(19) United States
(12) Patent Application Publication
(10) Pub. No.: US 2007/0294782 A1
(43) Pub. Date: Dec. 20, 2007

(54) Transgenic plants with enhanced agronomic traits

(76) Inventors: Mark Abad, Webster Groves, MO (US); Adrian Lund, Halstead, KS (US); Terry Bradshaw, Newton, KS (US)

Correspondence Address: MONSANTO COMPANY, 800 N. LINDBERGH BLVD., ATTENTION: GAIL P. WUELLNER, IP PARALEGAL, (E2NA), ST. LOUIS, MO, 63167, US

(21) Appl. No.: 11/311,940

(22) Filed: Dec. 19, 2005

Related U.S. Application Data
(60) Provisional application No. 60/638,099, filed on Dec. 21, 2004.
(60) Provisional application No. 60/660,320, filed on Mar. 10, 2005.

(51) Int. Cl. A01H 1/00; A01H 5/00; C12N 15/82

(52) U.S. Cl. 800/278; 435/419; 800/312; 800/314; 800/320.1; 800/320.2; 800/320.3

(57) ABSTRACT

This invention provides transgenic plant cells with recombinant DNA for expression of proteins that are useful for imparting enhanced agronomic trait(s) to transgenic crop plants. This invention also provides transgenic plants and progeny seed comprising the transgenic plant cells where the plants are selected for having an enhanced trait selected from the group of traits consisting of enhanced water use efficiency, enhanced cold tolerance, increased yield, enhanced nitrogen use efficiency, enhanced seed protein and enhanced seed oil. Also disclosed are methods for manufacturing transgenic seed and plants with enhanced traits.

### CROSS REFERENCE TO RELATED APPLICATIONS

[0001] This application claims benefit under 35USC §19(e) of U.S. provisional application Ser. No. 60/638,099, filed Dec. 21, 2004, and U.S. provisional application Ser. No. 60/660,320, filed Mar. 10, 2005, both of which herein incorporated by reference.

### INCORPORATION OF SEQUENCE LISTING

[0002] Two copies of the sequence listing (Copy 1 and Copy 2) and a computer readable form (CRF) of the sequence listing, all on CD-ROMs, each containing the text file named 38-21(53720)B, which is 33,897 kilobytes (measured in MS-WINDOWS) and was created on Dec. 13, 2005, are herein incorporated by reference.

### INCORPORATION OF COMPUTER PROGRAM LISTING

[0003] Computer Program Listing folders hmmer-2.3.2 and 67 pfamDir are contained on a compact disc and is hereby incorporated herein by reference in their entirety. Folder hmmer-2.3.2 contains the source code and other associated file for implementing the HMMer software for Pfam analysis. Folder 67 pfamDir contains 67 Pfam Hidden Markov Models. Both folders were created on the disk on December 13, 2005, having a total size of 7.7 megabytes (measured in MS-WINDOWS).

### FIELD OF THE INVENTION

[0004] Disclosed herein are inventions in the field of plant genetics and developmental biology. More specifically, the present inventions provide plant cells with recombinant DNA for providing an enhanced trait in a transgenic plant, plants comprising such cells, seed and pollen derived from such plants, methods of making and using such cells, plants, seeds and pollen.

### BACKGROUND OF THE INVENTION

[0005] Transgenic plants with improved agronomic traits such as yield, environmental stress tolerance, pest resistance, herbicide tolerance, improved seed compositions, and the like are desired by both farmers and consumers. Although considerable efforts in plant breeding have provided significant gains in desired traits, the ability to introduce specific DNA into plant genomes provides further opportunities for generation of plants with improved and/or unique traits. Merely introducing recombinant DNA into a plant genome doesn't always produce a transgenic plant with an enhanced agronomic trait. Methods to select individual transgenic events from a population are required to identify those transgenic events that are characterized by the enhanced agronomic trait.

### SUMMARY OF THE INVENTION

[0006] This invention employs recombinant DNA for expression of proteins that are useful for imparting enhanced agronomic traits to the transgenic plants. Recombinant DNA in this invention is provided in a construct comprising a promoter that is functional in plant cells and that is operably linked to DNA that encodes a protein having at least one amino acid domain in a sequence that exceeds the Pfam gathering cutoff for amino acid sequence alignment with a protein domain family identified by a Pfam name in the group of Pfam names as identified in Table 28. In more specific embodiments of the invention the protein expressed in plant cells has an amino acid sequence with at least 90% identity to a consensus amino acid sequence in the group of consensus amino acid sequences consisting of the consensus amino acid sequence constructed for SEQ ID NO:84 and homologs thereof listed in Table 2 through the consensus amino acid sequence constructed for SEQ ID NO: 166 and homologs thereof listed in Table 2. In even more specific embodiments of the invention the protein expressed in plant cells is a protein selected from the group of proteins identified in Table 1.

[0007] Other aspects of the invention are specifically directed to transgenic plant cells comprising the recombinant DNA of the invention, transgenic plants comprising a plurality of such plant cells, progeny transgenic seed and transgenic pollen from such plants. Such plant cells are selected from a population of transgenic plants regenerated from plant cells transformed with recombinant DNA and that express the protein by screening transgenic plants in the population for an enhanced trait as compared to control plants that do not have said recombinant DNA, where the enhanced trait is selected from group of enhanced traits consisting of enhanced water use efficiency, enhanced cold tolerance, increased yield, enhanced nitrogen use efficiency, enhanced seed protein and enhanced seed oil.

[0008] In yet another aspect of the invention the plant cells, plants, seeds and pollen further comprise DNA expressing a protein that provides tolerance from exposure to an herbicide applied at levels that are lethal to a wild type of said plant cell. Such tolerance is especially useful not only as a advantageous trait in such plants but is also useful in a selection step in the methods of the invention. In aspects of the invention the agent of such herbicide is a glyphosate, dicamba, or glufosinate compound.

[0009] Yet other aspects of the invention provide transgenic plants which are homozygous for the recombinant DNA and transgenic seed of the invention from corn, soybean, cotton, canola, alfalfa, wheat or rice plants. In other important embodiments for practice of various aspects of the invention in Argentina the recombinant DNA is provided in plant cells derived from corn lines that that are and maintain resistance to the Mal de Rio Cuarto virus or the Puccina sorghi fungus or both.

[0010] This invention also provides methods for manufacturing non-natural, transgenic seed that can be used to produce a crop of transgenic plants with an enhanced trait resulting from expression of stably-integrated, recombinant DNA for expressing a protein having at least one domain of amino acids in a sequence that exceeds the Pfam gathering cutoff for amino acid sequence alignment with a protein domain family identified by a Pfam name in the group of Pfam names identified in Table 28. More specifically the method comprises (a) screening a population of plants for an enhanced trait and a recombinant DNA, where individual plants in the population can exhibit the trait at a level less than, essentially the same as or greater than the level that the trait is exhibited in control plants which do not express the recombinant DNA, (b) selecting from the population one or more plants that exhibit the trait at a level greater than the level that said trait is exhibited in control plants, (c) verifying that the recombinant DNA is stably integrated in said selected plants, (d) analyzing tissue of a selected plant to determine the production of a protein having the function of a protein encoded by nucleotides in a sequence of one of SEQ ID NO: 1-83; and (e) collecting seed from a selected plant. In one aspect of the invention the plants in the population further comprise DNA expressing a protein that provides tolerance to exposure to an herbicide applied at levels that are lethal to wild type plant cells and the selecting is effected by treating the population with the herbicide, e.g. a glyphosate, dicamba, or glufosinate compound. In another aspect of the invention the plants are selected by identifying plants with the enhanced trait. The methods are especially useful for manufacturing corn, soybean, cotton, alfalfa, wheat or rice seed.

[0011] Another aspect of the invention provides a method of producing hybrid corn seed comprising acquiring hybrid corn seed from a herbicide tolerant corn plant which also has stably-integrated, recombinant DNA comprising a promoter that is (a) functional in plant cells and (b) is operably linked to DNA that encodes a protein having at least one domain of amino acids in a sequence that exceeds the Pfam gathering cutoff for amino acid sequence alignment with a protein domain family identified by a Pfam name in the group of Pfam names identified in Table 28. The methods further comprise producing corn plants from said hybrid corn seed, wherein a fraction of the plants produced from said hybrid corn seed is homozygous for said recombinant DNA, a fraction of the plants produced from said hybrid corn seed is hemizygous for said recombinant DNA, and a fraction of the plants produced from said hybrid corn seed has none of said recombinant DNA; selecting corn plants which are homozygous and hemizygous for said recombinant DNA by treating with an herbicide; collecting seed from herbicide-treated-surviving corn plants and planting said seed to produce further progeny corn plants; repeating the selecting and collecting steps at least once to produce an inbred corn line; and crossing the inbred corn line with a second corn line to produce hybrid seed.

[0012] Another aspect of the invention provides a method of selecting a plant comprising plant cells of the invention by using an immunoreactive antibody to detect the presence of protein expressed by recombinant DNA in seed or plant tissue. Yet another aspect of the invention provides anti-counterfeit milled seed having, as an indication of origin, a plant cells of this invention.

[0013] Still other aspects of this invention relate to transgenic plants with enhanced water use efficiency or enhanced nitrogen use efficiency. For instance, this invention provides methods of growing a corn, cotton or soybean crop without irrigation water comprising planting seed having plant cells of the invention which are selected for enhanced water use efficiency. Alternatively methods comprise applying reduced irrigation water, e.g. providing up to 300 millimeters of ground water during the production of a corn crop. This invention also provides methods of growing a corn cotton or soybean crop without added nitrogen fertilizer comprising planting seed having plant cells of the invention which are selected for enhanced nitrogen use efficiency.

### BRIEF DESCRIPTION OF THE DRAWINGS

[0014] FIG. 1 is a DNA sequence.

[0015] FIGS. 2 and 3 are alignments of amino acid sequence.

### DETAILED DESCRIPTION OF THE INVENTION

[0016] As used herein a “plant cell” means a plant cell that is transformed with stably-integrated, non-natural, recombinant DNA, e.g. by Agrobacterium-mediated transformation or by baombardment using microparticles coated with recombinant DNA or other means. A plant cell of this invention can be an originally-transformed plant cell that exists as a microorganism or as a progeny plant cell that is regenerated into differentiated tissue, e.g. into a transgenic plant with stably-integrated, non-natural recombinant DNA, or seed or pollen derived from a progeny transgenic plant.

[0017] As used herein a “transgenic plant” means a plant whose genome has been altered by the stable integration of recombinant DNA. A transgenic plant includes a plant regenerated from an originally-transformed plant cell and progeny transgenic plants from later generations or crosses of a transformed plant.

[0018] As used herein “recombinant DNA” means DNA which has been a genetically engineered and constructed outside of a cell including DNA containing naturally occurring DNA or cDNA or synthetic DNA.

[0019] As used herein “consensus sequence” means an artificial sequence of amino acids in a conserved region of an alignment of amino acid sequences of homologous proteins, e.g. as determined by a CLUSTALW alignment of amino acid sequence of homolog proteins.

[0020] As used herein “homolog” means a protein in a group of proteins that perform the same biological function, e.g. proteins that belong to the same Pfam protein family and that provide a common enhanced trait in transgenic plants of this invention. Homologs are expressed by homologous genes. Homologous genes include naturally occurring alleles and artificially-created variants. Degeneracy of the genetic code provides the possibility to substitute at least one base of the protein encoding sequence of a gene with a different base without causing the amino acid sequence of the polypeptide produced from the gene to be changed. Hence, a polynucleotide useful in the present invention may have any base sequence that has been changed from SEQ ID NO: 1 through SEQ ID NO:83 by substitution in accordance with degeneracy of the genetic code. Homologs are proteins that, when optimally aligned, have at least 60% identity, more preferably about 70% or higher, more preferably at least 80% and even more preferably at least 90% identity over the full length of a protein identified as being associated with imparting an enhanced trait when expressed in plant cells. Homologs include proteins with an amino acid sequence that has at least 90% identity to a consensus amino acid sequence of proteins and homologs disclosed herein.

[0021] Homologs are be identified by comparison of amino acid sequence, e.g. manually or by use of a computer-based tool using known homology-based search algorithms such as those commonly known and referred to as BLAST, FASTA, and Smith-Waterman. A local sequence alignment program, e.g. BLAST, can be used to search a database of sequences to find similar sequences, and the summary Expectation value (E-value) used to measure the sequence base similarity. As a protein hit with the best E-value for a particular organism may not necessarily be an ortholog or the only ortholog, a reciprocal query is used in the present invention to filter hit sequences with significant E-values for ortholog identification. The reciprocal query entails search of the significant hits against a database of amino acid sequences from the base organism that are similar to the sequence of the query protein. A hit is a likely ortholog, when the reciprocal query's best hit is the query protein itself or a protein encoded by a duplicated gene after speciation. A further aspect of the invention comprises functional homolog proteins that differ in one or more amino acids from those of disclosed protein as the result of conservative amino acid substitutions, for example substitutions are among: acidic (negatively charged) amino acids such as aspartic acid and glutamic acid; basic (positively charged) amino acids such as arginine, histidine, and lysine; neutral polar amino acids such as glycine, serine, threonine, cysteine, tyrosine, asparagine, and glutamine; neutral nonpolar (hydrophobic) amino acids such as alanine, leucine, isoleucine, valine, proline, phenylalanine, tryptophan, and methionine; amino acids having aliphatic side chains such as glycine, alanine, valine, leucine, and isoleucine; amino acids having aliphatic-hydroxyl side chains such as serine and threonine; amino acids having amide-containing side chains such as asparagine and glutamine; amino acids having aromatic side chains such as phenylalanine, tyrosine, and tryptophan; amino acids having basic side chains such as lysine, arginine, and histidine; amino acids having sulfur-containing side chains such as cysteine and methionine; naturally conservative amino acids such as valine-leucine, valine-isoleucine, phenylalanine-tyrosine, lysine-arginine, alanine-valine, aspartic acid-glutamic acid, and asparagine-glutamine. A further aspect of the homologs encoded by DNA useful in the transgenic plants of the invention are those proteins that differ from a disclosed protein as the result of deletion or insertion of one or more amino acids in a native sequence.

[0022] As used herein, “percent identity” means the extent to which two optimally aligned DNA or protein segments are invariant throughout a window of alignment of components, for example nucleotide sequence or amino acid sequence. An “identity fraction” for aligned segments of a test sequence and a reference sequence is the number of identical components that are shared by sequences of the two aligned segments divided by the total number of sequence components in the reference segment over a window of alignment which is the smaller of the full test sequence or the full reference sequence. “Percent identity” (“% identity”) is the identity fraction times 100.

[0023] As used herein “Pfam” refers to a large collection of multiple sequence alignments and hidden Markov models covering many common protein families, e.g. Pfam version 18.0 (August 2005) contains alignments and models for 7973 protein families and is based on the Swissprot 47.0 and SP-TrEMBL 30.0 protein sequence databases. See S. R. Eddy, “Profile Hidden Markov Models”, Bioinformatics 14:755-763, 1998. Pfam is currently maintained and updated by a Pfam Consortium. The alignments represent some evolutionary conserved structure that has implications for the protein's function. Profile hidden Markov models (profile HMMs) built from the Pfam alignments are useful for automatically recognizing that a new protein belongs to an existing protein family even if the homology by alignment appears to be low. Once one DNA is identified as encoding a protein which imparts an enhanced trait when expressed in transgenic plants, other DNA encoding proteins in the same protein family are identified by querying the amino acid sequence of protein encoded by candidate DNA against the Hidden Markov Model which characterizes the Pfam domain using HMMER software, a current version of which is provided in the appended computer listing. Candidate proteins meeting the gathering cutoff for the alignment of a particular Pfam are in the protein family and have cognate DNA that is useful in constructing recombinant DNA for the use in the plant cells of this invention. Hidden Markov Model databases for use with HMMER software in identifying DNA expressing protein in a common Pfam for recombinant DNA in the plant cells of this invention are also included in the appended computer listing. The HMMER software and Pfam databases are version 18.0 and were used to identify known domains in the proteins corresponding to amino acid sequence of SEQ ID NO:84 through SEQ ID NO:166. All DNA encoding proteins that have scores higher than the gathering cutoff disclosed in Table 27 by Pfam analysis disclosed herein can be used in recombinant DNA of the plant cells of this invention, e.g. for selecting transgenic plants having enhanced agronomic traits. The relevant Pfams for use in this invention, as more specifically disclosed below, are AAA, AP2, Aldo ket red, Alpha-amylase, Aminotran 1 2, Ank, ArfGap, Asn synthase, BRO1, CBFD NFYB HMF, Catalase, CorA, Cpn60 TCP1, Cystatin, DNA photolyase, DSPc, DUF1685, DUF296, Dil9, E2F TDP, FAD binding 7, FA desaturase, FBPase, GAF, GATA, GATase 2, Glyco hydro 1, Glyoxalase, Got1, HATPase c, HSF DNA-bind, HSP20, HisKA, Homeobox, Hpt, Isoamylase N, K-box, Lactamase B, Metallophos, MtN3 slv, NAF, NAM, NIF, Oxidored FMN, PAS, PDZ, PRA1, Peptidase C15, Peptidase S10, Peptidase S41, Phytochrome, Peinase, Pkinase Tyr, Pyridoxal deC, RIO1, RRM 1, RTC, RTC insert, Ras, Response reg, SPC25, SPX, SRF-TF, Synaptobrevin, UPF0057, zf-C2H2, and zf-C3HC4, the databases for which are included in the appended computer listing.

[0024] As used herein “promoter” means regulatory DNA for initializing transcription. A “plant promoter” is a promoter capable of initiating transcription in plant cells whether or not its origin is a plant cell, e.g. is it well known that Agrobacterium promoters are functional in plant cells. Thus, plant promoters include promoter DNA obtained from plants, plant viruses and bacteria such as Agrobacterium and Braidyrhizobium bacteria. Examples of promoters under developmental control include promoters that preferentially initiate transcription in certain tissues, such as leaves, roots, or seeds. Such promoters are referred to as “tissue preferred”. Promoters that initiate transcription only in certain tissues are referred to as “tissue specific”. A “cell type” specific promoter primarily drives expression in certain cell types in one or more organs, for example, vascular cells in roots or leaves. An “inducible” or “repressible” promoter is a promoter which is under environmental control. Examples of environmental conditions that may effect transcription by inducible promoters include anaerobic conditions, or certain chemicals, or the presence of light. Tissue specific, tissue preferred, cell type specific, and inducible promoters constitute the class of “non-constitutive” promoters. A “constitutive” promoter is a promoter which is active under most conditions.

[0025] As used herein “operably linked” means the association of two or more DNA fragments in a DNA construct so that the function of one, e.g. protein-encoding DNA, is controlled by the other, e.g. a promoter.

[0026] As used herein expressed” means produced, e.g. a protein is expressed in a plant cell when its cognate DNA is transcribed to mRNA that is translated to the protein.

[0027] As used herein a “control plant” means a plant that does not contain the recombinant DNA that expressed a protein that impart an enhanced trait. A control plant is to identify and select a transgenic plant that has an enhance trait. A suitable control plant can be a non-transgenic plant of the parental line used to generate a transgenic plant, i.e. devoid of recombinant DNA. A suitable control plant may in some cases be a progeny of a hemizygous transgenic plant line that is does not contain the recombinant DNA, known as a negative segregant.

[0028] As used herein an “enhanced trait” means a characteristic of a transgenic plant that includes, but is not limited to, an enhance agronomic trait characterized by enhanced plant morphology, physiology, growth and development, yield, nutritional enhancement, disease or pest resistance, or environmental or chemical tolerance. In more specific aspects of this invention enhanced trait is selected from group of enhanced traits consisting of enhanced water use efficiency, enhanced cold tolerance, increased yield, enhanced nitrogen use efficiency, enhanced seed protein and enhanced seed oil. In an important aspect of the invention the enhanced trait is enhanced yield including increased yield under non-stress conditions and increased yield under environmental stress conditions. Stress conditions may include, for example, drought, shade, fungal disease, viral disease, bacterial disease, insect infestation, nematode infestation, cold temperature exposure, heat exposure, osmotic stress, reduced nitrogen nutrient availability, reduced phosphorus nutrient availability and high plant density. “Yield” can be affected by many properties including without limitation, plant height, pod number, pod position on the plant, number of internodes, incidence of pod shatter, grain size, efficiency of nodulation and nitrogen fixation, efficiency of nutrient assimilation, resistance to biotic and abiotic stress, carbon assimilation, plant architecture, resistance to lodging, percent seed germination, seedling vigor, and juvenile traits. Yield can also affected by efficiency of germination (including germination in stressed conditions), growth rate (including growth rate in stressed conditions), ear number, seed number per ear, seed size, composition of seed (starch, oil, protein) and characteristics of seed fill.

[0029] Increased yield of a transgenic plant of the present invention can be measured in a number of ways, including test weight, seed number per plant, seed weight, seed number per unit area (i.e. seeds, or weight of seeds, per acre), bushels per acre, tonnes per acre, tons per acre, kilo per hectare. For example, maize yield may be measured as production of shelled corn kernels per unit of production area, for example in bushels per acre or metric tons per hectare, often reported on a moisture adjusted basis, for example at 15.5 percent moisture. Increased yield may result from improved utilization of key biochemical compounds, such as nitrogen, phosphorous and carbohydrate, or from improved responses to environmental stresses, such as cold, heat, drought, salt, and attack by pests or pathogens. Recombinant DNA used in this invention can also be used to provide plants having improved growth and development, and ultimately increased yield, as the result of modified expression of plant growth regulators or modification of cell cycle or photosynthesis pathways. Also of interest is the generation of transgenic plants that demonstrate enhanced yield with respect to a seed component that may or may not correspond to an increase in overall plant yield. Such properties include enhancements in seed oil, seed molecules such as tocopherol, protein and starch, or oil particular oil components as may be manifest by an alterations in the ratios of seed components.

[0030] A subset of the nucleic molecules of this invention includes fragments of the disclosed recombinant DNA consisting of oligonucleotides of at least 15, preferably at least 16 or 17, more preferably at least 18 or 19, and even more preferably at least 20 or more, consecutive nucleotides. Such oligonucleotides are fragments of the larger molecules having a sequence selected from the group consisting of SEQ ID NO: 1 through SEQ ID NO:83, and find use, for example as probes and primers for detection of the polynucleotides of the present invention.

[0031] In some embodiments of the present invention, a dominant negative mutant of a native gene is generated to achieve the desired effect. As used herein, “dominant negative mutant” means a mutant gene whose gene product adversely affects the normal, wild-type gene product within the same cell, usually by dimerizing (combining) with it. In cases of polymeric molecules, such as collagen, dominant negative mutations are often more deleterious than mutations causing the production of no gene product (null mutations or null alleles). SEQ ID NO: 6 and SEQ ID NO: 7 are constructed to encode agl11 protein with K-box deleted and MADs 3 protein with MAD box deleted, respectively. MADS box proteins similar to AGL11 can be considered as having three functional domains. There is an N-terminal DNA-binding domain (the MADS box), a more distal dimerization domain (the K-box) and a C-terminal domain that is usually involved in interactions with other proteins. In plants the region between the MADS box and the K-box has been shown to be important for DNA binding in some proteins and is often referred to as the I-box (Fan et al., 1997).Several different classes of dominant negative constructs are considered. Deletion or inactivation of the DNA-binding domain can create proteins that are able to dimerize with their native full length counterparts as well as other natural dimerization partners. Likewise, removal of the C-terminal domain can allow dimerization with both the native protein and it's natural dimerization partners. In both cases these types of constructs disable both the target protein and any other protein capable of interacting with the K-box.

[0032] In other embodiments of the invention a constitutively active mutant is constructed to achieve the desired effect. SEQ ID NO:3 encodes only the kinase domain from a calcium-dependent protein kinase (CDPK). CDPK1 has a domain structure similar to other calcium-dependant protein kinases in which the protein kinase domain is separated from four efhand domains by 42 amino acid “spacer” region. Calcium-dependant protein kinases are thought to be activated by a calcium-induced conformational change that results in movement of an autoinhibitory domain away from the protein kinase active site (Yokokura et al., 1995). Thus, constitutively active proteins can be made by over expressing the protein kinase domain alone.

[0033] DNA constructs are assembled using methods well known to persons of ordinary skill in the art and typically comprise a promoter operably linked to DNA, the expression of which provides the enhanced agronomic trait. Other construct components may include additional regulatory elements, such as 5′ leasders and introns for enhancing transcription, 3′ untranslated regions (such as polyadenylation signals and sites), DNA for transit or signal peptides.

[0034] Numerous promoters that are active in plant cells have been described in the literature. These include promoters present in plant genomes as well as promoters from other sources, including nopaline synthase (NOS) promoter and octopine synthase (OCS) promoters carried on tumor-inducing plasmids of Agrobacterium tumefaciens, caulimovirus promoters such as the cauliflower mosaic virus. For instance, see U.S. Pat. Nos. 5,858,742 and 5,322,938, which disclose versions of the constitutive promoter derived from cauliflower mosaic virus (CaMV35S), U.S. Pat. No. 5,641,876, which discloses a rice actin promoter, U.S. Patent Application Publication 2002/0192813A1, which discloses 5′, 3′ and intron elements useful in the design of effective plant expression vectors, U.S. patent application Ser. No. 09/757,089, which discloses a maize chloroplast aldolase promoter, U.S. patent application Ser. No. 08/706,946, which discloses a rice glutelin promoter, U.S. patent application Ser. No.09/757,089, which discloses a maize aldolase (FDA) promoter, and U.S. patent application Ser. No. 60/310,370, which discloses a maize nicotianamine synthase promoter, all of which are incorporated herein by reference. These and numerous other promoters that function in plant cells are known to those skilled in the art and available for use in recombinant polynucleotides of the present invention to provide for expression of desired genes in transgenic plant cells.

[0035] In some aspects of the invention, sufficient expression in plant seed tissues is desired to effect improvements in seed composition. Exemplary promoters for use for seed composition modification include promoters from seed genes such as napin (U.S. Pat. No. 5,420,034), zein Z27 and glutelin1 (Russell et al. (1997) Transgenic Res. 6(2):157-166), peroxiredoxin antioxidant (Per1) (Stacy et al. (1996) Plant Mol Biol. 31(6): 1205-1216)., maize L3 oleosin (U.S. Pat. No. 6,433,252), globulin 1 (Belanger et al (1991) Genetics 129:863-872).

[0036] In other aspects of the invention, preferential expression in plant green tissues is desired. Promoters of interest for such uses include those from (genes such as Arabidopsis thaliana ribulose-1,5-bisphosphate carboxylase (Rubisco) small subunit (Fischhoff et al. (1992) Plant Mol Biol. 20:81-93), aldolase and pyruvate orthophosphate dikinase (PPDK) (Taniguchi et al. (2000) Plant Cell Physiol. 41(1):42-48).

[0037] Furthermore, the promoters may be altered to contain multiple “enhancer sequences” to assist in elevating gene expression. Such enhancers are known in the art. By including an enhancer sequence with such constructs, the expression of the selected protein may be enhanced. These enhancers often are found 5′ to the start of transcription in a promoter that functions in eukaryotic cells, but can often be inserted upstream (5′) or downstream (3′) to the coding sequence. In some instances, these 5′ enhancing elements are introns. Particularly useful as enhancers are the 5′ introns of the rice actin 1 (see U.S. Pat. No. 5,641,876)and rice actin 2 genes, the maize alcohol dehydrogenase gene intron, the maize heat shock protein 70 gene intron (U.S. Pat. No. 5,593,874) and the maize shrunken 1 gene.

[0038] In other aspects of the invention, sufficient expression in plant seed tissues is desired to effect improvements in seed composition. Exemplary promoters for use for seed composition modification include promoters from seed genes such as napin (U.S. Pat. No. 5,420,034), maize L3 oleosin (U.S. Pat. No. 6,433,252), zein Z27 (Russell et al. (1997) Transgenic Res. 6(2): 157-166), globulin 1 (Belanger et al (1991) Genetics 129:863-872), glutelin 1 (Russell (1997) supra), and peroxiredoxin antioxidant (Per1) (Stacy et al. (1996) Plant Mol Biol. 31(6):1205-1216).

[0039] Recombinant DNA constructs prepared in accordance with the invention will also generally include a 3′ element that typically contains a polyadenylation signal and site. Well-known 3′ elements include those from Agrobacterium tumefaciens genes such as nos 3′, tml 3′, tmr 3′, tms 3′, ocs 3′, tr7 3′, for example disclosed in U.S. Pat. No. 6,090,627, incorporated herein by reference; 3′ elements from plant genes such as wheat (Triticum aesevitum) heat shock protein 17 (Hsp17 3′), a wheat ubiquitin gene, a wheat fructose-1,6-biphosphatase gene, a rice glutelin gene a rice lactate dehydrogenase gene and a rice beta-tubulin gene, all of which are disclosed in U.S. published patent application 2002/0192813 A1, incorporated herein by reference; and the pea (Pisum sativum) ribulose biphosphate carboxylase gene (rbs 3′), and 3′ elements from the genes within the host plant.

[0040] Constructs and vectors may also include a transit peptide for targeting of a gene target to a plant organelle, particularly to a chloroplast, leucoplast or other plastid organelle. For descriptions of the use of chloroplast transit peptides see U.S. Pat. No. 5,188,642 and U.S. Pat. No. 5,728,925, incorporated herein by reference. For description of the transit peptide region of an Arabidopsis EPSPS gene useful in the present invention, see Klee, H. J. et al (MGG (1987) 210:437-442).

[0041] Transgenic plants comprising or derived from plant cells of this invention transformed with recombinant DNA can be further enhanced with stacked traits, e.g. a crop plant having an enhanced trait resulting from expression of DNA disclosed herein in combination with herbicide and/or pest resistance traits. For example, genes of the current invention can be stacked with other traits of agronomic interest, such as a trait providing herbicide resistance, or insect resistance, such as using a gene from Bacillus thuringensis to provide resistance against lepidopteran, coliopteran, homopteran, hemiopteran, and other insects. Herbicides for which transgenic plant tolerance has been demonstrated and the method of the present invention can be applied include, but are not limited to, glyphosate, dicamba, glufosinate, sulfonylurea, bromoxynil and norflurazon herbicides. Polynucleotide molecules encoding proteins involved in herbicide tolerance are well-known in the art and include, but are not limited to, a polynucleotide molecule encoding 5-enolpyruvylshikimate-3-phosphate synthase (EPSPS) disclosed in U.S. Pat. Nos. 5,094,945; 5,627,061; 5,633,435 and 6,040,497 for imparting glyphosate tolerance; polynucleotide molecules encoding a glyphosate oxidoreductase (GOX) disclosed in U.S. Pat. No. 5,463,175 and a glyphosate-N-acetyl transferase (GAT) disclosed in U.S. Patent Application publication 2003/0083480 A1 also for imparting glyphosate tolerance; dicamba monooxygenase disclosed in U.S. Patent Application publication 2003/0135879 A1 for imparting dicamba tolerance; a polynucleotide molecule encoding bromoxynil nitrilase (Bxn) disclosed in U.S. Pat. No. 4,810,648 for imparting bromoxynil tolerance; a polynucleotide molecule encoding phytoene desaturase (crtl) described in Misawa et al, (1993) Plant J. 4:833-840 and Misawa et al, (1994) Plant J. 6:481-489 for norflurazon tolerance; a polynucleotide molecule encoding acetohydroxyacid synthase (AHAS, aka ALS) described in Sathasiivan et al. (1990) Nucl. Acids Res. 18:2188-2193 for imparting tolerance to sulfonylurea herbicides; polynucleotide molecules known as bar genes disclosed in DeBlock, et al. (1987) EMBO J. 6:2513-2519 for imparting glufosinate and bialaphos tolerance; polynucleotide molecules disclosed in U.S. Patent Application Publication 2003/010609 A1 for imparting N-amino methyl phosphonic acid tolerance; polynucleotide molecules disclosed in U.S. Pat. No. 6,107,549 for impartinig pyridine herbicide resistance; molecules and methods for imparting tolerance to multiple herbicides such as glyphosate, atrazine, ALS inhibitors, isoxoflutole and glufosinate herbicides are disclosed in U.S. Pat. No. 6,376,754 and U.S. Patent Application Publication 2002/0112260, all of said U.S. Patents and Patent Application Publications are incorporated herein by reference. Molecules and methods for imparting insect/nematode/virus resistance is disclosed in U.S. Pat. Nos. 5,250,515; 5,880,275; 6,506,599; 5,986,175 and U.S. Patent Application Publication 2003/0150017 A1, all of which are incorporated herein by reference.

[0042] In particular embodiments, the inventors contemplate the use of antibodies, either monoclonal or polyclonal which bind to the proteins disclosed herein. Means for preparing and characterizing antibodies are well known in the art (See, e.g., Antibodies: A Laboratory Manual, Cold Spring Harbor Laboratory, 1988; incorporated herein by reference). The methods for generating monoclonal antibodies (mAbs) generally begin along the same lines as those for preparing polyclonal antibodies. Briefly, a polyclonal antibody is prepared by immunizing an animal with an immunogenic composition in accordance with the present invention and collecting antisera from that immunized animal. A wide range of animal species can be used for the production of antisera. Typically the animal used for production of anti-antisera is a rabbit, a mouse, a rat, a hamster, a guinea pig or a goat. Because of the relatively large blood volume of rabbits, a rabbit is a preferred choice for production of polyclonal antibodies.

[0043] As is well known in the art, a given composition may vary in its immunogenicity. It is often necessary therefore to boost the host immune system, as may be achieved by coupling a peptide or polypeptide immunogen to a carrier. Exemplary and preferred carriers are keyhole limpet hemocyanin (KLH) and bovine serum albumin (BSA). Other albumins such as ovalbumin, mouse serum albumin or rabbit serum albumin can also be used as carriers. Means for conjugating a polypeptide to a carrier protein are well known in the art and include using glutaraldehyde, m-maleimidobencoyl-N-hydroxysuccinimide ester, carbodiimide and bis-biazotized benzidine.

[0044] As is also well known in the art, the immunogenicity of a particular immunogen composition can be enhanced by the use of non-specific stimulators of the immune response, known as adjuvants. Exemplary and preferred adjuvants include complete Freund's adjuvant (a non-specific stimulator of the immune response containing killed Mycobacterium tuberculosis), incomplete Freund's adjuvants and aluminum hydroxide adjuvant.

[0045] The amount of immunogen composition used in the production of polyclonal antibodies varies upon the nature of the immunogen as well as the animal used for immunization. A variety of routes can be used to administer the immunogen (subcutaneous, intramuscular, intradermal, intravenous and intraperitoneal). The production of polyclonal antibodies may be monitored by sampling blood of the immunized animal at various points following immunization. A second, booster, injection may also be given. The process of boosting and titering is repeated until a suitable titer is achieved. When a desired level of immunogenicity is obtained, the immunized animal can be bled and the serum isolated and stored, and/or the animal can be used to generate mAbs.

[0046] mAbs may be readily prepared through use of well-known techniques, such as those exemplified in U.S. Pat. No. 4,196,265, incorporated herein by reference. Typically, this technique involves immunizing a suitable animal with a selected immunogen composition, e.g., a purified or partially purified antifungal protein, polypeptide or peptide. The immunizing composition is administered in a manner effective to stimulate antibody producing cells. Rodents such as mice and rats are preferred animals, however, the use of rabbit, sheep, or frog cells is also possible. The use of rats may provide certain advantages (Goding, 1986, pp. 60-61), but mice are preferred, with the BALB/c mouse being most preferred as this is most routinely used and generally gives a higher percentage of stable fusions.

[0047] Following immunization, somatic cells with the potential for producing antibodies, specifically B lymphocytes (B cells), are selected for use in the mAb generating protocol. These cells may be obtained from biopsied spleens, tonsils or lymph nodes, or from a peripheral blood sample. Spleen cells and peripheral blood cells are preferred, the former because they are a rich source of antibody-producing cells that are in the dividing plasmablast stage, and the latter because peripheral blood is easily accessible. Often, a panel of animals will have been immunized and the spleen of animal with the highest antibody titer will be removed and the spleen lymphocytes obtained by homogenizing the spleen with a syringe. Typically, a spleen from an immunized mouse contains approximately 5×10⁷ to 2×10⁸ lymphocytes.

[0048] The antibody-producing B lymphocytes from the immunized animal are then fused with cells of an immortal myeloma cell, generally one of the same species as the animal that was immunized. Myeloma cell lines suited for use in hybridoma-producing fusion procedures preferably are non-antibody-producing, have high fusion efficiency, and enzyme deficiencies that render them incapable of growing in certain selective media which support the growth of only the desired fused cells (hybridomas).

[0049] Any one of a number of myeloma cells may be used, as are known to those of skill in the art (Goding, 1986, pp. 65-66; Campbell, 1984, pp. 75-83). For example, where the immunized animal is a mouse, one may use P3-X63/Ag8, X63-Ag8.653, NS1/1.Ag 4 1, Sp210-Ag14, FO, NSO/U, MPC-11, MPC11-X45-GTG1.7 and S194/5XX0 Bul; for rats, one may use R210.RCY3, Y3-Ag1.2.3, IR983F and 4B210; and U-266, GM1500-GRG2, LICR-LON-HMy2 and UC729-6 are all useful in connection with human cell fusions.

[0050] One preferred murine myeloma cell is the NS-1 myeloma cell line (also termed P3-NS-1-Ag4-1), which is readily available from the NIGMS Human Genetic Mutant Cell Repository by requesting cell line repository number GM3573. Another mouse myeloma cell line that may be used is the 8-azaguanine-resistant mouse murine myeloma SP2/0 non-producer cell line.

[0051] Methods for generating hybrids of antibody-producing spleen or lymph node cells and myeloma cells usually comprise mixing somatic cells with myeloma cells in a 2:1 ratio, though the ratio may vary from about 20:1 to about 1:1, respectively, in the presence of an agent or agents (chemical or electrical) that promote the fusion of cell membranes. Fusion methods using Spend virus have been described (Kohler and Milstein, 1975; 1976), and those using polyethylene glycol (PEG), such as 37% (v/v) PEG, (Gefter et al., 1977). The use of electrically induced fusion methods is also appropriate (Goding, 1986, pp. 71-74).

[0052] Fusion procedures usually produce viable hybrids at low frequencies, about 1×10⁻⁶ to 1×10⁻⁸. However, this does not pose a problem, as the viable, fused hybrids are differentiated from the parental, unfused cells (particularly the unfused myeloma cells that would normally continue to divide indefinitely) by culturing in a selective medium. The selective medium is generally one that contains an agent that blocks the de novo synthesis of nucleotides in the tissue culture media. Exemplary and preferred agents are aminopterin, methotrexate, and azasenne. Aminopterin and methotrexate block de novo synthesis of both purines and pyrimidines, whereas azasenne blocks only purine synthesis. Where aminopterin or methotrexate is used, the media is supplemented with hypoxanthine and thymidine as a source of nucleotides (HAT medium). Where azaserine is used, the media is supplemented with hypoxanthine.

[0053] The preferred selection medium is HAT. Only cells capable of operating nucleotide salvage pathways are able to survive in HAT medium. The myeloma cells are defective in key enzymes of the salvage pathway, e.g., hypoxanthine phosphoribosyl transferase (HPRT), and they cannot survive. The B-cells can operate this pathway, but they have a limited life span in culture and generally die within about two weeks. Therefore, the only cells that can survive in the selective media are those hybrids formed from myeloma and B-cells.

[0054] This culturing provides a population of hybridomas from which specific hybridomas are selected. Typically, selection of hybridomas is performed by culturing the cells by single-clone dilution in microtiter plates, followed by testing the individual clonal supernatants (after about two to three weeks) for the desired reactivity. The assay should be sensitive, simple and rapid, such as radioimmunoassays, enzyme immunoassays, cytotoxicity assays, plaque assays, dot immunobinding assays, and the like.

[0055] The selected hybridomas would then be serially diluted and cloned into individual antibody-producing cell lines, which clones can then be propagated indefinitely to provide mAbs. The cell lines may be exploited for mAb production in two basic ways. A sample of the hybridoma can be injected (often into the peritoneal cavity) into a histocompatible animal of the type that was used to provide the somatic and myeloma cells for the original fusion. The injected animal develops tumors secreting the specific monoclonal antibody produced by the fused cell hybrid. The body fluids of the animal, such as serum or ascites fluid, can then be tapped to provide mAbs in high concentration. The individual cell lines could also be cultured in vitro, where the mAbs are naturally secreted into the culture medium from which they can be readily obtained in high concentrations. mAbs produced by either means may be further purified, if desired, using filtration, centrifugation and various chromatographic methods such as HPLC or affinity chromatography.

Plant Cell Transformation Methods

[0056] Numerous methods for transforming plant cells with recombinant DNA are known in the art and may be used in the present invention. Two commonly used methods for plant transformation are Agrobacterium-mediated transformation and microprojectile bombardment. Microprojectile bombardment methods are illustrated in U.S. Pat. No. 5,015,580 (soybean); U.S. Pat. No. 5,550,318 (corn); U.S. Pat. No. 5,538,880 (corn); U.S. Pat. No. 5,914,451 (soybean); U.S. Pat. No. 6,160,208 (corn); U.S. Pat. No. 6,399,861 (corn) and U.S. Pat. No. 6,153,812 (wheat) and Agrobacterium-mediated transformation is described in U.S. Pat. No. 5,159,135 (cotton); U.S. Pat. No. 5,824,877 (soybean); U.S. Pat. No. 5,591,616 (corn); and U.S. Pat. No. 6,384,301 (soybean), all of which are incorporated herein by reference. For Agrobacterium tumefaciens based plant transformation system, additional elements present on transformation constructs will include T-DNA left and right border sequences to facilitate incorporation of the recombinant polynucleotide into the plant genome.

[0057] In general it is useful to introduce recombinant DNA randomly, i.e. at a non-specific location, in the genome of a target plant line. In special cases it may be useful to target recombinant DNA insertion in order to achieve site-specific integration, for example to replace an existing gene in the genome, to use an existing promoter in the plant genome, or to insert a recombinant polynucleotide at a predetermined site known to be active for gene expression. Several site specific recombination systems exist which are known to function implants include cre-lox as disclosed in U.S. Pat No. 4,959,317 and FLP-FRT as disclosed in U.S. Pat. No. 5,527,695, both incorporated herein by reference.

[0058] Transformation methods of this invention are preferably practiced in tissue culture on media and in a controlled environment. “Media” refers to the numerous nutrient mixtures that are used to grow cells in vitro, that is, outside of the intact living organism. Recipient cell targets include, but are not limited to, meristem cells, callus, immature embryos and gametic cells such as microspores, pollen, sperm and egg cells. It is contemplated that any cell from which a fertile plant may be regenerated is useful as a recipient cell. Callus may be initiated from tissue sources including, but not limited to, immature embryos, seedling apical meristems, microspores and the like. Cells capable of proliferating as callus are also recipient cells for genetic transformation. Practical transformation methods and materials for making transgenic plants of this invention, for example various media and recipient target cells, transformation of immature embryo cells and subsequent regeneration of fertile transgenic plants are disclosed in U.S. Pat. Nos. 6,194,636 and 6,232,526, which are incorporated herein by reference.

[0059] The seeds of transgenic plants can be harvested from fertile transgenic plants and be used to grow progeny generations of transformed plants of this invention including hybrid plants line for selection of plants having an enhanced trait. In addition to direct transformation of a plant with a recombinant DNA, transgenic plants can be prepared by crossing a first plant having a recombinant DNA with a second plant lacking the DNA. For example, recombinant DNA can be introduced into first plant line that is amenable to transformation to produce a transgenic plant which can be crossed with a second plant line to introgress the recombinant DNA into the second plant line. A transgenic plant with recombinant DNA providing an enhanced trait, e.g. enhanced yield, can be crossed with transgenic plant line having other recombinant DNA that confers another trait, for example herbicide resistance or pest resistance, to produce progeny plants having recombinant DNA that confers both traits. Typically, in such breeding for combining traits the transgenic plant donating the additional trait is a male line and the transgenic plant carrying the base traits is the female line. The progeny of this cross will segregate such that some of the plants will carry the DNA for both parental traits and some will carry DNA for one parental trait; such plants can be identified by markers associated with parental recombinant DNA, e.g. marker identification by analysis for recombinant DNA or, in the case where a selectable marker is linked to the recombinant, by application of the selecting agent such as a herbicide for use with a herbicide tolerance marker, or by selection for the enhanced trait. Progeny plants carrying DNA for both parental traits can be crossed back into the female parent line multiple times, for example usually 6 to 8 generations, to produce a progeny plant with substantially the same genotype as one original transgenic parental line but for the recombinant DNA of the other transgenic parental line.

[0060] In the practice of transformation DNA is typically introduced into only a small percentage of target plant cells in any one transformation experiment. Marker genes are used to provide an efficient system for identification of those cells that are stably transformed by receiving and integrating a transgenic DNA construct into their genomes. Preferred marker genes provide selective markers which confer resistance to a selective agent, such as an antibiotic or herbicide. Any of the herbicides to which plants of this invention may be resistant are useful agents for selective markers. Potentially transformed cells are exposed to the selective agent. In the population of surviving cells will be those cells where, generally, the resistance-conferring gene is integrated and expressed at sufficient levels to permit cell survival. Cells may be tested further to confirm stable integration of the exogenous DNA. Commonly used selective marker genes include those conferring resistance to antibiotics such as kanamycin and paromomycin (nptII), hygromycin B (aph IV) and gentamycin (aac3 and aacC4) or resistance to herbicides such as glufosinate (bar or pat) and glyphosate (aroA or EPSPS). Examples of such selectable are illustrated in U.S. Pat. Nos. 5,550,318; 5,633,435; 5,780,708 and 6,118,047, all of which are incorporated herein by reference. Selectable markers which provide an ability to visually identify transformants can also be employed, for example, a gene expressing a colored or fluorescent protein such as a luciferase or green fluorescent protein (GFP) or a gene expressing a beta-glucuronidase or uidA gene (GUS) for which various chromogenic substrates are known.

[0061] Plant cells that survive exposure to the selective agent, or plant cells that have been scored positive in a screening assay, may be cultured in regeneration media and allowed to mature into plants. Developing plantlets regenerated from transformed plant cells can be transferred to plant growth mix, and hardened off, for example, in an environmentally controlled chamber at about 85% relative humidity, 600 ppm CO₂, and 25-250 microeinsteins m⁻² s⁻¹ of light, prior to transfer to a greenhouse or growth chamber for maturation. Plants are regenerated from about 6 weeks to 10 months after a transformant is identified, depending on the initial tissue. Plants may be pollinated using conventional plant breeding methods known to those of skill in the art and seed produced, for example self-pollination is commonly used with transgenic corn. The regenerated transformed plant or its progeny seed or plants can be tested for expression of the recombinant DNA and selected for the presence of enhanced agronomic trait.

Transgenic Plants and Seeds

[0062] Transgenic plants derived from the plant cells of this invention are grown to generate transgenic plants having an enhanced trait as compared to a control plant and produce transgenic seed and haploid pollen of this invention. Such plants with enhanced traits are identified by selection of transformed plants or progeny seed for the enhanced trait. For efficiency a selection method is designed to evaluate multiple transgenic plants (events) comprising the recombinant DNA, for example multiple plants from 2 to 20 or more transgenic events. Transgenic plants grown from transgenic seed provided herein demonstrate improved agronomic traits that contribute to increased yield or other trait that provides increased plant value, including, for example, improved seed quality. Of particular interest are plants having enhanced water use efficiency, enhanced cold tolerance, increased yield, enhanced nitrogen use efficiency, enhanced seed protein and enhanced seed oil.

[0063] Table 1 provides a list of protein encoding DNA (“genes”) that are useful as recombinant DNA for production of transgenic plants with enhanced agronomic trait, the elements of Table 1 are described by reference to:
[0064] “PEP SEQ” which identifies an amino acid sequence from SEQ ID NO:84 to 166.
[0065] “NUC SEQ” which identifies a DNA sequence from SEQ ID NO: 1 to 83.
[0066] “Base Vector” which identifies a base plasmid used for transformation of the recombinant DNA.
[0067] “PROTEIN NAME” which is a common name for protein encoded by the recombinant DNA.
[0068] “Enhanced trait” which identifies an enhanced trait which is imparted by the expression of the protein in a transgenic crop plant.

[0069] “Plasmid ID” which identifies an arbitrary name for the plant transformation plasmid comprising recombinant DNA for expressing the recombinant DNA in plant cells.

TABLE 1

| PEP | NUC | | | | |
|---|---|---|---|---|---|
| SEQ | SEQ | | | | |
| ID | ID | | | | |
| NO | NO | Base Vector | PROTEIN NAME | Enhanced trait(s) | Plasmid ID |
| 84 | 1 | pMON65154 | lactoylglutathione lyase | Enhanced seed protein | pMON69462 |
| 85 | 2 | pMON72472 | rab7c | Enhanced cold tolerance | pMON69456 |
| 86 | 3 | pMON65154 | CDPK kinase domain | Enhanced water use | pMON67754 |
| | | | | efficiency | |
| 87 | 4 | pMON72472 | SCOF-1 | Enhanced water use | pMON72494 |
| | | | | efficiency and enhanced | |
| | | | | cold tolerance | |
| 88 | 5 | pMON72472 | Synechococcus sp. PCC | Increased yield, enhanced | pMON68399 |
| | | | 6301 Delta9 desaturase | cold tolerance and enhanced | |
| | | | | water use efficiency | |
| 89 | 6 | pMON72472 | Arabidopsis agl11 delta | Improved cold tolerance | pMON73765 |
| | | | K-box | | |
| 90 | 7 | pMON72472 | rice MADS3 delta | Enhanced cold tolerance | pMON73829 |
| | | | MADS-box - L37528 | | |
| 91 | 8 | pMON72472 | corn MADS box | Enhanced nitrogen use | pMON73816 |
| | | | protein 110 | efficiency and enhance cold | |
| | | | | tolerance | |
| 92 | 9 | pMON72472 | Arabidopsis | Enhanced cold tolerance | pMON75305 |
| | | | homeodomain | | |
| | | | transcription factor- | | |
| 93 | 10 | pMON72472 | Arabidopsis AP2 | Enhanced cold tolerance | pMON75306 |
| | | | domain transcription | | |
| | | | factor | | |
| 94 | 11 | pMON72472 | Arabidopsis GATA | Enhanced cold tolerance | pMON75309 |
| | | | domain transcription | | |
| | | | factor | | |
| 95 | 12 | pMON72472 | Arabidopsis AT-hook | Enhanced cold tolerance | pMON75312 |
| | | | domain transcription | | |
| | | | factor- | | |
| 96 | 13 | pMON72472 | rice DET1-like - | Enhanced nitrogen use | pMON80270 |
| | | | BAB16336 | efficiency and enhanced | |
| | | | | cold tolerance | |
| 97 | 14 | pMON72472 | soybean G482-like 1 | Enhanced water use | pMON76342 |
| | | | | efficiency | |
| 98 | 15 | pMON72472 | Arabidopsis | Enhanced cold tolerance | pMON79174 |
| | | | hypothetical protein | | |
| | | | [NM_114802] | | |
| 99 | 16 | pMON72472 | corn hypothetical | Enhanced cold tolerance | pMON79413 |
| | | | protein | | |
| 100 | 17 | pMON72472 | soy Pra2-like protein 2 | Enhanced nitrogen use | pMON75511 |
| | | | | efficiency | |
| 101 | 18 | pMON72472 | Agrobacterium | Enhanced cold tolerance | pMON75515 |
| | | | cryptochrome-like | | |
| | | | protein - AE008050 | | |
| 102 | 19 | pMON72472 | rice SNF1-like protein | Enhanced nitrogen use | pMON80542 |
| | | | 9 [OsPK4] - AB011967 | efficiency, enhanced water | |
| | | | | use efficiency, increased | |
| | | | | yield | |
| 103 | 20 | pMON72472 | corn SNF1-like protein 3 | Enhanced water use | pMON78949 |
| | | | | efficiency and enhanced | |
| | | | | nitrogen use efficiency | |
| 104 | 21 | pMON72472 | corn SNF1-like protein 8 | Enhanced cold tolerance | pMON78936 |
| | | | | and enhanced water use | |
| | | | | efficiency | |
| 105 | 22 | pMON72472 | Corn Rubisco Activase 2 | Increased yield, enhanced | pMON75524 |
| | | | | cold tolerance and enhanced | |
| | | | | nitrogen use efficiency | |
| 106 | 23 | pMON72472 | NLI Interacting Isoform | Enhanced cold tolerance | pMON79163 |
| | | | T1- | and increased yield | |
| 107 | 24 | pMON72472 | maize synaptobrevin- | Enhanced cold tolerance | pMON75533 |
| | | | related sequnece 1 - | condition and increased | |
| | | | | yield | |
| 108 | 25 | pMON72472 | maize magnesium | Enhanced nitrogen use | pMON79709 |
| | | | transporter mrs2-1-like | efficiency and increased | |
| | | | 1 sequence | yield | |
| 109 | 26 | pMON72472 | Corn Protein similar to | Enhanced water use | pMON79422 |
| | | | nodulin MtN3 protein | efficiency | |
| 110 | 27 | pMON72472 | Corn glyoxalase II | Enhanced cold tolerance | pMON79425 |
| | | | isozyme | | |
| 111 | 28 | pMON72472 | Corn RNA 3- | Enhanced cold tolerance | pMON79718 |
| | | | TERMINAL | | |
| | | | PHOSPHATE | | |
| | | | CYCLASE-LIKE | | |
| | | | PROTEIN | | |
| 112 | 29 | pMON72472 | rice Di19 like sequence | Enhanced cold tolerance | pMON79447 |
| 113 | 30 | pMON72472 | soybean MAP kinase 6 | Enhanced cold tolerance | pMON78232 |
| | | | like 2 sequence | | |
| 114 | 31 | pMON72472 | Ralstonia metallidurans | Enhanced cold tolerance, | pMON75980 |
| | | | glutamate | and enhanced nitrogen use | |
| | | | decarboxylase | efficiency | |
| 115 | 32 | pMON72472 | rice HSF5 like | Enhanced water use | pMON80489 |
| | | | sequence | efficiency | |
| 116 | 33 | pMON72472 | soybean hsp17.4 like 1 | Enhanced cold tolerance | pMON79697 |
| | | | sequence | and enhanced water use | |
| | | | | efficiency | |
| 117 | 34 | pMON72472 | Corn putative | Enhanced water use | pMON78237 |
| | | | pyrrolidone carboxyl | efficiency | |
| | | | peptidase | | |
| 118 | 35 | pMON72472 | Arabidopsis E2F | Enhanced cold tolerance | pMON80461 |
| | | | | enhanced nitrogen use | |
| | | | | efficiency | |
| 119 | 36 | pMON72472 | Arabidopsis protein | Enhanced cold tolerance | pMON78235 |
| | | | phosphatase 1A | | |
| 120 | 37 | pMON72472 | Arabidopsis CtpA | Enhanced cold tolerance, | pMON80452 |
| | | | | and enhanced water use | |
| | | | | efficiency | |
| 121 | 38 | pMON74532 | Arabidopsis CtpA | Increased yield | |
| 122 | 39 | pMON72472 | Corn protein similar to | Enhanced cold tolerance | pMON80500 |
| | | | Arabidopsis Probable | | |
| | | | microsomal signal | | |
| | | | peptidase | | |
| 123 | 40 | pMON72472 | [Oryza sativa] putative | Enhanced nitrogen use | pMON80850 |
| | | | aldose reductase | efficiency | |
| 124 | 41 | pMON72472 | Zea Mays Kinase II | Increased seed protein | pMON78949 |
| | | | (similar to Yeast IKS1 | | |
| | | | & At MRK1) | | |
| 125 | 42 | pMON72472 | Fructose-1-6- | Increased yield | pMON81853 |
| | | | bisphosphatase | | |
| 126 | 43 | pMON72472 | soy G1928 like 1 | Increased seed protein | pMON83769 |
| 127 | 44 | pMON74532 | Synechocystis sp. 6803 | Increased yield | pMON78911 |
| | | | Hik19 | | |
| 128 | 45 | pMON72472 | Synechocystis sp. 6803 | Increased yield | |
| | | | Hik19 | | |
| 129 | 46 | pMON72472 | Arabidopsis NAC | Increased yield | pMON73787 |
| | | | domain transcription | | |
| | | | factor | | |
| 130 | 47 | pMON72472 | yeast alanine | Increased yield and | pMON77895 |
| | | | aminotransferase 1 - | enhanced nitrogen use | |
| | | | AAB67593 | efficiency | |
| 131 | 48 | pMON72472 | soybean catalase-like 1 | Increased yield | pMON79152 |
| 132 | 49 | pMON72472 | corn ALG-2 interacting | Increased yield | pMON80921 |
| | | | protein | | |
| 133 | 50 | pMON72472 | Putative Serine | Increased yield | pMON75505 |
| | | | Carboxypeptidase- | | |
| 134 | 51 | pMON72472 | Putative Ankyrin Like | Increased yield | pMON80925 |
| | | | Protein- | | |
| 135 | 52 | pMON72472 | Putative Kinase Like | Increased yield | pMON78942 |
| | | | Protein- | | |
| 136 | 53 | pMON72472 | Putative Protein- | Increased yield | pMON79164 |
| 137 | 54 | pMON72472 | yeast YPR145W/asn1 - | Increased yield | pMON79653 |
| | | | U40829 | | |
| 138 | 55 | pMON72472 | rice AtHSP17.6A like 1 | Increased yield | pMON81228 |
| | | | sequence | | |
| 139 | 56 | pMON72472 | yeast YDL123w | Increased yield | pMON79430 |
| 140 | 57 | pMON72472 | rice 12- | Increased yield | pMON79731 |
| | | | oxophytodienoate | | |
| | | | reductase like 1 | | |
| | | | sequence | | |
| 141 | 58 | pMON72472 | soybean MAP kinase 6 | Increased yield | pMON78229 |
| | | | like 3 sequence | | |
| 142 | 59 | pMON72472 | Arabidopsis GAD1 | Increased yield | pMON79696 |
| 143 | 60 | pMON74532 | Arabidopsis GAD1 | | |
| 144 | 61 | pMON72472 | soybean hsp17.4 like 4 | Increased yield | pMON78240 |
| | | | sequence | | |
| 145 | 62 | pMON72472 | maize hsp60 like 4 | Increased yield | pMON80283 |
| | | | sequence | | |
| 146 | 63 | pMON72472 | soy dsPTP 1 | Increased yield | pMON80866 |
| 147 | 64 | pMON72472 | Yeast GLC3 Glycogen | Increased yield | pMON80292 |
| | | | branching enzyme | | |
| 148 | 65 | pMON72472 | Arabidopsis unknown | Increased yield | pMON82223 |
| | | | protein | | |
| 149 | 66 | pMON72472 | beta-D-glucosidase | Increased yield | pMON83553 |
| 150 | 67 | pMON72472 | unknown protein1 | Increased yield | pMON81857 |
| 151 | 68 | pMON72472 | aldehyde oxidase | Increased yield | pMON82218 |
| 152 | 69 | pMON72472 | corn hypothetical | Improved growth under cold | pMON78227 |
| | | | protein | stress | |
| 153 | 70 | pMON72472 | corn hypothetical | Improved growth under cold | pMON78904 |
| | | | protein | stress | |
| 154 | 71 | pMON72472 | Arabidopsis cysteine | Increased yield | pMON78920 |
| | | | proteinase inhibitor | | |
| 155 | 72 | pMON82053 | Arabidopsis cysteine | Increased yield | pMON92646 |
| | | | proteinase inhibitor | | |
| 156 | 73 | pMON72472 | Arabidopsis | Improved growth under cold | pMON78922 |
| | | | hypothetical protein | stress | |
| 157 | 74 | pMON72472 | yeast SNF1 - A26030 | Improved growth under low | pMON78948 |
| | | | | nitrogen, drought, and/or | |
| | | | | cold stresses | |
| 158 | 75 | pMON72472 | soy SNF1-like protein 1 | Increased yield | pMON79660 |
| 159 | 76 | pMON72472 | soy SNF-like protein 2 | Enhanced nitrogen use | pMON78931 |
| | | | | efficiency, enhanced water | |
| | | | | use efficiency, increased | |
| | | | | yield | |
| 160 | 77 | pMON72472 | soy G1760 | Increased yield and | pMON82645 |
| | | | | enhanced water use | |
| | | | | efficiency | |
| 160 | 77 | | Soy G1760 | Increased yield | pMON74470 |
| 161 | 78 | pMON72472 | Rice Glyoxalase II | Increased yield | pMON79665 |
| 162 | 79 | pMON72472 | corn OsPK7-like | Enhanced nitrogen use | pMON82629 |
| | | | | efficiency, enhanced water | |
| | | | | use efficiency, increased | |
| | | | | yield | |
| 163 | 80 | pMON74532 | rice phyA with | Increased yield | pMON81344 |
| | | | Arabidopsis phyC | | |
| | | | intron 1 | | |
| 164 | 81 | pMON82060 | rice G975 like1 | Improved growth under cold | |
| | | | | stress | |
| 165 | 82 | | Corn Phytochrome A | Increased yield | pMON74916 |
| 166 | 83 | | Arabidopsis G1760 | Increased yield | pMON73957 |

Selection Methods for Transgenic Plants with Enhanced Agronomic Trait

[0070] Within a population of transgenic plants regenerated from plant cells transformed with the recombinant DNA many plants that survive to fertile transgenic plants that produce seeds and progeny plants will not exhibit an enhanced agronomic trait. Selection from the population is necessary to identify one or more transgenic plant cells that can provide plants with the enhanced trait. Transgenic plants having enhanced traits are selected from populations of plants regenerated or derived from plant cells transformed as described herein by evaluating the plants in a variety of assays to detect an enhanced trait, e.g. enhanced water use efficiency, enhanced cold tolerance, increased yield, enhanced nitrogen use efficiency, enhanced seed protein and enhanced seed oil. These assays also may take many forms including, but not limited to, direct screening for the trait in a greenhouse or field trial or by screening for a surrogate trait. Such analyses can be directed to detecting changes in the chemical composition, biomass, physiological properties, morphology of the plant. Changes in chemical compositions such as nutritional composition of grain can be detected by analysis of the seed composition and content of protein, free amino acids, oil, free fatty acids, starch or tocopherols. Changes in biomass characteristics can be made on greenhouse or field grown plants and can include plant height, stem diameter, root and shoot dry weights; and, for corn plants, ear length and diameter. Changes in physiological properties can be identified by evaluating responses to stress conditions, for example assays using imposed stress conditions such as water deficit, nitrogen deficiency, cold growing conditions, pathogen or insect attack or light deficiency, or increased plant density. Changes in morphology can be measured by visual observation of tendency of a transformed plant with an enhanced agronomic trait to also appear to be a normal plant as compared to changes toward bushy, taller, thicker, narrower leaves, striped leaves, knotted trait, chlorosis, albino, anthocyanin production, or altered tassels, ears or roots. Other selection properties include days to pollen shed, days to silking, leaf extension rate, chlorophyll content, leaf temperature, stand, seedling vigor, internode length, plant height, leaf number, leaf area, tillering, brace roots, stay green, stalk lodging, root lodging, plant health, barreness/prolificacy, green snap, and pest resistance. In addition, phenotypic characteristics of harvested grain may be evaluated, including number of kernels per row on the ear, number of rows of kernels on the ear, kernel abortion, kernel weight, kernel size, kernel density and physical grain quality. Although the plant cells and methods of this invention can be applied to any plant cell, plant, seed or pollen, e.g. any fruit, vegetable, grass, tree or ornamental plant, the various aspects of the invention are preferably applied to corn, soybean, cotton, canola, alfalfa, wheat and rice plants. In many cases the invention is applied to corn plants that are inherently resistant to disease from the Mal de Rio Cuarto virus or the Puccina sorghi fungus or both.

[0071] The following examples are included to demonstrate aspects of the invention, those of skill in the art should, in light of the present disclosure, appreciate that many changes can be made in the specific aspects which are disclosed and still obtain a like or similar results without departing from the spirit and scope of the invention.

### EXAMPLE 1

### Plant Expression Constructs

A. Plant Expression Constructs for Corn Transformation

[0072] This example illustrates the construction of plasmids for transferring recombinant DNA into plant cells which can be regenerated into transgenic plants of this invention. Primers for PCR amplification of protein coding nucleotides of recombinant DNA were designed at or near the start and stop codons of the coding sequence, in order to eliminate most of the 5′ and 3′ untranslated regions. Each recombinant DNA coding for a protein identified in Table 1 was amplified by PCR prior to insertion into the insertion site of one of the base vectors as referenced in Table 1.

[0073] A base plant transformation vector pMON65154 was fabricated for use in preparing recombinant DNA for transformation into corn tissue using GATEWAY™ Destination plant expression vector systems (available from Invitrogen Life Technologies, Carlsbad, Calif.). With reference to the elements described in Table 3 below and SEQ ID NO:10024, pMON65 154 comprises a selectable marker expression cassette and a template recombinant DNA expression cassette. The marker expression cassette comprises a CaMV 35S promoter operably linked to a gene encoding neomycin phosphotransferase II (nptII) followed by a 3′ region of an Agrobacterium tumefaciens nopaline synthase gene (nos). The template recombinant DNA expression cassette is positioned tail to tail with the marker expression cassette. The template recombinant DNA expression cassette comprises 5′ regulatory DNA including a rice actin 1 promoter, exon and intron, followed by a GATEWAY™ insertion site for recombinant DNA, followed by a 3′ region of a potato proteinase inhibitor II (pinII) gene. Once recombinant DNA has been inserted into the insertion site, the plasmid is useful for plant transformation, for example by microprojectile bombardment.

TABLE 3

| FUNCTION | ELEMENT | REFERENCE |
|---|---|---|
| Plant gene of interest | Rice actin 1 promoter | U.S. Pat. No. 5,641,876 |
| expression cassette | Rice actin 1 exon 1, intron 1 | U.S. Pat. No. 5,641,876 |
| | enhancer | |
| Gene of interest | AttR1 | GATEWAY ™ Cloning Technology |
| insertion site | | Instruction Manual |
| | CmR gene | GATEWAY ™ Cloning Technology |
| | | Instruction Manual |
| | ccdA, ccdB genes | GATEWAY ™ Cloning Technology |
| | | Instruction Manual |
| | attR2 | GATEWAY ™ Cloning Technology |
| | | Instruction Manual |
| Plant gene of interest | Potato pinII 3′ region | An et al. (1989) Plant Cell 1: 115-122 |
| expression cassette | | |
| Plant selectable | CaMV 35S promoter | U.S. Pat. No. 5,858,742 |
| marker expression | nptII selectable marker | U.S. Pat. No. 5,858,742 |
| cassette | nos 3′ region | U.S. Pat. No. 5,858,742 |
| Maintenance in E. coli | ColE1 origin of replication | |
| | F1 origin of replication | |
| | Bla ampicillin resistance | |

[0074] A similar base vector plasmid pMON72472 (SEQ ID NO: 10025) was constructed for use in Agrobacterium-mediated methods of plant transformation similar to pMON65154 except (a) the 5′ regulatory DNA in the template recombinant DNA expression cassette was a rice actin promoter and a rice actin intron, (b) left and right T-DNA border sequences from Agrobacterium are added with the right border sequence is located 5′ to the rice actin 1 promoter and the left border sequence is located 3′ to the 35S promoter and (c) DNA is added to facilitate replication of the plasmid in both E. coli and Agroacterium tumefaciens. The DNA added to the plasmid outside of the T-DNA border sequences includes an oriV wide host range origin of DNA replication functional in Agrobacterium, a pBR322 origin of replication functional in E. coli, and a spectinomycin/stretptomycin resistance gene for selection in both E. coli and Agrobacterium.

[0075] Another base vector pMON82060 (SEQ ID NO: 10026), illustrated in Table 4, was assembled using the technology known in the art.

TABLE 4

| | | | Coordinates |
|---|---|---|---|
| | | | of SEQ ID |
| function | name | Annotation | NO: 10026 |
| Agro | B-AGRtu.right border | Agro right border sequence, essential for | 5235-5591 |
| transformation | | transfer of T-DNA. | |
| Gene of | P-Os.Act1 | Promoter from the rice actin gene act1. | 5609-7009 |
| interest plant | L-Os.Act1 | Leader (first exon) from the rice actin 1 | |
| expression | | gene. | |
| cassette | I-Os.Act1 | First intron and flanking UTR exon | |
| | | sequences from the rice actin 1 gene | |
| | T-St.Pis4 | The 3′ non-translated region of the | 7084-8026 |
| | | potato proteinase inhibitor II gene which | |
| | | functions to direct polyadenylation of the | |
| | | mRNA | |
| Plant | P-CaMV.35S | CaMV 35S promoter | 8075-8398 |
| selectable | L-CaMV.35S | 5′ UTR from the 35S RNA of CaMV | |
| marker | CR-Ec.nptII-Tn5 | nptII selectable marker that confers | 8432-9226 |
| expression | | resistance to neomycin and kanamycin | |
| cassette | T-AGRtu.nos | A 3′ non-translated region of the | 9255-9507 |
| | | nopaline synthase gene of | |
| | | Agrobacterium tumefaciens Ti plasmid | |
| | | which functions to direct | |
| | | polyadenylation of the mRNA. | |
| Agro | B-AGRtu.left border | Agro left border sequence, essential for | 39-480 |
| transformation | | transfer of T-DNA. | |
| Maintenance | OR-Ec.oriV-RK2 | The vegetative origin of replication from | 567-963 |
| in E. coli | | plasmid RK2. | |
| | CR-Ec.rop | Coding region for repressor of primer | 2472-2663 |
| | | from the ColE1 plasmid. Expression of | |
| | | this gene product interferes with primer | |
| | | binding at the origin of replication, | |
| | | keeping plasmid copy number low. | |
| | OR-Ec.ori-ColE1 | The minimal origin of replication from | 3091-3679 |
| | | the E. coli plasmid ColE1. | |
| | P-Ec.aadA-SPC/STR | promoter for Tn7 adenylyltransferase | 4210-4251 |
| | | (AAD(3″)) | |
| | CR-Ec.aadA- | Coding region for Tn7 | 4252-5040 |
| | SPC/STR | adenylyltransferase (AAD(3″)) | |
| | | conferring spectinomycin and | |
| | | streptomycin resistance. | |
| | T-Ec.aadA-SPC/STR | 3′ UTR from the Tn7 adenylyltransferase | 5041-5098 |
| | | (AAD(3″)) gene of E. coli. | |

[0076] TABLE 5

| Function | Element | Reference |
|---|---|---|
| Agro transformation | B-ARGtu.right border | Depicker, A. et al (1982) |
| | | Mol Appl Genet 1: 561-573 |
| Antibiotic resistance | CR-Ec.aadA-SPC/STR | |
| Repressor of primers from the ColE1 | CR-Ec.rop | |
| plasmid | | |
| Origin of replication | OR-Ec.oriV-RK2 | |
| Agro transformation | B-ARGtu.left border | Barker, R. F. et al (1983) |
| | | Plant Mol Biol 2: 335-350 |
| Plant selectable marker expression | Promoter with intron and | McDowell et al. (1996) |
| cassette | 5′UTR of Arabidopsis act 7 | Plant Physiol. 111: 699-711. |
| | gene (AtAct7) | |
| | 5′ UTR of Arabidopsis act 7 | |
| | gene | |
| | Intron in 5′UTR of AtAct7 | |
| | Transit peptide region of | Klee, H. J. et al (1987) |
| | Arabidopsis EPSPS | MGG 210: 437-442 |
| | Synthetic CP4 coding region | |
| | with dicot preferred codon | |
| | usage | |
| | A 3′ UTR of the nopaline | U.S. Pat. No. 5,858,742 |
| | synthase gene of | |
| | Agrobacterium tumefaciens | |
| | Ti plasmid | |
| Plant gene of interest expression | Promoter for 35S RNA from | U.S. Pat. No. 5,322,938 |
| cassette | CaMV containing a | |
| | duplication of the −90 to −350 | |
| | region | |
| | Gene of interest insertion site | |
| | Cotton E6 3′ end | GenBank accession |
| | | U30508 |

[0077] Another base vector pMON82053 (SEQ ID NO: 10028), illustrated in Table 6, was assembled using the technology known in the art.

TABLE 6

| | | | Coordinates of SEQ ID |
|---|---|---|---|
| Function | Name | Annotation | NO: 10028 |
| Agro | B-AGRtu.left border | Agro left border | 6144-6585 |
| transforamtion | | sequence, essential for | |
| | | transfer of T-DNA. | |
| Plant | P-At.Act7 | Promoter from the | 6624-7861 |
| selectable | | arabidopsis actin 7 gene | |
| marker | L-At.Act7 | 5′UTR of Arabidopsis | |
| expression | | Act7 gene | |
| cassette | I-At.Act7 | Intron from the | |
| | | Arabidopsis actin7 gene | |
| | TS-At.ShkG-CTP2 | Transit peptide region of | 7864-8091 |
| | | Arabidopsis EPSPS | |
| | CR-AGRtu.aroA- | Synthetic CP4 coding | 8092-9459 |
| | CP4.nno_At | region with dicot | |
| | | preferred codon usage. | |
| | T-AGRtu.nos | A 3′ non-translated region | 9466-9718 |
| | | of the nopaline synthase | |
| | | gene of Agrobacterium | |
| | | tumefaciens Ti plasmid | |
| | | which functions to direct | |
| | | polyadenylation of the | |
| | | mRNA. | |
| Gene of | P-CaMV.35S-enh | Promoter for 35S RNA | 1-613 |
| interest | | from CaMV containing a | |
| expression | | duplication of the −90 to −350 | |
| cassette | | region. | |
| | T-Gb.E6-3b | 3′ untranslated region | 688-1002 |
| | | from the fiber protein E6 | |
| | | gene of sea-island cotton; | |
| Agro | B-AGRtu.right border | Agro right border | 1033-1389 |
| transformation | | sequence, essential for | |
| | | transfer of T-DNA. | |
| Maintenance | OR-Ec.oriV-RK2 | The vegetative origin of | 5661-6057 |
| in E. coli | | replication from plasmid | |
| | | RK2. | |
| | CR-Ec.rop | Coding region for | 3961-4152 |
| | | repressor of primer from | |
| | | the ColE1 plasmid. | |
| | | Expression of this gene | |
| | | product interferes with | |
| | | primer binding at the | |
| | | origin of replication, | |
| | | keeping plasmid copy | |
| | | number low. | |
| | OR-Ec.ori-ColE1 | The minimal origin of | 2945-3533 |
| | | replication from the E. coli | |
| | | plasmid ColE1. | |
| | P-Ec.aadA-SPC/STR | romoter for Tn7 | 2373-2414 |
| | | adenylyltransferase | |
| | | (AAD(3″)) | |
| | CR-Ec.aadA- | Coding region for Tn7 | 1584-2372 |
| | SPC/STR | adenylyltransferase | |
| | | (AAD(3″)) conferring | |
| | | spectinomycin and | |
| | | streptomycin resistance. | |
| | T-Ec.aadA-SPC/STR | 3′ UTR from the Tn7 | 1526-1583 |
| | | adenylyltransferase | |
| | | (AAD(3″)) gene of E. coli. | |

[0078] Protein coding segments of recombinant DNA are amplified by PCR prior to insertion into vectors at the insertion site. Primers for PCR amplification are designed at or near the start and stop codons of the coding sequence, in order to eliminate most of the 5′ and 3′ untranslated regions.

### EXAMPLE 2

### Corn Transformation

[0079] This example illustrates plant cell transformation methods useful in producing transgenic corn plant cells, plants, seeds and pollen of this invention and the production and identification of transgenic corn plants and seed with an enhanced trait, i.e. enhanced water use efficiency, enhanced cold tolerance, increased yield, enhanced nitrogen use efficiency, enhanced seed protein and enhanced seed oil. Plasmid vectors were prepared by cloning DNA identified in Table 1 in the identified base vectors for use in corn transformation of corn plant cells to produce transgenic corn plants and progeny plants, seed and pollen.

[0080] For Agrobacterium-mediated transformation of corn embryo cells corn plants of a readily transformable line (designated LH59) is grown in the greenhouse and ears harvested when the embryos are 1.5 to 2.0 mm in length. Ears are surface sterilized by spraying or soaking the ears in 80% ethanol, followed by air drying. Immature embryos are isolated from individual kernels on surface sterilized ears. Prior to inoculation of maize cells, Agrobacterium cells are grown overnight at room temperature. Immature maize embryo cells are inoculated with Agrobacterium shortly after excision, and incubated at room temperature with Agrobacterium for 5-20 minutes. Immature embryo plant cells are then co-cultured with Agrobacterium for 1 to 3 days at 23° C. in the dark. Co-cultured embryos are transferred to selection media and cultured for approximately two weeks to allow embryogenic callus to develop. Embryogenic callus is transferred to culture medium containing 100 mg/L paromomycin and subcultured at about two week intervals. Transformed plant cells are recovered 6 to 8 weeks after initiation of selection.

[0081] For Agrobacterium-mediated transformation of maize callus immature embryos are cultured for approximately 8-21 days after excision to allow callus to develop. Callus is then incubated for about 30 minutes at room temperature with the Agrobacterium suspension, followed by removal of the liquid by aspiration. The callus and Agrobacterium are co-cultured without selection for 3-6 days followed by selection on paromomycin for approximately 6 weeks, with biweekly transfers to fresh media, and paromomycin resistant callus identified as containing the recombinant DNA in an expression cassette.

[0082] For transformation by microprojectile bombardment immature maize embryos are isolated and cultured 3-4 days prior to bombardment. Prior to microprojectile bombardment, a suspension of gold particles is prepared onto which the desired recombinant DNA expression cassettes are precipitated. DNA is introduced into maize cells as described in U.S. Pat. Nos. 5,550,318 and 6,399,861 using the electric discharge particle acceleration gene delivery device. Following microprojectile bombardment, tissue is cultured in the dark at 27 degrees C. Additional transformation methods and materials for making transgenic plants of this invention, for example, various media and recipient target cells, transformation of immature embryos and subsequence regeneration of fertile transgenic plants are disclosed in U.S. Pat. Nos. 6,194,636 and 6,232,526 and U.S. patent application Ser. No. 09/757,089, which are incorporated herein by reference.

[0083] To regenerate transgenic corn plants a callus of transgenic plant cells resulting from transformation is placed on media to initiate shoot development in plantlets which are transferred to potting soil for initial growth in a growth chamber at 26 degrees C. followed by a mist bench before transplanting to 5 inch pots where plants are grown to maturity. The regenerated plants are self fertilized and seed is harvested for use in one or more methods to select seed, seedlings or progeny second generation transgenic plants (R2 plants) or hybrids, e.g. by selecting transgenic plants exhibiting an enhanced trait as compared to a control plant.

[0084] Transgenic corn plant cells were transformed with recombinant DNA from each of the genes identified in Table 1. Progeny transgenic plants and seed of the transformed plant cells were screened for enhanced water use efficiency, enhanced cold tolerance, increased yield, enhanced nitrogen use efficiency, enhanced seed protein and enhanced seed oil as reported in Example 5.

### EXAMPLE 3

### Soybean Transformation

[0085] This example illustrates plant transformation useful in producing the transgenic soybean plants of this invention and the production and identification of transgenic seed for transgenic soybean having enhanced water use efficiency, enhanced cold tolerance, increased yield, enhanced nitrogen use efficiency, enhanced seed protein and enhanced seed oil.

[0086] For Agrobacterium mediated transformation, soybean seeds are germinated overnight and the meristem explants excised. The meristems and the explants are placed in a wounding vessel. Soybean explants and induced Agrobacterium cells from a strain containing plasmid DNA with the gene of interest cassette and a plant selectable marker cassette are mixed no later than 14 hours from the time of initiation of seed germination and wounded using sonication. Following wounding, explants are placed in co-culture for 2-5 days at which point they are transferred to selection media for 6-8 weeks to allow selection and growth of transgenic shoots. Trait positive shoots are harvested approximately 6-8 weeks and placed into selective rooting media for 2-3 weeks. Shoots producing roots are transferred to the greenhouse and potted in soil. Shoots that remain healthy on selection, but do not produce roots are transferred to non-selective rooting media for an additional two weeks. Roots from any shoots that produce roots off selection are tested for expression of the plant selectable marker before they are transferred to the greenhouse and potted in soil. Additionally, a DNA construct can be transferred into the genome of a soybean cell by particle bombardment and the cell regenerated into a fertile soybean plant as described in U.S. Pat. No. 5,015,580, herein incorporated by reference.

[0087] Transgenic soybean plant cells were transformed with recombinant DNA from each of the genes identified in Table 1. Progeny transgenic plants and seed of the transformed plant cells were screened for enhanced water use efficiency, enhanced cold tolerance, increased yield, enhanced nitrogen use efficiency, enhanced seed protein and enhanced seed oil as reported in Example 5.

### EXAMPLE 4

### Homolog Identification

[0088] This example illustrates the identification of homologs of proteins encoded by the DNA identified in Table 1 which is used to provide transgenic seed and plants having enhanced agronomic traits. From the sequence of the homologs, homologous DNA sequence can be identified for preparing additional transgenic seeds and plants of this invention with enhanced agronomic traits.

[0089] An “All Protein Database” was constructed of known protein sequences using a proprietary sequence database and the National Center for Biotechnology Information (NCBI) non-redundant amino acid database (nr.aa). For each organism from which a polynucleotide sequence provided herein was obtained, an “Organism Protein Database” was constructed of known protein sequences of the organism; it is a subset of the All Protein Database based on the NCBI taxonomy ID for the organism.

[0090] The All Protein Database was queried using amino acid sequences provided herein as SEQ ID NO: 84 through SEQ ID NO: 166 using NCBI “blastp” program with E-value cutoff of 1e-8. Up to 1000 top hits were kept, and separated by organism names. For each organism other than that of the query sequence, a list was kept for hits from the query organism itself with a more significant E-value than the best hit of the organism. The list contains likely duplicated genes of the polynucleotides provided herein, and is referred to as the Core List. Another list was kept for all the hits from each organism, sorted by E-value, and referred to as the Hit List.

[0091] The Organism Protein Database was queried using polypeptide sequences provided herein as SEQ ID NO:84 through SEQ ID NO:166 using NCBI “blastp” program with E-value cutoff of 1e-4. Up to 1000 top hits were kept. A BLAST searchable database was constructed based on these hits, and is referred to as “SubDB”. SubDB was queried with each sequence in the Hit List using NCBI “blastp” program with E-value cutoff of 1e-8. The hit with the best E-value was compared with the Core List from the corresponding organism. The hit is deemed a likely ortholog if it belongs to the Core List, otherwise it is deemed not a likely ortholog and there is no further search of sequences in the Hit List for the same organism. Homologs from a large number of distinct organisms were identified and are reported by amino acid sequences of SEQ ID NO: 167 through SEQ ID NO: 10023. These relationship of proteins of SEQ ID NO:84 through 166 and homologs of SEQ ID NO: 167 through 10023 is identified in Table 2. The source organism for each homolog is found in the Sequence Listing.

TABLE 2

| PEP SEQ ID NO: | homolog SEQ ID NOs | | | | | | | | | | | |
|---|---|---|---|---|---|---|---|---|---|---|---|---|
| 84: | 4274 | 4007 | 7537 | 1472 | 2465 | 1788 | 1873 | 8538 | 2486 | 2101 | 2090 | 3705 |
| | 513 | 7264 | 6280 | 4902 | 2624 | 8820 | 1614 | 5907 | 8247 | 2717 | 4147 | 5559 |
| | 1631 | 7278 | 6566 | 6687 | 2116 | 9018 | 192 | 2002 | 5150 | 322 | 6314 | 6458 |
| | 6281 | 1285 | 7292 | 4226 | 4543 | 2496 | 9903 | 1478 | 554 | 5383 | 7751 | 2484 |
| | 4954 | 7695 | 5821 | 6271 | 3339 | 443 | 8542 | 1561 | 2321 | 5876 | 6877 | 3452 |
| | 2879 | 3497 | 2097 | 4257 | 7449 | 7281 | 3708 | 4513 | 2001 | 4425 | 9319 | 4133 |
| | 6686 | 2146 | 9698 | 1036 | 2026 | 1292 | 5566 | 181 | 6951 | 9794 | 2439 | 2621 |
| | 5202 | 878 | 8081 | 1392 | 1950 | 9999 | 4392 | 2121 | 7824 | 2367 | 5102 | 6717 |
| | 1541 | 9444 | 7051 | 529 | 4096 | 602 | 8266 | | | | | |
| 85: | 1163 | 3954 | 9565 | 5913 | 8096 | 1310 | 3871 | 3019 | 2926 | 1456 | 2770 | 4461 |
| | 2570 | 5099 | 7946 | 3700 | 9665 | 1600 | 7270 | 7312 | 6531 | 9978 | 8803 | 8920 |
| | 4917 | 6067 | 6352 | 6902 | 2025 | 2516 | 4213 | 9446 | 8483 | 5404 | 2213 | 4311 |
| | 3724 | 9926 | 9599 | 3835 | 727 | 8396 | 190 | 3701 | 7478 | 706 | 4038 | 7149 |
| | 5413 | 1538 | 8094 | 9467 | 7385 | 7520 | 7275 | 3299 | 3658 | | | |
| 86: | 2511 | 2513 | 7067 | 7055 | 5647 | 9608 | 9399 | 4420 | 9867 | 4564 | 2527 | 7769 |
| | 2323 | 347 | 6509 | 2052 | 5258 | 4504 | 5363 | 3847 | 329 | 7133 | 1751 | 3243 |
| | 8135 | 4767 | 5558 | 2719 | 6177 | 6161 | 6180 | 1606 | 3066 | 514 | 7725 | 4747 |
| | 2868 | 3953 | 3995 | 9218 | 8245 | 1471 | 1050 | 4602 | 9788 | 5705 | 1043 | |
| 87: | 7338 | 2565 | 1372 | 619 | 8819 | 7803 | 7216 | 9263 | 8478 | 7286 | 2051 | 8010 |
| | 4629 | 2569 | 8521 | 7659 | 6081 | 6080 | 2727 | 1944 | 5731 | 7616 | 8198 | 8166 |
| | 6312 | 9586 | 2010 | 7801 | 4694 | 4265 | 3928 | 9925 | 1675 | 6099 | 5725 | 1040 |
| | 5933 | 270 | 4135 | 6356 | 8593 | 7015 | 3351 | 9045 | 5105 | 9655 | 3874 | 5951 |
| | 2184 | 7921 | 9476 | 3408 | 7095 | 1214 | 9077 | 3211 | 7050 | 7106 | 4788 | 3534 |
| | 3093 | 7715 | | | | | | | | | | |
| 88: | 9004 | 8450 | 3918 | 3721 | 516 | 8506 | 8664 | 3458 | 6365 | 2464 | 1564 | 4322 |
| | 7760 | 3673 | 7547 | 2603 | 8146 | 1755 | 7919 | 4542 | 436 | 2278 | 4913 | 2453 |
| | 9651 | 2319 | 3659 | 678 | 4640 | 3600 | 4171 | 1156 | 1807 | 5765 | 6619 | 2992 |
| | 354 | 8233 | 2386 | 9454 | 9453 | 8837 | 1238 | 6971 | 7874 | 6538 | 8258 | 1371 |
| | 1609 | 3120 | 3437 | 8825 | 7158 | 5623 | 1313 | 7335 | 6137 | 3691 | 8239 | 415 |
| | 7580 | 5147 | 8818 | 6282 | 4612 | 543 | 6639 | 9686 | 7662 | 7683 | 7682 | 7664 |
| | 5278 | 5260 | 8016 | 2558 | 2566 | 2530 | 9515 | 5921 | 8962 | 3892 | 7174 | 6793 |
| | 6936 | 6938 | 8284 | 5225 | 9323 | 2932 | 4932 | 5328 | 6697 | 6602 | 5109 | 9625 |
| | 1876 | 7435 | 7758 | 1719 | 662 | 6913 | 4095 | 5563 | 4919 | 8188 | 6804 | 360 |
| | 9790 | 7742 | 7745 | 2584 | 8776 | 8004 | 862 | 6690 | 8757 | 5193 | 6618 | 9595 |
| | 225 | 4815 | 5192 | 1055 | 4061 | 4017 | 9781 | 9955 | 8231 | 1254 | 5944 | 4087 |
| | 8234 | 319 | 1180 | 4631 | 9258 | 6546 | 699 | 3498 | 866 | 588 | 189 | 4577 |
| | 1244 | 5332 | 3952 | 9818 | 2700 | 9827 | 6958 | 7167 | 3762 | 9259 | 3504 | 4434 |
| | 4968 | 3204 | 8580 | 1077 | 5275 | 9915 | 1474 | 9160 | 1653 | 2701 | 1637 | 5350 |
| | 5299 | 1843 | 4178 | 10018 | 7040 | 2894 | 2821 | 5624 | 680 | 9370 | 7560 | 4573 |
| | 2144 | 6813 | 6722 | 3689 | 6721 | 3373 | 8902 | 6656 | 8928 | 8462 | 1336 | 9106 |
| | 6956 | 220 | 3196 | 221 | 6118 | 4162 | 7171 | 9683 | 3870 | 4094 | 8343 | 8342 |
| | 213 | 904 | 6335 | 8822 | 2482 | 3806 | 1766 | 2692 | 9038 | 384 | 9008 | 9007 |
| | 3843 | 2040 | 7982 | 9001 | 9002 | 4781 | 606 | 4807 | 4852 | 5595 | 1509 | 1018 |
| | 8100 | 8751 | 6816 | 9347 | 8346 | | | | | | | |
| 89: | 9376 | 7987 | 7994 | 8028 | 8008 | 9732 | 7256 | 7258 | 6605 | 6606 | 7280 | 3139 |
| | 9607 | 7439 | 6711 | 9237 | 9236 | 6585 | 1956 | 1982 | 1979 | 7291 | 7290 | 1200 |
| | 8901 | 7293 | 7295 | 7315 | 7297 | 7279 | 6624 | 6601 | 6622 | 6584 | 6583 | 6387 |
| | 7341 | 9612 | 264 | 284 | 3163 | 7321 | 7324 | 3947 | 6330 | 6620 | 6600 | 6598 |
| | 6675 | 9922 | 4296 | 3753 | 4899 | 6243 | 4253 | 4128 | 8555 | 2069 | 9831 | 3105 |
| | 6073 | 6074 | 6075 | 7571 | 9157 | 3157 | 7568 | 8071 | 7565 | 5977 | 4467 | 7244 |
| | 1849 | 7820 | 7235 | 3250 | 6000 | 1058 | 6372 | 9381 | 7369 | 4775 | 4109 | 609 |
| | 9998 | 9373 | 6579 | 6559 | 6561 | 206 | 8729 | 1166 | 4317 | 1863 | 5710 | 381 |
| | 2162 | 4270 | 6680 | 6925 | 752 | 2268 | 4086 | 394 | 378 | 3059 | 6262 | 9338 |
| | 2659 | 8145 | 6646 | 9005 | 4294 | 6457 | 6451 | 8075 | 8093 | 3747 | 3558 | 7476 |
| | 7475 | 7317 | 1709 | 6558 | 3764 | 3280 | 6580 | 1845 | | | | |
| 90: | 446 | 4338 | 4342 | 9732 | 4169 | 7256 | 7258 | 7260 | 6605 | 6606 | 7280 | 9607 |
| | 3131 | 3148 | 6585 | 4388 | 3940 | 177 | 7243 | 7291 | 7290 | 1200 | 1231 | 1207 |
| | 6265 | 7295 | 7293 | 7315 | 7297 | 7279 | 7792 | 7788 | 6624 | 6601 | 6622 | 6583 |
| | 6584 | 6891 | 7253 | 7277 | 7262 | 7272 | 7271 | 7324 | 7321 | 6598 | 6620 | 6600 |
| | 9922 | 7623 | 6675 | 9831 | 2069 | 3105 | 6073 | 6075 | 6074 | 7571 | 9157 | 7107 |
| | 7110 | 7108 | 7109 | 7244 | 1849 | 7235 | 3250 | 176 | 179 | 3357 | 1058 | 6798 |
| | 5204 | 9410 | 1816 | 5206 | 6794 | 1553 | 6056 | 6795 | 6372 | 9585 | 9587 | 7819 |
| | 383 | 510 | 175 | 2068 | 2865 | 2823 | 450 | 9643 | 1555 | 1636 | 3418 | 2608 |
| | 701 | 6147 | 6165 | 1470 | 6578 | 9307 | 4775 | 3206 | 4245 | 7525 | 8255 | 2331 |
| | 9277 | 9305 | 9278 | 9274 | 6559 | 6579 | 6561 | 8729 | 7851 | 2561 | 7850 | 2208 |
| | 1166 | 9701 | 670 | 6640 | 8134 | 5364 | 3904 | 6039 | 1320 | 6481 | 5993 | 3541 |
| | 207 | 8345 | 8326 | 4696 | 7508 | 1266 | 2160 | 2162 | 1270 | 3958 | 4250 | 6887 |
| | 3932 | 4270 | 5104 | 6680 | 8202 | 6925 | 1088 | 8251 | 1466 | 8249 | 9677 | 3579 |
| | 7756 | 2119 | 4273 | 1011 | 245 | 3713 | 9490 | 5245 | 4735 | 2153 | 854 | 4214 |
| | 5025 | 6660 | 5001 | 4086 | 4099 | 4077 | 7241 | 7237 | 3059 | 6262 | 2659 | 820 |
| | 6646 | 9005 | 4294 | 6457 | 6451 | 2869 | 2767 | 7746 | 1732 | 1738 | 1734 | 1740 |
| | 1617 | 6714 | 8105 | 7317 | 7318 | 1709 | 1731 | 6558 | 7716 | 7971 | 7968 | 1210 |
| | 1248 | 925 | 6580 | 1247 | 1273 | 1274 | 3369 | 2586 | 3664 | | | |
| 91: | 7402 | 7398 | 3583 | 3592 | 4729 | 6500 | 6496 | 2752 | 215 | 7280 | 3139 | 3136 |
| | 7439 | 7440 | 7424 | 9236 | 9237 | 3124 | 3128 | 3938 | 177 | 1956 | 1982 | 1979 |
| | 7291 | 7290 | 4868 | 6436 | 7355 | 7315 | 7297 | 7279 | 794 | 7341 | 7272 | 7262 |
| | 290 | 304 | 289 | 291 | 288 | 7324 | 7321 | 3947 | 6330 | 6661 | 6658 | 4296 |
| | 3753 | 8555 | 1943 | 8457 | 3157 | 7565 | 7568 | 7088 | 5977 | 4467 | 3998 | 3185 |
| | 3181 | 3152 | 3155 | 7534 | 7516 | 7244 | 1847 | 7442 | 7468 | 6000 | 8494 | 375 |
| | 1057 | 9773 | 6372 | 7369 | 957 | 2685 | 3508 | 3586 | 3087 | 8866 | 5749 | 1377 |
| | 2317 | 723 | 4586 | 2111 | 4703 | 4413 | 3687 | 8541 | 9052 | 1793 | 6037 | 2164 |
| | 2626 | 6824 | 5207 | 3238 | 7618 | 9974 | 9973 | 1815 | 1813 | 206 | 4540 | 2230 |
| | 6716 | 5597 | 2206 | 2232 | 2200 | 5599 | 1187 | 3435 | 9672 | 9040 | 9039 | 2881 |
| | 7223 | 2377 | 2292 | 7024 | 6395 | 4348 | 4880 | 744 | 8064 | 5301 | 8492 | 8447 |
| | 4312 | 4317 | 8472 | 1863 | 7956 | 6694 | 8324 | 7358 | 381 | 5710 | 3028 | 2182 |
| | 7020 | 3016 | 531 | 5699 | 9003 | 7798 | 7421 | 2299 | 787 | 1905 | 3641 | 1934 |
| | 1893 | 1889 | 7496 | 5036 | 7100 | 3584 | 3055 | 2018 | 2043 | 2042 | 7345 | 1084 |
| | 1086 | 8473 | 8350 | 4908 | 4934 | 8469 | 8477 | 8098 | 8215 | 6937 | 8496 | 4319 |
| | 8499 | 8500 | 1741 | 5722 | 1844 | 1930 | 2265 | 2272 | 605 | 4099 | 4086 | 5667 |
| | 7379 | 7378 | 6262 | 9338 | 4236 | 9976 | 9969 | 9972 | 819 | 9011 | 9012 | 4937 |
| | 4956 | 2236 | 6461 | 5469 | 8073 | 6550 | 3501 | 2047 | 2133 | 7747 | 6304 | 1321 |
| | 7230 | 5154 | 5153 | 7376 | 7373 | 7476 | 7490 | 6862 | 7512 | 7475 | 7562 | 7538 |
| | 7536 | 7559 | 212 | 200 | 2238 | 3159 | 8122 | 1753 | 435 | 442 | 2337 | 3280 |
| | 3274 | 8476 | 5502 | 6810 | 2934 | 4335 | 3380 | 8421 | 1125 | 1368 | | |
| 92: | 4117 | 4611 | 3810 | 2575 | 6435 | 3730 | 689 | 8501 | 7519 | 5065 | 7840 | 1174 |
| | 8079 | 3550 | 8678 | 8411 | 9895 | 1790 | 4481 | 2401 | 2373 | 1224 | | |
| 93: | 3314 | 5148 | 1284 | 2180 | 7766 | 9728 | 8528 | 6328 | 7621 | 9726 | 1134 | 7569 |
| | 7567 | 5040 | 7727 | 8537 | 7497 | 8041 | 1784 | 8956 | 8953 | 3029 | 5087 | 7642 |
| | 2764 | 1736 | 6023 | 8126 | 164 | 8296 | 4997 | 6279 | 3822 | 9989 | 6339 | 5750 |
| | 4196 | 2427 | 7030 | 8232 | 2440 | 5671 | 7115 | 6494 | 3608 | | | |
| 94: | 370 | 4530 | 5496 | 2209 | 8764 | 5878 | 2102 | 3133 | 4500 | | | |
| 95: | 7835 | 7905 | 4016 | 3657 | 6757 | 2948 | 2947 | 3710 | 3091 | 4869 | 8309 | 6256 |
| | 3302 | 1832 | 7091 | 9509 | 2972 | 4439 | 667 | 3396 | 7147 | | | |
| 96: | 7080 | 6259 | 8950 | 8331 | 6582 | 1510 | 8054 | 801 | 3389 | 4111 | 2614 | 4255 |
| | 5795 | 2476 | 10023 | 6565 | 3866 | 1300 | 6088 | 7775 | 6346 | 9576 | 8029 | 6701 |
| | 1803 | 4281 | 816 | 2806 | 396 | 2594 | 3089 | | | | | |
| 97: | 6736 | 292 | 4996 | 5983 | 8898 | 6886 | 8845 | 1312 | 9032 | 1586 | 9964 | 9971 |
| | 6476 | 455 | 357 | 6653 | 3756 | 4574 | 3311 | 920 | 3295 | 3443 | 9601 | 6906 |
| | 5214 | 5215 | 5216 | 5217 | 7960 | 7945 | 7009 | 8847 | 4936 | 6359 | 5296 | 6571 |
| | 2233 | 3288 | 8736 | 5420 | 4531 | 9662 | 4891 | 7545 | 7948 | 7980 | 2201 | 9853 |
| | 8153 | 4861 | 8591 | 1746 | 7233 | 8693 | 3252 | 8690 | 709 | 5069 | 9505 | |
| 98: | 9658 | 9420 | 3779 | 6609 | 3006 | 2471 | 3567 | 4983 | 434 | 3565 | 10008 | 8348 |
| | 5728 | 8033 | 8302 | 5426 | 8854 | 6705 | 4160 | 4243 | 9780 | 9744 | 8244 | 4469 |
| | 317 | 152 | 522 | 6171 | 3571 | 3894 | 8512 | 2442 | 9642 | 6255 | 3980 | 3725 |
| 99: | 9060 | 9635 | 3511 | 3575 | 1890 | 1852 | 7041 | 4217 | 2648 | 156 | 2833 | 8456 |
| | 7232 | 8503 | 5709 | 8742 | 6107 | 9824 | 9121 | 1142 | 886 | 9105 | 8210 | 2910 |
| 100: | 9526 | 1911 | 5622 | 9279 | 2726 | 1935 | 4608 | 7672 | 9536 | 4429 | 260 | 4235 |
| | 356 | 5588 | 4995 | 2426 | 5771 | 4203 | 1942 | 6086 | 3697 | 2322 | 9359 | 1534 |
| | 9550 | 1034 | 8012 | 7732 | 7017 | 1448 | | | | | | |
| 101: | 4840 | 6812 | 777 | 7939 | 1059 | 6995 | 5721 | 4881 | 5741 | 9047 | 566 | 3050 |
| | 8123 | 2590 | 8060 | 4040 | 6354 | 2078 | 2081 | 3304 | 2079 | 3305 | 2734 | 1841 |
| | 9901 | 9621 | 1060 | 6385 | 3676 | 2300 | 1773 | 9674 | 4263 | 7267 | 9920 | 7962 |
| | 1042 | 6416 | 8813 | 2382 | 4599 | 5670 | 3931 | 4207 | 2985 | 400 | 5678 | 2687 |
| | 7693 | 5971 | 2534 | 4262 | 9246 | 1286 | 9506 | 3796 | 9450 | 271 | 6880 | 5182 |
| | 6830 | 3290 | 2631 | 572 | 3716 | 9890 | 9594 | 9073 | 7979 | 8835 | 7060 | 503 |
| | 4838 | 6333 | 2562 | 8179 | 3698 | 4825 | 8783 | 2604 | 673 | 2632 | 5822 | 3084 |
| | 9095 | 9913 | 3912 | 9850 | 7102 | 7121 | 4583 | 5132 | 3859 | 3618 | 4979 | 1024 |
| | 4655 | 9239 | 1027 | 3466 | 8177 | 1137 | 6704 | 1902 | 3898 | 6320 | 3990 | 8921 |
| | 9789 | 7780 | 1867 | 720 | 7797 | 8984 | 8792 | 6677 | 2787 | 6486 | 4974 | 7096 |
| | 6414 | 1120 | 4261 | 4688 | 9633 | 7118 | 1304 | 7906 | 4639 | 8137 | 6317 | 6512 |
| | 5194 | 7524 | 3719 | 8879 | 5892 | 6719 | 10015 | 2432 | 5524 | 5347 | 4620 | 7838 |
| | 2349 | 3742 | 3336 | 8156 | 4407 | 751 | 9048 | 1574 | 8745 | 9064 | 5982 | 3677 |
| | 3335 | 8828 | 2296 | 6016 | 2954 | 2083 | 7531 | 750 | 6967 | 8907 | 4754 | 7306 |
| | 9325 | 8831 | 8687 | 6604 | 8124 | 953 | 5357 | 6150 | 4106 | 7305 | 448 | 7370 |
| | 2848 | 4299 | 6468 | 9430 | 4333 | 9395 | 6953 | 5311 | 6493 | 5514 | 1883 | 2876 |
| | 4693 | 645 | 4187 | 4174 | 955 | 2372 | 7506 | 9290 | 4134 | 4176 | 2986 | 9835 |
| | 4353 | 3004 | 4350 | 4916 | 2653 | 9517 | 5416 | 2953 | 2619 | 8038 | 8443 | 5903 |
| | 8092 | 4082 | 5327 | 1767 | 1761 | 1781 | 1763 | 9578 | 9787 | 3277 | 4719 | 7767 |
| | 4559 | 3285 | 7164 | 1444 | 6028 | 2320 | 6608 | 1684 | 1706 | 1687 | 1710 | 7111 |
| | 7099 | 5737 | 6814 | 6811 | 386 | 1976 | 9411 | 7973 | 2663 | 5521 | 9734 | 8257 |
| | 5695 | 2667 | 1484 | 5781 | 1479 | 2298 | 9281 | 9280 | 9689 | 502 | 6909 | 4165 |
| | 426 | 2941 | 8935 | 9201 | 1089 | 5055 | 7239 | 831 | 1203 | 9814 | 9688 | 385 |
| | 7326 | 6723 | 7768 | 5838 | 2982 | 242 | 2577 | 3232 | 9055 | 8305 | 5794 | 7974 |
| | 6114 | 3340 | 1764 | 5723 | 5940 | 5567 | 5093 | 9792 | 1635 | 7645 | 4958 | 6863 |
| | 2987 | 9330 | 3245 | 9438 | 4298 | 534 | 3316 | 5125 | 6755 | 4873 | 1065 | 6730 |
| | 6904 | 3603 | 5948 | 6903 | 9042 | 2384 | 3197 | 1325 | 9053 | 5820 | 971 | 3970 |
| | 7014 | 4645 | 2517 | 5757 | 7712 | 3115 | 3116 | 3113 | 6008 | 3494 | 9096 | 9270 |
| | 8942 | 5369 | 3727 | 5382 | 6563 | 7718 | 4888 | 3393 | 9383 | 834 | | |
| 102: | 4624 | 1430 | 1961 | 1964 | 5156 | 999 | 3374 | 6267 | 4084 | 9627 | 4383 | 1556 |
| | 1098 | 783 | 6842 | 7112 | 7177 | 7189 | 4841 | 9547 | 456 | 3255 | 2850 | 8504 |
| | 1846 | 9224 | 7752 | 1367 | 8373 | 3039 | 6783 | 3653 | 4153 | 6429 | 9457 | 8323 |
| | 4252 | 6669 | 202 | 162 | 8940 | 1117 | 956 | 5660 | 7829 | 5669 | 4893 | 5253 |
| | 9367 | 6594 | 4400 | 6788 | | | | | | | | |
| 103: | 4624 | 9456 | 5156 | 999 | 6267 | 3374 | 4084 | 5394 | 6413 | 7397 | 8169 | 6610 |
| | 9718 | 7876 | 4383 | 1098 | 1556 | 783 | 7112 | 3279 | 6197 | 9663 | 6252 | 7970 |
| | 7356 | 4596 | 1390 | 5051 | 5754 | 7566 | 980 | 5947 | 6353 | 2721 | 2365 | 3317 |
| | 2005 | 5483 | 8362 | 7498 | 6681 | 1616 | 4872 | 1367 | 6742 | 1167 | 8605 | 7077 |
| | 3202 | 8267 | 3674 | 8623 | 7344 | 6893 | 869 | 8068 | 1122 | 1124 | 3653 | 4153 |
| | 6429 | 9457 | 8101 | 8228 | 1091 | 8323 | 5427 | 3242 | 9678 | 7829 | 5669 | 6594 |
| | 4893 | 157 | 2141 | 2249 | 205 | 7148 | 4801 | 1348 | 5789 | 371 | 9957 | 3281 |
| | 2933 | 6102 | 9219 | 4400 | 7744 | | | | | | | |
| 104: | 4624 | 9456 | 5156 | 999 | 6267 | 4084 | 5394 | 6413 | 7397 | 8169 | 9718 | 6610 |
| | 7876 | 1098 | 4383 | 1556 | 783 | 5129 | 3279 | 6197 | 7970 | 4596 | 7356 | 1390 |
| | 5051 | 5754 | 7566 | 5947 | 980 | 6353 | 2721 | 2365 | 3317 | 7189 | 7177 | 456 |
| | 1367 | 6742 | 1167 | 3202 | 7077 | 8605 | 8623 | 8267 | 3368 | 7344 | 6893 | 3674 |
| | 6783 | 8068 | 9341 | 3935 | 4153 | 6429 | 9457 | 8101 | 3987 | 9140 | 3035 | 238 |
| | 8323 | 5427 | 3242 | 7829 | 5669 | 6594 | 4893 | 157 | 2141 | 205 | 2249 | 7148 |
| | 4801 | 4054 | 1348 | 5789 | 9493 | 8525 | 371 | 9957 | 3281 | 2933 | 6102 | 9219 |
| | 4400 | 6788 | 9027 | | | | | | | | | |
| 105: | 7812 | 882 | 3025 | 2739 | 5708 | 3306 | 1560 | 7612 | 5164 | 8369 | 4656 | 9015 |
| | 2778 | 2824 | 4488 | 9482 | 4490 | 7160 | 1576 | 8990 | 3445 | 9496 | 1081 | 8581 |
| | 8589 | 9860 | 6511 | 559 | 8419 | 7407 | 6212 | 6227 | 9129 | 4498 | 7269 | 8072 |
| | 9605 | 1531 | 7089 | 1967 | 8562 | 9391 | 1385 | 7893 | 1070 | 3042 | 8370 | 8206 |
| | 1811 | 5662 | 5196 | 4406 | 4389 | 5144 | 4681 | 4683 | 4661 | 7698 | 3800 | 6641 |
| | 7414 | 4547 | 9756 | 5711 | 5714 | 4033 | 4037 | 4039 | 4035 | 948 | | |
| 106: | 9402 | 8595 | 2366 | 8382 | 1968 | 3420 | 6998 | 1544 | 1165 | 8998 | 1193 | 5810 |
| | 8051 | 1252 | 8171 | | | | | | | | | |
| 107: | 1291 | 7911 | 2740 | 6326 | 1417 | 8943 | 7052 | 3303 | 9661 | 5223 | 7511 | 5891 |
| | 5111 | 6321 | 4259 | 4424 | 4358 | 9191 | 2891 | 8424 | 8353 | 2521 | 6427 | 1960 |
| | 355 | 5300 | 5739 | 2460 | 3831 | 6920 | 9695 | 6754 | 4501 | 2964 | 4399 | 7640 |
| | 8431 | 7924 | 3977 | 1557 | 2027 | 3409 | 1651 | 8086 | 9083 | 8265 | 313 | 1774 |
| | 2339 | 1155 | 8549 | 234 | 6176 | 5862 | 3417 | 4736 | 6612 | 2434 | | |
| 108: | 3765 | 171 | 1106 | 382 | 6195 | 8056 | 5268 | 5113 | 472 | 8844 | 4982 | 666 |
| | 8778 | 6706 | 7739 | 2918 | 9074 | 3017 | 4218 | 9363 | 9914 | 5967 | 7796 | 9712 |
| | 5449 | 5635 | 9520 | | | | | | | | | |
| 109: | 1826 | 2705 | 9393 | 2425 | 1213 | 7660 | 9089 | 9054 | 4327 | 3778 | 303 | 4458 |
| | 9486 | 6741 | 5431 | 6169 | 3381 | 1431 | 930 | 1853 | 2573 | 4821 | 8454 | 5435 |
| | 1573 | | | | | | | | | | | |
| 110: | 5969 | 7138 | 7828 | 3577 | 489 | 5529 | 6737 | 9681 | 6534 | 1722 | 8881 | 4557 |
| | 8810 | 4325 | 7209 | 9670 | 5063 | 2588 | 3570 | 2468 | 3921 | 9958 | 9301 | 5466 |
| | 3869 | 3523 | 1591 | 5729 | 9783 | 2404 | 7123 | 10012 | 1898 | 2921 | 1361 | 2199 |
| | 6079 | 4823 | 6562 | 3582 | 4198 | 2988 | 1673 | 9091 | 6045 | 745 | 7254 | 4887 |
| | 977 | 564 | 9761 | 790 | 3944 | 608 | 1196 | 5222 | 966 | 8036 | 326 | 1477 |
| | 2535 | 9234 | 1206 | 4824 | 2506 | 5853 | 1778 | 6765 | 919 | 8702 | 4812 | 5353 |
| | 1322 | 3733 | 5817 | 3053 | 4591 | 5238 | 4483 | 786 | 852 | 3201 | 1588 | 7489 |
| | 5700 | 2914 | 5503 | 2660 | 2500 | 2582 | 8351 | 2766 | 9436 | 4685 | 9940 | 4443 |
| | 8414 | 1785 | 1349 | 417 | 5680 | 3107 | 1447 | 4089 | 3425 | 2643 | 8291 | 7197 |
| | 5541 | 6047 | 4613 | 2239 | 7734 | 4497 | 881 | 7549 | 2390 | 7637 | 6418 | 5266 |
| | 5855 | 5325 | 7607 | 3119 | 859 | 3220 | 1382 | 4268 | 240 | 5654 | 3739 | 8059 |
| | 4397 | 806 | 301 | 2748 | 4529 | 838 | 9166 | 769 | 7471 | 8997 | 2099 | 1829 |
| | 3560 | 8685 | 3440 | 4648 | 6234 | 642 | 8422 | 3978 | 1239 | 3217 | 755 | 3790 |
| | 2682 | 1051 | 5269 | 8390 | 6076 | 676 | 6647 | 1805 | 8971 | 7955 | 788 | 2675 |
| | 161 | 8217 | 9631 | 9610 | 2898 | 569 | 3240 | 6155 | 3722 | 2713 | 9746 | 5523 |
| | 6768 | 5103 | 4879 | 6805 | 6194 | 5775 | 7593 | 7966 | 1217 | 1068 | 592 | 5777 |
| | 2301 | 9364 | 7176 | 1747 | 7810 | | | | | | | |
| 111: | 1848 | 7581 | 8716 | 1381 | 3763 | 9600 | 464 | 830 | 1454 | 2697 | 1946 | 3371 |
| | 3331 | 5569 | 5388 | 8095 | 1812 | 8144 | 5798 | 9118 | 4416 | 2526 | 6791 | 6506 |
| | 2295 | 1757 | 521 | 807 | 6077 | 9190 | 8758 | 1157 | 2605 | 5928 | 4987 | 256 |
| | 8104 | 3453 | 5802 | 9866 | 374 | 6761 | | | | | | |
| 112: | 3041 | 1135 | 1343 | 4097 | 5330 | 4575 | 1412 | 1253 | | | | |
| 113: | 7726 | 7410 | 8023 | 8039 | 8037 | 3318 | 7855 | 3370 | 1661 | 7688 | 5627 | 4943 |
| | 8955 | 8914 | 4862 | 1500 | 344 | 3426 | 5227 | 3502 | 293 | 9110 | 3083 | 2887 |
| | 9766 | 1619 | 6856 | 2546 | 6874 | 6190 | 6923 | 5100 | 4621 | 9470 | 8754 | 9389 |
| | 6376 | 6441 | 4422 | 9154 | 345 | 457 | 6292 | 571 | 1061 | 3909 | 4751 | 2793 |
| | 5101 | 4673 | 4878 | 3491 | 6065 | 7011 | 7632 | 5390 | 4909 | 8328 | 5391 | 6022 |
| | 9063 | 1804 | 3189 | 3803 | 880 | 2123 | 2931 | 6650 | 7789 | 2392 | 3478 | 2204 |
| | 1188 | 1993 | 6419 | 5463 | 1704 | 1718 | 4102 | 6349 | 4776 | 8793 | 1919 | 7221 |
| | 1154 | 8756 | 3192 | 1603 | 8648 | 1347 | 1692 | 9684 | 3073 | 3212 | 8125 | 1563 |
| | 5012 | 2143 | 2731 | 10006 | 5240 | 4915 | 7389 | 1729 | 7639 | 6319 | 844 | 2263 |
| | 6343 | 891 | 3352 | 590 | 593 | 578 | 591 | 8035 | 6049 | 6731 | 7592 | 1145 |
| | 7686 | 9079 | 4699 | 5323 | 4303 | 1000 | 579 | 340 | 9696 | 539 | 7817 | 7814 |
| | 352 | 6724 | 1917 | 3594 | 8858 | 8853 | 8855 | 1866 | 2559 | 5673 | | |
| 114: | 9538 | 6322 | 7202 | 4360 | 8216 | 2187 | 2190 | 2706 | 8864 | 7631 | 4191 | 753 |
| | 4188 | 3875 | 4002 | 8728 | 5819 | 8780 | 4946 | 5823 | 5429 | 9409 | 4797 | 1914 |
| | 9292 | 4470 | 1705 | 8384 | 2457 | 7603 | 5603 | 8655 | 376 | 7135 | 3249 | 3241 |
| | 5239 | 1064 | 1066 | 7518 | 6038 | 6924 | 3213 | 3207 | 5845 | 2936 | 6683 | 5372 |
| | 10011 | 9763 | 9153 | 4074 | 4666 | 7043 | 8312 | 4569 | 1296 | 3499 | 3846 | 5324 |
| | 5997 | 7365 | 3321 | 2810 | 4489 | 5162 | 9846 | 1282 | 8791 | 5848 | 5696 | 6367 |
| | 5854 | 3923 | 6828 | 9284 | 2736 | 6767 | 4015 | 4001 | 7119 | 7128 | 6819 | 6637 |
| | 6746 | 5893 | 8436 | 3198 | 954 | 9398 | 4215 | 6750 | 1094 | 429 | 6157 | 7446 |
| | 5377 | 6108 | 7283 | 2695 | 597 | 5092 | 227 | 5082 | 143 | 142 | 4345 | 4731 |
| | 5584 | 4024 | 1933 | 9022 | 1446 | 8586 | 6315 | 9886 | 8896 | 1441 | 3322 | 2485 |
| | 9887 | 1859 | 4473 | 4598 | 1725 | 1723 | 1711 | 1727 | 4684 | 1789 | 3375 | 2128 |
| | 1830 | 7859 | 7156 | 4538 | 461 | 5632 | 4722 | 4804 | 449 | 7646 | 4227 | 5060 |
| | 4568 | 5604 | 6193 | 2360 | 3728 | 5736 | 1183 | 4672 | 3037 | 9327 | 688 | 466 |
| | 1275 | 1707 | 2012 | 6397 | 463 | 3789 | 2075 | 6517 | 6083 | 2533 | 2036 | 726 |
| | 6533 | 899 | 8318 | 6219 | 508 | 312 | 5191 | 1874 | 4144 | 704 | 762 | 1810 |
| | 4409 | 6251 | 5115 | 4914 | 526 | 3447 | 1665 | 9116 | 2732 | 5462 | 7997 | 1995 |
| | 8681 | 1540 | 3384 | 9404 | 2304 | 4761 | 3200 | 9823 | 622 | 1354 | 5145 | 9265 |
| | 1685 | 8769 | 8873 | 8475 | 1862 | 5428 | 3807 | 1585 | 1457 | 9535 | 7023 | 7207 |
| | 8840 | 3150 | 7215 | 4107 | 3879 | 4554 | 1912 | 9215 | 1955 | 2217 | 4314 | 6198 |
| | 6851 | 7248 | 3714 | 1842 | 6726 | 3068 | 1234 | 1314 | 8417 | 5801 | 6952 | 7120 |
| | 2118 | 643 | 7187 | 7053 | 7671 | 9298 | 4633 | 4795 | 2872 | 634 | 6275 | 3390 |
| | 5246 | | | | | | | | | | | |
| 115: | 6527 | 5534 | 7630 | 1822 | 3812 | 8830 | 7349 | 8173 | 8230 | 6454 | 823 | 5742 |
| | 7635 | 2370 | 6734 | 3441 | 7401 | 1825 | 7723 | 1776 | 8502 | 4376 | 9849 | 8505 |
| | 9918 | 1246 | 5086 | 9880 | 5477 | 1168 | 6035 | 263 | 6347 | 7450 | 4783 | 8460 |
| | 3576 | 1626 | 1550 | 6648 | 3860 | 6467 | 9774 | 1264 | 5066 | 3347 | 9869 | 4031 |
| | 1128 | 9691 | 6162 | 7227 | 3529 | 3184 | 3182 | 6301 | 6712 | | | |
| 116: | 6340 | 2512 | 9223 | 8511 | 1411 | 9838 | 4614 | 2313 | 8017 | 3726 | 7853 | 4136 |
| | 7242 | 5908 | 4839 | 3629 | 2463 | 8002 | 685 | 2572 | 5679 | 9641 | 5049 | 6231 |
| | 3777 | 9346 | 570 | 2598 | 5766 | 4493 | 1856 | 3171 | 633 | 3079 | 3519 | 6914 |
| | 6119 | 4782 | 9549 | 944 | 6394 | 1818 | 3916 | 7353 | 2995 | 5902 | 2095 | 747 |
| | 9917 | 9933 | 4752 | 4734 | 4779 | 493 | 3829 | 5900 | 7925 | 2928 | 2157 | 1988 |
| | 7313 | 4921 | 4689 | 9543 | 1857 | 4528 | 407 | 9514 | 9214 | 3665 | 3506 | 2973 |
| | 3045 | 4875 | 6374 | 6390 | 4895 | 6392 | 6393 | 8200 | 4551 | 6433 | 5790 | 2532 |
| | 6707 | 8937 | 4894 | 7719 | 7722 | 6196 | 4546 | 7019 | 6334 | 5718 | 2693 | 8868 |
| | 8337 | 7624 | 8084 | 5368 | 1792 | 1809 | 5308 | 5291 | 3604 | 2470 | 4720 | 1363 |
| | 2244 | 6555 | 1691 | 5954 | 5228 | 5208 | 5224 | 3448 | 5362 | 9613 | 5230 | 7162 |
| | 8616 | 2935 | 5756 | 4391 | 4390 | 4378 | 9775 | 1461 | 914 | 4939 | 6668 | 2178 |
| | 4494 | 4491 | 4492 | 4447 | 4446 | 4398 | 4401 | 4423 | 3968 | 4462 | 6837 | 7793 |
| | 8451 | 922 | 9304 | 4070 | 7852 | 1526 | 1527 | 2223 | 387 | 246 | 1554 | 8977 |
| | 6547 | 3865 | 1386 | 684 | 8322 | 252 | 248 | 249 | 4690 | 2214 | 7084 | 6873 |
| | 328 | 9533 | 8682 | 4926 | 4698 | 7268 | 2344 | 9907 | 6963 | 6033 | 7577 | 297 |
| | 5424 | 3515 | 8897 | 9306 | 2854 | 9203 | 7342 | 949 | 6487 | 8468 | 2389 | 9019 |
| | 6360 | 377 | 9321 | 7871 | 1683 | 1290 | 4183 | 3397 | 3219 | 4855 | 4853 | 7564 |
| | 8066 | 2391 | 2364 | 2341 | 2308 | 2336 | 2359 | 2312 | 2355 | 2291 | 8674 | 8676 |
| | 2309 | 2334 | 2338 | 2293 | 6361 | 5880 | 4164 | 2896 | 8031 | 6630 | 5425 | 7499 |
| | 1442 | | | | | | | | | | | |
| 117: | 3877 | 5727 | 4241 | 1513 | 5672 | 903 | 2629 | 7240 | 1570 | 3522 | 6209 | 6399 |
| | 7453 | 4618 | 848 | 9822 | 1978 | 8047 | 7126 | 9241 | 3754 | 6401 | 6838 | 8863 |
| | 8632 | 7454 | 5580 | 8522 | 7895 | | | | | | | |
| 118: | 3495 | 5400 | 9889 | 6676 | 3537 | 2811 | 5961 | 7327 | 7081 | 3672 | 180 | 3487 |
| | 729 | 9474 | 1384 | 3951 | 5271 | 717 | 7942 | 6235 | 5455 | 4990 | 9372 | 1754 |
| | 1073 | 6133 | 7304 | 7521 | | | | | | | | |
| 119: | 9634 | 7978 | 4066 | 4065 | 2009 | 5886 | 5171 | 8727 | 7846 | 9806 | 2815 | 4941 |
| | 1225 | 8445 | 4436 | 2407 | 3775 | 5616 | 4453 | 5778 | 6515 | 6090 | 4925 | 4646 |
| | 5370 | 6739 | 7765 | 4381 | 8172 | 1108 | 1839 | 7443 | 330 | 7806 | 7804 | 1251 |
| | 7085 | 1192 | 1195 | 8607 | 6203 | 9771 | 698 | 8705 | 5590 | 5598 | 5592 | 5596 |
| | 3601 | 9117 | 2765 | 3559 | 343 | 7898 | 8931 | 3693 | 3692 | 1611 | 1610 | 365 |
| | 5981 | 1171 | 764 | 5611 | 5444 | 5881 | 8797 | 7530 | 2017 | 8983 | 2997 | 2930 |
| | 6738 | 5270 | 1786 | 9245 | 3759 | 1888 | 4980 | 6122 | 5354 | 3372 | 9297 | 5120 |
| 120: | 9228 | 4471 | 4904 | 8878 | 2071 | 9785 | 822 | 6100 | 8130 | 8957 | 6961 | 1787 |
| | 9828 | 6974 | 5058 | 6048 | 2058 | 1334 | 8704 | 4992 | 625 | 3328 | 4222 | 2494 |
| | 8453 | 5397 | 4969 | 4450 | 4318 | 2859 | 1370 | 1074 | 323 | 8974 | 4426 | 6663 |
| | 5231 | 4130 | 5715 | 6857 | 4963 | 5687 | 5392 | 8795 | 5871 | 8912 | 6299 | 1801 |
| | 2634 | 2636 | 1802 | 3896 | 9268 | 8278 | 3174 | 7026 | 7220 | 8074 | 8650 | 9102 |
| | 9287 | 7583 | 7097 | 8408 | 7371 | 7667 | 195 | 5536 | 2730 | 3535 | 2115 | 4088 |
| | 1078 | 5734 | 6232 | 6400 | 5785 | 9041 | 5946 | 5806 | 533 | 6762 | 5167 | 3509 |
| | 7720 | 6425 | 1775 | 5393 | 9808 | 2671 | 5316 | 1712 | 9504 | 4010 | 5818 | 4041 |
| | 4667 | 2542 | 3854 | 9371 | 235 | 4204 | 6216 | 4774 | 1599 | 2661 | 3975 | 8489 |
| | 1947 | 6860 | 3465 | 9213 | 3323 | 6144 | 9350 | 1311 | 6868 | 1029 | 5543 | 7654 |
| | 5689 | 9138 | 4901 | 3646 | 4370 | 5447 | 3568 | 9049 | 191 | 9432 | 7500 | 3216 |
| | 1937 | 1287 | 2215 | 3057 | 4331 | 2431 | 3662 | 2335 | 4680 | 9924 | 9464 | 9069 |
| | 2446 | 1136 | 9899 | 6634 | 3821 | 7491 | 5743 | 3818 | 5952 | 7694 | 5008 | 7044 |
| | 427 | 2844 | 993 | 3332 | 3542 | 9555 | 7509 | 2655 | 9733 | 5930 | 9935 | 2885 |
| | 3456 | 4859 | 5366 | 9953 | 703 | 1152 | 8430 | 4437 | 7699 | 8295 | 1423 | 695 |
| | 8683 | 1317 | 3715 | 6834 | 613 | 3411 | 1147 | 6674 | 3578 | 9109 | 2999 | 7881 |
| | 8241 | 6528 | 3430 | 2831 | 9772 | 7685 | 4897 | 7480 | 601 | 7250 | 9392 | 2656 |
| | 8567 | 4984 | 3736 | 9512 | 9647 | 5430 | 4593 | 748 | 6576 | 8827 | 3346 | 9892 |
| | 4300 | 3364 | 7086 | 6670 | 4459 | 7543 | 3063 | 3463 | 5232 | 5575 | 9624 | 1514 |
| | 1882 | 4732 | 5860 | 3475 | 5168 | 6684 | 6581 | 6437 | 8357 | 2423 | 4876 | 2589 |
| | 4866 | 4870 | 2803 | 6735 | 8307 | 4675 | 4142 | 798 | 2816 | 5545 | 867 | 2253 |
| | 5522 | 3595 | 2944 | 1158 | 840 | 7251 | 6225 | 8152 | 6818 | 7384 | 8440 | 8966 |
| | 5155 | 6030 | 7494 | 5408 | 8341 | 7914 | 7909 | 1602 | 8527 | 9112 | 2828 | 2829 |
| | 5360 | 4922 | 4427 | 459 | 9254 | 1278 | 7587 | 10010 | 5614 | 5712 | 6699 | 1041 |
| | 6085 | 1953 | 5422 | 1038 | 1533 | 8211 | 5116 | 4737 | 7492 | 9123 | 1237 | 3782 |
| | 5218 | 8775 | 8058 | 7078 | 9592 | 1095 | 9142 | 325 | 368 | 4520 | 6553 | 5378 |
| | 6134 | 8299 | 1309 | 2520 | 7542 | 9412 | 7800 | 6452 | 5355 | 3976 | 9725 | 7636 |
| | 7309 | 525 | 9834 | 4503 | 5283 | 870 | 5203 | | | | | |
| 121: | 9228 | 4471 | 4904 | 8878 | 2071 | 9785 | 822 | 6100 | 8130 | 8957 | 6961 | 1787 |
| | 9828 | 6974 | 5058 | 6048 | 2058 | 1334 | 8704 | 4992 | 625 | 3328 | 4222 | 2494 |
| | 8453 | 5397 | 4969 | 4450 | 4318 | 2859 | 1370 | 1074 | 323 | 8974 | 4426 | 6663 |
| | 5231 | 4130 | 5715 | 6857 | 4963 | 5687 | 5392 | 8795 | 5871 | 8912 | 6299 | 1801 |
| | 2634 | 2636 | 1802 | 3896 | 9268 | 8278 | 3174 | 7026 | 7220 | 8074 | 8650 | 9102 |
| | 9287 | 7583 | 7097 | 8408 | 7371 | 7667 | 195 | 5536 | 2730 | 3535 | 2115 | 4088 |
| | 1078 | 5734 | 6232 | 6400 | 5785 | 9041 | 5946 | 5806 | 533 | 6762 | 5167 | 3509 |
| | 7720 | 6425 | 1775 | 5393 | 9808 | 2671 | 5316 | 1712 | 9504 | 4010 | 5818 | 4041 |
| | 4667 | 2542 | 3854 | 9371 | 235 | 4204 | 6216 | 4774 | 1599 | 2661 | 3975 | 8489 |
| | 1947 | 6860 | 3465 | 9213 | 3323 | 6144 | 9350 | 1311 | 6868 | 1029 | 5543 | 7654 |
| | 5689 | 9138 | 4901 | 3646 | 4370 | 5447 | 3568 | 9049 | 191 | 9432 | 7500 | 3216 |
| | 1937 | 1287 | 2215 | 3057 | 4331 | 2431 | 3662 | 2335 | 4680 | 9924 | 9464 | 9069 |
| | 2446 | 1136 | 9899 | 6634 | 3821 | 7491 | 5743 | 3818 | 5952 | 7694 | 5008 | 7044 |
| | 427 | 2844 | 993 | 3332 | 3542 | 9555 | 7509 | 2655 | 9733 | 5930 | 9935 | 2885 |
| | 3456 | 4859 | 5366 | 9953 | 703 | 1152 | 8430 | 4437 | 7699 | 8295 | 1423 | 695 |
| | 8683 | 1317 | 3715 | 6834 | 613 | 3411 | 1147 | 6674 | 3578 | 9109 | 2999 | 7881 |
| | 8241 | 6528 | 3430 | 2831 | 9772 | 7685 | 4897 | 7480 | 601 | 7250 | 9392 | 2656 |
| | 8567 | 4984 | 3736 | 9512 | 9647 | 5430 | 4593 | 748 | 6576 | 8827 | 3346 | 9892 |
| | 4300 | 3364 | 7086 | 6670 | 4459 | 7543 | 3063 | 3463 | 5232 | 5575 | 9624 | 1514 |
| | 1882 | 4732 | 5860 | 3475 | 5168 | 6684 | 6581 | 6437 | 8357 | 2423 | 4876 | 2589 |
| | 4866 | 4870 | 2803 | 6735 | 8307 | 4675 | 4142 | 798 | 2816 | 5545 | 867 | 2253 |
| | 5522 | 3595 | 2944 | 1158 | 840 | 7251 | 6225 | 8152 | 6818 | 7384 | 8440 | 8966 |
| | 5155 | 6030 | 7494 | 5408 | 8341 | 7914 | 7909 | 1602 | 8527 | 9112 | 2828 | 2829 |
| | 5360 | 4922 | 4427 | 459 | 9254 | 1278 | 7587 | 10010 | 5614 | 5712 | 6699 | 1041 |
| | 6085 | 1953 | 5422 | 1038 | 1533 | 8211 | 5116 | 4737 | 7492 | 9123 | 1237 | 3782 |
| | 5218 | 8775 | 8058 | 7078 | 9592 | 1095 | 9142 | 325 | 368 | 4520 | 6553 | 5378 |
| | 6134 | 8299 | 1309 | 2520 | 7542 | 9412 | 7800 | 6452 | 5355 | 3976 | 9725 | 7636 |
| | 7309 | 525 | 9834 | 4503 | 5283 | 870 | 5203 | | | | | |
| 122: | 5149 | 8274 | 1269 | 5690 | 5410 | 6173 | 3556 | 3468 | 4438 | 1208 | 5663 | 545 |
| | 7791 | 167 | 8526 | 3554 | 3890 | 5517 | 2633 | 5799 | 7332 | 3855 | | |
| 123: | 6613 | 2955 | 6069 | 4371 | 9778 | 2358 | 6094 | 6089 | 6526 | 8516 | 5547 | 6071 |
| | 3313 | 6112 | 4034 | 2957 | 2978 | 5525 | 5509 | 5531 | 5528 | 5561 | 5607 | 5578 |
| | 5565 | 5581 | 5579 | 5526 | 5533 | 8275 | 9649 | 3706 | 6832 | 6350 | 5088 | 1150 |
| | 1439 | 5916 | 5281 | 2689 | 4704 | 6036 | 7641 | 3679 | 9051 | 6455 | 6836 | 861 |
| | 3525 | 9267 | 551 | 1047 | 9231 | 6871 | 6525 | 6523 | 3862 | 6179 | 7206 | 2549 |
| | 3992 | 178 | 3349 | 2003 | 9082 | 2354 | 3011 | 3013 | 6910 | 9731 | 555 | 1033 |
| | 8344 | 6990 | 7131 | 5177 | 8976 | 9092 | 1601 | 1598 | 1608 | 8048 | 8418 | 3451 |
| | 7002 | 4523 | 8340 | 5474 | 2917 | 7702 | 4505 | 7759 | 6992 | 6991 | 4145 | 9590 |
| | 9714 | 3423 | 9656 | 7573 | 3644 | 350 | 6892 | 6889 | 403 | 423 | 9597 | 10004 |
| | 8938 | 1952 | 9076 | 2084 | 3308 | 849 | 8160 | 1899 | 2114 | 8649 | 3702 | 4565 |
| | 6473 | 4071 | 5833 | 2038 | 3309 | 9303 | 3587 | 3472 | 9061 | 6685 | 194 | 646 |
| | 6121 | 5506 | 2376 | 9559 | 2417 | 3376 | 3360 | 1834 | 9759 | 2899 | 2901 | 6629 |
| | 5631 | 7670 | 8613 | 2962 | 9803 | 2743 | 2363 | 6848 | 9146 | 8108 | 8882 | 1697 |
| | 9779 | 3960 | 9830 | 4022 | 7740 | 4346 | 4615 | 3012 | 2583 | 803 | 5888 | 8151 |
| | 1450 | 8428 | 6588 | 5909 | 3963 | 6185 | 5814 | 1539 | 274 | 3076 | 10003 | 10005 |
| | 1221 | 1737 | 4288 | 6470 | 8686 | 2601 | 6469 | 5276 | 2937 | 6200 | 5380 | 172 |
| | 7523 | 9242 | 1590 | 266 | 973 | 7743 | 1032 | 9357 | 5552 | 9716 | 3259 | 6628 |
| | 3263 | 4120 | 3258 | 2581 | 3260 | 4555 | 5197 | 1295 | 7028 | 5131 | 9343 | 8641 |
| | 5953 | 2790 | 4533 | 3684 | 6756 | 8425 | 7620 | 9044 | 4484 | 4442 | 6589 | 7205 |
| | 2544 | 5999 | 5110 | 7690 | 3707 | 6257 | 8989 | 5519 | 4451 | 9747 | 4199 | 8386 |
| | 3597 | 3792 | 4276 | 797 | 2990 | 3048 | 5601 | 359 | 7576 | 1657 | 3740 | 8176 |
| | 9455 | 612 | 694 | 7192 | 9414 | 7194 | 254 | 581 | 2378 | 2380 | 1235 | 7600 |
| | 1272 | 3830 | 6792 | 5403 | 3464 | 3261 | 6428 | 8573 | 8600 | 9589 | 5505 | 5333 |
| | 2150 | 9945 | 536 | 8952 | 6290 | 8741 | 9349 | 7929 | 6110 | 6101 | 6554 | 6551 |
| | 7005 | 6556 | 2195 | 2194 | 9934 | 6053 | 5550 | 6091 | 6097 | 1294 | 4304 | 6796 |
| | 5401 | 3015 | 3974 | 9921 | 2789 | 8083 | 8082 | 6710 | 8905 | 7514 | 576 | 3319 |
| | 5564 | 4590 | 9666 | 515 | 6745 | 5138 | 5139 | 2130 | 2645 | 6228 | 3562 | 8634 |
| | 9178 | 6536 | 4361 | 3337 | 9699 | 8491 | 7757 | 4905 | 3257 | 7611 | 6743 | 9014 |
| | 3439 | 6120 | 1783 | 1850 | 8136 | 4851 | 661 | 800 | 6654 | 2866 | 1759 | 7551 |
| | 2690 | 4141 | 6430 | 654 | 527 | 7495 | 5412 | 8061 | 2455 | 8022 | 4435 | 4155 |
| | 1201 | 7714 | 5423 | 7689 | 7485 | 7469 | 7473 | 7463 | 7348 | 5512 | 575 | 5548 |
| | 7021 | 6070 | 5585 | 9708 | 3749 | | | | | | | |
| 124: | 7858 | 8376 | 2905 | 7510 | 6066 | 7834 | 594 | 9979 | 7103 | 3214 | 2892 | 4020 |
| 125: | 1965 | 1299 | 9851 | 8509 | 7263 | 1130 | 8178 | 2737 | 8180 | 3769 | 8759 | 9805 |
| | 1981 | 9059 | 8530 | 1473 | 9765 | 4269 | 4292 | 1925 | 7809 | 4290 | 9845 | 314 |
| | 7374 | 231 | 4410 | 7211 | 4323 | 7033 | 6382 | 6485 | 4356 | 7873 | 9342 | 5560 |
| | 5071 | 3031 | 305 | 8559 | 247 | 1595 | 5021 | 4580 | 1249 | 8659 | 3872 | 6504 |
| | 5803 | 5906 | 8242 | 4525 | 8657 | 8070 | 598 | 5089 | 283 | 2903 | 2720 | 7170 |
| | 2274 | 8111 | 2729 | 7063 | 1409 | 2646 | 5774 | 5385 | 2760 | 5834 | 8876 | 7082 |
| | 3856 | 4842 | 5034 | 1645 | 7857 | 1744 | 9722 | 3900 | 2635 | 3326 | 6930 | 444 |
| | 5800 | 4668 | 3489 | 3366 | 3363 | 6548 | 1067 | 6568 | 3580 | 9755 | 462 | 1517 |
| | 3282 | 5254 | 7231 | 5879 | 5640 | 9730 | 8264 | 6866 | 8271 | 8219 | 8982 | 8518 |
| | 7330 | 5152 | 6006 | 362 | 6587 | 3857 | 8189 | 1021 | 4928 | 6146 | 7366 | 1017 |
| | 4985 | 6287 | 269 | 9285 | 8103 | 6140 | 8900 | 8461 | 8042 | 7513 | 1530 | 8908 |
| | 9187 | 7436 | 5320 | 7656 | 1494 | 1750 | 9428 | 8182 | 5863 | 1567 | 4944 | 9088 |
| | 4138 | 3394 | 3493 | 2812 | 5989 | 8558 | 2028 | 7289 | 1771 | 1452 | 9932 | 5027 |
| | 5309 | 2398 | 5097 | 8009 | 201 | 2519 | 8192 | 5965 | 8374 | 8356 | 6799 | 7965 |
| | 6539 | 3530 | 4701 | 563 | 8194 | 7382 | 410 | 5432 | 2428 | 265 | 5697 | 6229 |
| | 331 | 2681 | 8269 | 4012 | 7866 | 7729 | 1913 | 2904 | 4157 | 3917 | | |
| 126: | 5740 | 333 | 3685 | 6489 | 6369 | 4339 | 7931 | 3455 | 392 | 7908 | 5602 | 1268 |
| | 5664 | 6024 | 5557 | 2057 | 1003 | 8161 | 4098 | 8684 | 6875 | 9916 | 6781 | 936 |
| | 9710 | 7735 | 5417 | 7273 | 887 | 5812 | | | | | | |
| 127: | 5856 | 1578 | 7377 | 3621 | 5827 | 3671 | 2110 | 9481 | 4233 | 1104 | 8163 | 9262 |
| | 4971 | 2839 | 3787 | 5613 | 3078 | 2259 | 8139 | 5793 | 3459 | 5929 | 2801 | 2151 |
| | 8722 | 3469 | 2286 | 3100 | 5637 | 6002 | 1085 | 7774 | 3391 | 1250 | 5804 | 1639 |
| | 512 | 660 | 4885 | 7730 | 3038 | 9471 | 9992 | 825 | 7282 | 9937 | 2080 | 2108 |
| | 8747 | 7188 | 1529 | 5986 | 8046 | 6381 | 1331 | 2403 | 209 | 1777 | 8557 | 1506 |
| | 2579 | 8482 | 3343 | 2553 | 565 | 3342 | 3401 | 6464 | 5117 | 8449 | 3528 | 7042 |
| | 1092 | 4056 | 4605 | 3546 | 5074 | 4182 | 6213 | 3686 | 8439 | 7265 | 9894 | 2923 |
| | 4307 | 3005 | 7934 | 287 | 3138 | 6664 | 6013 | 4832 | 4468 | 3283 | 6236 | 9800 |
| | 7555 | 7668 | 2445 | 8349 | 8224 | 8032 | 6172 | 7963 | 7938 | 7860 | 7910 | 7940 |
| | 7907 | 7451 | 8523 | 7548 | 8917 | 4291 | 4210 | 5628 | 7633 | 8801 | 2658 | 5498 |
| | 6844 | 9034 | 992 | 6878 | 638 | 5185 | 3614 | 3001 | 2430 | 5371 | 2297 | 3099 |
| | 3329 | 2769 | 5307 | 818 | 5470 | 1002 | 3141 | 1414 | 9309 | 8679 | 8656 | 5433 |
| | 8459 | 4544 | 7977 | 2596 | 4036 | 6311 | 8615 | 7375 | 4284 | 7400 | 2159 | 1895 |
| | 6521 | 4711 | 1896 | 2666 | 9809 | 1537 | 3569 | 6829 | 6890 | 8347 | 5244 | 2023 |
| | 9596 | 210 | 8696 | 3632 | 3636 | 7413 | 7411 | 3341 | 5996 | 9252 | 6570 | 6106 |
| | 2550 | 827 | 9397 | 7998 | 5434 | 6501 | 421 | 6820 | 4792 | 8862 | 2587 | 1686 |
| | 5844 | 8143 | 2650 | 9719 | 2952 | 7764 | 7310 | 7350 | 4419 | 7343 | 4953 | 2281 |
| | 6922 | 998 | 732 | 4907 | 3656 | 3861 | 7773 | 1362 | 540 | 9872 | 4889 | 4717 |
| | 5358 | 4967 | 3442 | 9026 | 1186 | 1545 | 3768 | 3848 | 397 | 1733 | 7778 | 3230 |
| | 3231 | 2907 | 5201 | 4679 | 4662 | 2132 | 7944 | 9893 | 9351 | 9176 | 7697 | 4264 |
| | 4814 | 2142 | 7990 | 9856 | 9426 | 9361 | 4582 | 1406 | 2310 | 8164 | 8601 | 8738 |
| | 3162 | 3793 | 5143 | 9494 | 8400 | 2046 | 2045 | 4978 | 5677 | 7136 | 2474 | 5014 |
| | 5007 | 5017 | 5011 | 5639 | 3867 | 5691 | 5713 | 4168 | 4184 | 2860 | 1543 | 9881 |
| | 2070 | 8772 | 9552 | 6943 | 577 | 8594 | 2433 | 2435 | 6495 | 9544 | 4137 | 1833 |
| | 9946 | 6276 | 6143 | 6141 | 5825 | 6671 | 5735 | 8848 | 7146 | 7144 | 4623 | 5738 |
| | 184 | 9876 | 7225 | 9462 | 9460 | 9465 | 5910 | 2383 | 4800 | 5870 | 5869 | 273 |
| | 9875 | 9873 | 222 | 9840 | 4786 | 981 | 3797 | 1770 | 4201 | 7394 | 3143 | 9906 |
| | 1220 | 6221 | 4682 | 4697 | 6465 | 7159 | 6643 | 3631 | 3660 | 3640 | 3639 | 3638 |
| | 3635 | 3154 | 3650 | 3082 | 9499 | 1198 | 8043 | 8063 | 9598 | 7101 | 1871 | 1197 |
| | 4535 | 6057 | 7181 | 5995 | 6202 | 934 | 5123 | 5106 | 5576 | 5128 | 6688 | 6678 |
| | 4536 | 952 | 3461 | 5374 | 6774 | 9942 | 1230 | 6306 | 3483 | 5047 | 5450 | 4652 |
| | 9013 | 4964 | 7678 | 5914 | 3945 | 5931 | 5883 | 3330 | 584 | 7843 | 7842 | 7848 |
| | 7868 | 7847 | 4173 | 8628 | 8577 | 8303 | 8804 | 4589 | | | | |
| 128: | 5856 | 1578 | 7377 | 3621 | 5827 | 3671 | 6513 | 2110 | 9481 | 4233 | 1104 | 8163 |
| | 9262 | 4971 | 2839 | 3787 | 5613 | 3078 | 2259 | 8139 | 5793 | 3459 | 5929 | 2801 |
| | 2151 | 8722 | 3469 | 2286 | 3100 | 5637 | 6002 | 1085 | 7774 | 3391 | 1250 | 5804 |
| | 1639 | 512 | 660 | 4885 | 7730 | 3038 | 9471 | 9992 | 825 | 7282 | 9937 | 2080 |
| | 2108 | 8747 | 7188 | 1529 | 5986 | 8046 | 6381 | 1331 | 2403 | 209 | 1777 | 8557 |
| | 1506 | 2579 | 8482 | 3343 | 2553 | 565 | 3342 | 3401 | 3108 | 8272 | 3784 | 4267 |
| | 6464 | 5117 | 8449 | 3528 | 7042 | 1092 | 4056 | 4605 | 3546 | 5074 | 4182 | 6213 |
| | 3686 | 8439 | 7265 | 9894 | 2923 | 4307 | 3005 | 7934 | 287 | 3138 | 6664 | 6013 |
| | 4832 | 4468 | 3283 | 6236 | 9800 | 7555 | 7668 | 2445 | 8349 | 8224 | 8032 | 6172 |
| | 2670 | 7963 | 7938 | 7860 | 7910 | 7940 | 7907 | 7451 | 8523 | 7548 | 8917 | 4291 |
| | 4210 | 5628 | 7633 | 8801 | 2658 | 5498 | 6844 | 9034 | 992 | 6878 | 638 | 5185 |
| | 3614 | 3001 | 2430 | 5371 | 2297 | 3099 | 3329 | 2769 | 5307 | 8420 | 818 | 5470 |
| | 1002 | 3141 | 1414 | 9309 | 8679 | 8656 | 5433 | 8459 | 4544 | 7977 | 2596 | 4036 |
| | 6311 | 8615 | 7375 | 4284 | 7400 | 2159 | 1895 | 6521 | 4711 | 1896 | 2666 | 9809 |
| | 1537 | 3569 | 6829 | 6890 | 8347 | 5244 | 2023 | 9596 | 210 | 8696 | 3632 | 3636 |
| | 7413 | 7411 | 3341 | 5996 | 9252 | 6570 | 6106 | 2550 | 827 | 9397 | 7998 | 5434 |
| | 6501 | 421 | 6820 | 4792 | 8862 | 2587 | 1686 | 5844 | 8143 | 2650 | 9719 | 2952 |
| | 7764 | 7310 | 7350 | 4419 | 7343 | 4953 | 2281 | 6922 | 998 | 732 | 7563 | 4907 |
| | 3656 | 3861 | 7773 | 1362 | 540 | 9872 | 4889 | 4717 | 5358 | 4967 | 3442 | 9026 |
| | 1186 | 1545 | 3768 | 3848 | 397 | 1733 | 7778 | 3230 | 3231 | 2907 | 5201 | 4679 |
| | 4662 | 2132 | 7944 | 9893 | 9351 | 9176 | 7697 | 4264 | 4814 | 2142 | 7990 | 9856 |
| | 9426 | 9361 | 4582 | 1406 | 2310 | 8164 | 8601 | 8738 | 3162 | 3793 | 5143 | 9494 |
| | 8400 | 2046 | 2045 | 4978 | 5677 | 7136 | 2474 | 5014 | 5007 | 5017 | 5011 | 5639 |
| | 3867 | 5691 | 5713 | 4168 | 4184 | 2860 | 1543 | 9881 | 2070 | 8772 | 9552 | 6943 |
| | 577 | 8594 | 2433 | 2435 | 6495 | 9544 | 4137 | 1833 | 9946 | 6276 | 6143 | 6141 |
| | 251 | 5336 | 5825 | 6671 | 5735 | 8848 | 7146 | 7144 | 4623 | 5738 | 184 | 9876 |
| | 7225 | 9462 | 9460 | 9465 | 5910 | 2383 | 4800 | 5870 | 5869 | 273 | 9875 | 9873 |
| | 222 | 9840 | 4786 | 981 | 3797 | 1770 | 4201 | 7394 | 3143 | 9906 | 1220 | 6221 |
| | 4682 | 4697 | 6465 | 5600 | 7159 | 6643 | 3631 | 3660 | 3640 | 3639 | 3638 | 3635 |
| | 3154 | 3650 | 3082 | 9499 | 1198 | 8043 | 8063 | 9598 | 7101 | 1871 | 1197 | 4535 |
| | 6057 | 7181 | 5995 | 6202 | 934 | 5123 | 5106 | 5576 | 5128 | 4166 | 6688 | 6678 |
| | 4536 | 952 | 9386 | 3367 | 3461 | 5374 | 6774 | 9942 | 1230 | 6306 | 3483 | 5047 |
| | 5450 | 4652 | 9013 | 4964 | 7678 | 5914 | 3945 | 5931 | 5883 | 3330 | 584 | 7843 |
| | 7842 | 7848 | 7868 | 7847 | 4173 | 8628 | 8577 | 8303 | 8804 | 4589 | | |
| 129: | 6283 | 2094 | 3062 | 2271 | 6254 | 9056 | 4151 | 3773 | 1819 | 5768 | 1674 | 7328 |
| | 5634 | 9770 | 3114 | 9282 | 6309 | 9704 | 845 | 5395 | 7738 | 5398 | 1796 | 5098 |
| | 1232 | 5972 | | | | | | | | | | |
| 130: | 7784 | 5453 | 9584 | 6859 | 9085 | 5136 | 9525 | 2342 | 2327 | 2326 | 8227 | 3072 |
| | 6540 | 5884 | 9046 | 3774 | 9221 | 8368 | 4647 | 6152 | 6616 | 4140 | 5610 | 267 |
| | 1654 | 9864 | 3834 | 9194 | 5858 | 3771 | 2074 | 3054 | 970 | 1835 | 1677 | 7614 |
| | 6954 | 3403 | 6800 | 1641 | 7395 | 5591 | 3386 | 9950 | 8611 | 856 | 1858 | 1520 |
| | 473 | 8885 | 6011 | 9711 | 9825 | 9859 | 3111 | 5119 | 1429 | 1523 | 3561 | 1945 |
| | 9938 | 5482 | 3348 | 2385 | 6226 | 3194 | 3839 | 9243 | 3008 | 4170 | 6662 | 1892 |
| | 2971 | 766 | 6573 | 409 | 5075 | 4890 | 9646 | 5026 | 9188 | 942 | 940 | 7917 |
| | 938 | 7915 | 6978 | 1566 | 4359 | 5107 | 6149 | 1921 | 9205 | 558 | 2593 | 9767 |
| | 3663 | 3485 | 4395 | 5451 | 1327 | 3271 | 725 | 793 | 4006 | 2369 | 465 | 3590 |
| | 858 | 4660 | 8466 | 5760 | 453 | 2677 | 3069 | 3964 | 3914 | 4301 | 3064 | 3301 |
| | 7884 | 2946 | 9593 | 1301 | 1216 | 9620 | 2994 | 2405 | 3203 | 6375 | 2147 | 4373 |
| | 9796 | 8212 | 4251 | 5659 | 3187 | 9170 | 2662 | 2694 | 5304 | 4050 | 4069 | 4047 |
| | 6861 | 9115 | 2858 | 481 | 4119 | 7615 | 7762 | 10016 | 6239 | 337 | 338 | 8599 |
| | 8597 | 929 | 927 | 924 | 363 | 7717 | 204 | 5991 | 3852 | 6318 | 1176 | 1179 |
| | 2056 | 2441 | 8533 | 628 | 2053 | 8174 | 5619 | 1515 | 5080 | 7386 | 6250 | 7883 |
| | 2826 | 5083 | 1164 | 9070 | 1162 | 1160 | 1438 | 1436 | 913 | 3235 | 596 | 3680 |
| | 4588 | 4570 | 6183 | 6184 | 8547 | 367 | 1416 | 380 | 1891 | 3924 | 5262 | 5013 |
| | 4687 | 5467 | 8364 | 7479 | 6919 | 5452 | 6845 | 2870 | 2993 | 3956 | 4175 | 1153 |
| | 7594 | 1878 | 2488 | 9668 | 3669 | 9251 | 5263 | 7422 | 8183 | 5174 | 6764 | 8181 |
| | 404 | 2913 | 6297 | 604 | 812 | 8190 | 9618 | 3480 | 3278 | 2591 | 5960 | 1324 |
| | 7168 | 7056 | 8115 | 5520 | 9207 | 8128 | 218 | 1127 | 3477 | 3670 | 3125 | 8175 |
| | 7877 | 1752 | 2733 | 1141 | 4208 | 4347 | 1178 | 1655 | 4864 | 9388 | 7195 | 1831 |
| | 7319 | 2809 | 9983 | 8576 | 8209 | 6211 | 5985 | 7193 | 7172 | 3476 | 6946 | 8553 |
| | 8127 | 336 | 9078 | 7210 | 7452 | 842 | 6296 | 7259 | 8099 | 262 | 7208 | 5730 |
| | 3224 | 5151 | 9273 | 3752 | 2509 | 4744 | 9275 | 8065 | 3772 | 8089 | 1647 | 761 |
| | 393 | 9365 | 3811 | 2436 | 2699 | 9248 | 2055 | 5846 | 4705 | 4287 | 1594 | 2863 |
| | 4479 | 6327 | 416 | 3939 | 1110 | 8556 | 8259 | 1688 | 3628 | 1083 | 9741 | 6541 |
| | 4025 | 4046 | 4026 | 815 | 2691 | 8354 | 2970 | 2976 | 8363 | 5782 | 6532 | 6520 |
| | 7608 | 3545 | 6249 | 10017 | 8969 | 170 | 7412 | 2402 | 1726 | 2886 | 6760 | 2893 |
| | 8941 | 8926 | 1099 | 8899 | 5043 | 8842 | 9093 | 9097 | 9094 | 3237 | 997 | 5732 |
| | 6302 | 4820 | 483 | 599 | 3492 | 485 | 9120 | 4799 | 5221 | 6286 | 3496 | 9084 |
| | 5010 | 8262 | 3704 | 5443 | 4626 | 583 | 9310 | 4048 | 8575 | 3981 | 3979 | 7967 |
| | 9931 | 8221 | 203 | 193 | 9874 | 470 | 4105 | 864 | 6260 | 2222 | 791 | 2909 |
| | 2949 | 8495 | 479 | 5872 | 216 | 3623 | 3236 | 9418 | 3607 | 4308 | 7455 | 3010 |
| | 9192 | 1583 | 9348 | 5873 | 796 | 9882 | 8903 | 2724 | 9328 | 3934 | 3514 | 7540 |
| | 6894 | 8289 | 10013 | 8967 | 7832 | 9868 | 5251 | 8336 | 6242 | 6691 | 6785 | 2443 |
| | 1097 | 7889 | 7093 | 6508 | 4232 | 2438 | 2247 | 9065 | 6246 | 6168 | 6186 | 621 |
| | 1149 | 9707 | 2641 | 3609 | 2735 | 7025 | 420 | 1824 | 7038 | 9975 | 5137 | 8767 |
| | 7252 | 6126 | 3695 | 478 | 4249 | 9959 | 6269 | 8608 | 5706 | 951 | 3884 | 316 |
| | 6858 | 4028 | 4644 | 7046 | 1823 | 1357 | 6802 | 7127 | 9616 | 4121 | 3047 | 7634 |
| | 1870 | 302 | 4118 | 2842 | 652 | 6907 | 9815 | 9812 | 3365 | 9764 | 4844 | 4849 |
| | 4847 | 4846 | 2929 | 6567 | 8044 | 7445 | 2818 | 8838 | 8841 | 7861 | 8986 | 5665 |
| | 8545 | 9143 | 6751 | 6789 | 9944 | | | | | | | |
| 131: | 5504 | 7201 | 9080 | 4524 | 6201 | 3840 | 4320 | 2523 | 2135 | 7287 | 7299 | 9617 |
| | 6355 | 4519 | 632 | 4321 | 7887 | 8869 | 366 | 8507 | 2280 | 8201 | 3170 | 697 |
| | 696 | 7153 | 6491 | 8338 | 8389 | 8397 | 8381 | 8377 | 8380 | 8358 | 8393 | 8391 |
| | 8394 | 8313 | 8352 | 8415 | 8317 | 8334 | 8333 | 8361 | 8314 | 8315 | 8332 | 8335 |
| | 8375 | 5831 | 5829 | 7224 | 1326 | 8514 | 946 | 7226 | 2939 | 327 | 649 | 1493 |
| | 3809 | 4297 | 4080 | 2845 | 1795 | 5346 | 6667 | 309 | 1854 | 1140 | 7837 | 2545 |
| | 7199 | 1133 | 1129 | 1151 | 1115 | 1146 | 1985 | 1959 | 1957 | 1983 | 3307 | 8045 |
| | 3741 | 3761 | 3758 | 6087 | 9379 | 4826 | 6544 | 675 | 538 | 8707 | 5857 | 9832 |
| | 8154 | 8796 | 1629 | 5286 | 8321 | 7217 | 824 | 2711 | 9035 | 9036 | 3030 | 975 |
| | 7674 | 6483 | 7661 | 8936 | 1875 | 5973 | 4043 | 1380 | 1475 | 4930 | 2958 | 7261 |
| | 1499 | 3014 | 1118 | 4597 | 9776 | 4045 | 9394 | 1075 | 5052 | 3239 | 6900 | 4517 |
| | 7736 | 1105 | 9534 | 2745 | 1713 | 8191 | 6041 | 1894 | 9169 | 2207 | 9058 | 9057 |
| | 7606 | 9010 | 6901 | 6139 | 8120 | 7458 | 1100 | 8906 | 6027 | 419 | 4516 | 1121 |
| | 1840 | 5685 | 742 | 3398 | 4315 | 7584 | 5975 | 7854 | 6034 | 580 | 672 | 3555 |
| | 7613 | 5650 | 1836 | 8040 | 3428 | 8666 | 2077 | 1708 | 437 | 4402 | 3169 | 7183 |
| | 6217 | 6054 | 7882 | 665 | 3473 | 2638 | 2784 | 674 | 8719 | 5127 | 7087 | 5042 |
| | 9757 | 8027 | 395 | 2919 | 511 | 6695 | 7456 | 560 | 3549 | 8964 | 286 | 3470 |
| | 9697 | 8561 | 2708 | 6753 | 9472 | 2611 | 7750 | 7001 | 342 | 3233 | 3234 | 5990 |
| | 4867 | 5918 | 321 | 9956 | 2156 | 5769 | 6864 | 320 | 6627 | 7213 | 7184 | 9216 |
| | 544 | 4092 | 5302 | 6529 | 1682 | 1907 | 4691 | 5608 | 1063 | 7337 | 2808 | 9500 |
| | 1975 | 9163 | 2361 | 4923 | 6408 | 6445 | 7405 | 1974 | 5389 | 9491 | 3969 | 6957 |
| | 8378 | 3026 | 3751 | 5198 | 8427 | 8438 | 8584 | 8587 | 5030 | 5340 | 9031 | 5970 |
| | 3246 | 5935 | 5841 | 7679 | 391 | 4480 | 451 | 4813 | 6214 | 3457 | 8155 | 8236 |
| | 9366 | 710 | 8960 | 3718 | 4721 | 7862 | 3936 | 8627 | 1552 | 3825 | 1633 | 6948 |
| | 4863 | 7763 | 8131 | 5038 | 335 | 6404 | 1109 | 253 | 5375 | 991 | 1827 | 1503 |
| | 2479 | 2503 | 6313 | 4724 | 4816 | 6673 | 9553 | 2085 | 9222 | 9687 | 2686 | 3888 |
| | 5409 | 2127 | 5964 | 9572 | 681 | 3989 | 6809 | 9602 | 5922 | 9591 | 2756 | 2758 |
| | 6689 | 8560 | 1663 | 5987 | 4502 | 5912 | 8708 | 8737 | 8713 | 1575 | 6507 | 4057 |
| | 2862 | 469 | 1869 | 7285 | 8781 | 7390 | 1437 | 3602 | 9071 | 9713 | 2412 | 2922 |
| | 1209 | 5744 | 5692 | 1026 | 9522 | 5688 | 3097 | 9739 | 9900 | 7071 | 7359 | 7822 |
| | 4049 | 8760 | 349 | 690 | 2499 | 2502 | 2505 | 2498 | 1337 | 2791 | 5897 | 5606 |
| | 4991 | 3385 | 3598 | 9168 | 5609 | 9723 | 9452 | 5114 | 1422 | 542 | 9513 | 1289 |
| | 3327 | 6439 | 1584 | 8412 | 4773 | 1330 | 5478 | 8055 | 9066 | 3902 | 8510 | 1970 |
| | 3043 | 422 | 425 | 4014 | 7799 | 6230 | 2105 | 6258 | 6010 | 9413 | 8660 | 2628 |
| | 6270 | 6876 | 4757 | 1582 | 1581 | 5586 | 9313 | 2411 | 3471 | 2774 | 9575 | 4886 |
| | 4883 | 4884 | 1215 | 785 | 4052 | 9911 | 8024 | 9256 | 3819 | 2592 | 4122 | 4055 |
| | 2104 | 8273 | 8711 | 3776 | 4609 | 5894 | 5414 | 5418 | 5415 | 5642 | 996 | 5943 |
| | 6109 | 4051 | 4053 | 8715 | 8689 | 8709 | 8717 | 8692 | 8688 | 5287 | 2817 | 9609 |
| | 7733 | 9086 | 6128 | 4075 | 7772 | 6277 | 6273 | 4787 | 3051 | 8442 | 8712 | 4124 |
| | 2000 | 4725 | 1483 | 9000 | 9477 | 2674 | 278 | 7578 | 3218 | 1900 | 1350 | 6241 |
| | 1920 | 6638 | 5305 | 6621 | 9702 | 4686 | 7782 | 6159 | 7362 | 5339 | 1623 | 8116 |
| | 1283 | 7783 | 3123 | 3850 | 5188 | 8534 | 6749 | 6062 | 7680 | 4280 | 6471 | 5968 |
| | 5335 | 9529 | 7785 | 6059 | 4403 | 9104 | 1212 | 9615 | 6740 | 3591 | 2050 | 2501 |
| | 802 | 9315 | 8981 | 1486 | 9161 | 2203 | 821 | 6989 | 8360 | 5767 | 501 | 5220 |
| | 5243 | 5219 | 1306 | 2318 | 1308 | 1569 | 3903 | 7296 | 1023 | 5411 | 7922 | 10000 |
| | 8193 | 5033 | 7826 | 8112 | 1031 | 480 | 9434 | 8638 | 2548 | 6644 | 6659 | 926 |
| | 1281 | 3863 | 6885 | 5018 | 4324 | 8240 | 5645 | 1451 | 1428 | 9255 | 5020 | 4604 |
| | 4477 | 2089 | 4986 | 5016 | 4449 | 4981 | 4472 | 4466 | 7926 | 3449 | 7930 | 5796 |
| | 7352 | 8479 | 4487 | 8945 | 8107 | 3619 | 1039 | 5716 | 943 | 5762 | 4636 | 6158 |
| | 553 | 6272 | 3897 | 8815 | 1257 | 974 | 2294 | 2276 | 804 | 846 | 2807 | 7643 |
| | 2248 | 9745 | 506 | 6040 | 557 | 2227 | 6288 | 6293 | 4240 | 257 | 8598 | 6115 |
| | 7125 | 4527 | 7301 | 5367 | 5048 | 2504 | 3901 | 5615 | 6160 | 7427 | 9645 | |
| 132: | 7833 | 5889 | 3007 | 8109 | 5915 | 2022 | 6345 | 3652 | 3805 | 4242 | 6959 | 5248 |
| | 6384 | 1580 | 8887 | 6294 | 1739 | 9842 | 6700 | 3666 | 2480 | 3620 | 7472 | 9016 |
| | 9795 | 276 | 1758 | 5135 | 1256 | 3574 | 7061 | 4918 | 7154 | 1916 | 2076 | 9159 |
| | 3416 | 4625 | 1865 | 1670 | 9896 | 6240 | 8603 | 8205 | 6782 | 8883 | 877 | 7470 |
| | 7190 | | | | | | | | | | | |
| 133: | 3767 | 1936 | 390 | 6879 | 5949 | 8320 | 4341 | 1797 | 9923 | 5720 | 7626 | 5638 |
| | 8294 | 5250 | 5783 | 4649 | 3513 | 3058 | 519 | 7034 | 4635 | 7649 | 7684 | 4411 |
| | 7300 | 4860 | 7598 | 9786 | 3415 | 4337 | 4344 | 7610 | 3729 | 4393 | 7627 | 1303 |
| | 9821 | 5057 | 520 | 6928 | 3675 | 494 | 8993 | 2837 | 7701 | 2841 | 8011 | 6082 |
| | 6341 | 495 | 7302 | 7878 | 8508 | 7303 | 9857 | 4723 | 3748 | 5707 | 6773 | 7432 |
| | 918 | 3886 | 8446 | 2456 | 7372 | 1768 | 3467 | 6125 | 5805 | 4521 | 2163 | 2258 |
| | 9581 | 4275 | 4278 | 4277 | 6407 | 5172 | 4628 | 2564 | 4139 | 2574 | | |
| 134: | 9820 | 3178 | 3325 | 9629 | 4845 | 7949 | 7988 | 6657 | 1236 | 4592 | 310 | 4063 |
| | 1123 | 2925 | 2783 | 7441 | 3361 | 4193 | 7477 | 4906 | 2980 | 4000 | | |
| 135: | 4310 | 4445 | 1549 | 1551 | 3520 | 6747 | 1048 | 9936 | 8536 | 4394 | 3173 | 8330 |
| | 2117 | 6095 | 9293 | 4238 | 4200 | 4617 | 3566 | 9898 | 2444 | | | |
| 136: | 7669 | 3429 | 8564 | 5459 | 5927 | 2547 | 8365 | 5562 | 7856 | | | |
| 137: | 7203 | 1791 | 7073 | 4234 | 972 | 3070 | 439 | 9332 | 8118 | 4541 | 3482 | 648 |
| | 537 | 5289 | 5540 | 490 | 702 | 664 | 1008 | 6187 | 7074 | 6233 | 6163 | 4384 |
| | 8150 | 5035 | 1644 | 4408 | 6682 | 3350 | 8610 | 3596 | 230 | 3531 | 3948 | 898 |
| | 219 | 1056 | 4256 | 8367 | 3221 | 4110 | 4671 | 5460 | 2049 | 9396 | 2900 | 2969 |
| | 9748 | 389 | 9212 | 1864 | 5652 | 2316 | 3193 | 8423 | 7844 | 243 | 7890 | 1403 |
| | 2437 | 6939 | 332 | 5108 | 1139 | 3836 | 4791 | 3688 | 3868 | 5811 | 9804 | 1305 |
| | 7891 | 2082 | 8288 | 5255 | 7561 | 8519 | 5295 | 7387 | 5694 | 5274 | 9863 | 6912 |
| | 8622 | 3682 | 5241 | 8843 | 9768 | 4465 | 5859 | 1838 | 5905 | 1199 | 524 | 2161 |
| | 2578 | 9604 | 1383 | 9340 | 2346 | 616 | 1159 | 7597 | 8811 | 4810 | 945 | 968 |
| | 5461 | 5898 | 1202 | 5573 | 8859 | 3581 | 6206 | 6103 | 4456 | 3135 | 1772 | 2420 |
| | 1542 | 9260 | 6174 | 562 | 1605 | 1656 | 6955 | 6926 | 6358 | 441 | 9249 | 2800 |
| | 8387 | 3191 | 334 | 2847 | 6264 | 872 | 687 | 8724 | 8761 | 549 | 567 | 582 |
| | 507 | 5130 | 8455 | 3399 | 4068 | 2609 | 6331 | 5656 | 4441 | 2510 | 2332 | 3481 |
| | 4081 | 9524 | 6696 | 6218 | 4369 | 4945 | 4309 | 4977 | 405 | 6983 | 6870 | 7927 |
| | 4526 | 2262 | 7867 | 4653 | 2920 | 5839 | 2357 | 3696 | 2951 | 3527 | 3462 | 1263 |
| | 1881 | 5247 | 9669 | 6111 | 9269 | 6592 | 4622 | 5763 | 8052 | 4584 | 5303 | 9133 |
| | 9742 | 1799 | 5298 | 5348 | 2353 | 408 | 6603 | 1498 | 4948 | 1468 | 6569 | 4552 |
| | 4474 | 6215 | 9167 | 8635 | 3889 | 3190 | 6852 | 6001 | 2924 | 6593 | 1769 | 9650 |
| | 8304 | 5072 | 3090 | 6124 | 6966 | 6156 | 5792 | 7585 | 9548 | 4237 | 4190 | 6153 |
| | 7245 | 9753 | 4877 | 3298 | 3746 | 1328 | 6557 | 8823 | 8653 | 2152 | 353 | 424 |
| | 5626 | 9311 | 7214 | 4534 | 4537 | 8243 | 2229 | 1536 | 1559 | 3540 | 3539 | 2772 |
| | 294 | 1511 | 1204 | 9644 | 1227 | 1332 | 6205 | 8680 | 6524 | 9632 | 2875 | 1173 |
| | 7336 | 9927 | 8110 | 3755 | 9682 | 7367 | 8630 | 2454 | 3973 | 5134 | 3040 | 8782 |
| | 8372 | 199 | 1015 | 2599 | 6284 | 2131 | 9652 | 9977 | 4718 | 2747 | 2315 | 1977 |
| | 4229 | 5568 | 2490 | 4404 | 3624 | 3794 | 1205 | 6459 | 5436 | 5438 | 3000 | 2998 |
| | 223 | 1445 | 2176 | 3648 | 3647 | 614 | 9919 | 3503 | 1333 | 4230 | 285 | 6261 |
| | 2409 | 4607 | 8222 | 3883 | 8049 | 9508 | 7003 | 3315 | 8218 | 5212 | 1954 | 7696 |
| | 7141 | 6117 | 3021 | 5587 | 3606 | 7591 | 1054 | 3882 | 9819 | 548 | 2096 | 4432 |
| | 2507 | 2406 | 4146 | 3563 | 603 | 7104 | 9676 | 3832 | 5518 | 4567 | 1994 | 7175 |
| | 3096 | 6776 | 7786 | 6338 | 186 | 8520 | 5752 | 630 | 8740 | 5658 | 5674 | 2763 |
| | 8877 | 5701 | 6518 | 1260 | 8398 | 8918 | 7622 | 8077 | 2861 | 9735 | 8643 | 5686 |
| | 6827 | 5648 | 4664 | 950 | 1885 | 9164 | 668 | 528 | 656 | 6068 | 9043 | 8808 |
| | 4152 | 8817 | 4150 | 5780 | 5776 | 9902 | 5830 | 5073 | 324 | 5617 | 5625 | 7408 |
| | 5329 | 6642 | 318 | 7647 | 4115 | | | | | | | |
| 138: | 8968 | 2512 | 9223 | 8511 | 3726 | 6931 | 2463 | 9346 | 570 | 2598 | 2374 | 2120 |
| | 6914 | 6119 | 944 | 6394 | 1818 | 7353 | 9429 | 747 | 3887 | 9917 | 9933 | 4752 |
| | 2216 | 1923 | 9626 | 493 | 2928 | 3665 | 4875 | 4912 | 6403 | 6405 | 6433 | 8937 |
| | 4874 | 9507 | 1293 | 1302 | 4892 | 6196 | 7019 | 2623 | 2620 | 9448 | 9929 | 3532 |
| | 198 | 7447 | 1262 | 9816 | 2942 | 214 | 5895 | 8132 | 6833 | 2470 | 6044 | 1360 |
| | 3864 | 3354 | 5078 | 3712 | 3622 | 2243 | 7841 | 7704 | 7058 | 8513 | 4248 | 5756 |
| | 1329 | 1650 | 915 | 3098 | 4511 | 4507 | 6837 | 7793 | 8451 | 8617 | 4070 | 7852 |
| | 4387 | 2840 | 9705 | 7098 | 9546 | 9283 | 7821 | 9334 | 1355 | 8515 | 4515 | 3849 |
| | 1103 | 4638 | 7596 | 1101 | 6492 | 7805 | 4585 | 2129 | 3813 | 3165 | 6012 | 2459 |
| | 4855 | 3219 | 4853 | 7564 | 4163 | 2896 | 6630 | | | | | |
| 139: | 3997 | 2703 | 1918 | 5761 | 6918 | 6142 | 9908 | 5187 | 2508 | | | |
| 140: | 9075 | 587 | 5843 | 3210 | 5471 | 8034 | 8884 | 3547 | 8432 | 5657 | 433 | 3460 |
| | 5473 | 789 | 471 | 3122 | 7813 | 7075 | 3837 | 3743 | 8256 | 348 | 3077 | 5593 |
| | 5832 | 987 | 3146 | 9721 | 5493 | 5966 | 5508 | 2938 | 8924 | 7628 | 2462 | 6274 |
| | 719 | 8951 | 9226 | 7284 | 2916 | 4116 | 8624 | 4496 | 2668 | 9288 | 1814 | 5032 |
| | 893 | 5334 | 3572 | 6043 | 1404 | 6379 | 5861 | 9837 | 8946 | 1512 | 2796 | 2246 |
| | 1405 | 9622 | 7329 | 4715 | 1148 | 4231 | 4695 | 5190 | 4903 | 7517 | 1440 | 3444 |
| | 9782 | 8850 | 2260 | 9801 | 3324 | 6632 | 2884 | 9126 | 3044 | 2991 | 3786 | 8888 |
| | 7132 | 3383 | 9017 | 8248 | 1660 | 7652 | 3827 | 8250 | 7599 | 5788 | 2798 | 8406 |
| | 3056 | 2529 | 8973 | 1049 | 1082 | 6220 | 6984 | 9090 | 4858 | 8488 | 484 | 6596 |
| | 1558 | 7383 | 8535 | 6808 | 9568 | 6266 | 168 | 406 | 1425 | 5748 | 6969 | 6702 |
| | 9912 | 3294 | 9324 | 3291 | 6801 | 9081 | 1476 | 5724 | 8405 | 372 | 4330 | 5141 |
| | 3067 | 7461 | 6014 | 3410 | 4643 | 4606 | 2961 | 6780 | 414 | 3074 | 4632 | 6130 |
| | 1316 | 1319 | 2004 | 3438 | 2134 | 9758 | 1126 | 3244 | 3215 | 7234 | 722 | 1394 |
| | 2679 | 7238 | 7007 | 4659 | 1903 | 7605 | 5015 | 9769 | 9693 | 6982 | 2630 | 6050 |
| | 1465 | 244 | 4085 | 1276 | 4159 | 5963 | 9264 | 2927 | 6093 | 8298 | 3359 | 8697 |
| | 8399 | 1481 | 4594 | 5950 | 5882 | 5282 | 6872 | 2524 | 9738 | 9706 | 6151 | 4349 |
| | 498 | 4669 | 9149 | 5901 | 9185 | 7875 | 169 | 183 | 6175 | 4512 | 8771 | 174 |
| | 6208 | 768 | 8720 | 1460 | 770 | 4495 | 4692 | 724 | 901 | 6744 | 6651 | 7901 |
| | 1649 | 7047 | 5090 | 8755 | 5784 | 5815 | 9826 | 5681 | 1076 | 7590 | 1185 | 7406 |
| | 3024 | 8988 | 7169 | 4476 | 2458 | 561 | 241 | 259 | 1191 | 7004 | 1219 | 6720 |
| | 5056 | 7916 | 5849 | 2343 | 2984 | 6652 | 2915 | 261 | 4127 | 1948 | 6310 | 8213 |
| | 7655 | 6289 | 6015 | 5992 | 713 | 737 | 9023 | 1906 | 3484 | 3994 | 4180 | 6042 |
| | 4627 | 4179 | 6063 | 1342 | 4478 | 1760 | 735 | 7308 | 1211 | 211 | 2016 | 3413 |
| | 2761 | 8403 | 9671 | 3223 | 2610 | 6373 | 2912 | 3345 | 6189 | 373 | 3613 | 430 |
| | 7399 | 7985 | 4778 | 509 | 3557 | 3379 | 5229 | 629 | 3927 | 7993 | 8030 | 7991 |
| | 505 | 9441 | 8091 | 635 | 8392 | 3382 | 9291 | 9299 | 2607 | 712 | 4192 | 7064 |
| | 4220 | 5454 | 5175 | 8836 | 7428 | 1630 | 2531 | 4634 | 7795 | 3052 | 1659 | 532 |
| | 8922 | 6060 | 8806 | 1643 | 1046 | 6432 | 530 | 5257 | 6181 | 5009 | 1144 | 173 |
| | 2348 | 7322 | 7083 | 9654 | 255 | 2956 | 7522 | 9545 | 9523 | 3395 | 3709 | 236 |
| | 4405 | 187 | 4154 | 2983 | 3573 | 5555 | 9760 | 7294 | 9331 | 2109 | 2167 | 1280 |
| | 4396 | 1044 | 3149 | 4750 | 4896 | 2106 | 3020 | 6679 | 6549 | 7288 | 8013 | 9862 |
| | 3450 | 1045 | 6386 | 9884 | 896 | 7380 | 3022 | 5932 | 492 | 3526 | 9847 | 7879 |
| | 5847 | 2718 | 9458 | 4283 | 4104 | 5361 | 8282 | 6752 | 1668 | 9638 | 7885 | 3930 |
| | 863 | 7550 | 4244 | 5787 | 2543 | 2906 | 4959 | 4952 | 418 | 4994 | 6927 | 5582 |
| | 4076 | 9962 | 2092 | 8524 | 3145 | 4431 | 2557 | 5249 | 8225 | 6443 | 9667 | 4131 |
| | 2416 | 8413 | 3643 | 4181 | 7952 | 9690 | 5499 | 2154 | 2155 | 2177 | 2061 | 8834 |
| | 2175 | 2749 | 523 | 1716 | 8963 | 3110 | 3009 | 5753 | 4947 | 9619 | 3694 | 7995 |
| | 9473 | 9431 | 1492 | 7403 | 4539 | 623 | 9195 | 2989 | 8057 | 1634 | 5530 | 3661 |
| | 4674 | 8260 | 6635 | 4058 | 3824 | 6199 | 5809 | 3436 | 2191 | 9530 | 9501 | 1972 |
| | 2813 | 6148 | 8444 | 1808 | 6021 | 7831 | 5292 | 3950 | 6999 | 6997 | 5133 | 6170 |
| | 5636 | 3521 | 2788 | 9752 | 9527 | 1910 | 6847 | 7134 | 4013 | 1102 | 4506 | 7666 |
| | 3334 | 5267 | 2644 | 3985 | 651 | 5046 | 4819 | 6263 | 9628 | 3518 | 3516 | 2113 |
| | 2098 | 7129 | 3412 | 3092 | 5544 | 6537 | 4415 | 841 | 1037 | 836 | 6545 | 9865 |
| | 9685 | 1632 | 9736 | 9510 | 6775 | 6136 | 3176 | 721 | 5911 | 3424 | 7246 | 5062 |
| | 3402 | 7541 | 4475 | 7969 | 8925 | 307 | 8929 | 8910 | 8913 | 8915 | 5176 | 440 |
| | 399 | 4558 | 1132 | 5824 | 8138 | 5406 | 8078 | 847 | 4706 | 2943 | 2722 | 9939 |
| | 8129 | 6474 | 9988 | 9994 | 6797 | 4455 | 4457 | 4454 | 1607 | 916 | 9574 | 5091 |
| | 9573 | 9416 | 6129 | 2974 | 9630 | 9904 | 8114 | 1131 | 1742 | 7897 | 5186 | 5618 |
| | 2362 | 2379 | 468 | 7173 | 6703 | 2170 | 9387 | 9362 | 9562 | 1646 | 5807 | 3814 |
| | 9186 | 6763 | 6268 | 2429 | 902 | 5140 | 4247 | 885 | 2652 | 6247 | 3161 | 3723 |
| | 6096 | 7818 | 6599 | 2688 | 7827 | 1622 | 6633 | 8485 | 6498 | 4882 | 5163 | 5076 |
| | 4563 | 5733 | 9810 | | | | | | | | | |
| 141: | 7726 | 7410 | 8023 | 8039 | 8037 | 6113 | 3318 | 7855 | 3370 | 7688 | 1661 | 4943 |
| | 5627 | 8955 | 8914 | 4862 | 1500 | 344 | 3426 | 5227 | 3502 | 293 | 9110 | 3083 |
| | 2887 | 9766 | 6856 | 1619 | 2546 | 6874 | 6190 | 5100 | 6923 | 4621 | 9470 | 8754 |
| | 9389 | 6441 | 6376 | 4422 | 9154 | 345 | 457 | 6292 | 571 | 1061 | 3909 | 4751 |
| | 2793 | 5101 | 4673 | 4878 | 8732 | 3491 | 6065 | 7011 | 7632 | 5390 | 8328 | 6022 |
| | 880 | 2123 | 2931 | 4044 | 6650 | 7789 | 2392 | 3478 | 2204 | 1188 | 4440 | 1993 |
| | 6419 | 5463 | 1704 | 1718 | 4102 | 6349 | 398 | 4776 | 8793 | 1919 | 7221 | 8756 |
| | 1154 | 3192 | 1603 | 8648 | 2048 | 1692 | 1347 | 3073 | 9684 | 3212 | 8125 | 1563 |
| | 5012 | 2143 | 2731 | 10006 | 5240 | 4915 | 7389 | 1729 | 7639 | 6319 | 844 | 2263 |
| | 6343 | 891 | 3352 | 590 | 593 | 578 | 591 | 8035 | 6049 | 6731 | 7592 | 1145 |
| | 7686 | 9079 | 4699 | 5323 | 4303 | 1000 | 579 | 340 | 9696 | 539 | 7817 | 7814 |
| | 352 | 6724 | 1917 | 8987 | 3594 | 8858 | 8853 | 8855 | 1866 | 2559 | 5673 | 7130 |
| 142: | 9538 | 6322 | 8216 | 2187 | 2190 | 2706 | 2702 | 8864 | 7631 | 5819 | 4946 | 5429 |
| | 1914 | 9292 | 4470 | 1705 | 2457 | 8384 | 7603 | 8655 | 376 | 1064 | 7518 | 5845 |
| | 2936 | 6683 | 9763 | 9153 | 7043 | 3846 | 5324 | 5162 | 4489 | 5848 | 6367 | 5696 |
| | 5854 | 2736 | 9284 | 6767 | 4015 | 4001 | 7119 | 7128 | 6819 | 6746 | 6637 | 8436 |
| | 3198 | 7283 | 2695 | 597 | 5092 | 4684 | 1789 | 8417 | 7187 | 643 | 7053 | 7671 |
| | 4633 | 4795 | 6275 | 3390 | 5246 | 4731 | | | | | | |
| 143: | 9538 | 6322 | 7202 | 114 | 8216 | 2187 | 2190 | 2706 | 2702 | 8864 | 7631 | 4188 |
| | 753 | 4191 | 8728 | 4002 | 3875 | 5819 | 8780 | 4946 | 5429 | 1914 | 9292 | 4470 |
| | 1705 | 2457 | 8384 | 7603 | 8655 | 376 | 7135 | 1064 | 1066 | 7518 | 6038 | 6924 |
| | 5845 | 3207 | 2936 | 6683 | 10011 | 9763 | 9153 | 7043 | 4569 | 1296 | 3846 | 5324 |
| | 5997 | 3321 | 5162 | 4489 | 9846 | 1282 | 8791 | 5848 | 6367 | 5696 | 5854 | 6828 |
| | 2736 | 9284 | 6767 | 4015 | 4001 | 7119 | 7128 | 6819 | 6746 | 6637 | 8436 | 3198 |
| | 9398 | 1094 | 7283 | 2695 | 597 | 5092 | 227 | 5082 | 4684 | 1789 | 3375 | 6456 |
| | 8602 | 2128 | 5736 | 1183 | 4672 | 6560 | 688 | 466 | 3789 | 2075 | 6517 | 726 |
| | 6083 | 2036 | 2533 | 4914 | 762 | 5115 | 4409 | 6251 | 704 | 1810 | 526 | 1665 |
| | 7997 | 2732 | 5462 | 7207 | 8475 | 8840 | 7215 | 1585 | 1862 | 3807 | 5428 | 1234 |
| | 8417 | 5801 | 6952 | 7120 | 7187 | 643 | 7053 | 7671 | 9298 | 4633 | 4795 | 6275 |
| | 3390 | 5246 | 4731 | | | | | | | | | |
| 144: | 7151 | 6340 | 8968 | 2512 | 9223 | 8511 | 6831 | 1411 | 8429 | 640 | 9838 | 8939 |
| | 4614 | 2313 | 8017 | 7853 | 3726 | 4136 | 7242 | 5908 | 4839 | 3629 | 5553 | 2463 |
| | 8002 | 685 | 2572 | 5679 | 5651 | 9641 | 5049 | 2397 | 6231 | 3777 | 9346 | 570 |
| | 2598 | 5766 | 4493 | 4464 | 1856 | 3171 | 4078 | 2374 | 633 | 615 | 3079 | 3519 |
| | 6914 | 6119 | 4782 | 8753 | 9483 | 1625 | 9549 | 944 | 6394 | 1818 | 7353 | 491 |
| | 9429 | 2995 | 10019 | 8167 | 5902 | 2890 | 636 | 9917 | 9933 | 4734 | 4779 | 493 |
| | 6410 | 3829 | 1821 | 2762 | 5900 | 7925 | 2780 | 627 | 6949 | 2928 | 9995 | 2157 |
| | 1988 | 7313 | 4921 | 9729 | 2461 | 4689 | 9543 | 3358 | 1857 | 4528 | 9514 | 9214 |
| | 3665 | 3506 | 2973 | 4875 | 3045 | 6374 | 6390 | 4895 | 6393 | 6392 | 8200 | 4665 |
| | 3446 | 4551 | 1111 | 6433 | 5790 | 2532 | 6707 | 8937 | 4894 | 7719 | 7722 | 7644 |
| | 6196 | 4546 | 7019 | 6334 | 4112 | 2693 | 5718 | 8868 | 8337 | 7105 | 8401 | 3479 |
| | 9883 | 5297 | 5826 | 5195 | 1694 | 1052 | 7624 | 8084 | 5368 | 1792 | 1809 | 5308 |
| | 5291 | 3604 | 6611 | 2470 | 4720 | 1363 | 1360 | 1366 | 2541 | 2540 | 2244 | 7448 |
| | 7845 | 5208 | 5228 | 5224 | 5362 | 5230 | 3448 | 7779 | 7781 | 9870 | 7776 | 4248 |
| | 2935 | 5756 | 4391 | 4378 | 9775 | 4390 | 1461 | 914 | 4939 | 6837 | 7793 | 8451 |
| | 9304 | 9302 | 922 | 718 | 4070 | 7852 | 1527 | 1526 | 8977 | 246 | 684 | 3865 |
| | 6547 | 1386 | 387 | 2223 | 1554 | 8322 | 252 | 249 | 248 | 2214 | 7084 | 4690 |
| | 328 | 6873 | 7325 | 2968 | 9025 | 8682 | 9533 | 6729 | 9375 | 1072 | 6897 | 4926 |
| | 7268 | 2344 | 6963 | 9907 | 4698 | 7342 | 949 | 5424 | 6033 | 1290 | 7577 | 297 |
| | 3515 | 8897 | 9306 | 2854 | 9019 | 6360 | 6487 | 2389 | 9203 | 7871 | 9321 | 377 |
| | 1683 | 8468 | 3397 | 4855 | 3219 | 4853 | 7825 | 8066 | 2391 | 2312 | 2364 | 2341 |
| | 2308 | 2336 | 2359 | 2355 | 2291 | 2309 | 8676 | 2334 | 8674 | 2338 | 2293 | 6361 |
| | 5880 | 4164 | 2896 | 6929 | 5179 | 4595 | 8031 | 1887 | 6630 | 5425 | 7499 | 1442 |
| | 7539 | 5770 | | | | | | | | | | |
| 145: | 585 | 3920 | 765 | 759 | 2616 | 8355 | 4161 | 2637 | 7094 | 9183 | 4433 | 9037 |
| | 5612 | 7711 | 708 | 9981 | 1449 | 535 | 369 | 3735 | 3293 | 3266 | 3269 | 8463 |
| | 8467 | 8543 | 8464 | 3289 | 3286 | 3297 | 3287 | 3262 | 5702 | 5683 | 5698 | 7139 |
| | 1676 | 9405 | 9107 | 8749 | 779 | 4302 | 6597 | 6771 | 5571 | 7748 | 6790 | 5122 |
| | 8975 | 8959 | 6766 | 8978 | 8958 | 9114 | 7307 | 6807 | 8875 | 5118 | 8980 | 6787 |
| | 7247 | 6769 | 6530 | 5704 | 6823 | 5121 | 6786 | 8954 | 873 | 8636 | 3808 | 3804 |
| | 2021 | 8654 | 3510 | 3490 | 6003 | 413 | 2715 | 3140 | 589 | 7741 | 3717 | 7864 |
| | 4809 | 1615 | 1297 | 3474 | 2657 | 8486 | 1090 | 4379 | 3610 | 1681 | 7276 | 3538 |
| | 9250 | 5439 | 9541 | 6420 | 6446 | 6448 | 6453 | 1779 | 2759 | 4209 | 8839 | 5759 |
| | 6316 | 5079 | 9067 | 7346 | 965 | 5537 | 4924 | 932 | 4239 | 5440 | 4550 | 4553 |
| | 9891 | 728 | 6411 | 3757 | 1365 | 749 | 8359 | 4212 | 5384 | 5887 | 5885 | 7619 |
| | 5344 | 8695 | 4266 | 8762 | 895 | 5170 | 9300 | 4177 | 3407 | 3406 | 1658 | 4158 |
| | 3996 | 5386 | 9435 | 3353 | 2967 | 7334 | 1571 | 9189 | 1662 | 9905 | 784 | 8069 |
| | 1679 | 4032 | 8480 | 1420 | 8470 | 2469 | 6970 | 3941 | 10007 | 1233 | 7595 | 1223 |
| | 3392 | 9479 | 5643 | 4657 | 5675 | 2843 | 6552 | 8891 | 733 | 1929 | 6409 | 4271 |
| | 1806 | 8106 | 906 | 5484 | 7989 | 1861 | 5345 | 3310 | 2776 | 6368 | 2838 | 8416 |
| | 5284 | 3760 | 9836 | 7972 | 7638 | 6223 | 760 | 8339 | 639 | 626 | 4576 | 7072 |
| | 6595 | 3817 | 5644 | 3801 | 500 | 8184 | 9664 | 182 | 3226 | 3544 | 2678 | 5693 |
| | 8861 | 428 | 9165 | 4156 | 8484 | 9539 | 275 | 279 | 280 | 730 | 736 | 739 |
| | 741 | 758 | 763 | 767 | 778 | 781 | 3505 | 5684 | 3264 | 2966 | 7474 | 1093 |
| | 7069 | 8585 | 5272 | 2654 | 2683 | 624 | 5465 | 5356 | 7266 | 5797 | 3536 | 1828 |
| | 547 | 1597 | 8870 | 6843 | 10022 | 8087 | 8540 | 2613 | 3377 | 9407 | 1980 | 4818 |
| | 5874 | 7036 | 1298 | 1335 | 2836 | 7790 | 3404 | 1182 | 3845 | 3785 | 8290 | 3075 |
| | 7048 | 6182 | 3791 | 4149 | 2282 | 6718 | 5538 | 679 | 9878 | 2857 | 8645 | 5464 |
| | 7964 | 1621 | 5456 | 477 | 476 | 475 | 2742 | 8088 | 8670 | 6713 | 9308 | 3421 |
| | 5326 | 5668 | 4641 | 9333 | 1369 | 1749 | 6883 | 4532 | 961 | 7152 | 6032 | 5703 |
| | 8658 | 774 | 9119 | 7953 | 3512 | 9537 | 3823 | 4365 | 8395 | 1780 | 488 | 2388 |
| | 3356 | 6398 | 7648 | 3878 | 3906 | 7124 | 7182 | 5189 | 746 | 2122 | 644 | 8448 |
| | 9888 | 8140 | 6672 | 217 | 4167 | 8812 | 6029 | 3543 | 4023 | 7409 | 8142 | 2473 |
| | 5200 | 772 | 546 | 1868 | 7354 | 6135 | 3651 | 9257 | 8149 | 1604 | 9928 | 3589 |
| | 1820 | 6020 | 4900 | 8814 | 963 | 2723 | 5479 | 5280 | 7755 | 1762 | 775 | 7059 |
| | 776 | 5842 | 6839 | 3690 | 6921 | 8787 | 4186 | 8301 | 3732 | 1119 | 1114 | 1715 |
| | 7142 | 7143 | 714 | 3780 | 9326 | 6442 | 5485 | 1407 | 6888 | 4871 | 3002 | 6383 |
| | 1161 | 7161 | 7157 | 7065 | 3783 | 8739 | 2979 | 4246 | 2649 | 3844 | 2647 | 2325 |
| | 2642 | 743 | 740 | 734 | 731 | 738 | 6590 | 6591 | 4561 | 8433 | 7535 | 8157 |
| | 346 | 499 | 9813 | 773 | 7165 | 780 | 8640 | 2945 | 2556 | 438 | 7219 | 7179 |
| | 4482 | 2856 | 2709 | 3962 | 5211 | 3292 | 3296 | 3300 | 3802 | 8102 | 9987 | 995 |
| | 4700 | 1720 | 8404 | 5786 | 3433 | 8639 | 454 | 7777 | 1004 | 1491 | 1490 | 5199 |
| | 969 | 982 | 2555 | 3984 | 1007 | 990 | 5359 | 9982 | 306 | 8565 | 8574 | 8570 |
| | 8551 | 7460 | 6248 | 8548 | 868 | 8546 | 8994 | 6342 | 6224 | 6145 | 6748 | 1028 |
| | 8067 | 7339 | 7140 | 1005 | 2536 | 2771 | 1006 | 7381 | 6324 | 4286 | 1013 | 985 |
| | 983 | 986 | 988 | 1012 | 1014 | 5904 | 6917 | 9390 | 8571 | 3799 | 9941 | 1435 |
| | 1184 | 1700 | 7836 | 6450 | 6415 | 3826 | 460 | 4702 | 1613 | 989 | 3627 | 7006 |
| | 3820 | 2775 | 2019 | 6031 | 3109 | 9844 | 1190 | 8286 | 2676 | 7249 | 8053 | 8050 |
| | 8021 | 5583 | 1288 | 9211 | 1388 | 9566 | 9567 | 8578 | 1194 | 5183 | 5441 | 5476 |
| | 9139 | 1941 | 7180 | 2347 | 7137 | 7145 | 3046 | 3434 | 2250 | 659 | 4654 | 5998 |
| | 4123 | 2044 | 7609 | 3431 | 4126 | 7018 | 9353 | 2424 | 8631 | 5621 | 716 | 3265 |
| | 1927 | 4113 | 5029 | 2741 | 3179 | 1255 | 1258 | 1259 | 4029 | 1699 | 1680 | 4579 |
| | 1701 | 4581 | 1678 | 4578 | 6472 | 5994 | 5755 | 5840 | 9542 | 620 | 967 | 8297 |
| | 8661 | 2254 | 2618 | 3734 | 388 | 1999 | 6815 | 6462 | 3737 | 3738 | 5682 | |
| 146: | 7116 | 5816 | 2975 | 2710 | 7572 | 5242 | 8569 | | | | | |
| 147: | 9980 | 8517 | 5865 | 3276 | 1782 | 5877 | 3378 | 2835 | 6460 | 7031 | 637 | 7150 |
| | 5976 | 5053 | 8379 | 6853 | 5054 | 6835 | 2396 | 2400 | 10014 | 8794 | 2777 | 3049 |
| | 3065 | 4260 | 1323 | 1393 | 3229 | 4514 | 518 | 6979 | 2478 | 4572 | 7815 | 8710 |
| | 8714 | 2447 | 1880 | 1877 | 9531 | 6131 | 2371 | 9692 | 4518 | 7212 | 7070 | 8383 |
| | 2539 | 447 | 4509 | 2757 | 8254 | 4486 | 1886 | 8886 | 647 | 3605 | 1340 | 4340 |
| | 4352 | 2450 | 9960 | 9961 | 9984 | 5974 | 3654 | 2277 | 3683 | 4258 | 7625 | 7629 |
| | 7807 | 1667 | 5942 | 4108 | 4951 | 7663 | 4817 | 9558 | 1497 | 9335 | 1922 | 2552 |
| | 315 | 5475 | 1702 | 8621 | 1181 | 4759 | 6019 | 412 | 3885 | 6535 | 9659 | 8860 |
| | 1138 | 3205 | 3227 | 3507 | 7092 | 2746 | 7090 | 8214 | 8238 | 1170 | 7996 | 1169 |
| | 2580 | 4143 | 700 | 2066 | 5653 | 6377 | 9985 | 8119 | 8133 | 3999 | 8846 | 9385 |
| | 1080 | 9220 | 7323 | 8985 | 611 | 9087 | 4272 | 4289 | 9437 | 9871 | 7731 | 1640 |
| | 6396 | 5112 | 6732 | 308 | 6772 | 2651 | 6072 | 6882 | 6884 | 6840 | 1243 | 4194 |
| | 8085 | 6138 | 5719 | 7574 | 9528 | 7823 | 6291 | 5169 | 6865 | 3858 | 9839 | 7673 |
| | 5764 | 8979 | 3419 | 9556 | 4316 | 5574 | 9235 | 7604 | 6645 | 7218 | 7992 | 923 |
| | 7314 | 7316 | 5655 | 2602 | 2600 | 1222 | 1226 | 9024 | 1998 | 8625 | 2107 | 9020 |
| | 9749 | 9033 | 9750 | 9030 | 8706 | 8220 | 3106 | 3838 | 2032 | 5349 | 4566 | 6025 |
| | 4658 | 4677 | 9841 | 8773 | 6626 | 8774 | 5666 | 5661 | 5458 | 6693 | 3788 | 5620 |
| | 5178 | 6017 | 6018 | 2528 | 2525 | 226 | 888 | 799 | 2054 | 4027 | 4030 | 9848 |
| | 4545 | 1071 | 5285 | 6911 | 1565 | 1568 | 3943 | 4377 | 5487 | 2125 | 9897 | 6666 |
| | 9709 | 771 | 7870 | 5851 | 3208 | 8090 | 810 | 1624 | 8292 | 9433 | 3388 | 3387 |
| | 467 | 2381 | 5050 | 1693 | 5019 | 1695 | 1698 | 1001 | 2950 | 1016 | 7419 | 4009 |
| | 8816 | 941 | 3750 | 7912 | 5077 | 196 | 2275 | 5837 | 5836 | 311 | 7444 | 4898 |
| | 9271 | 7544 | 7546 | 7570 | 4976 | 3166 | 5924 | 4603 | 3955 | 2015 | 1997 | 4708 |
| | 8402 | 7880 | 3273 | 905 | 7113 | 6305 | 683 | 8306 | 839 | 272 | 8308 | 7888 |
| | 4510 | 9798 | 2895 | 2832 | 2996 | 9727 | 6188 | 250 | 228 | 9569 | 6665 | 2669 |
| | 3905 | 3967 | 3983 | 7320 | 7999 | 8000 | 6004 | 5158 | 6444 | 5159 | 2911 | 2908 |
| | 4616 | 5890 | 9068 | 2210 | 3841 | 8458 | 3611 | 517 | 3630 | 3617 | 3634 | 9484 |
| | 3248 | 2410 | 9577 | 3637 | 3616 | 3612 | 296 | 6502 | 232 | 3745 | 6421 | 7737 |
| | 1535 | 1728 | 4293 | 6636 | 4642 | 2481 | 295 | 8618 | 7665 | 5500 | 6092 | 6417 |
| | 9793 | 1756 | 1107 | 8880 | 7849 | 4355 | 2551 | 6728 | 6727 | 6725 | 5717 | 1618 |
| | 6869 | 1735 | 2189 | 8582 | 431 | 6104 | 2137 | 4753 | 300 | 7068 | 4364 | 5925 |
| | 7582 | 5337 | 8409 | 3270 | 7438 | 2020 | 5293 | 6300 | 6132 | 6898 | 6348 | 6344 |
| | 6915 | 6364 | 6988 | 6944 | 6962 | 6402 | 6389 | 6896 | 6935 | 6431 | 6895 | 7039 |
| | 6164 | 6960 | 6933 | 7037 | 6424 | 6363 | 7012 | 2698 | 7035 | 7054 | 7062 | 2625 |
| | 8662 | 8725 | 2242 | 8550 | 2240 | 2235 | 8721 | 2622 | 2306 | 8620 | 8694 | 8718 |
| | 2211 | 2185 | 2181 | 1669 | 2328 | 2288 | 8665 | 8698 | 8544 | 8691 | 2186 | 2307 |
| | 2302 | 6323 | 2283 | 2261 | 8612 | 2269 | 2329 | 8588 | 8614 | 2303 | 8572 | 8592 |
| | 2273 | 8668 | 2375 | 8563 | 8619 | 8566 | 2266 | 7707 | 7198 | 2415 | 8663 | 7016 |
| | 7651 | 8590 | 7653 | 2413 | 2352 | 8644 | 7010 | 2981 | 6940 | 7029 | 6908 | 6370 |
| | 6303 | 2330 | 2408 | 2350 | 6406 | 6964 | 6758 | 8583 | 6307 | 6899 | 7586 | 6942 |
| | 5539 | 5516 | 5556 | 5542 | 5472 | 5535 | 8947 | 5497 | 7057 | 6987 | 7008 | 7617 |
| | 7553 | 7032 | 6985 | 541 | 6058 | 6084 | 8637 | 6965 | 9469 | 7236 | 6698 | 1730 |
| | 9006 | 3880 | 5551 | 1508 | 6825 | 595 | 3061 | 3766 | 1241 | 4738 | 3338 | 9162 |
| | 2738 | 2754 | 2792 | 2755 | 8261 | 9240 | 8014 | 3333 | 3160 | 2615 | 6154 | 7902 |
| | 1851 | 1638 | 6482 | 5095 | 2179 | 4637 | 7811 | 7808 | 9636 | 7191 | 7650 | 2537 |
| | 5006 | | | | | | | | | | | |
| 148: | 9807 | 9021 | 3422 | 2554 | 9217 | 1648 | 8121 | 7920 | 3711 | 4189 | 445 | 8186 |
| | 9777 | 5773 | 5629 | 8481 | 7331 | 9861 | 358 | 5468 | 2202 | 5988 | 3247 | 6055 |
| | 4619 | 474 | 4670 | | | | | | | | | |
| 149: | 5381 | 9028 | 2279 | 884 | 4610 | 8904 | 4254 | 5875 | 6779 | 4755 | 8911 | 5791 |
| | 5808 | 8596 | 5957 | 6105 | 7423 | 9570 | 6777 | 3703 | 6770 | 9316 | 9694 | 6778 |
| | 1800 | 3633 | 2725 | 1518 | 2728 | 8293 | 197 | 7515 | 6222 | 817 | 5934 | 3432 |
| | 4228 | 497 | 9852 | 9532 | 9797 | 2585 | 9286 | 4549 | 2707 | 6026 | 7816 | 7886 |
| | 9885 | 8531 | 7941 | 6505 | 5939 | 8407 | 7918 | 9261 | 5926 | 4508 | 5980 | 2753 |
| | 4600 | 6329 | 4072 | 482 | 3320 | 1189 | 6715 | 6733 | 4651 | 4185 | 6207 | 4328 |
| | 4305 | 7347 | 7753 | 3966 | 7961 | 4768 | 6708 | 6614 | 809 | 8319 | 8165 | 1612 |
| | 4463 | 2522 | 6308 | 9784 | 3982 | 7865 | 1315 | 9193 | 4380 | 5448 | 9717 | 1962 |
| | 2714 | 2820 | 3593 | 6916 | 5746 | 1143 | 6972 | 8371 | 5751 | 5306 | 1696 | 6855 |
| | 1022 | 2422 | 8196 | 6854 | 1087 | 7228 | 4448 | 5899 | 2617 | 2888 | 8141 | 229 |
| | 2851 | 1359 | 6649 | 7079 | 9751 | 9877 | 8961 | 8311 | 6617 | 556 | 1951 | 3744 |
| | 1307 | 9445 | 6692 | 2039 | 188 | 4412 | 6543 | 2640 | 4522 | 1318 | 8539 | 8579 |
| | 5589 | 6447 | 3908 | 5896 | 6572 | 9171 | 7178 | 9244 | 1271 | 9817 | 9266 | 7196 |
| | 7122 | 7937 | 2744 | 9623 | 3164 | 1855 | 3222 | 5747 | 3731 | 8388 | 631 | 1245 |
| | 4663 | 3199 | 8554 | 9111 | 2314 | 2031 | 6332 | 1664 | 1672 | 8062 | 9272 | 4562 |
| | 1229 | 1443 | 850 | 5294 | 1908 | 2034 | 3937 | 1627 | 9459 | 2172 | 3699 | 2324 |
| | 2220 | 9564 | 1596 | 6052 | 7728 | 3284 | 4062 | 4060 | 4351 | 3833 | 3795 | 5442 |
| | 5446 | 8168 | 9551 | 2627 | 9679 | 6542 | 2567 | 8609 | 9122 | 6380 | 7657 | 3272 |
| | 8965 | 4079 | 5096 | 9540 | 5633 | 4911 | 5173 | 3094 | 1532 | 1748 | 2145 | 6278 |
| | 3256 | 4148 | 7431 | 3922 | 3919 | 5419 | 5331 | 5059 | 1467 | 921 | 7229 | 4285 |
| | 2140 | 2571 | 573 | 994 | 3993 | 6950 | 1469 | 3500 | 2877 | 5376 | 7404 | 6849 |
| | 8018 | 5094 | 1374 | 4042 | 4962 | 1459 | 1463 | 4601 | 9948 | 610 | 4064 | 379 |
| | 2475 | 2960 | 6166 | 8246 | 7298 | 5379 | 9417 | 7830 | 9137 | 5938 | 5923 | 4827 |
| | 5937 | 4780 | 9811 | 7357 | 5234 | 8731 | 7904 | 258 | 4100 | 7487 | 233 | 1079 |
| | 8789 | 8798 | 607 | 2673 | 2477 | 9419 | 3588 | 2672 | 6167 | 6245 | 7975 | 5342 |
| | 5322 | 1030 | 9660 | 917 | 2188 | 3645 | 2878 | 3625 | 6803 | 653 | 4021 | 2136 |
| | 6522 | 2665 | 1990 | 6623 | 452 | 5945 | 9639 | 1516 | 7426 | 8934 | 6867 | 5941 |
| | 339 | 1901 | 2174 | 1572 | 6009 | 586 | | | | | | |
| 150: | 6947 | 9930 | 8552 | 4707 | 600 | 458 | 9423 | 3655 | 2834 | 5726 | 3667 | 9648 |
| | 650 | 9611 | 5396 | 7913 | 8923 | 5649 | 3615 | 4630 | 7483 | 9614 | 7700 | 1010 |
| | 1924 | 6440 | 9247 | 7839 | 4961 | 6973 | 7163 | 7602 | 4129 | 574 | 3851 | 6285 |
| | 618 | 5577 | 8277 | | | | | | | | | |
| 151: | 2606 | 2063 | 2060 | 496 | 3946 | 10020 | 7076 | 2024 | 5495 | 6475 | 9700 | |
| 152: | 9658 | 9420 | 3779 | 6609 | 3006 | 2471 | 3567 | 4983 | 98 | 979 | 3486 | 5549 |
| | 3725 | 6098 | 7872 | 2112 | 434 | 3565 | 10008 | 5728 | 8348 | 8033 | 5426 | 8854 |
| | 9642 | 6255 | 3980 | | | | | | | | | |
| 153: | 9658 | 9420 | 3779 | 6609 | 3006 | 2471 | 3567 | 4983 | 3486 | 98 | 979 | 5549 |
| | 434 | 3565 | 10008 | 8348 | 5728 | 8302 | 8033 | 6705 | 8244 | 9642 | 6255 | |
| 154: | 9424 | 4676 | 2340 | 5445 | 8252 | 8604 | 8158 | 6499 | 3027 | 1765 | 10009 | 2963 |
| | 4716 | 5352 | 5351 | 5277 | 6850 | 7155 | 4678 | 8208 | 8329 | 6993 | 2100 | 9833 |
| | 2421 | 9791 | 7936 | 7900 | 9072 | 9799 | 4367 | 6826 | 6514 | 4091 | 4090 | 2751 |
| | 4093 | 3033 | 9312 | 9554 | 6607 | 4421 | 1703 | 4418 | 1817 | 7022 | 4357 | 4059 |
| | 9296 | 9910 | 3071 | 2940 | 1860 | 7771 | 402 | 2073 | 9498 | 928 | 1909 | 9653 |
| | 9497 | 2696 | 8498 | 3036 | 2414 | 4777 | 3899 | 6192 | 9909 | 3770 | 4485 | 2467 |
| | 2419 | 9451 | 2712 | 837 | 8434 | 2138 | 6351 | 9108 | 4836 | 5481 | 2124 | 2418 |
| | 6981 | 7274 | 5184 | 5081 | 1671 | 9295 | 3599 | 1020 | 4224 | 5554 | 5572 | 5570 |
| | 6391 | 3961 | | | | | | | | | | |
| 155: | 9424 | 4676 | 2340 | 5445 | 8252 | 8604 | 8158 | 6499 | 3027 | 1765 | 6510 | 3427 |
| | 10009 | 2963 | 4716 | 5352 | 5351 | 5277 | 6850 | 7155 | 4678 | 8208 | 8329 | 6993 |
| | 2100 | 9833 | 6994 | 9657 | 6996 | 9854 | 3668 | 8199 | 5365 | 7802 | 9029 | 2421 |
| | 9791 | 7936 | 7900 | 9072 | 9799 | 4367 | 6826 | 6514 | 4091 | 4090 | 2751 | 4093 |
| | 3033 | 9312 | 9554 | 6607 | 4421 | 1703 | 4418 | 1817 | 7022 | 4357 | 4059 | 9296 |
| | 9910 | 3071 | 2940 | 1860 | 2684 | 782 | 9276 | 7425 | 9991 | 2492 | 1884 | 2794 |
| | 8529 | 5265 | 8007 | 7771 | 402 | 3842 | 2073 | 9498 | 928 | 1909 | 9653 | 9497 |
| | 2696 | 8498 | 3036 | 2414 | 4777 | 3899 | 6192 | 9909 | 3770 | 4485 | 2467 | 2419 |
| | 9451 | 2712 | 837 | 8434 | 2138 | 6351 | 9108 | 4836 | 5481 | 2124 | 2418 | 6981 |
| | 7274 | 5184 | 5081 | 1714 | 3228 | 2139 | 6846 | 7947 | 2977 | 5641 | 1671 | 9295 |
| | 3599 | 1020 | 4224 | 5554 | 5572 | 5570 | 6391 | 3961 | | | | |
| 156: | 9060 | 9635 | 3511 | 1890 | 1852 | 7041 | 8456 | 8503 | 5709 | 7232 | 9824 | 9121 |
| | 1142 | 9105 | 3524 | 886 | 99 | 2910 | 9802 | 8893 | 9050 | 6116 | 8210 | 2648 |
| 157: | 4624 | 1430 | 1961 | 1964 | 9456 | 5156 | 5394 | 7397 | 8169 | 7589 | 3279 | 4306 |
| | 7970 | 5051 | 6353 | 5373 | 7529 | 7189 | 7177 | 9720 | 9724 | 9737 | 8325 | 9743 |
| | 8310 | 9762 | 5483 | 4841 | 9547 | 456 | 7027 | 4073 | 865 | 3681 | 4125 | 2487 |
| | 9754 | 9715 | 5852 | 7311 | 8287 | 9858 | 4556 | 4386 | 5237 | 4843 | 8283 | 6968 |
| | 3988 | 5146 | 2030 | 3167 | 10021 | 7754 | 401 | 6336 | 1019 | 9986 | 7351 | 9843 |
| | 1519 | 5919 | 6463 | 2568 | 4326 | 3251 | 7257 | 411 | 8280 | 2612 | 4172 | 677 |
| | 5236 | 6337 | 6941 | 1939 | 1846 | 3268 | 5264 | 2126 | 2850 | 1413 | 2595 | 4865 |
| | 5338 | 8606 | 8629 | 3585 | 9954 | 2395 | 3255 | 1592 | 8504 | 2091 | 3454 | 8148 |
| | 2103 | 6516 | 7601 | 9113 | 5955 | 8362 | 7498 | 6681 | 8435 | 682 | 1616 | 4872 |
| | 3003 | 3881 | 9673 | 5402 | 10002 | 9368 | 1367 | 5310 | 4499 | 5630 | 4811 | 486 |
| | 6466 | 4114 | 6893 | 1167 | 504 | 159 | 7344 | 2897 | 9561 | 6709 | 3828 | 8373 |
| | 5779 | 5405 | 8890 | 3368 | 7467 | 1794 | 5605 | 3202 | 7077 | 3414 | 8605 | 8267 |
| | 8441 | 6977 | 6210 | 3177 | 3674 | 9141 | 1069 | 1345 | 8623 | 3926 | 7892 | 5387 |
| | 663 | 1904 | 869 | 6784 | 3039 | 6783 | 5341 | 9603 | 7943 | 1496 | 1495 | 8633 |
| | 7703 | 6564 | 8195 | 4295 | 754 | 7579 | 7687 | 9829 | 1122 | 3935 | 9341 | 8268 |
| | 4211 | 3564 | 2805 | 8263 | 792 | 1124 | 756 | 2716 | 7333 | 7222 | 2014 | 2356 |
| | 3127 | 3653 | 7950 | 4153 | 8867 | 6429 | 9457 | 6434 | 8734 | 6905 | 2165 | 4571 |
| | 2072 | 6064 | 4650 | 5252 | 3798 | 3915 | 1666 | 7185 | 7706 | 3720 | 883 | 3254 |
| | 4920 | 8452 | 5962 | 7186 | 1091 | 8162 | 8228 | 843 | 9140 | 2345 | 3987 | 7200 |
| | 2814 | 6078 | 9492 | 3816 | 4354 | 6881 | 7705 | 1724 | 2597 | 102 | 4828 | 238 |
| | 552 | 5676 | 1642 | 4417 | 5646 | 3678 | 6325 | 4282 | 2664 | 3035 | 9503 | 7204 |
| | 6422 | 6586 | 1652 | 3175 | 8323 | 2399 | 2394 | 5427 | 4430 | 6378 | 8097 | 2704 |
| | 4444 | 9173 | 9557 | 8568 | 6575 | 1240 | 268 | 5166 | 550 | 2093 | 5835 | 8235 |
| | 3242 | 9062 | 7503 | 1242 | 6669 | 202 | 4252 | 3942 | 1837 | 5772 | 7013 | 3949 |
| | 2387 | 1872 | 4132 | 239 | 6362 | 3853 | 5399 | 5290 | 361 | 1690 | 6817 | 1339 |
| | 1096 | 1489 | 224 | 351 | 1620 | 7863 | 9449 | 6123 | 8366 | 6051 | 2183 | 1721 |
| | 9238 | 2680 | 3626 | 3344 | 1116 | 2750 | 6932 | 7588 | 7744 | 103 | 3267 | 5492 |
| | 104 | 9588 | 6655 | 8671 | 8426 | 5594 | 1218 | 7709 | 9637 | 2882 | 3986 | 162 |
| | 8940 | 7045 | 1364 | 3112 | 2088 | 6478 | 9289 | 3965 | 1117 | 5979 | 9329 | 2311 |
| | 956 | 6806 | 9680 | 5660 | 8285 | 1398 | 5343 | 6127 | 7466 | 4784 | 3032 | 5850 |
| | 5920 | 9197 | 3649 | 8744 | 8970 | 8852 | 1984 | 5669 | 7829 | 6594 | 8237 | 1348 |
| | 5789 | 371 | 9957 | 3281 | 2933 | 6102 | 9219 | 4400 | 6788 | 4414 | | |
| 158: | 2959 | 3815 | 4004 | 3362 | 3533 | 6295 | 3034 | 6178 | 1228 | 1025 | 5085 | |
| 159: | 4624 | 1430 | 1961 | 1964 | 9456 | 5156 | 999 | 3374 | 6267 | 1053 | 4084 | 9627 |
| | 5394 | 6413 | 7397 | 8169 | 9718 | 6610 | 7876 | 4383 | 1098 | 1556 | 783 | 6842 |
| | 7112 | 9675 | 3279 | 6197 | 9663 | 4306 | 7970 | 4596 | 7356 | 1390 | 5051 | 7566 |
| | 5754 | 6353 | 2721 | 2365 | 7177 | 7189 | 4841 | 9547 | 3255 | 2850 | 8504 | 1846 |
| | 9224 | 7752 | 6742 | 3039 | 8268 | 3564 | 4153 | 6429 | 9457 | 102 | 4828 | 7200 |
| | 4354 | 6881 | 8323 | 5427 | 6669 | 4252 | 162 | 8940 | 1117 | 5660 | 956 | 7829 |
| | 5669 | 6594 | 4893 | 5253 | 9367 | 5124 | 9369 | 5546 | 157 | 2141 | 205 | 2249 |
| | 7148 | 8237 | 1348 | 5789 | 9493 | 371 | 9957 | 3281 | 2933 | 6102 | 9219 | 4400 |
| | 6788 | 9027 | 8373 | | | | | | | | | |
| 160: | 7398 | 4338 | 6484 | 6449 | 9732 | 6500 | 6496 | 6480 | 6477 | 4169 | 7260 | 6605 |
| | 6606 | 7280 | 8487 | 9607 | 7439 | 9236 | 9237 | 3131 | 6585 | 177 | 7291 | 7290 |
| | 4868 | 7293 | 7295 | 7297 | 7315 | 7279 | 8159 | 6601 | 6624 | 6622 | 6584 | 6583 |
| | 6388 | 6387 | 7341 | 6891 | 7253 | 7321 | 7324 | 3947 | 4452 | 6330 | 6620 | 6598 |
| | 6600 | 3753 | 4899 | 6243 | 9355 | 3157 | 7108 | 7107 | 5977 | 4467 | 3998 | 3181 |
| | 3185 | 3152 | 3155 | 7534 | 1849 | 7442 | 7235 | 3250 | 8494 | 176 | 3357 | 7369 |
| | 8673 | 9585 | 9587 | 8866 | 6046 | 9103 | 4775 | 9951 | 9949 | 9943 | 9947 | 6579 |
| | 6559 | 6561 | 6574 | 1261 | 8729 | 1166 | 9701 | 8492 | 8447 | 8472 | 4317 | 1863 |
| | 7956 | 8326 | 3400 | 1267 | 4696 | 7761 | 1266 | 1270 | 5036 | 7100 | 6366 | 6519 |
| | 6371 | 3055 | 3488 | 6680 | 1088 | 8473 | 8469 | 3126 | 8098 | 5813 | 8496 | 4319 |
| | 8499 | 8500 | 1717 | 1741 | 4313 | 9009 | 854 | 6660 | 5001 | 4099 | 4086 | 4077 |
| | 7241 | 8185 | 3059 | 3060 | 8187 | 2158 | 8207 | 5667 | 8147 | 7379 | 6262 | 9338 |
| | 8145 | 820 | 6646 | 9005 | 2236 | 5469 | 8075 | 8093 | 3501 | 7746 | 1321 | 6007 |
| | 3747 | 1915 | 5153 | 7373 | 3558 | 7476 | 212 | 200 | 2238 | 1617 | 6714 | 8105 |
| | 7317 | 7318 | 6558 | 7716 | 3764 | 7971 | 7968 | 3275 | 6580 | 8476 | 3023 | |
| 161: | 7166 | 6423 | 5969 | 7138 | 7828 | 3577 | 489 | 5529 | 6737 | 9681 | 6534 | 1722 |
| | 8881 | 8779 | 4557 | 8810 | 4325 | 7209 | 9670 | 5063 | 2588 | 3570 | 2468 | 3921 |
| | 9958 | 9301 | 5466 | 911 | 3869 | 3523 | 1591 | 9783 | 2404 | 237 | 7123 | 6479 |
| | 10012 | 1898 | 2921 | 1361 | 341 | 8532 | 2199 | 6079 | 2205 | 4823 | 6562 | 3582 |
| | 4198 | 5437 | 2988 | 1673 | 7066 | 5126 | 9091 | 6045 | 745 | 4216 | 7254 | 5161 |
| | 4887 | 977 | 5407 | 564 | 9761 | 790 | 1009 | 3944 | 8437 | 608 | 1196 | 5222 |
| | 966 | 8036 | 1477 | 2535 | 9234 | 4824 | 5288 | 2506 | 5853 | 2880 | 1778 | 3225 |
| | 6765 | 919 | 4375 | 8702 | 3209 | 4812 | 1562 | 833 | 5353 | 1322 | 3733 | 5817 |
| | 6945 | 3053 | 7049 | 900 | 4591 | 5238 | 5868 | 4483 | 786 | 3201 | 1588 | 7489 |
| | 5700 | 2914 | 5503 | 2660 | 2500 | 6191 | 2902 | 2582 | 8948 | 8351 | 185 | 2766 |
| | 6841 | 9436 | 9478 | 4685 | 9940 | 658 | 4443 | 1344 | 8414 | 1785 | 1349 | 8856 |
| | 417 | 5680 | 984 | 3107 | 1447 | 4089 | 3425 | 2643 | 3781 | 3118 | 4548 | 7197 |
| | 5541 | 6047 | 4613 | 7933 | 2239 | 7734 | 4497 | 9378 | 4202 | 881 | 8999 | 7549 |
| | 2390 | 7637 | 795 | 6418 | 6577 | 5266 | 3253 | 5855 | 6759 | 5325 | 7607 | 3119 |
| | 859 | 2333 | 3220 | 1382 | 4560 | 4268 | 240 | 5654 | 3739 | 8059 | 4397 | 806 |
| | 686 | 8170 | 301 | 2748 | 9480 | 4529 | 838 | 9166 | 769 | 1265 | 1112 | 8997 |
| | 2099 | 1408 | 1829 | 3560 | 8685 | 3440 | 4648 | 6234 | 8422 | 642 | 3978 | 3217 |
| | 755 | 1239 | 3790 | 2682 | 1051 | 5269 | 8390 | 6253 | 6076 | 676 | 6647 | 1805 |
| | 8971 | 7955 | 788 | 9502 | 2675 | 9610 | 2898 | 569 | 3240 | 110 | 7810 | 487 |
| | 9253 | 6155 | 3722 | 2713 | 9746 | 5523 | 8080 | 6768 | 5103 | 4879 | 6805 | 9475 |
| | 7593 | 364 | 7966 | 1217 | 1068 | 592 | 5777 | 568 | 2301 | 3933 | 1747 | |
| 162: | 4624 | 9456 | 5156 | 999 | 3374 | 1053 | 4084 | 9627 | 5394 | 6413 | 2639 | 7397 |
| | 8169 | 6610 | 9718 | 4383 | 1556 | 1098 | 783 | 6842 | 7112 | 9675 | 3279 | 6197 |
| | 4306 | 7970 | 4596 | 7356 | 5051 | 7566 | 5754 | 6353 | 2721 | 2365 | 7177 | 7189 |
| | 9724 | 9547 | 456 | 3255 | 7752 | 3039 | 6783 | 8268 | 3564 | 4153 | 6429 | 9457 |
| | 102 | 4828 | 7200 | 6881 | 4354 | 8323 | 4252 | 6669 | 202 | 7829 | 5669 | 5253 |
| | 9367 | 4893 | 6594 | 157 | 2141 | 205 | 2249 | 7148 | 1348 | 5789 | 9493 | 371 |
| | 9957 | 3281 | 2933 | 6102 | 9219 | 4400 | 6788 | 1117 | 5660 | 956 | | |
| 163: | 3151 | 8646 | 4019 | 4005 | 282 | 299 | 4018 | 4831 | 2576 | 4850 | 3134 | 9124 |
| | 9125 | 9174 | 9175 | 9209 | 9210 | 9127 | 9128 | 9134 | 7493 | 2483 | 4101 | 9518 |
| | 9521 | 907 | 7896 | 937 | 1505 | 8471 | 8474 | 8465 | 5165 | 5181 | 5180 | 7708 |
| | 7710 | 5235 | 5233 | 4103 | 8785 | 8786 | 8790 | 8788 | 8723 | 8703 | 8733 | 8735 |
| | 8748 | 3085 | 8752 | 8765 | 8763 | 8770 | 8784 | 1378 | 1402 | 8799 | 8800 | 8805 |
| | 8802 | 8824 | 8821 | 8826 | 9314 | 9317 | 9320 | 9322 | 9318 | 9345 | 9344 | 9352 |
| | 9354 | 9384 | 9400 | 9358 | 9356 | 9374 | 9380 | 9377 | 9382 | 9406 | 9408 | 9421 |
| | 9425 | 9422 | 9427 | 9439 | 9440 | 9442 | 9447 | 9443 | 9461 | 9466 | 9463 | 9485 |
| | 9468 | 9487 | 9488 | 9489 | 9495 | 9511 | 9963 | 9965 | 9970 | 9990 | 9968 | 9966 |
| | 9996 | 10001 | 9997 | 8766 | 8768 | 8647 | 8651 | 8652 | 8667 | 8699 | 1432 | 1504 |
| | 1455 | 1502 | 805 | 7528 | 5864 | 5866 | 2489 | 9147 | 9148 | 281 | 9206 | 9208 |
| | 9225 | 9227 | 2563 | 9229 | 9230 | 715 | 2008 | 2011 | 1387 | 1389 | 9100 | 9101 |
| | 9130 | 9131 | 7770 | 7787 | 9150 | 9151 | 4834 | 9179 | 9180 | 4837 | 3153 | 2065 |
| | 2067 | 2086 | 2087 | 4460 | 3913 | 3911 | 3103 | 1391 | 1395 | 2491 | 1928 | 1926 |
| | 1973 | 4008 | 4003 | 8746 | 8743 | 8833 | 8829 | 9993 | 1940 | 1963 | 1992 | 2006 |
| | 1932 | 1938 | 5044 | 933 | 939 | 7558 | 4219 | 808 | 908 | 811 | 813 | 7526 |
| | 7481 | 828 | 4221 | 826 | 814 | 931 | 829 | 910 | 851 | 832 | 7505 | 853 |
| | 835 | 7429 | 7486 | 7391 | 7388 | 7364 | 7527 | 7417 | 7433 | 7465 | 964 | 875 |
| | 7363 | 874 | 876 | 7361 | 7360 | 909 | 4223 | 7457 | 7462 | 879 | 7459 | 4206 |
| | 7482 | 4733 | 7464 | 7507 | 7557 | 889 | 7392 | 935 | 7504 | 7393 | 7532 | 7488 |
| | 4205 | 7554 | 7437 | 7533 | 960 | 7415 | 894 | 892 | 897 | 5532 | 959 | 890 |
| | 7552 | 4942 | 3959 | 3972 | 3957 | 3991 | 3971 | 5758 | 5070 | 2448 | 2449 | 2452 |
| | 2466 | 2493 | 2495 | 2497 | 2560 | 7368 | 7501 | 7556 | 4726 | 4728 | 1966 | 9177 |
| | 1397 | 2514 | 2538 | 711 | 958 | 1035 | 7575 | 7434 | 855 | 871 | 7484 | 857 |
| | 860 | 962 | 7502 | 7420 | 7416 | 5068 | 4938 | 1433 | 7986 | 8001 | 1480 | 8005 |
| | 1501 | 1528 | 1373 | 3095 | 4225 | 4730 | 7396 | 1277 | 1279 | 947 | 7932 | 7935 |
| | 2285 | 2287 | 4374 | 4910 | 4927 | 4929 | 4931 | 4933 | 4935 | 9181 | 9182 | 1485 |
| | 6986 | 3088 | 1522 | 1338 | 1356 | 1353 | 1427 | 1426 | 1487 | 1525 | 1351 | 1399 |
| | 1521 | 1524 | 1507 | 1488 | 2472 | 1358 | 1376 | 1401 | 1464 | 3104 | 4949 | 4950 |
| | 4955 | 4957 | 4960 | 4988 | 4989 | 4993 | 4998 | 4999 | 5022 | 5023 | 5024 | 5028 |
| | 5031 | 5486 | 5488 | 5489 | 5490 | 5494 | 5507 | 5510 | 5513 | 5515 | 5511 | 5527 |
| | 3101 | 7954 | 7958 | 7957 | 7899 | 7903 | 4372 | 4385 | 7928 | 7959 | 7976 | 7951 |
| | 7981 | 7984 | 8019 | 8006 | 8025 | 8020 | 4368 | 4366 | 4343 | 4363 | 4382 | 7894 |
| | 8026 | 4334 | 4332 | 4822 | 8003 | 7923 | 7983 | 4336 | 3180 | 3158 | 3129 | 2245 |
| | 3086 | 3137 | 2290 | 3183 | 3186 | 3188 | 8700 | 8701 | 2393 | 2368 | 3117 | 4739 |
| | 4972 | 4763 | 4766 | 4772 | 4806 | 2241 | 2289 | 2305 | 2270 | 2264 | 2267 | 2284 |
| | 2212 | 2237 | 6357 | 4975 | 4756 | 9294 | 8327 | 5259 | 5256 | 5867 | 4794 | 8493 |
| | 8497 | 1931 | 3144 | 3142 | 3121 | 1113 | 5209 | 7676 | 7658 | 7675 | 3548 | 3551 |
| | 4329 | 8490 | 9196 | 9198 | 4848 | 9152 | 9155 | 9145 | 9144 | 9135 | 9136 | 9204 |
| | 8385 | 2228 | 2226 | 2231 | 2234 | 3552 | 3553 | 1589 | 7721 | 9640 | 2515 | 2518 |
| | 277 | 3910 | 3018 | 6615 | 3355 | 6975 | 6980 | 6976 | 7713 | 7000 | 3517 | 4790 |
| | 4802 | 4830 | 3405 | 2451 | 4011 | 4833 | 5828 | 4712 | 4805 | 4771 | 4746 | 5318 |
| | 4713 | 4793 | 4835 | 5319 | 5317 | 4742 | 4764 | 1421 | 1424 | 9606 | 6625 | 1969 |
| | 1971 | 1434 | 8672 | 8669 | 3130 | 2013 | 2029 | 9516 | 8726 | 8730 | 9336 | 9339 |
| | 9337 | 4829 | 6934 | 1743 | 5745 | 1958 | 7869 | 6426 | 1986 | 1987 | 7340 | 5037 |
| | 4785 | 4789 | 912 | 3876 | 3873 | 3891 | 3102 | 8807 | 8626 | 8642 | 3132 | 4854 |
| | 9232 | 9233 | 9202 | 9132 | 1418 | 1419 | 9199 | 9200 | 9184 | 1628 | 1172 | 1175 |
| | 1177 | 9360 | 4765 | 5061 | 671 | 657 | 669 | 655 | 5314 | 5067 | 8113 | 8117 |
| | 978 | 8270 | 165 | 7255 | 8809 | 298 | 1989 | 1991 | 4796 | 4808 | 6244 | 6488 |
| | 6490 | 6503 | 4743 | 3312 | 6822 | 4067 | 5279 | 9156 | 9158 | 5205 | 3147 | 3168 |
| | 3172 | 4856 | 3156 | 1548 | 1798 | 1546 | 208 | 8944 | 8933 | 8949 | 8276 | 8279 |
| | 8281 | 8203 | 8204 | 6005 | 8253 | 8992 | 8995 | 8996 | 8972 | 8991 | 9519 | 8197 |
| | 5917 | 5978 | 8223 | 5984 | 5936 | 8316 | 5956 | 5958 | 8226 | 8229 | 8300 | 9098 |
| | 9099 | 9560 | 9580 | 9579 | 9582 | 9583 | 8919 | 7418 | 7794 | 1587 | 1579 | 7692 |
| | 5273 | 1593 | 5261 | 4710 | 4279 | 1547 | 6497 | 3895 | 3893 | 3907 | 3081 | 4195 |
| | 5210 | 4758 | 4197 | 8832 | 8916 | 8851 | 8857 | 8894 | 8892 | 8871 | 8865 | 8849 |
| | 8872 | 8889 | 8874 | 8927 | 8932 | 8930 | 8895 | 8909 | 4770 | 7681 | 7691 | 5226 |
| | 5213 | 5157 | 5160 | 1375 | 1400 | 1458 | 1462 | 1482 | 2037 | 2041 | 9172 | 5321 |
| | 1396 | 1415 | 4714 | 4741 | 4966 | 4970 | 5000 | 5002 | 4745 | 5003 | 4760 | 4762 |
| | 5005 | 4769 | 4798 | 5064 | 1379 | 1352 | 1341 | 1453 | 3929 | 3925 | 3080 | 8750 |
| | 7430 | 9401 | 9403 | 2007 | 2062 | 2059 | 2064 | 4857 | 8675 | 8677 | 4940 | 4965 |
| | 4973 | 5004 | 5039 | 5041 | 5045 | 705 | 707 | 691 | 693 | 692 | 2033 | 2035 |
| | 4740 | 4709 | 4749 | 4748 | 4803 | 5312 | 5313 | 5315 | 1745 | 9855 | 6821 | |
| 164: | 6237 | 6238 | 7766 | 2180 | 5501 | 6061 | 617 | 1996 | 7115 | 6328 | 7621 | 9726 |
| | 1897 | 1879 | 6204 | 5480 | 6298 | 8537 | 6412 | 5959 | 1784 | 7642 | 8015 | 1736 |
| | 9952 | 8126 | 432 | 3822 | 4362 | 5750 | 5671 | 7677 | | | | |
| 165: | 3151 | 1577 | 8646 | 4019 | 4005 | 282 | 299 | 4018 | 4831 | 2576 | 4850 | 3134 |
| | 9124 | 9125 | 9174 | 9175 | 9209 | 9210 | 9127 | 9128 | 9134 | 7493 | 2483 | 9518 |
| | 9521 | 907 | 7896 | 937 | 1505 | 2252 | 2804 | 2782 | 2779 | 2822 | 2224 | 2251 |
| | 2149 | 2256 | 2846 | 2781 | 2257 | 2255 | 2855 | 2852 | 2797 | 2785 | 2221 | 2802 |
| | 2873 | 2849 | 2786 | 2819 | 2795 | 2799 | 2148 | 2198 | 2192 | 2168 | 2225 | 2218 |
| | 2197 | 2867 | 2864 | 2825 | 2196 | 2193 | 2171 | 2169 | 2830 | 2219 | 2173 | 2166 |
| | 2853 | 2827 | 2889 | 2871 | 2874 | 8471 | 8474 | 8465 | 5165 | 5181 | 5180 | 7708 |
| | 7710 | 5235 | 5233 | 4103 | 8785 | 8786 | 8790 | 8788 | 8723 | 8703 | 8733 | 8735 |
| | 8748 | 3085 | 8752 | 8765 | 8763 | 8770 | 8784 | 1378 | 1402 | 8799 | 8800 | 8805 |
| | 8802 | 8824 | 8821 | 8826 | 9314 | 9317 | 9320 | 9322 | 9318 | 9345 | 9344 | 9352 |
| | 9354 | 9384 | 9400 | 9358 | 9356 | 9374 | 9380 | 9377 | 9382 | 9406 | 9408 | 9421 |
| | 9425 | 9422 | 9427 | 9439 | 9440 | 9442 | 9447 | 9443 | 9461 | 9466 | 9463 | 9485 |
| | 9468 | 9487 | 9488 | 9489 | 9495 | 9511 | 9963 | 9965 | 9970 | 9990 | 9968 | 9966 |
| | 9996 | 10001 | 9997 | 8766 | 8768 | 8647 | 8651 | 8652 | 8667 | 8699 | 1432 | 1504 |
| | 1455 | 1502 | 805 | 7528 | 5864 | 5866 | 2489 | 9147 | 9148 | 281 | 3195 | 2773 |
| | 9206 | 9208 | 9225 | 9227 | 2563 | 9229 | 9230 | 715 | 2008 | 2011 | 1387 | 1389 |
| | 9100 | 9101 | 9130 | 9131 | 7770 | 7787 | 9150 | 9151 | 4834 | 9179 | 9180 | 4837 |
| | 3153 | 2065 | 2067 | 2086 | 2087 | 4460 | 3913 | 3911 | 3103 | 1391 | 1395 | 2491 |
| | 1928 | 1926 | 1973 | 4008 | 4003 | 8746 | 8743 | 8833 | 8829 | 9993 | 1940 | 1963 |
| | 1992 | 2006 | 1932 | 1938 | 5044 | 933 | 939 | 7558 | 4219 | 808 | 908 | 811 |
| | 813 | 7526 | 7481 | 828 | 4221 | 826 | 814 | 931 | 829 | 910 | 851 | 832 |
| | 7505 | 853 | 835 | 7429 | 7486 | 7391 | 7388 | 7364 | 7527 | 7417 | 7433 | 7465 |
| | 964 | 875 | 7363 | 874 | 876 | 7361 | 7360 | 909 | 4223 | 7457 | 7462 | 879 |
| | 7459 | 4206 | 7482 | 4733 | 7464 | 7507 | 7557 | 889 | 7392 | 935 | 7504 | 7393 |
| | 7532 | 7488 | 4205 | 7554 | 7437 | 7533 | 960 | 7415 | 894 | 892 | 897 | 5532 |
| | 959 | 890 | 7552 | 4942 | 3959 | 3972 | 3957 | 3991 | 3971 | 5758 | 5070 | 2448 |
| | 2449 | 2452 | 2466 | 2493 | 2495 | 2497 | 2560 | 7368 | 7501 | 7556 | 4726 | 4728 |
| | 1966 | 9177 | 1397 | 2514 | 2538 | 711 | 958 | 1035 | 7575 | 7434 | 855 | 871 |
| | 7484 | 860 | 857 | 962 | 7502 | 7420 | 7416 | 5068 | 4938 | 1433 | 7986 | 8001 |
| | 1480 | 8005 | 1501 | 1528 | 1373 | 3095 | 4225 | 4730 | 7396 | 1277 | 1279 | 947 |
| | 7932 | 7935 | 2285 | 2287 | 4374 | 4910 | 4927 | 4929 | 4931 | 4933 | 4935 | 9181 |
| | 9182 | 1485 | 6986 | 976 | 3088 | 1522 | 1338 | 1356 | 1353 | 1427 | 1426 | 1487 |
| | 1525 | 1351 | 1399 | 1521 | 1524 | 1507 | 1488 | 2472 | 1358 | 1376 | 1401 | 1464 |
| | 3104 | 4949 | 4950 | 4955 | 4957 | 4960 | 4988 | 4989 | 4993 | 4998 | 4999 | 5022 |
| | 5023 | 5024 | 5028 | 5031 | 5486 | 5488 | 5489 | 5490 | 5494 | 5507 | 5510 | 5513 |
| | 5515 | 5511 | 5527 | 3101 | 7954 | 7958 | 7957 | 7899 | 7903 | 4372 | 4385 | 7928 |
| | 7959 | 7976 | 7951 | 7981 | 7984 | 8019 | 8006 | 8025 | 8020 | 4368 | 4366 | 4343 |
| | 4363 | 4382 | 7894 | 8026 | 4334 | 4332 | 4822 | 7117 | 8003 | 7923 | 7983 | 4336 |
| | 3180 | 3158 | 3129 | 2245 | 3086 | 3137 | 2290 | 3183 | 3186 | 3188 | 8700 | 8701 |
| | 2393 | 2368 | 3117 | 4739 | 4972 | 4763 | 4766 | 4772 | 4806 | 2241 | 2289 | 2305 |
| | 2270 | 2264 | 2267 | 2284 | 2212 | 2237 | 6357 | 4975 | 4756 | 9294 | 8327 | 5259 |
| | 5256 | 5867 | 4794 | 8493 | 8497 | 3144 | 3142 | 1113 | 7676 | 7658 | 7675 | 3548 |
| | 3551 | 4329 | 8490 | 9196 | 9198 | 4848 | 9152 | 9155 | 9145 | 9144 | 9135 | 9136 |
| | 9204 | 8385 | 2226 | 2228 | 2231 | 2234 | 3552 | 3553 | 7721 | 9640 | 2515 | 2518 |
| | 277 | 3910 | 3018 | 6615 | 3355 | 6975 | 6980 | 6976 | 7713 | 7000 | 3517 | 4790 |
| | 4802 | 4830 | 3405 | 2451 | 4011 | 4833 | 5828 | 4712 | 4805 | 4771 | 4746 | 5318 |
| | 4713 | 4793 | 4835 | 5319 | 5317 | 4742 | 4764 | 1421 | 1424 | 9606 | 6625 | 1969 |
| | 1971 | 1434 | 8672 | 8669 | 3130 | 2013 | 2029 | 9516 | 8726 | 8730 | 9336 | 9339 |
| | 9337 | 6631 | 4829 | 6934 | 1743 | 5745 | 1958 | 7869 | 6426 | 1986 | 1987 | 7340 |
| | 5037 | 4785 | 4789 | 912 | 3876 | 3873 | 3891 | 3102 | 8807 | 8626 | 8642 | 3132 |
| | 4854 | 9232 | 9233 | 9202 | 9132 | 1418 | 1419 | 9199 | 9200 | 9184 | 1628 | 1172 |
| | 1175 | 1177 | 9360 | 4765 | 9855 | 163 | 5084 | 6821 | 5061 | 671 | 657 | 669 |
| | 655 | 5314 | 5067 | 8113 | 8117 | 298 | 1989 | 1991 | 4796 | 4808 | 6244 | 6488 |
| | 6490 | 6503 | 4743 | 3312 | 6822 | 4067 | 5279 | 9156 | 9158 | 5205 | 3147 | 3168 |
| | 4856 | 3156 | 1548 | 1798 | 1546 | 208 | 8944 | 8933 | 8949 | 8276 | 8279 | 8281 |
| | 8203 | 6005 | 8253 | 8992 | 8995 | 8996 | 8972 | 8991 | 9519 | 8197 | 5917 | 5978 |
| | 8223 | 5984 | 5936 | 8316 | 5956 | 5958 | 8226 | 8229 | 8300 | 9098 | 9099 | 9560 |
| | 9563 | 9580 | 9579 | 9582 | 9583 | 8919 | 7418 | 7794 | 1587 | 1579 | 7692 | 5273 |
| | 1593 | 5261 | 4710 | 4279 | 1547 | 3895 | 3893 | 3907 | 3081 | 4195 | 5210 | 4758 |
| | 4197 | 4727 | 8832 | 8916 | 8851 | 8857 | 8894 | 8892 | 8871 | 8865 | 8849 | 8872 |
| | 8889 | 8874 | 8927 | 8932 | 8930 | 8895 | 8909 | 4770 | 1062 | 7681 | 7691 | 5213 |
| | 5226 | 5157 | 5160 | 1375 | 1400 | 1458 | 1462 | 1482 | 2037 | 2041 | 9172 | 5321 |
| | 1396 | 1415 | 4714 | 4741 | 4966 | 4970 | 5000 | 5002 | 4745 | 5003 | 4760 | 4762 |
| | 5005 | 4769 | 4798 | 5064 | 7114 | 1379 | 1352 | 1341 | 1453 | 3929 | 3925 | 3080 |
| | 8750 | 7430 | 9401 | 9403 | 2007 | 2059 | 2062 | 2064 | 4857 | 8675 | 8677 | 4940 |
| | 4965 | 4973 | 5004 | 5039 | 5041 | 5045 | 705 | 707 | 691 | 693 | 692 | 2033 |
| | 2035 | 4740 | 4709 | 4749 | 4748 | 4803 | 5312 | 5313 | 5315 | 1745 | 8270 | |
| 166: | 7398 | 6484 | 6449 | 4729 | 6500 | 6496 | 6480 | 6477 | 4169 | 7256 | 7258 | 2351 |
| | 6605 | 6606 | 7280 | 9607 | 7439 | 9571 | 9415 | 6711 | 9236 | 9237 | 6585 | 177 |
| | 1949 | 7291 | 7290 | 4868 | 6438 | 6265 | 7293 | 7295 | 7297 | 7315 | 7279 | 7792 |
| | 7788 | 8159 | 6601 | 6622 | 6624 | 6584 | 6583 | 6388 | 7341 | 7253 | 7277 | 7321 |
| | 7324 | 3947 | 6620 | 6598 | 6600 | 4296 | 3753 | 4899 | 6243 | 4253 | 4128 | 9355 |
| | 8071 | 7568 | 7534 | 7244 | 7442 | 7468 | 7820 | 7235 | 3250 | 8494 | 176 | 6372 |
| | 7369 | 4428 | 8866 | 4775 | 7525 | 8255 | 5421 | 9967 | 6579 | 6559 | 6561 | 2768 |
| | 1166 | 9701 | 4083 | 9703 | 8447 | 4312 | 8472 | 4317 | 1863 | 7956 | 3400 | 757 |
| | 3642 | 5036 | 7100 | 3055 | 3488 | 6680 | 4587 | 8473 | 8469 | 3126 | 8477 | 8098 |
| | 5813 | 9879 | 2965 | 9740 | 5142 | 8499 | 4319 | 8500 | 1717 | 8410 | 2883 | 1410 |
| | 641 | 854 | 6660 | 5001 | 4099 | 4086 | 7241 | 4077 | 7237 | 8777 | 3059 | 8185 |
| | 5491 | 3060 | 5667 | 7379 | 6262 | 9338 | 4236 | 6646 | 2236 | 8075 | 8093 | 8076 |
| | 2767 | 7746 | 7749 | 1321 | 6007 | 7724 | 7373 | 7376 | 3558 | 7476 | 1732 | 1734 |
| | 1740 | 1738 | 212 | 200 | 6714 | 7317 | 7318 | 1689 | 1709 | 6558 | 7716 | 3764 |
| | 435 | 7971 | 7968 | 6580 | 8476 | 5457 | 1346 | | | | | |

### EXAMPLE 5

### Selection of Transgenic Plants with Enhanced Agronomic Trait(s)

[0092] This example illustrates identification of plant cells of the invention by screening derived plants and seeds for enhanced trait. Transgenic corn seed and plants with recombinant DNA identified in Table 1 were prepared by plant cells transformed with DNA that was stably integrated into the genome of the corn cell. The transgenic seed, plantlets and progeny plants were selected using the methods that measure Transgenic corn plant cells were transformed with recombinant DNA from each of the genes identified in Table 1. Progeny transgenic plants and seed of the transformed plant cells were screened for enhanced water use efficiency, enhanced cold tolerance, increased yield, enhanced nitrogen use efficiency, enhanced seed protein and enhanced seed oil as compared to control plants.

A. Selection for Enhanced Nitrogen Use Efficiency

[0093] The physiological efficacy of transgenic corn plants (tested as hybrids) can be tested for nitrogen use efficiency (NUE) traits in a high-throughput nitrogen (N) selection method. The collected data are compared to the measurements from wildtype controls using a statistical model to determine if the changes are due to the transgene. Raw data were analyzed by SAS software. Results shown herein are the comparison of transgenic plants relative to the wildtype controls.

(1) Media Preparation for Planting a NUE Protocol

[0094] Planting materials used: Metro Mix 200 (vendor: Hummert) Cat. #10-0325, Scotts Micro Max Nutrients (vendor: Hummert) Cat. #07-6330, OS 4⅓″×3⅞″ pots (vendor: Hummert) Cat. #16-1415, OS trays (vendor: Hummert) Cat. #16-1515, Hoagland's macronutrients solution, Plastic 5″ stakes (vendor: Hummert) yellow Cat. #49-1569, white Cat. #49-1505, Labels with numbers indicating material contained in pots. Fill 500 pots to rim with Metro Mix 200 to a weight of ˜140g/pot. Pots are filled uniformly by using a balancer. Add 0.4 g of Micro Max nutrients to each pot. Stir ingredients with spatula to a depth of 3 inches while preventing material loss.

(2) Planting a NUE Selection in the Greenhouse

[0095] (a) Seed Germination—Each pot is lightly atered twice using reverse osmosis purified water. The first watering is scheduled to occur just before planting; and the second watering, after the seed has been planted in the pot. Ten Seeds of each entry (1 seed per pot) are planted to select eight healthy uniform seedlings. Additional wild type controls are planted for use as border rows. Alternatively, 15 seeds of each entry (1 seed per pot) are planted to select 12 healthy uniform seedlings (this larger number of plantings is used for the second, or confirmation, planting). Place pots on each of the 12 shelves in the Conviron growth chamber for seven days. This is done to allow more uniform germination and early seedling growth. The following growth chamber settings are 25° C./day and 22° C./night, 14 hours light and ten hours dark, humidity ˜80%, and light intensity ˜350 μmol/m²/s (at pot level). Watering is done via capillary matting similar to greenhouse benches with duration of ten minutes three times a day.

[0096] (b) Seedling transfer—After seven days, the best eight or 12 seedlings for the first or confirmation pass runs, respectively, are chosen and transferred to greenhouse benches. The pots are spaced eight inches apart (center to center) and are positioned on the benches using the spacing patterns printed on the capillary matting. The Vattex matting creates a 384-position grid, randomizing all range, row combinations. Additional pots of controls are placed along the outside of the experimental block to reduce border effects.

[0097] Plants are allowed to grow for 28 days under the low N run or for 23 days under the high N run. The macronutrients are dispensed in the form of a macronutrient solution (see composition below) containing precise amounts of N added (2 mM NH₄NO₃ for limiting N selection and 20 mM NH₄NO₃ for high N selection runs). Each pot is manually dispensed 100 ml of nutrient solution three times a week on alternate days starting at eight and ten days after planting for high N and low N runs, respectively. On the day of nutrient application, two 20 min waterings at 05:00 and 13:00 are skipped. The vattex matting should be changed every third run to avoid N accumulation and buildup of root matter. Table 7 shows the amount of nutrients in the nutrient solution for either the low or high nitrogen selection.

TABLE 7

| | 2 mM NH₄NO₃ | 20 mM NH₄NO₃ (high |
|---|---|---|
| | (Low Nitrogen Growth | Nitrogen Growth |
| | Condition, Low N) | Condition, High N) |
| Nutrient Stock | mL/L | mL/L |
| 1 M NH₄N0₃ | 2 | 20 |
| 1 M KH₂PO₄ | 0.5 | 0.5 |
| 1 M MgSO₄•7H₂O | 2 | 2 |
| 1 M CaCl₂ | 2.5 | 2.5 |
| 1 M K₂SO₄ | 1 | 1 |

Note:
Adjust pH to 5.6 with HCl or KOH

[0098] (c) Harvest Measurements and Data Collection—After 28 days of plant growth for low N runs and 23 days of plant growth for high N runs, the following measurements are taken (phenocodes in parentheses): total shoot fresh mass (g) (SFM) measured by Sartorius electronic balance, V6 leaf chlorophyll measured by Minolta SPAD meter (relative units) (LC), V6 leaf area (cm²) (LA) measured by a Li—Cor leaf area meter, V6 leaf fresh mass (g) (LFM) measured by Sartorius electronic balance, and V6 leaf dry mass (g) (LDM) measured by Sartorius electronic balance. Raw data were analyzed by SAS software. Results shown are the comparison of transgenic plants relative to the wildtype controls.

[0099] To take a leaf reading, samples were excised from the V6 leaf. Since chlorophyll meter readings of corn leaves are affected by the part of the leaf and the position of the leaf on the plant that is sampled, SPAD meter readings were done on leaf six of the plants. Three measurements per leaf were taken, of which the first reading was taken from a point one-half the distance between the leaf tip and the collar and halfway from the leaf margin to the midrib while two were taken toward the leaf tip. The measurements were restricted in the area from ½ to ¾ of the total length of the leaf (from the base) with approximately equal spacing between them. The average of the three measurements was taken from the SPAD machine.

[0100] Leaf fresh mass is recorded for an excised V6 leaf, the leaf is placed into a paper bag. The paper bags containing the leaves are then placed into a forced air oven at 80° C. for 3 days. After 3 days, the paper bags are removed from the oven and the leaf dry mass measurements are taken.

[0101] From the collected data, two derived measurements are made: (1) Leaf chlorophyll area (LCA), which is a product of V6 relative chlorophyll content and its leaf area (relative units). Leaf chlorophyll area=leaf chlorophyll X leaf area. This parameter gives an indication of the spread of chlorophyll over the entire leaf area; (2)specific leaf area (LSA) is calculated as the ratio of V6 leaf area to its dry mass (cm²/g dry mass), a parameter also recognized as a measure of NUE. The data are shown in Table 8.

TABLE 8

| | | | | | | | Leaf chlorophyll | | | | Shoot fresh mass | | | |
|---|---|---|---|---|---|---|---|---|---|---|---|---|---|---|
| | | | | | | | | | Mean | | | | Mean | |
| PEP | | | Leaf chlorophyll area | | | | | | of | | | | of | |
| SEQ | Construct | | Percent | | Mean of | | Percent | | con- | | Percent | | con- | |
| ID | ID | Event ID | change | Mean | controls | P-value | change | Mean | trols | P-value | change | Mean | trols | P-value |
| 91 | PMON73816 | ZM_M37183 | 4 | 3688.43 | 3558.85 | 0.221 | 3 | 24.54 | 23.73 | 0.0722 | 5 | 48.04 | 45.92 | 0.1289 |
| | PMON73816 | ZM_M37183 | 15 | 5963.14 | 5180.33 | 0 | 12 | 31.72 | 28.41 | 0 | 16 | 48.24 | 41.48 | 1.00E−04 |
| | PMON73816 | ZM_M37183 | 8 | 4796 | 4439.2 | 0.0438 | 3 | 27.1 | 26.2 | 0.2569 | 23 | 55.2 | 44.8 | 0 |
| | PMON73816 | ZM_M37188 | 12 | 4002.73 | 3558.85 | 0 | 13 | 26.86 | 23.73 | 0 | 4 | 47.83 | 45.92 | 0.1707 |
| | PMON73816 | ZM_M37188 | 13 | 5832.79 | 5180.33 | 3.00E−04 | 12 | 31.73 | 28.41 | 0 | 11 | 46.25 | 41.48 | 0.0046 |
| | PMON73816 | ZM_M37188 | −9 | 4037.7 | 4439.2 | 0.0234 | −1 | 26 | 26.2 | 0.7492 | −10 | 40.4 | 44.8 | 0.0144 |
| | PMON73816 | ZM_M37197 | 4 | 5375.2 | 5180.33 | 0.2694 | 1 | 28.81 | 28.41 | 0.5194 | 17 | 48.42 | 41.48 | 0 |
| | PMON73816 | ZM_M37197 | 21 | 5374.8 | 4439.2 | 0 | 14 | 29.9 | 26.2 | 0 | 30 | 58.4 | 44.8 | 0 |
| | PMON73816 | ZM_M37197 | 5 | 3733.33 | 3558.85 | 0.0996 | 1 | 24.02 | 23.73 | 0.522 | 5 | 48.42 | 45.92 | 0.0742 |
| 100 | PMON75511 | ZM_M44958 | 18.1 | 5065.43 | 4287.52 | 1.00E−04 | 13.9 | 29.44 | 25.86 | 0 | 12 | 44.22 | 39.48 | 0.0096 |
| | PMON75511 | ZM_M44958 | 7.3 | 8006.21 | 7460.91 | 0.0071 | 5.5 | 40.63 | 38.5 | 0.0072 | 0 | 67.53 | 67.56 | 0.9892 |
| | PMON75511 | ZM_M44961 | 8.2 | 4639.06 | 4287.52 | 0.0583 | 5.8 | 27.36 | 25.86 | 0.0449 | 6.7 | 42.13 | 39.48 | 0.1258 |
| | PMON75511 | ZM_M44961 | 4.7 | 7810.27 | 7460.91 | 0.0947 | 4.9 | 40.41 | 38.5 | 0.0195 | 4.9 | 70.87 | 67.56 | 0.1511 |
| | PMON75511 | ZM_M46591 | 5.1 | 4504.72 | 4287.52 | 0.2951 | 5.5 | 27.27 | 25.86 | 0.0734 | −4.5 | 37.69 | 39.48 | 0.3276 |
| | PMON75511 | ZM_M46591 | −4.3 | 7142.88 | 7460.91 | 0.1149 | −1.4 | 37.98 | 38.5 | 0.4997 | 8 | 72.98 | 67.56 | 0.0151 |
| | PMON75511 | ZM_M46601 | 12.3 | 4813.03 | 4287.52 | 0.0117 | 4.7 | 27.07 | 25.86 | 0.1494 | 22.4 | 48.31 | 39.48 | 0 |
| | PMON75511 | ZM_M46601 | 7.7 | 8036.73 | 7460.91 | 0.0045 | 5 | 40.44 | 38.5 | 0.014 | 0.3 | 67.76 | 67.56 | 0.93 |
| 114 | PMON75980 | ZM_M53387 | −8 | 3998.29 | 4368.22 | 0.0065 | 2 | 24.35 | 23.8 | 0.3237 | −18 | 37.79 | 45.85 | 0 |
| | PMON75980 | ZM_M53389 | −10 | 3323.6 | 3691.69 | 0.0189 | −3 | 23.05 | 23.65 | 0.3551 | −8 | 30.6 | 33.21 | 0.0804 |
| | PMON75980 | ZM_M53389 | −5 | 4139.75 | 4368.22 | 0.1038 | −2 | 23.42 | 23.8 | 0.4834 | −10 | 41.22 | 45.85 | 0.0031 |
| | PMON75980 | ZM_M53390 | 8 | 4728.73 | 4368.22 | 0.0188 | 5 | 25.07 | 23.8 | 0.0272 | −3 | 44.65 | 45.85 | 0.4407 |
| | PMON75980 | ZM_M53390 | 10 | 4044.06 | 3691.69 | 0.0245 | 2 | 24.24 | 23.65 | 0.3703 | 9 | 36.29 | 33.21 | 0.0398 |
| | PMON75980 | ZM_M53392 | 27 | 4679.18 | 3691.69 | 0 | 10 | 26.06 | 23.65 | 3.00E−04 | 27 | 42.31 | 33.21 | 0 |
| | PMON75980 | ZM_M53392 | 2 | 4446.67 | 4368.22 | 0.5757 | 4 | 24.88 | 23.8 | 0.0534 | 3 | 47.36 | 45.85 | 0.3298 |
| | PMON75980 | ZM_M53396 | 13 | 4948.67 | 4368.22 | 0 | 7 | 25.37 | 23.8 | 0.0068 | 8 | 49.32 | 45.85 | 0.0259 |
| | PMON75980 | ZM_M53396 | 16 | 4271.59 | 3691.69 | 2.00E−04 | 4 | 24.7 | 23.65 | 0.109 | 13 | 37.46 | 33.21 | 0.0046 |
| | PMON75980 | ZM_M53397 | 1 | 4411.5 | 4368.22 | 0.7574 | 1 | 24.06 | 23.8 | 0.6707 | −6 | 43.08 | 45.85 | 0.0992 |
| | PMON75980 | ZM_M53398 | 2 | 4476.43 | 4368.22 | 0.4235 | 7 | 25.36 | 23.8 | 0.0052 | −6 | 43.12 | 45.85 | 0.0792 |
| 103 | PMON78949 | ZM_M63936 | −2.1 | 4587.66 | 4686.12 | 0.4835 | 3.3 | 30.35 | 29.37 | 0.1605 | −6.1 | 32.65 | 34.77 | 0.0457 |
| | PMON78949 | ZM_M63936 | −2.1 | 3863.18 | 3946.32 | 0.4391 | −0.6 | 28.37 | 28.55 | 0.7352 | 8.7 | 45.14 | 41.55 | 0.0077 |
| | PMON78949 | ZM_M63941 | 7.5 | 5037.73 | 4686.12 | 0.0128 | 3.9 | 30.51 | 29.37 | 0.1021 | 7.4 | 37.33 | 34.77 | 0.0158 |
| | PMON78949 | ZM_M63941 | −1.9 | 3871.03 | 3946.32 | 0.4835 | −2.5 | 27.83 | 28.55 | 0.1742 | 9.8 | 45.63 | 41.55 | 0.0036 |
| | PMON78949 | ZM_M63942 | 7.5 | 5036.21 | 4686.12 | 0.0132 | 6.4 | 31.26 | 29.37 | 0.007 | 9.2 | 37.98 | 34.77 | 0.0025 |
| | PMON78949 | ZM_M63942 | 13 | 4459.25 | 3946.32 | 0 | 7.6 | 30.73 | 28.55 | 0 | 9.2 | 45.37 | 41.55 | 0.0047 |
| | PMON78949 | ZM_M63944 | 4.3 | 4887.29 | 4686.12 | 0.1528 | 4.9 | 30.81 | 29.37 | 0.0393 | −6.6 | 32.48 | 34.77 | 0.0306 |
| | PMON78949 | ZM_M63944 | 0.8 | 3979.53 | 3946.32 | 0.7571 | 0.4 | 28.66 | 28.55 | 0.8318 | −0.9 | 41.17 | 41.55 | 0.7776 |
| 108 | PMON79709 | ZM_M51983 | 3 | 5110.49 | 4947.82 | 0.1855 | 6 | 28.18 | 26.59 | 0.0012 | 4 | 46.1 | 44.36 | 0.076 |
| | PMON79709 | ZM_M51983 | 2 | 6011.13 | 5906.6 | 0.6174 | 3 | 28.75 | 27.9 | 0.2078 | 16 | 62.26 | 53.53 | 2.00E−04 |
| | PMON79709 | ZM_M51983 | 0.9 | 5829.16 | 5776.02 | 0.7681 | −0.7 | 30.24 | 30.45 | 0.7671 | −3.1 | 45.46 | 46.92 | 0.4097 |
| | PMON79709 | ZM_M51985 | 0 | 5773.16 | 5776.02 | 0.988 | −0.2 | 30.38 | 30.45 | 0.9183 | −1.6 | 46.16 | 46.92 | 0.682 |
| | PMON79709 | ZM_M51985 | 7 | 6301.05 | 5906.6 | 0.0602 | 3 | 28.81 | 27.9 | 0.1763 | 16 | 62.11 | 53.53 | 2.00E−04 |
| | PMON79709 | ZM_M51985 | 6 | 5263.87 | 4947.82 | 0.0079 | 6 | 28.07 | 26.59 | 0.0026 | 3 | 45.48 | 44.36 | 0.2555 |
| | PMON79709 | ZM_M52025 | 3 | 5075.34 | 4947.82 | 0.2817 | 4 | 27.58 | 26.59 | 0.0415 | 4 | 46.33 | 44.36 | 0.052 |
| | PMON79709 | ZM_M52025 | 3.2 | 5959.63 | 5776.02 | 0.3087 | −1.7 | 29.93 | 30.45 | 0.4617 | 1 | 47.38 | 46.92 | 0.7983 |
| | PMON79709 | ZM_M52025 | 21 | 7124.16 | 5906.6 | 0 | 14 | 31.74 | 27.9 | 0 | 20 | 64.48 | 53.53 | 0 |
| | PMON79709 | ZM_M52710 | 6 | 6240.85 | 5906.6 | 0.1109 | 10 | 30.6 | 27.9 | 1.00E−04 | 9 | 58.5 | 53.53 | 0.0321 |
| | PMON79709 | ZM_M52710 | 8 | 5339.8 | 4947.82 | 0.001 | 7 | 28.46 | 26.59 | 1.00E−04 | 3 | 45.82 | 44.36 | 0.1373 |
| | PMON79709 | ZM_M52710 | 3.8 | 5995.36 | 5776.02 | 0.2241 | 3.6 | 31.55 | 30.45 | 0.1214 | −4.1 | 45 | 46.92 | 0.2779 |
| | PMON79709 | ZM_M52720 | 7.4 | 6201.46 | 5776.02 | 0.0188 | 5.2 | 32.04 | 30.45 | 0.0258 | 6.1 | 49.8 | 46.92 | 0.1242 |
| | PMON79709 | ZM_M52720 | 7 | 5280.25 | 4947.82 | 0.0053 | 7 | 28.39 | 26.59 | 2.00E−04 | −5 | 42.31 | 44.36 | 0.0357 |
| | PMON79709 | ZM_M52720 | 12 | 6617.79 | 5906.6 | 8.00E−04 | 9 | 30.28 | 27.9 | 9.00E−04 | 3 | 55.01 | 53.53 | 0.5222 |
| 96 | PMON80270 | ZM_M55967 | 5.2 | 6306.34 | 5993.37 | 0.0376 | 4.3 | 30.64 | 29.39 | 0.028 | 7.3 | 54.7 | 50.98 | 0.0017 |
| | PMON80270 | ZM_M55967 | 6.6 | 5.33 | 5 | 0.0666 | 6.7 | 33.48 | 31.38 | 0.0075 | 6 | 44.75 | 42.21 | 0.0627 |
| | PMON80270 | ZM_M55968 | 16.6 | 5.83 | 5 | 0 | 5.7 | 33.17 | 31.38 | 0.0421 | 17.5 | 49.6 | 42.21 | 0 |
| | PMON80270 | ZM_M55968 | −1 | 5930.77 | 5993.37 | 0.6873 | −0.5 | 29.25 | 29.39 | 0.8058 | 7.7 | 54.89 | 50.98 | 0.001 |
| | PMON80270 | ZM_M55969 | −4.1 | 5749.51 | 5993.37 | 0.1048 | 0.3 | 29.47 | 29.39 | 0.892 | 4.7 | 53.36 | 50.98 | 0.0427 |
| | PMON80270 | ZM_M55969 | 5 | 5.25 | 5 | 0.1118 | 4.1 | 32.66 | 31.38 | 0.1464 | 8 | 45.58 | 42.21 | 0.0139 |
| | PMON80270 | ZM_M55970 | −2.3 | 5855.83 | 5993.37 | 0.3595 | 1.3 | 29.76 | 29.39 | 0.5246 | 4.4 | 53.2 | 50.98 | 0.0504 |
| | PMON80270 | ZM_M55970 | 2.6 | 5.13 | 5 | 0.4257 | −2.5 | 30.58 | 31.38 | 0.3062 | 2.9 | 43.45 | 42.21 | 0.3616 |
| | PMON80270 | ZM_M55971 | −4 | 5754.31 | 5993.37 | 0.1118 | 0.7 | 29.61 | 29.39 | 0.7 | 1.8 | 51.92 | 50.98 | 0.4075 |
| | PMON80270 | ZM_M55971 | 6 | 5.3 | 5 | 0.0728 | 4.8 | 32.89 | 31.38 | 0.0536 | 6 | 44.74 | 42.21 | 0.064 |
| | PMON80270 | ZM_M55972 | −1 | 5933.48 | 5993.37 | 0.6897 | −0.3 | 29.29 | 29.39 | 0.8631 | 3.6 | 52.81 | 50.98 | 0.1193 |
| | PMON80270 | ZM_M55972 | 13.8 | 5.69 | 5 | 0 | 5.1 | 32.99 | 31.38 | 0.0397 | 9.4 | 46.19 | 42.21 | 0.0037 |
| | PMON80270 | ZM_M56524 | 8 | 5.4 | 5 | 0.0364 | 5.1 | 32.98 | 31.38 | 0.0413 | 15.5 | 48.74 | 42.21 | 0 |
| | PMON80270 | ZM_M56524 | −1.4 | 5908.18 | 5993.37 | 0.5702 | 1 | 29.67 | 29.39 | 0.6255 | 6.3 | 54.18 | 50.98 | 0.0067 |
| | PMON80270 | ZM_M56526 | −2.7 | 5829.79 | 5993.37 | 0.276 | −1.4 | 28.98 | 29.39 | 0.4744 | 2.5 | 52.23 | 50.98 | 0.2681 |
| | PMON80270 | ZM_M56526 | 20 | 6 | 5 | 0 | 0.5 | 31.54 | 31.38 | 0.8352 | 13.8 | 48.05 | 42.21 | 0 |
| | PMON80270 | ZM_M56527 | 1.2 | 6063.11 | 5993.37 | 0.6421 | −0.2 | 29.32 | 29.39 | 0.8978 | 5.6 | 53.82 | 50.98 | 0.0126 |
| | PMON80270 | ZM_M56527 | 2.2 | 5.11 | 5 | 0.489 | 2.4 | 32.14 | 31.38 | 0.3294 | 4.1 | 43.95 | 42.21 | 0.2012 |
| 118 | PMON80461 | ZM_M52932 | 24.5 | 8417.13 | 6759.85 | 0 | 13.4 | 34.66 | 30.57 | 0 | 25.7 | 76.5 | 60.88 | 0 |
| | PMON80461 | ZM_M52932 | 6 | 7095.13 | 6713.17 | 0.0553 | 3 | 30.63 | 29.82 | 0.294 | −1 | 54.05 | 54.73 | 0.653 |
| | PMON80461 | ZM_M52932 | 1 | 4877.13 | 4816.31 | 0.5834 | 2 | 29.24 | 28.65 | 0.2351 | −2 | 30.75 | 31.34 | 0.4187 |
| | PMON80461 | ZM_M52932 | −4.5 | 5830.38 | 6107.25 | 0.1599 | −1.1 | 29.45 | 29.77 | 0.6468 | −2.7 | 37.58 | 38.63 | 0.5145 |
| | PMON80461 | ZM_M52932 | −9 | 4808.1 | 5269.64 | 0.0084 | 1 | 30.86 | 30.68 | 0.7905 | 2 | 35.8 | 35.13 | 0.4119 |
| | PMON80461 | ZM_M52932 | 8.2 | 5068.24 | 4686.12 | 0.0069 | 10 | 32.31 | 29.37 | 0 | −6 | 32.68 | 34.77 | 0.0483 |
| | PMON80461 | ZM_M52932 | 14.3 | 4511.99 | 3946.32 | 0 | 6.5 | 30.42 | 28.55 | 5.00E−04 | 11 | 46.12 | 41.55 | 7.00E−04 |
| | PMON80461 | ZM_M53218 | −14.6 | 5773.62 | 6759.85 | 1.00E−04 | −5.6 | 28.87 | 30.57 | 0.0168 | −16.4 | 50.92 | 60.88 | 1.00E−04 |
| | PMON80461 | ZM_M53218 | 7 | 7166.44 | 6713.17 | 0.0231 | 5 | 31.33 | 29.82 | 0.0501 | 9 | 59.48 | 54.73 | 0.002 |
| | PMON80461 | ZM_M53218 | 2 | 4908.21 | 4816.31 | 0.4075 | 3 | 29.55 | 28.65 | 0.072 | 3 | 32.25 | 31.34 | 0.1908 |
| | PMON80461 | ZM_M53218 | −9 | 4808.4 | 5269.64 | 0.0085 | −2 | 30.04 | 30.68 | 0.3563 | −2 | 34.52 | 35.13 | 0.4641 |
| | PMON80461 | ZM_M53218 | 8.2 | 5071.81 | 4686.12 | 0.0064 | 6.2 | 31.19 | 29.37 | 0.0096 | 0.4 | 34.91 | 34.77 | 0.8893 |
| | PMON80461 | ZM_M53218 | 1.7 | 6211.2 | 6107.25 | 0.6164 | −1.5 | 29.33 | 29.77 | 0.5225 | 0.9 | 38.97 | 38.63 | 0.8332 |
| | PMON80461 | ZM_M53218 | 1.1 | 3987.88 | 3946.32 | 0.6988 | 1.3 | 28.92 | 28.55 | 0.484 | 1.3 | 42.07 | 41.55 | 0.6981 |
| | PMON80461 | ZM_M53235 | 3 | 4955.98 | 4816.31 | 0.2084 | 1 | 28.93 | 28.65 | 0.5828 | 0 | 31.45 | 31.34 | 0.8709 |
| | PMON80461 | ZM_M53235 | 20.2 | 8122.46 | 6759.85 | 0 | 13.8 | 34.79 | 30.57 | 0 | 17.3 | 71.4 | 60.88 | 0 |
| | PMON80461 | ZM_M53235 | 3 | 6907.56 | 6713.17 | 0.3282 | 5 | 31.36 | 29.82 | 0.0447 | 1 | 55.05 | 54.73 | 0.8357 |
| | PMON80461 | ZM_M53503 | 2 | 4921.37 | 4816.31 | 0.3438 | 8 | 30.95 | 28.65 | 0 | 3 | 32.32 | 31.34 | 0.1605 |
| | PMON80461 | ZM_M53503 | 14.9 | 7763.72 | 6759.85 | 1.00E−04 | 10.4 | 33.77 | 30.57 | 0 | 25.9 | 76.63 | 60.88 | 0 |
| | PMON80461 | ZM_M53503 | 7 | 7197.24 | 6713.17 | 0.0154 | 6 | 31.54 | 29.82 | 0.0255 | 12 | 61.48 | 54.73 | 0 |
| | PMON80461 | ZM_M53504 | −1 | 6666.94 | 6713.17 | 0.816 | 1 | 29.98 | 29.82 | 0.8413 | 10 | 60.29 | 54.73 | 6.00E−04 |
| | PMON80461 | ZM_M53504 | −1 | 4748.6 | 4816.31 | 0.5416 | −1 | 28.4 | 28.65 | 0.6231 | −2 | 30.82 | 31.34 | 0.4559 |
| | PMON80461 | ZM_M53504 | −15.3 | 5724.41 | 6759.85 | 0 | −8.6 | 27.93 | 30.57 | 2.00E−04 | −21 | 48.11 | 60.88 | 0 |
| | PMON80461 | ZM_M53848 | 2 | 4897.29 | 4816.31 | 0.4654 | 4 | 29.87 | 28.65 | 0.0153 | −2 | 30.63 | 31.34 | 0.3077 |
| | PMON80461 | ZM_M53848 | −15.3 | 5722.73 | 6759.85 | 0 | −5.6 | 28.87 | 30.57 | 0.0168 | −24.1 | 46.19 | 60.88 | 0 |
| | PMON80461 | ZM_M53848 | 3 | 6882.64 | 6713.17 | 0.394 | 7 | 31.86 | 29.82 | 0.008 | 2 | 56 | 54.73 | 0.4059 |
| | PMON80461 | ZM_M54282 | 0 | 4800.09 | 4816.31 | 0.8878 | 2 | 29.31 | 28.65 | 0.2011 | −1 | 30.98 | 31.34 | 0.6261 |
| | PMON80461 | ZM_M54282 | −2 | 6592.76 | 6713.17 | 0.5446 | −2 | 29.35 | 29.82 | 0.5372 | 3 | 56.57 | 54.73 | 0.2552 |
| | PMON80461 | ZM_M54282 | −12.7 | 5900.82 | 6759.85 | 7.00E−04 | −4.9 | 29.07 | 30.57 | 0.0346 | −19.8 | 48.83 | 60.88 | 0 |
| | PMON80461 | ZM_M54284 | 7 | 7155.9 | 6713.17 | 0.0265 | 5 | 31.2 | 29.82 | 0.0723 | 1 | 55.01 | 54.73 | 0.855 |
| | PMON80461 | ZM_M54284 | 19.2 | 8060.14 | 6759.85 | 0 | 9.7 | 33.55 | 30.57 | 0 | 16.4 | 70.88 | 60.88 | 1.00E−04 |
| | PMON80461 | ZM_M54284 | 5 | 5052.8 | 4816.31 | 0.0404 | 1 | 28.94 | 28.65 | 0.5692 | 3 | 32.14 | 31.34 | 0.2488 |
| | PMON80461 | ZM_M55266 | −2.4 | 5962.4 | 6107.25 | 0.4616 | 0.2 | 29.81 | 29.77 | 0.9457 | −6.7 | 36.04 | 38.63 | 0.1098 |
| | PMON80461 | ZM_M55957 | 5 | 6414.71 | 6107.25 | 0.1187 | 2.9 | 30.63 | 29.77 | 0.2128 | −3.7 | 37.21 | 38.63 | 0.3528 |
| | PMON80461 | ZM_M56233 | 2.7 | 6270.89 | 6107.25 | 0.4056 | 5 | 31.25 | 29.77 | 0.0426 | −0.7 | 38.38 | 38.63 | 0.8653 |
| | PMON80461 | ZM_M56728 | 3.8 | 6338.35 | 6107.25 | 0.2405 | 4 | 30.96 | 29.77 | 0.0831 | −0.5 | 38.43 | 38.63 | 0.8911 |
| 102 | PMON80542 | ZM_M57107 | −3.8 | 5766.93 | 5993.37 | 0.1461 | −0.2 | 29.34 | 29.39 | 0.9327 | 6.1 | 54.07 | 50.98 | 0.0089 |
| | PMON80542 | ZM_M57107 | 14.2 | 5.71 | 5 | 0 | 1.2 | 31.75 | 31.38 | 0.6312 | 12.3 | 47.4 | 42.21 | 2.00E−04 |
| | PMON80542 | ZM_M57119 | −8 | 5512.76 | 5993.37 | 0.0015 | −1.1 | 29.08 | 29.39 | 0.5896 | 4.6 | 53.34 | 50.98 | 0.0375 |
| | PMON80542 | ZM_M57119 | 11.6 | 5.58 | 5 | 5.00E−04 | 5.1 | 32.96 | 31.38 | 0.0429 | 16.2 | 49.03 | 42.21 | 0 |
| | PMON80542 | ZM_M57120 | 2.6 | 5.13 | 5 | 0.4257 | 2.5 | 32.16 | 31.38 | 0.3138 | −1.1 | 41.75 | 42.21 | 0.7377 |
| | PMON80542 | ZM_M57120 | −3.1 | 5807.66 | 5993.37 | 0.2163 | 0.2 | 29.46 | 29.39 | 0.9036 | 0.1 | 51.04 | 50.98 | 0.9595 |
| | PMON80542 | ZM_M57121 | −2.7 | 5829.33 | 5993.37 | 0.2746 | 1.9 | 29.94 | 29.39 | 0.3311 | 8.4 | 55.24 | 50.98 | 2.00E−04 |
| | PMON80542 | ZM_M57121 | 4.4 | 5.22 | 5 | 0.2467 | −1.4 | 30.95 | 31.38 | 0.5865 | 9 | 45.99 | 42.21 | 0.0058 |
| | PMON80542 | ZM_M57122 | −3.5 | 5785.68 | 5993.37 | 0.1669 | 0.4 | 29.5 | 29.39 | 0.8458 | 8.9 | 55.51 | 50.98 | 1.00E−04 |
| | PMON80542 | ZM_M57122 | 0 | 5 | 5 | 1 | 2.3 | 32.1 | 31.38 | 0.3537 | 6.8 | 45.07 | 42.21 | 0.0474 |
| | PMON80542 | ZM_M57124 | −3 | 5815.15 | 5993.37 | 0.2353 | −2.7 | 28.61 | 29.39 | 0.1694 | 6.6 | 54.33 | 50.98 | 0.0032 |
| | PMON80542 | ZM_M57124 | 13.4 | 5.67 | 5 | 2.00E−04 | 0.3 | 31.48 | 31.38 | 0.8981 | 13.1 | 47.74 | 42.21 | 1.00E−04 |
| | PMON80542 | ZM_M57131 | 13.3 | 7776.21 | 6866.4 | 0 | 6.5 | 33.54 | 31.48 | 0.0099 | 27.9 | 68.11 | 53.23 | 0 |
| | PMON80542 | ZM_M57132 | −2.3 | 5853.25 | 5993.37 | 0.3506 | −2.3 | 28.71 | 29.39 | 0.2306 | 13.2 | 57.73 | 50.98 | 0 |
| | PMON80542 | ZM_M57132 | 7.6 | 5.38 | 5 | 0.0174 | −1.9 | 30.79 | 31.38 | 0.4522 | 7.4 | 45.34 | 42.21 | 0.0221 |
| | PMON80542 | ZM_M57146 | 0.6 | 6031.47 | 5993.37 | 0.7995 | 4.9 | 30.82 | 29.39 | 0.0124 | −2.6 | 49.63 | 50.98 | 0.2347 |
| | PMON80542 | ZM_M57146 | 0.4 | 5.02 | 5 | 0.9047 | 7 | 33.58 | 31.38 | 0.0052 | 0.7 | 42.51 | 42.21 | 0.8221 |
| 123 | PMON80850 | ZM_M56061 | −3.7 | 4.94 | 5.13 | 0.1027 | 2.8 | 30.43 | 29.6 | 0.2912 | −1.8 | 44.81 | 45.62 | 0.6326 |
| | PMON80850 | ZM_M56061 | −1.1 | 5272.7 | 5331.51 | 0.7088 | 0.7 | 28.56 | 28.35 | 0.7113 | −6.3 | 42.33 | 45.16 | 0.0465 |
| | PMON80850 | ZM_M56062 | 3.5 | 5.31 | 5.13 | 0.1181 | 0.1 | 29.63 | 29.6 | 0.9654 | 6.2 | 48.44 | 45.62 | 0.0972 |
| | PMON80850 | ZM_M56062 | 4.4 | 5566.18 | 5331.51 | 0.1369 | 1.6 | 28.8 | 28.35 | 0.4251 | 9.3 | 49.37 | 45.16 | 0.0032 |
| | PMON80850 | ZM_M56071 | −3.3 | 4.96 | 5.13 | 0.141 | 2.5 | 30.33 | 29.6 | 0.379 | 7.6 | 49.1 | 45.62 | 0.0407 |
| | PMON80850 | ZM_M56071 | −0.5 | 5302.33 | 5331.51 | 0.853 | −0.8 | 28.11 | 28.35 | 0.6697 | 10.7 | 50.01 | 45.16 | 7.00E−04 |
| | PMON80850 | ZM_M56222 | −0.8 | 5.09 | 5.13 | 0.719 | 6.1 | 31.41 | 29.6 | 0.0211 | 0.9 | 46.01 | 45.62 | 0.8177 |
| | PMON80850 | ZM_M56222 | 4 | 5545.23 | 5331.51 | 0.1754 | 4.2 | 29.53 | 28.35 | 0.0367 | −0.8 | 44.78 | 45.16 | 0.7867 |
| | PMON80850 | ZM_M56722 | −1.8 | 5.05 | 5.13 | 0.4557 | 0.1 | 29.61 | 29.6 | 0.9841 | −5.6 | 43.05 | 45.62 | 0.1295 |
| | PMON80850 | ZM_M56722 | 0.9 | 5379.37 | 5331.51 | 0.7693 | 2.1 | 28.94 | 28.35 | 0.3101 | 2.8 | 46.42 | 45.16 | 0.3906 |
| | PMON80850 | ZM_M56723 | −4.1 | 4.92 | 5.13 | 0.0711 | −1.2 | 29.25 | 29.6 | 0.6582 | −2.9 | 44.28 | 45.62 | 0.4536 |
| | PMON80850 | ZM_M56723 | 8.3 | 5774.12 | 5331.51 | 0.0052 | 2.1 | 28.94 | 28.35 | 0.2947 | 2.6 | 46.33 | 45.16 | 0.4113 |
| | PMON80850 | ZM_M57056 | 7.2 | 5.51 | 5.13 | 0.0014 | 5 | 31.06 | 29.6 | 0.0623 | 11.5 | 50.85 | 45.62 | 0.0022 |
| | PMON80850 | ZM_M57056 | 2.6 | 5472.58 | 5331.51 | 0.3707 | 1.4 | 28.75 | 28.35 | 0.4782 | 2.1 | 46.11 | 45.16 | 0.5035 |

Nitrogen use Field Efficacy Assay

[0102] Level I. Transgenic plants provided by the present invention are planted in field without any nitrogen source being applied. Transgenic plants and control plants are grouped by genotype and construct with controls arranged randomly within genotype blocks. Each type of transgenic plants are tested by 3 replications and across 5 locations. Nitrogen levels in the fields are analyzed in early April pre-planting by collecting 30 sample soil cores from 0-24″ and 24 to 48″ soil layer. Soil samples are analyzed for nitrate-nitrogen, phosphorus(P), Potassium(K), organic matter and pH to provide baseline values. P, K and micronutrients are applied based upon soil test recommendations.

[0103] Level II. Transgenic plants provided by the present invention are planted in field with three levels of nitrogen (N) fertilizer being applied, i.e. low level (0 N), medium level (80 lb/ac) and high level (180 lb/ac). Liquid 28% or 32% UAN (Urea, Ammonium Nitrogen) are used as the N source and apply by broadcast boom and incorporate with a field cultivator with rear rolling basket in the same direction as intended crop rows. Although there is no N applied to the 0 N treatment the soil should still be disturbed in the same fashion as the treated area. Transgenic plants and control plants are grouped by genotype and construct with controls arranged randomly within genotype blocks. Each type of transgenic plants is tested by 3 replications and across 4 locations. Nitrogen levels in the fields are analyzed in early April pre-planting by collecting 30 sample soil cores from 0-24″ and 24 to 48″ soil layer. Soil samples are analyzed for nitrate-nitrogen, phosphorus(P), Potassium(K), organic matter and pH to provide baseline values. P, K and micronutrients are applied based upon soil test recommendations.

TABLE 9
Genes increase seed yield in transgenic plants at different nitrogen levels.

| | PEP SEQ | | | | | Transgenic | | | |
|---|---|---|---|---|---|---|---|---|---|
| | ID NO | Phe ID | Gene | Construct | Event | mean | Control Mean | Percent change | Pvalue |
| I | 108 | PHE0001623_1734 | maize | PMON79709 | ZM_M51983 | 137.5 | 124.76521 | 10.207 | 0.0908 |
| | | | magnesium | | | | | | |
| | | | transporter, | | | | | | |
| | | | mrs2-1-like 1 | | | | | | |
| | 105 | PHE0001376_1468 | Corn Rubisco | PMON75524 | ZM_M47998 | 140.2 | 124.76521 | 12.3711 | 0.0407 |
| | | | Activase 2 | | | | | | |
| | 130 | PHE0001111_1201 | Yeast alanine | PMON77895 | ZM_M61017 | 140.3 | 124.76521 | 12.4512 | 0.0394 |
| | | | aminotransferase | | | | | | |

| | PEP | | | | | | | | | |
|---|---|---|---|---|---|---|---|---|---|---|
| | SEQ | | | | | | Transgenic | Control | Percent | P- |
| | ID NO | Phe ID | Gene | Construct | treatment | event | yield | yield | change | value |
| II | 114 | PHE0002412_2512 | Ralstonia | pMON75980 | High | ZM_M53398 | 159.7 | 142.45 | 10.801503 | 0.0621 |
| | | | metallidurans | | | | | | | |
| | | | glutamate | | | | | | | |
| | | | decarboxylase | | | | | | | |
| | | PHE0002412_2512 | Ralstonia | | Low | ZM_M53398 | 137.125 | 125.14298 | 8.7380273 | 0.0263 |
| | | | metallidurans | | | | | | | |
| | | | glutamate | | | | | | | |
| | | | decarboxylase | | | | | | | |
| | | PHE0002412_2512 | Ralstonia | | High | ZM_M53392 | 202.575 | 190.5333333 | 5.9443005 | 0.0833 |
| | | | metallidurans | | | | | | | |
| | | | glutamate | | | | | | | |
| | | | decarboxylase | | | | | | | |
| | 118 | PHE0002492_2592 | Arabidopsis E2F | pMON80461 | High | ZM_M53218 | 160.6 | 142.45 | 11.30137 | 0.0498 |
| | | PHE0002492_2592 | Arabidopsis E2F | | High | ZM_M53848 | 158.675 | 142.45 | 10.225303 | 0.0792 |
| | | PHE0002492_2592 | Arabidopsis E2F | | Low | ZM_M53848 | 141.175 | 125.14298 | 11.356132 | 0.0031 |
| | | PHE0002492_2592 | Arabidopsis E2F | | Med | ZM_M53218 | 159.15 | 145.075 | 8.843858 | 0.0883 |
| | 91 | PHE0001017_1108 | MADS box 110 | pMON73816 | Low | ZM_M37188 | 134.575 | 125.14298 | 7.008746 | 0.0798 |

B. Selection for Increased Yield

[0104] Many transgenic plants of this invention exhibit improved yield as compared to a control plant. Improved yield can result from enhanced seed sink potential, i.e. the number and size of endosperm cells or kernels and/or enhanced sink strength, i.e. the rate of starch biosynthesis. Sink potential can be established very early during kernel development, as endosperm cell number and size are determined within the first few days after pollination.

[0105] Much of the increase in corn yield of the past several decades has resulted from an increase in planting density. During that period, corn yield has been increasing at a rate of 2.1 bushels/acre/year, but the planting density has increased at a rate of 250 plants/acre/year. A characteristic of modern hybrid corn is the ability of these varieties to be planted at high density. Many studies have shown that a higher than current planting density should result in more biomass production, but current germplasm does not perform well at these higher densities. One approach to increasing yield is to increase harvest index (HI), the proportion of biomass that is allocated to the kernel compared to total biomass, in high density plantings.

[0106] Effective yield selection of enhanced yielding transgenic corn events uses hybrid progeny of the transgenic event over multiple locations with plants grown under optimal production management practices, and maximum pest control. A useful target for improved yield is a 5% to 10% increase in yield as compared to yield produced by plants grown from seed for a control plant. Selection methods may be applied in multiple and diverse geographic locations, for example up to 16 or more locations, over one or more plating seasons, for example at least two planting seasons to statistically distinguish yield improvement from natural environmental effects. It is to plant multiple transgenic plants, positive and negative control plants, and pollinator plants in standard plots, for example 2 row plots, 20 feet long by 5 feet wide with 30 inches distance between rows and a 3 foot alley between ranges. Transgenic events can be grouped by recombinant DNA constructs with groups randomly placed in the field. A pollinator plot of a high quality corn line is planted for every two plots to allow open pollination when using male sterile transgenic events. A useful planting density is about 30,000 plants/acre. High planting density is greater than 30,000 plants/acre; preferably about 40,000 plants/acre, more preferably about 42,000 plants/acre, most preferably about 45,000 plants/acre. Surrogate indicators for yield improvement include source capacity (biomass), source output (sucrose and photosynthesis), sink components (kernel size, ear size, starch in the seed), development (light response, height, density tolerance), maturity, early flowering trait and physiological responses to high density planting, for example at 45,000 plants per acre, for example as illustrated in Table 10 and 11.

TABLE 10

| Timing | Evaluation | Description | comments |
|---|---|---|---|
| V2-3 | Early stand | Can be taken any time after | |
| | | germination and prior to | |
| | | removal of any plants. | |
| Pollen shed | GDU to 50% shed | GDU to 50% plants shedding | |
| | | 50% tassel. | |
| Silking | GDU to 50% silk | GDU to 50% plants showing | |
| | | silks. | |
| Maturity | Plant height | Height from soil surface to | 10 plants per plot - Yield |
| | | flag leaf attachment (inches). | team assistance |
| Maturity | Ear height | Height from soil surface to | 10 plants per plot - Yield |
| | | primary ear attachment node. | team assistance |
| Maturity | Leaves above ear | visual scores: erect, size, | |
| | | rolling | |
| Maturity | Tassel size | Visual scores +/− vs. WT | |
| Pre-Harvest | Final Stand | Final stand count prior to | |
| | | harvest, exclude tillers | |
| Pre-Harvest | Stalk lodging | No. of stalks broken below | |
| | | the primary ear attachment. | |
| | | Exclude leaning tillers | |
| Pre-Harvest | Root lodging | No. of stalks leaning >45° | |
| | | angle from perpendicular. | |
| Pre-Harvest | Stay green | After physiological maturity | |
| | | and when differences among | |
| | | genotypes are evident: Scale | |
| | | 1 (90-100% tissue green) - 9 | |
| | | (0-19% tissue green). | |
| Harvest | Grain Yield | Grain yield/plot (Shell | |
| | | weight) | |

[0107] TABLE 11

| Timing | Evaluation | Description |
|---|---|---|
| V8-V12 | Chlorophyll | |
| V12-VT | Ear leaf area | |
| V15-15DAP | Chl fluorescence | |
| V15-15DAP | CER | |
| 15-25 DAP | Carbohydrates | sucrose, starch |
| Pre-Harvest | 1st internode diameter | |
| Pre-Harvest | Base 3 internode diameter | |
| Pre-Harvest | Ear internode diameter | |
| Maturity | Ear traits | diameter, length, kernel |
| | | number, kernel weight |

[0108] Electron transport rates (ETR) and CO2 exchange rates (CER): ETR and CER were measured with Li640LCF (Licor, Lincoln, Nebr.) around V9-R1 stages. Leaf chlorophyll fluorescence is a quick way to monitor the source activity and was reported to be highly correlated with CO₂ assimilation under varies conditions (Photosyn Research, 37: 89-102). The youngest fully expanded leaf or 2 leaves above the ear leaf was measured with actinic light 1500 (with 10% blue light) micromol m⁻² s⁻¹, 28° C., CO2 levels 450 ppm. Ten plants were measured in each event. There were 2 readings for each plant.

[0109] A hand-held chlorophyll meter SPAD-502 (Minolta-Japan) was used to measure the total chlorophyll level on live transgenic plants and the wild type counterparts a. Three trifoliates from each plant were analyzed, and each trifoliate were analyzed three times. Then 9 data points were averaged to obtain the chlorophyll level. The number of analyzed plants of each genotype ranged from 5 to 8.

TABLE 12

| pep | | | Witchita, KS | | | Carrollton, IL | | |
|---|---|---|---|---|---|---|---|---|
| SEQ | | | Mean SPAD | | p- | Mean SPAD | | p- |
| ID | construct | | vaule | % change | value | vaule | % change | value |
| 88 | pMON68399 | ZM_M31143 | 64.8 | 2 | 0.5215 | 58.87 | 4 | 0.0507 |
| | | ZM_M31143 | 64.8 | 2 | 0.5828 | | | |
| | | ZM_M31146 | 64 | 1 | 0.7624 | 54 | −1.14 | 0.0337 |
| | | ZM_M31146 | 64 | 1 | 0.8319 | | | |
| | | ZM_M31147 | 67.3 | 6 | 0.0858 | 59.84 | 6 | 0.0665 |
| | | ZM_M31147 | 67.3 | 6 | 0.105 | | | |
| | | ZM_M31152 | 66.6 | 5 | 0.1564 | 58.9 | 1 | 0.7965 |
| | | ZM_M31152 | 66.6 | 5 | 0.1862 | | | |
| | | ZM_M31524 | 60.4 | −5 | 0.2009 | 57.44 | 2 | 0.5839 |
| | | ZM_M31524 | 60.4 | −5 | 0.1734 | | | |
| | | ZM_M32356 | 61.9 | −2 | 0.5386 | 59.36 | −2 | 0.4308 |
| | | ZM_M32356 | 61.9 | −3 | 0.4836 | | | |
| | | ZM_M34171 | 62.7 | −1 | 0.7919 | 60.18 | 0 | 0.9203 |
| | | ZM_M34171 | 62.7 | −1 | 0.7255 | | | |
| | | ZM_M38646 | 64.5 | 2 | 0.6164 | 59.89 | 3 | 0.3042 |
| | | ZM_M38646 | 64.5 | 1 | 0.6819 | | | |
| | | ZM_M38660 | 67.3 | 6 | 0.0836 | 62.35 | 7 | 0.004 |

[0110] TABLE 13

| PEP | | | n- | n- | ETR- | % | | CER- | % | |
|---|---|---|---|---|---|---|---|---|---|---|
| SEQ ID | Construct | event | trt | ctr | ctr | Change | Pvalue | ctr | Change | Pvalue |
| 105 | PMON75524 | ZM_M47998 | 20 | 40 | 141.3 | 3 | 0.001 | 45.7 | 7 | 0.000 |
| | PMON75524 | ZM_M48003 | 20 | 40 | 141.3 | 8 | 0.000 | 45.7 | 6 | 0.000 |
| | PMON75524 | ZM_M48004 | 20 | 40 | 141.3 | −4 | 0.000 | 45.7 | −8 | 0.000 |
| | PMON75524 | ZM_M48005 | 20 | 40 | 141.3 | 2 | 0.008 | 45.7 | 4 | 0.012 |
| | PMON75524 | ZM_M48007 | 20 | 40 | 141.3 | 4 | 0.000 | 45.7 | −3 | 0.052 |
| | PMON75524 | ZM_M48010 | 20 | 40 | 141.3 | 6 | 0.000 | 45.7 | 8 | 0.000 |
| 125 | PMON81853 | ZM_M70887 | 18 | 64 | 136.3 | −3 | 0.298 | 43.7 | −5 | 0.097 |
| | PMON81853 | ZM_M70888 | 22 | 64 | 136.3 | 15 | 0.000 | 43.7 | 15 | 0.000 |
| | PMON81853 | ZM_M70889 | 22 | 64 | 136.3 | −23 | 0.000 | 43.7 | −18 | 0.000 |
| | PMON81853 | ZM_M70900 | 22 | 64 | 136.3 | −14 | 0.000 | 43.7 | −14 | 0.000 |
| | PMON81853 | ZM_M71630 | 16 | 64 | 136.3 | 9 | 0.005 | 43.7 | 5 | 0.119 |
| 102 | PMON80542 | ZM_M57107 | 20 | 101 | 154.1 | 0 | 0.863 | 40.5 | 5 | 0.084 |
| | PMON80542 | ZM_M57119 | 20 | 101 | 154.1 | 3 | 0.002 | 40.5 | 5 | 0.099 |
| | PMON80542 | ZM_M57120 | 20 | 101 | 154.1 | −6 | 0.000 | 40.5 | −4 | 0.112 |
| | PMON80542 | ZM_M57121 | 20 | 101 | 154.1 | −5 | 0.000 | 40.5 | −8 | 0.003 |
| | PMON80542 | ZM_M57122 | 20 | 101 | 154.1 | 10 | 0.000 | 40.5 | 19 | 0.000 |
| | PMON80542 | ZM_M57124 | 20 | 101 | 154.1 | 1 | 0.514 | 40.5 | 3 | 0.204 |
| | PMON80542 | ZM_M57131 | 20 | 101 | 154.1 | 6 | 0.000 | 40.5 | 7 | 0.017 |
| | PMON80542 | ZM_M57132 | 20 | 101 | 154.1 | 9 | 0.000 | 40.5 | 11 | 0.000 |
| | PMON80542 | ZM_M57146 | 20 | 101 | 154.1 | 9 | 0.000 | 40.5 | 13 | 0.000 |

| PEP | | n- | n- | ETR- | % | | CER- | % | |
|---|---|---|---|---|---|---|---|---|---|
| SEQ ID | Construct | trt | ctr | ctr | Change | Pvalue | ctr | Change | Pvalue |
| 105 | PMON75524 | 10 | 42 | 153.7 | −0 | 0.978 | 45.8 | −2 | 0.067 |
| | PMON75524 | 10 | 42 | 153.7 | 1 | 0.414 | 45.8 | 4 | 0.001 |
| | PMON75524 | 11 | 42 | 153.7 | 7 | 0.000 | 45.8 | 9 | 0.000 |
| | PMON75524 | 12 | 42 | 153.7 | 3 | 0.004 | 45.8 | 5 | 0.000 |
| | PMON75524 | 11 | 42 | 153.7 | 1 | 0.498 | 45.8 | −2 | 0.072 |
| | PMON75524 | 10 | 42 | 153.7 | 7 | 0.000 | 45.8 | 9 | 0.000 |
| 125 | PMON81853 | 19 | 51 | 151.5 | 8 | 0.001 | 34.8 | 9 | 0.012 |
| | PMON81853 | 10 | 51 | 151.5 | 11 | 0.000 | 34.8 | 22 | 0.000 |
| | PMON81853 | 16 | 51 | 151.5 | 10 | 0.000 | 34.8 | 13 | 0.000 |
| | PMON81853 | 21 | 51 | 151.5 | 1 | 0.666 | 34.8 | −0 | 0.944 |
| | PMON81853 | 10 | 51 | 151.5 | 12 | 0.000 | 34.8 | 22 | 0.000 |
| 102 | PMON80542 | 9 | 40 | 131.7 | 16 | 0.000 | 28.9 | 18 | 0.000 |
| | PMON80542 | 10 | 40 | 131.7 | −1 | 0.691 | 28.9 | −3 | 0.304 |
| | PMON80542 | 10 | 40 | 131.7 | 18 | 0.000 | 28.9 | 15 | 0.000 |
| | PMON80542 | 12 | 40 | 131.7 | −9 | 0.000 | 28.9 | −12 | 0.000 |
| | PMON80542 | 9 | 40 | 131.7 | −3 | 0.126 | 28.9 | −5 | 0.080 |
| | PMON80542 | 11 | 40 | 131.7 | 20 | 0.000 | 28.9 | 27 | 0.000 |
| | PMON80542 | 10 | 40 | 131.7 | −3 | 0.098 | 28.9 | −3 | 0.276 |
| | PMON80542 | 11 | 40 | 131.7 | −4 | 0.025 | 28.9 | −3 | 0.191 |
| | PMON80542 | 10 | 40 | 131.7 | 8 | 0.000 | 28.9 | 5 | 0.062 |

[0111] When selecting for yield improvement a useful statistical measurement approach comprises three components, i.e. modeling spatial autocorrelation of the test field separately for each location, adjusting traits of recombinant DNA events for spatial dependence for each location, and conducting an across location analysis. The first step in modeling spatial autocorrelation is estimating the covariance parameters of the semivariogram. A spherical covariance model is assumed to model the spatial autocorrelation. Because of the size and nature of the trial, it is likely that the spatial autocorrelation may change. Therefore, anisotropy is also assumed along with spherical covariance structure. The following set of equations describes the statistical form of the anisotropic spherical covariance model.

$$C ( h ; θ ) = vI ( h = 0 ) + {σ}^{2} ( 1 - \frac{3}{2} h + \frac{1}{2} {h}^{3} ) I ( h < 1 ) ,$$

where I(*) is the indicator function, h={square root over (\dot{x}²+\dot{y}², and
\dot{x}=[cos(ρπ/180)(x₁−x₂)−sin(ρπ/180)(y₁−y₂)]/ωₓ
\dot{y}=[sin(ρπ/180)(x₁−x₂)+cos(ρπ/180)(y₁−y₂)]/ω_{y}
where s₁=(x₁, y₁) are the spatial coordinates of one location and s₂=(x₂, y₂) are the spatial coordinates of the second location. There are 5 covariance parameters, θ=(v, σ², ρ, ωₙ, ωⱼ), where v is the nugget effect, σ² is the partial sill, ρ is a rotation in degrees clockwise from north, ωₙ is a scaling parameter for the minor axis and ωⱼ is a scaling parameter for the major axis of an anisotropical ellipse of equal covariance. The five covariance parameters that defines the spatial trend will then be estimated by using data from heavily replicated pollinator plots via restricted maximum likelihood approach. In a multi-location field trial, spatial trend are modeled separately for each location.

[0112] After obtaining the variance parameters of the model, a variance-covariance structure is generated for the data set to be analyzed. This variance-covariance structure contains spatial information required to adjust yield data for spatial dependence. In this case, a nested model that best represents the treatment and experimental design of the study is used along with the variance-covariance structure to adjust the yield data. During this process the nursery or the seed batch effects can also be modeled and estimated to adjust the yields for any yield parity caused by seed batch differences. After spatially adjusted data from different locations are generated, all adjusted data is combined and analyzed assuming locations as replications. In this analysis, intra and inter-location variances are combined to estimate the standard error of yield from transgenic plants and control plants. Relative mean comparisons are used to indicate statistically significant yield improvements.

TABLE 14

| PEP SEQ ID | | Transgenic | | Mean | Control | Percent | |
|---|---|---|---|---|---|---|---|
| NO | construct id | event | control | Transgenic | mean | difference | P-value |
| 105 | pMON75524 | ZM_M47998 | Negative | 173.3 | 176.1 | −1.6 | 0.392 |
| | | | segregant | | | | |
| | | ZM_M48003 | Negative | 167.2 | 176.1 | −5.1 | 0.007 |
| | | | segregant | | | | |
| | | ZM_M48004 | Negative | 176.2 | 176.1 | 0.0 | 0.990 |
| | | | segregant | | | | |
| | | ZM_M48005 | Negative | 186.0 | 176.1 | 5.6 | 0.003 |
| | | | segregant | | | | |
| | | ZM_M48007 | Negative | 177.9 | 176.1 | 1.0 | 0.631 |
| | | | segregant | | | | |
| | | ZM_M48010 | Negative | 176.8 | 176.1 | 0.4 | 0.841 |
| | | | segregant | | | | |
| 88 | pMON68399 | ZM_M31146 | Negative | 179.1 | 179.9 | −0.4 | 0.778 |
| | | | segregant | | | | |
| | | ZM_M31147 | Negative | 181.7 | 179.9 | 1.0 | 0.497 |
| | | | segregant | | | | |
| | | ZM_M31524 | Negative | 179.3 | 179.9 | −0.3 | 0.829 |
| | | | segregant | | | | |
| | | ZM_M32356 | Negative | 181.3 | 179.9 | 0.8 | 0.601 |
| | | | segregant | | | | |
| | | ZM_M38646 | Negative | 180.3 | 179.9 | 0.2 | 0.880 |
| | | | segregant | | | | |
| | | ZM_M38681 | Negative | 180.2 | 179.9 | 0.2 | 0.894 |
| | | | segregant | | | | |
| | | ZM_M39295 | Negative | 176.6 | 179.9 | −1.8 | 0.259 |
| | | | segregant | | | | |
| | | ZM_M39297 | Negative | 175.6 | 179.9 | −2.3 | 0.125 |
| | | | segregant | | | | |
| | | ZM_M39298 | Negative | 184.6 | 179.9 | 2.7 | 0.082 |
| | | | segregant | | | | |
| | | ZM_M39302 | Negative | 182.0 | 179.9 | 1.2 | 0.440 |
| | | | segregant | | | | |
| 105 | pMON75524 | ZM_M47998 | Negative | 173.3 | 176.1 | −1.6 | 0.392 |
| | | | segregant | | | | |
| | | ZM_M48003 | Negative | 167.2 | 176.1 | −5.1 | 0.007 |
| | | | segregant | | | | |
| | | ZM_M48004 | Negative | 176.2 | 176.1 | 0.0 | 0.990 |
| | | | segregant | | | | |
| | | ZM_M48005 | Negative | 186.0 | 176.1 | 5.6 | 0.003 |
| | | | segregant | | | | |
| | | ZM_M48007 | Negative | 177.9 | 176.1 | 1.0 | 0.631 |
| | | | segregant | | | | |
| | | ZM_M48010 | Negative | 176.8 | 176.1 | 0.4 | 0.841 |
| | | | segregant | | | | |
| 88 | pMON68399 | ZM_M31146 | Negative | 179.1 | 179.9 | −0.4 | 0.778 |
| | | | segregant | | | | |
| | | ZM_M31147 | Negative | 181.7 | 179.9 | 1.0 | 0.497 |
| | | | segregant | | | | |
| | | ZM_M31524 | Negative | 179.3 | 179.9 | −0.3 | 0.829 |
| | | | segregant | | | | |
| | | ZM_M32356 | Negative | 181.3 | 179.9 | 0.8 | 0.601 |
| | | | segregant | | | | |
| | | ZM_M38646 | Negative | 180.3 | 179.9 | 0.2 | 0.880 |
| | | | segregant | | | | |
| | | ZM_M38681 | Negative | 180.2 | 179.9 | 0.2 | 0.894 |
| | | | segregant | | | | |
| | | ZM_M39295 | Negative | 176.6 | 179.9 | −1.8 | 0.259 |
| | | | segregant | | | | |
| | | ZM_M39297 | Negative | 175.6 | 179.9 | −2.3 | 0.125 |
| | | | segregant | | | | |
| | | ZM_M39298 | Negative | 184.6 | 179.9 | 2.7 | 0.082 |
| | | | segregant | | | | |
| | | ZM_M39302 | Negative | 182.0 | 179.9 | 1.2 | 0.440 |
| | | | segregant | | | | |

[0113] TABLE 15

| | | | Mean | Mean | Percent | |
|---|---|---|---|---|---|---|
| | Construct | Event | Transgenic | Control | change | P-value |
| PEP SEQ ID | | | | | | |
| 127 | PMON78911 | ZM_M45101 | 167.9 | 176.1 | −4.7 | 0.015 |
| 127 | PMON78911 | ZM_M59413 | 175.4 | 176.1 | −0.4 | 0.832 |
| 127 | PMON78911 | ZM_M59778 | 161.2 | 176.1 | −8.5 | 0.000 |
| 127 | PMON78911 | ZM_M59783 | 191.0 | 176.1 | 8.4 | 0.000 |
| 127 | PMON78911 | ZM_M59784 | 182.6 | 176.1 | 3.7 | 0.053 |
| 127 | PMON78911 | ZM_M62810 | 180.2 | 176.1 | 2.3 | 0.212 |
| 130 | PMON77895 | ZM_M61016 | 171.5 | 176.1 | −2.6 | 0.163 |
| 139 | PMON77895 | ZM_M61017 | 173.4 | 176.1 | −1.6 | 0.397 |
| 130 | PMON77895 | ZM_M61033 | 184.1 | 176.1 | 4.5 | 0.015 |
| 131 | PMON79152 | ZM_M64367 | 162.9 | 176.1 | −7.5 | 0.000 |
| 131 | PMON79152 | ZM_M65978 | 184.5 | 176.1 | 4.7 | 0.012 |
| 131 | PMON79152 | ZM_M65982 | 175.0 | 176.1 | −0.6 | 0.733 |
| 131 | PMON79152 | ZM_M65986 | 139.7 | 176.1 | −20.7 | 0.000 |
| 131 | PMON79152 | ZM_M65992 | 171.8 | 176.1 | −2.5 | 0.182 |
| 132 | PMON80921 | ZM_M63833 | 184.2 | 176.1 | 4.6 | 0.015 |
| 133 | PMON75505 | ZM_M49384 | 183.6 | 176.1 | 4.2 | 0.023 |
| 134 | PMON80925 | ZM_M60505 | 183.4 | 176.1 | 4.1 | 0.039 |
| 134 | PMON80925 | ZM_M62005 | 179.8 | 176.1 | 2.1 | 0.268 |
| 134 | PMON80925 | ZM_M62007 | 178.5 | 176.1 | 1.3 | 0.489 |
| 134 | PMON80925 | ZM_M63594 | 180.1 | 176.1 | 2.3 | 0.229 |
| 106 | PMON79163 | ZM_M45011 | 177.0 | 176.1 | 0.5 | 0.792 |
| 106 | PMON79163 | ZM_M48217 | 179.8 | 176.1 | 2.1 | 0.289 |
| 106 | PMON79163 | ZM_M61816 | 183.5 | 176.1 | 4.2 | 0.033 |
| 106 | PMON79163 | ZM_M61822 | 168.1 | 176.1 | −4.6 | 0.023 |
| 136 | PMON79164 | ZM_M44045 | 172.1 | 176.1 | −2.3 | 0.217 |
| 136 | PMON79164 | ZM_M59749 | 180.6 | 176.1 | 2.5 | 0.175 |
| 136 | PMON79164 | ZM_M59750 | 181.8 | 176.1 | 3.2 | 0.087 |
| 136 | PMON79164 | ZM_M61349 | 169.5 | 176.1 | −3.8 | 0.042 |
| 136 | PMON79164 | ZM_M61889 | 175.0 | 176.1 | −0.6 | 0.738 |
| 136 | PMON79164 | ZM_M61890 | 145.4 | 176.1 | −17.4 | 0.000 |
| 136 | PMON79164 | ZM_M62988 | 175.7 | 176.1 | −0.3 | 0.881 |
| 136 | PMON79164 | ZM_M63003 | 185.0 | 176.1 | 5.0 | 0.007 |
| 107 | PMON75533 | ZM_M47453 | 183.4 | 176.1 | 4.1 | 0.027 |
| 107 | PMON75533 | ZM_M47460 | 178.4 | 176.1 | 1.3 | 0.491 |
| 107 | PMON75533 | ZM_M49275 | 183.9 | 176.1 | 4.4 | 0.018 |
| 107 | PMON75533 | ZM_M49278 | 177.0 | 176.1 | 0.5 | 0.790 |
| 137 | PMON79653 | ZM_M49883 | 174.6 | 176.1 | −0.9 | 0.633 |
| 137 | PMON79653 | ZM_M65281 | 183.4 | 176.1 | 4.1 | 0.030 |
| 138 | PMON81228 | ZM_M59931 | 169.3 | 176.1 | −3.9 | 0.055 |
| 138 | PMON81228 | ZM_M60825 | 185.8 | 176.1 | 5.5 | 0.003 |
| 148 | PMON82223 | ZM_M70571 | 185.8 | 176.1 | 5.5 | 0.007 |
| 161 | PMON79665 | ZM_M51224 | 171.9 | 176.1 | −2.4 | 0.198 |
| 161 | PMON79665 | ZM_M53787 | 172.2 | 176.1 | −2.2 | 0.233 |
| 161 | PMON79665 | ZM_M55078 | 184.2 | 176.1 | 4.6 | 0.019 |
| 139 | PMON79430 | ZM_M50221 | 181.1 | 176.1 | 2.8 | 0.137 |
| 139 | PMON79430 | ZM_M50222 | 178.6 | 176.1 | 1.4 | 0.477 |
| 139 | PMON79430 | ZM_M50223 | 180.8 | 176.1 | 2.7 | 0.153 |
| 139 | PMON79430 | ZM_M50727 | 177.7 | 176.1 | 0.9 | 0.637 |
| 139 | PMON79430 | ZM_M50729 | 179.0 | 176.1 | 1.6 | 0.377 |
| 139 | PMON79430 | ZM_M51479 | 171.7 | 176.1 | −2.5 | 0.198 |
| 139 | PMON79430 | ZM_M51481 | 185.4 | 176.1 | 5.2 | 0.006 |
| 139 | PMON79430 | ZM_M51490 | 178.5 | 176.1 | 1.3 | 0.492 |
| 140 | PMON79731 | ZM_M52239 | 187.5 | 176.1 | 6.5 | 0.001 |
| 140 | PMON79731 | ZM_M52245 | 172.2 | 176.1 | −2.2 | 0.230 |
| 140 | PMON79731 | ZM_M52252 | 174.6 | 176.1 | −0.9 | 0.638 |
| 140 | PMON79731 | ZM_M52255 | 172.4 | 176.1 | −2.1 | 0.248 |
| 140 | PMON79731 | ZM_M52375 | 173.3 | 176.1 | −1.6 | 0.396 |
| 140 | PMON79731 | ZM_M52802 | 173.6 | 176.1 | −1.5 | 0.447 |
| 140 | PMON79731 | ZM_M52812 | 166.6 | 176.1 | −5.4 | 0.004 |
| 141 | PMON78229 | ZM_M55961 | 176.0 | 176.1 | −0.1 | 0.963 |
| 141 | PMON78229 | ZM_M55962 | 182.3 | 176.1 | 3.5 | 0.065 |
| 141 | PMON78229 | ZM_M55964 | 175.1 | 176.1 | −0.6 | 0.743 |
| 141 | PMON78229 | ZM_M56184 | 187.2 | 176.1 | 6.3 | 0.001 |
| 141 | PMON78229 | ZM_M56185 | 181.8 | 176.1 | 3.2 | 0.083 |
| 141 | PMON78229 | ZM_M59082 | 176.1 | 176.1 | 0.0 | 0.984 |
| SEQ ID NO | | | | | | |
| 116 | PMON79697 | ZM_M53938 | 171.6 | 176.1 | −2.6 | 0.171 |
| 116 | PMON79697 | ZM_M53939 | 180.2 | 176.1 | 2.3 | 0.236 |
| 116 | PMON79697 | ZM_M54371 | 175.0 | 176.1 | −0.6 | 0.733 |
| 116 | PMON79697 | ZM_M54372 | 185.1 | 176.1 | 5.1 | 0.009 |
| 116 | PMON79697 | ZM_M54374 | 181.2 | 176.1 | 2.8 | 0.127 |
| 144 | PMON78240 | ZM_M53464 | 184.1 | 176.1 | 4.5 | 0.015 |
| 144 | PMON78240 | ZM_M53465 | 175.2 | 176.1 | −0.5 | 0.785 |
| 144 | PMON78240 | ZM_M53470 | 174.4 | 176.1 | −1.0 | 0.611 |
| 144 | PMON78240 | ZM_M53471 | 166.7 | 176.1 | −5.4 | 0.005 |
| 144 | PMON78240 | ZM_M53478 | 173.6 | 176.1 | −1.4 | 0.456 |
| 144 | PMON78240 | ZM_M53673 | 175.8 | 176.1 | −0.2 | 0.917 |
| 144 | PMON78240 | ZM_M53674 | 172.5 | 176.1 | −2.1 | 0.269 |
| 144 | PMON78240 | ZM_M53684 | 179.4 | 176.1 | 1.8 | 0.342 |
| 122 | PMON80500 | ZM_M56549 | 173.4 | 176.1 | −1.6 | 0.408 |
| 122 | PMON80500 | ZM_M56560 | 173.4 | 176.1 | −1.6 | 0.394 |
| 122 | PMON80500 | ZM_M56565 | 175.4 | 176.1 | −0.4 | 0.811 |
| 122 | PMON80500 | ZM_M56567 | 177.9 | 176.1 | 1.0 | 0.599 |
| 122 | PMON80500 | ZM_M56568 | 185.9 | 176.1 | 5.6 | 0.003 |
| 122 | PMON80500 | ZM_M58003 | 169.4 | 176.1 | −3.8 | 0.047 |
| 145 | PMON80283 | ZM_M58140 | 174.6 | 176.1 | −0.9 | 0.641 |
| 145 | PMON80283 | ZM_M58141 | 179.7 | 176.1 | 2.0 | 0.294 |
| 145 | PMON80283 | ZM_M58143 | 183.8 | 176.1 | 4.4 | 0.024 |
| 146 | PMON80866 | ZM_M58256 | 177.6 | 176.1 | 0.8 | 0.651 |
| 146 | PMON80866 | ZM_M59441 | 183.3 | 176.1 | 4.1 | 0.028 |
| 146 | PMON80866 | ZM_M60646 | 174.8 | 176.1 | −0.7 | 0.692 |
| 147 | PMON80292 | ZM_M57487 | 180.8 | 176.1 | 2.6 | 0.159 |
| 147 | PMON80292 | ZM_M58571 | 184.2 | 176.1 | 4.6 | 0.021 |
| 147 | PMON80292 | ZM_M58578 | 177.5 | 176.1 | 0.8 | 0.717 |
| 142 | PMON79696 | ZM_M53849 | 177.6 | 179.1 | −1.2 | 0.431 |
| 142 | PMON79696 | ZM_M53849 | 190.3 | 179.1 | 5.8 | 0.0003 |
| 142 | PMON79696 | ZM_M53849 | 178.5 | 179.1 | −0.7 | 0.0635 |
| 150 | PMON81857 | ZM_M67504 | 178.8 | 176.1 | 1.5 | 0.415 |
| 150 | PMON81857 | ZM_M70000 | 182.7 | 176.1 | 3.7 | 0.047 |
| 150 | PMON81857 | ZM_M71064 | 172.1 | 176.1 | −2.3 | 0.229 |
| 150 | PMON81857 | ZM_M71065 | 184.6 | 176.1 | 4.8 | 0.011 |
| 150 | PMON81857 | ZM_M72550 | 174.3 | 176.1 | −1.0 | 0.589 |
| 149 | PMON83553 | ZM_M71131 | 150.7 | 176.1 | −14.5 | 0.000 |
| 149 | PMON83553 | ZM_M71140 | 187.4 | 176.1 | 6.4 | 0.001 |
| 149 | PMON83553 | ZM_M71156 | 150.3 | 176.1 | −14.7 | 0.000 |
| 149 | PMON83553 | ZM_M71161 | 172.7 | 176.1 | −1.9 | 0.298 |
| 150 | PMON81857 | ZM_M67504 | 178.8 | 176.1 | 1.5 | 0.415 |
| 150 | PMON81857 | ZM_M70000 | 182.7 | 176.1 | 3.7 | 0.047 |
| 150 | PMON81857 | ZM_M71064 | 172.1 | 176.1 | −2.3 | 0.229 |
| 150 | PMON81857 | ZM_M71065 | 184.6 | 176.1 | 4.8 | 0.011 |
| 150 | PMON81857 | ZM_M72550 | 174.3 | 176.1 | −1.0 | 0.589 |
| 151 | PMON82212 | ZM_M67581 | 171.1 | 176.1 | −2.8 | 0.126 |
| 151 | PMON82212 | ZM_M67583 | 186.1 | 176.1 | 5.6 | 0.002 |
| 151 | PMON82212 | ZM_M69111 | 173.2 | 176.1 | −1.7 | 0.368 |
| PEP SEQ ID NO | | | | | | |
| 108 | PMON79709 | ZM_M51983 | 184.3 | 176.1 | 4.7 | 0.037 |
| 108 | PMON79709 | ZM_M51985 | 180.1 | 176.1 | 2.3 | 0.231 |
| 108 | PMON79709 | ZM_M52052 | 185.6 | 176.1 | 5.3 | 0.013 |
| 108 | PMON79709 | ZM_M52710 | 175.5 | 176.1 | −0.4 | 0.862 |
| 108 | PMON79709 | ZM_M52720 | 175.2 | 176.1 | −0.6 | 0.765 |
| 129 | PMON73787 | ZM_M55089 | 162.6 | 176.1 | −7.7 | 0.000 |
| 129 | PMON73787 | ZM_M61950 | 186.4 | 176.1 | 5.8 | 0.002 |
| 129 | PMON73787 | ZM_M61953 | 164.7 | 176.1 | −6.5 | 0.001 |
| 129 | PMON73787 | ZM_M61958 | 165.9 | 176.1 | −5.8 | 0.003 |
| 129 | PMON73787 | ZM_M61965 | 134.3 | 176.1 | −23.8 | 0.000 |
| 129 | PMON73787 | ZM_M61966 | 172.6 | 176.1 | −2.0 | 0.280 |
| 135 | PMON78942 | ZM_M66312 | 176.2 | 176.1 | 0.0 | 0.997 |
| 135 | PMON78942 | ZM_M66316 | 173.1 | 176.1 | −1.7 | 0.362 |
| 135 | PMON78942 | ZM_M66318 | 164.1 | 176.1 | −6.9 | 0.000 |
| 135 | PMON78942 | ZM_M66331 | 183.3 | 176.1 | 4.1 | 0.029 |

C. Selection for Enhanced Water use Efficiency (WUE)

[0114] Described in this example is a high-throughput method for greenhouse selection of transgenic corn plants to wild type corn plants (tested as inbreds or hybrids) for water use efficiency. This selection process imposes 3 drought/re-water cycles on plants over a total period of 15 days after an initial stress free growth period of 11 days. Each cycle consists of 5 days, with no water being applied for the first four days and a water quenching on the 5 th day of the cycle. The primary phenotypes analyzed by the selection method are the changes in plant growth rate as determined by height and biomass during a vegetative drought treatment. The hydration status of the shoot tissues following the drought is also measured. The plant height are measured at three time points. The first is taken just prior to the onset drought when the plant is 11 days old, which is the shoot initial height (SIH). The plant height is also measured halfway throughout the drought/re-water regimen, on day 18 after planting, to give rise to the shoot mid-drought height (SMH). Upon the completion of the final drought cycle on day 26 after planting, the shoot portion of the plant is harvested and measured for a final height, which is the shoot wilt height (SWH) and also measured for shoot wilted biomass (SWM). The shoot is placed in water at 40 degree Celsius in the dark. Three days later, the shoot is weighted to give rise to the shoot turgid weight (STM). After drying in an oven for four days, the shoots are weighted for shoot dry biomass (SDM). The shoot average height (SAH) is the mean plant height across the 3 height measurements. The procedure described above may be adjusted for ±˜one day for each step given the situation.

[0115] To correct for slight differences between plants, a size corrected growth value is derived from SIH and SWH. This is the Relative Growth Rate (RGR). Relative Growth Rate (RGR) is calculated for each shoot using the formula [RGR %=(SWH−SIH)/((SWH+SIH)/2)*100]. Relative water content (RWC) is a measurement of how much (%) of the plant was water at harvest. Water Content (RWC) is calculated for each shoot using the formula [RWC %=(SWM−SDM)/(STM−SDM)*100]. Fully watered corn plants of this age run around 98% RWC.

[0116] The transgenic plants provided by this invention were selected through the selection process according to the standard procedure described above and the performance of these transgenic plants are shown in Table 16 below.

TABLE 16

| PEP | | | | | | | | | | |
|---|---|---|---|---|---|---|---|---|---|---|
| SEQ ID | | N | Perc, | Pvalue, | Perc, | Pvalue, | Perc, | Pvalue, | Perc, | Pvalue, |
| NO | Construct | Event | SAH | SAH | RGR | RGR | SDM | SDM | RWC | RWC |
| 88 | PMON68399 | 18 | −2.9129 | 0 | 4.6104 | 0 | −1.2282 | 0.0534 | 2.0799 | 0 |
| 87 | PMON72494 | 2 | −2.6854 | 0 | 3.3347 | 0.0034 | −3.178 | 0.0258 | 2.8177 | 0.0001 |
| | PMON72494 | 2 | −1.4189 | 0 | 4.5389 | 0 | 1.0503 | 0.2808 | 1.8075 | 0.0272 |
| | PMON72494 | 6 | −2.8912 | 0 | 5.0217 | 0 | −3.0056 | 0.0032 | 3.0684 | 0 |
| | PMON72494 | 1 | −3.2736 | 0 | 1.4026 | 0.2741 | 0.0968 | 0.9545 | −2.3654 | 0.0194 |
| 97 | PMON76342 | 1 | −3.6096 | 0.0003 | 8.9657 | 0 | −2.9332 | 0.2317 | 2.1037 | 0.1252 |
| | PMON76342 | 2 | −0.9997 | 0.0384 | 4.9006 | 0 | −1.7424 | 0.1472 | −0.8155 | 0.2552 |
| 117 | PMON78237 | 4 | −2.0513 | 0 | 2.1335 | 0.0011 | 3.2477 | 0.0002 | 0.5998 | 0.2456 |
| 104 | PMON78936 | 2 | 0.2781 | 0.3727 | 1.3631 | 0.0165 | 2.1849 | 0.023 | 1.4237 | 0.0744 |
| | PMON78936 | 4 | −2.3342 | 0 | 6.1784 | 0 | −2.5964 | 0.0336 | 2.5358 | 0.0003 |
| 103 | PMON78949 | 4 | −1.6398 | 0 | 4.5323 | 0 | 2.2077 | 0.0112 | 0.9068 | 0.08 |
| 109 | PMON79422 | 4 | −2.0016 | 0 | 2.8698 | 0 | −1.3511 | 0.0488 | 1.8883 | 0.0009 |
| 116 | PMON79697 | 2 | −1.0829 | 0.1252 | 2.9806 | 0.0225 | −0.0495 | 0.9771 | 0.0115 | 0.9907 |
| | PMON79697 | 3 | −1.5704 | 0 | 2.1663 | 0 | −0.4949 | 0.5582 | 1.7787 | 0.0073 |
| 120 | PMON80452 | 1 | −1.7626 | 0.0032 | 2.1476 | 0.2778 | 2.1702 | 0.3832 | −1.914 | 0.1164 |
| | PMON80452 | 8 | −0.2756 | 0.0645 | −1.0206 | 0.0002 | 0.4707 | 0.3101 | −0.072 | 0.8521 |
| | PMON80452 | 11 | −0.7077 | 0.0258 | 2.1403 | 0.0003 | 1.4477 | 0.0623 | −0.0405 | 0.9267 |
| 115 | PMON80489 | 6 | −0.895 | 0.0001 | 3.7262 | 0 | −1.5941 | 0.0442 | 1.4212 | 0.0038 |
| 102 | PMON80542 | 8 | −2.5925 | 0 | 1.1234 | 0.0254 | 2.1829 | 0.0013 | 3.2415 | 0 |
| | PMON80542 | 1 | −5.5931 | 0 | 2.5902 | 0.0486 | −2.1444 | 0.2158 | 9.5238 | 0 |

[0117] Transgenic plants transformed with pMON67754 comprising the recombinant DNA as set forth in SEQ ID NO: 3 were tested in field with moderate drought conditions in Sananta, Ill. and Dixon Calif. SPAD readings on leaves under a moderate drought stress showed a significant increase in chlorophyll level in the transgenic plants as compared to the control plants. Two events showed a significant increase in SPAD reading for chlorophyll level, indicating an improvement in drought tolerance. In replicated field trials, 2 events (ZM_M16396 and ZM_M16401) out of 6 tested, showed significantly (p<0.1) improved leaf SPAD readings in two different locations, indicating an improvement in drought tolerance.

D. Selection for Growth Under Cold Stress

[0118] (1) Cold germination assay—Three sets of seeds are used for the assay. The first set consists of positive transgenic events (F1 hybrid) where the genes of the present invention are expressed in the seed. The second seed set is nontransgenic, wild-type negative control made from the same genotype as the transgenic events. The third set consisted of two cold tolerant and one cold sensitive commercial check lines of corn. All seeds are treated with a fungicide “Captan” (MAESTRO® 80DF Fungicide, Arvesta Corporation, San Francisco, Calif., USA). 0.43 mL Captan is applied per 45 g of corn seeds by mixing it well and drying the fungicide prior to the experiment.

[0119] Corn kernels are placed embryo side down on blotter paper within an individual cell (8.9×8.9 cm) of a germination tray (54×36 cm). Ten seeds from an event are placed into one cell of the germination tray. Each tray can hold 21 transgenic events and 3 replicates of wildtype (LH244SDms+LH59), which is randomized in a complete block design. For every event there are five replications (five trays). The trays are placed at 9.7C for 24 days (no light) in a Convrion growth chamber (Conviron Model PG V36, Controlled Environments, Winnipeg, Canada). Two hundred and fifty milliliters of deionized water are added to each germination tray. Germination counts are taken 10th, 11th, 12th, 13th, 14th, 17th, 19th, 21st, and 24th day after start date of the experiment. Seeds are considered germinated if the emerged radicle size is 1 cm. From the germination counts germination index is calculated.

[0120] The germination index is calculated as per:
Germination index=(Σ([T+1−nᵢ]*[Pᵢ−Pᵢ₋₁]))/T

[0121] Where T is the total number of days for which the germination assay is performed. The number of days after planting is defined by n. “i” indicated the number of times the germination had been counted, including the current day. P is the percentage of seeds germinated during any given rating. Statistical differences are calculated between transgenic events and wild type control. After statistical analysis, the events that show a statistical significance at the p level of less than 0.1 relative to wild-type controls will advance to a secondary cold selection. The secondary cold screen is conducted in the same manner of the primary selection only increasing the number of repetitions to ten. Statistical analysis of the data from the secondary selection is conducted to identify the events that show a statistical significance at the p level of less than 0.05 relative to wild-type controls.

TABLE 17

| | | | Germination index | | | |
|---|---|---|---|---|---|---|
| | | | | | Mean | |
| PEP | | | | | of | |
| SEQ | | | Percent | | con- | |
| ID | Construct ID | Event ID | change | Mean | trols | P-value |
| 85 | PMON69456 | ZM_M15392 | −27 | 23.4 | 32.07 | 0.0718 |
| | PMON69456 | ZM_M15392 | 12 | 47.88 | 42.93 | 9.00E−04 |
| | PMON69456 | ZM_M15392 | 13 | 48 | 42.44 | 0.0756 |
| | PMON69456 | ZM_M17042 | −9 | 29.2 | 32.07 | 0.4 |
| | PMON69456 | ZM_M17042 | 17 | 49.5 | 42.44 | 0.0248 |
| | PMON69456 | ZM_M17042 | 16 | 49.89 | 42.93 | 0 |
| | PMON69456 | ZM_M17042 | −6 | 28.14 | 30.07 | 0.6526 |
| | PMON69456 | ZM_M17044 | −38 | 19.25 | 30.88 | 0.019 |
| | PMON69456 | ZM_M17044 | 9 | 46.17 | 42.44 | 0.2317 |
| | PMON69456 | ZM_M17044 | 7 | 46.88 | 43.86 | 0.0297 |
| | PMON69456 | ZM_M17044 | 14 | 34.14 | 30.07 | 0.3445 |
| 107 | PMON75533 | ZM_M47453 | 3 | 46.88 | 45.38 | 0.3782 |
| | PMON75533 | ZM_M47453 | 25 | 49.75 | 39.69 | 0.002 |
| | PMON75533 | ZM_M47460 | 23 | 48.83 | 39.69 | 0.0047 |
| | PMON75533 | ZM_M47460 | 3 | 46.88 | 45.38 | 0.3782 |
| | PMON75533 | ZM_M49275 | 14 | 45.08 | 39.69 | 0.0914 |
| | PMON75533 | ZM_M49275 | 11 | 50.46 | 45.38 | 0.0031 |
| | PMON75533 | ZM_M49278 | 15 | 45.83 | 39.69 | 0.055 |
| | PMON75533 | ZM_M49278 | 14 | 51.75 | 45.38 | 2.00E−04 |
| 119 | PMON78235 | ZM_M53641 | 16 | 48.25 | 41.72 | 4.00E−04 |
| | PMON78235 | ZM_M53641 | 23 | 45 | 36.5 | 0.0508 |
| | PMON78235 | ZM_M53641 | 1 | 48.42 | 48.08 | 0.9116 |
| | PMON78235 | ZM_M53641 | 5 | 42.17 | 40.24 | 0.5629 |
| | PMON78235 | ZM_M53994 | 26 | 46 | 36.5 | 0.0294 |
| | PMON78235 | ZM_M53994 | 15 | 47.92 | 41.72 | 7.00E−04 |
| | PMON78235 | ZM_M53994 | 1 | 48.67 | 48.08 | 0.8459 |
| | PMON78235 | ZM_M53994 | −4 | 38.58 | 40.24 | 0.6196 |
| | PMON78235 | ZM_M53997 | 16 | 48.21 | 41.72 | 4.00E−04 |
| | PMON78235 | ZM_M53997 | 15 | 42 | 36.5 | 0.2036 |
| 104 | PMON78936 | ZM_M45248 | 25 | 48.25 | 38.69 | 0.0221 |
| | PMON78936 | ZM_M45248 | 14 | 48.29 | 42.21 | 0.0013 |
| | PMON78936 | ZM_M45274 | 15 | 48.33 | 42.21 | 0.0012 |
| | PMON78936 | ZM_M45274 | 24 | 48.08 | 38.69 | 0.0245 |
| | PMON78936 | ZM_M45275 | 5 | 40.5 | 38.69 | 0.6613 |
| | PMON78936 | ZM_M46485 | 11 | 42.92 | 38.69 | 0.3066 |
| | PMON78936 | ZM_M46516 | −1 | 38.33 | 38.69 | 0.9301 |
| | PMON78936 | ZM_M46516 | −4 | 40.38 | 42.21 | 0.3274 |
| | PMON78936 | ZM_M47276 | 11 | 43.08 | 38.69 | 0.288 |
| 110 | PMON79425 | ZM_M50823 | 4 | 42.79 | 41.31 | 0.3848 |
| | PMON79425 | ZM_M50823 | 18 | 42.83 | 36.25 | 0.0378 |
| | PMON79425 | ZM_M50856 | 4 | 42.88 | 41.31 | 0.3589 |
| | PMON79425 | ZM_M50856 | 13 | 40.83 | 36.25 | 0.1462 |
| | PMON79425 | ZM_M51300 | 7 | 44.25 | 41.31 | 0.087 |
| | PMON79425 | ZM_M51300 | −3 | 35.16 | 36.25 | 0.7282 |
| | PMON79425 | ZM_M51302 | 23 | 44.54 | 36.25 | 0.0093 |
| | PMON79425 | ZM_M51302 | 17 | 48.17 | 41.31 | 1.00E−04 |
| | PMON79425 | ZM_M51313 | 12 | 46.33 | 41.31 | 0.004 |
| | PMON79425 | ZM_M51313 | 23 | 44.7 | 36.25 | 0.008 |
| | PMON79425 | ZM_M51608 | 24 | 45.08 | 36.25 | 0.0057 |
| | PMON79425 | ZM_M51608 | 11 | 45.88 | 41.31 | 0.0086 |
| | PMON79425 | ZM_M51623 | 21 | 43.7 | 36.25 | 0.0189 |
| | PMON79425 | ZM_M51623 | 14 | 47.21 | 41.31 | 8.00E−04 |
| | PMON79425 | ZM_M52067 | −5 | 39.13 | 41.31 | 0.2033 |
| | PMON79425 | ZM_M52067 | 8 | 39.08 | 36.25 | 0.368 |
| 116 | PMON79697 | ZM_M53938 | 7 | 47.04 | 43.93 | 0.0587 |
| | PMON79697 | ZM_M53938 | 5 | 42 | 40.17 | 0.6198 |
| | PMON79697 | ZM_M53939 | 18 | 47.25 | 40.17 | 0.0575 |
| | PMON79697 | ZM_M53939 | 11 | 48.58 | 43.93 | 0.0049 |
| | PMON79697 | ZM_M54371 | 11 | 48.88 | 43.93 | 0.0028 |
| | PMON79697 | ZM_M54371 | 15 | 46.25 | 40.17 | 0.1019 |
| | PMON79697 | ZM_M54372 | 1 | 40.75 | 40.17 | 0.8745 |
| | PMON79697 | ZM_M54374 | 12 | 49.21 | 43.93 | 0.0022 |
| | PMON79697 | ZM_M54374 | 18 | 47.25 | 40.17 | 0.0575 |
| 111 | PMON79718 | ZM_M50838 | 6 | 45.25 | 42.78 | 0.331 |
| | PMON79718 | ZM_M51591 | −3 | 42.67 | 43.93 | 0.4409 |
| | PMON79718 | ZM_M51591 | −18 | 35.08 | 42.78 | 0.0031 |
| | PMON79718 | ZM_M51592 | −3 | 41.42 | 42.78 | 0.5919 |
| | PMON79718 | ZM_M51594 | 6 | 46.46 | 43.93 | 0.1241 |
| | PMON79718 | ZM_M51594 | 13 | 48.15 | 42.78 | 0.0545 |
| | PMON79718 | ZM_M51598 | 11 | 48.96 | 43.93 | 0.0024 |
| | PMON79718 | ZM_M51598 | 11 | 47.58 | 42.78 | 0.0606 |
| | PMON79718 | ZM_M51615 | 6 | 46.46 | 43.93 | 0.1241 |
| | PMON79718 | ZM_M51615 | 11 | 47.33 | 42.78 | 0.075 |
| | PMON79718 | ZM_M51618 | 2 | 43.5 | 42.78 | 0.7759 |
| | PMON79718 | ZM_M52797 | −6 | 40.17 | 42.78 | 0.3047 |
| | PMON79718 | ZM_M52937 | 16 | 49.67 | 42.78 | 0.0077 |
| | PMON79718 | ZM_M52937 | 12 | 49.04 | 43.93 | 0.0021 |
| 96 | PMON80270 | ZM_M55967 | 10.19 | 50.63 | 45.94 | 6.00E−04 |
| | PMON80270 | ZM_M55968 | 7.38 | 49.33 | 45.94 | 0.0129 |
| | PMON80270 | ZM_M55969 | 3.27 | 47.44 | 45.94 | 0.2678 |
| | PMON80270 | ZM_M55970 | 10.56 | 50.79 | 45.94 | 4.00E−04 |
| | PMON80270 | ZM_M55971 | 7.38 | 49.33 | 45.94 | 0.0129 |
| | PMON80270 | ZM_M55972 | 2.66 | 47.17 | 45.94 | 0.3663 |
| | PMON80270 | ZM_M56524 | 3.81 | 47.7 | 45.94 | 0.1952 |
| | PMON80270 | ZM_M56526 | −7.6 | 42.46 | 45.94 | 0.0105 |
| | PMON80270 | ZM_M56527 | −19.87 | 36.82 | 45.94 | 0 |
| 120 | PMON80452 | ZM_M53452 | 13 | 41.83 | 37.08 | 0.1902 |
| | PMON80452 | ZM_M53452 | 19 | 49.63 | 41.56 | 0 |
| | PMON80452 | ZM_M53452 | 7 | 51.42 | 48.08 | 0.2683 |
| | PMON80452 | ZM_M53452 | 0 | 40.25 | 40.24 | 0.9971 |
| | PMON80452 | ZM_M53455 | −3 | 36 | 37.08 | 0.7642 |
| | PMON80452 | ZM_M53455 | 17 | 48.67 | 41.56 | 0 |
| | PMON80452 | ZM_M53455 | −9 | 43.67 | 48.08 | 0.1434 |
| | PMON80452 | ZM_M53455 | −1 | 39.92 | 40.24 | 0.9231 |
| | PMON80452 | ZM_M53456 | 18 | 49.17 | 41.56 | 0 |
| | PMON80452 | ZM_M53456 | 18 | 43.83 | 37.08 | 0.0639 |
| | PMON80452 | ZM_M53469 | 14 | 47.54 | 41.56 | 1.00E−04 |
| | PMON80452 | ZM_M53469 | 18 | 43.75 | 37.08 | 0.0672 |
| | PMON80452 | ZM_M53694 | 14 | 42.42 | 37.08 | 0.1418 |
| | PMON80452 | ZM_M53694 | 13 | 46.92 | 41.56 | 4.00E−04 |
| | PMON80452 | ZM_M53695 | 21 | 50.08 | 41.56 | 0 |
| | PMON80452 | ZM_M53695 | 22 | 45.25 | 37.08 | 0.0256 |
| | PMON80452 | ZM_M53696 | 21 | 50.42 | 41.56 | 0 |
| | PMON80452 | ZM_M53696 | 31 | 48.5 | 37.08 | 0.002 |
| | PMON80452 | ZM_M54104 | 13 | 41.75 | 37.08 | 0.198 |
| | PMON80452 | ZM_M54104 | 13 | 47.17 | 41.56 | 2.00E−04 |
| | PMON80452 | ZM_M54106 | 8 | 39.92 | 37.08 | 0.4332 |
| | PMON80452 | ZM_M54106 | 12 | 46.38 | 41.56 | 0.0015 |
| 118 | PMON80461 | ZM_M52932 | 17 | 48.67 | 41.56 | 0 |
| | PMON80461 | ZM_M52932 | 32 | 48.17 | 36.5 | 0.0079 |
| | PMON80461 | ZM_M52932 | −8 | 43.25 | 46.86 | 0.1944 |
| | PMON80461 | ZM_M52932 | 9 | 43.92 | 40.24 | 0.271 |
| | PMON80461 | ZM_M53218 | 16 | 42.42 | 36.5 | 0.1717 |
| | PMON80461 | ZM_M53218 | 7 | 44.58 | 41.56 | 0.0448 |
| | PMON80461 | ZM_M53218 | −6 | 44.08 | 46.86 | 0.3172 |
| | PMON80461 | ZM_M53218 | 4 | 41.92 | 40.24 | 0.6145 |
| | PMON80461 | ZM_M53235 | 22 | 50.71 | 41.56 | 0 |
| | PMON80461 | ZM_M53235 | 24 | 45.25 | 36.5 | 0.0445 |
| | PMON80461 | ZM_M53503 | 13 | 46.79 | 41.56 | 6.00E−04 |
| | PMON80461 | ZM_M53503 | 28 | 46.83 | 36.5 | 0.0181 |
| | PMON80461 | ZM_M53504 | 12 | 41 | 36.5 | 0.2975 |
| | PMON80461 | ZM_M53504 | 14 | 47.5 | 41.56 | 1.00E−04 |
| | PMON80461 | ZM_M53848 | 24 | 51.57 | 41.56 | 0 |
| | PMON80461 | ZM_M53848 | 15 | 41.92 | 36.5 | 0.2104 |
| | PMON80461 | ZM_M54282 | 22 | 50.75 | 41.56 | 0 |
| | PMON80461 | ZM_M54282 | 29 | 47 | 36.5 | 0.0164 |
| | PMON80461 | ZM_M54284 | 21 | 44.33 | 36.5 | 0.0714 |
| | PMON80461 | ZM_M54284 | 22 | 50.71 | 41.56 | 0 |
| | PMON80461 | ZM_M55266 | 7 | 50.22 | 46.86 | 0.2268 |
| | PMON80461 | ZM_M55957 | 10 | 51.53 | 46.86 | 0.0945 |
| | PMON80461 | ZM_M56233 | 9 | 51.18 | 46.86 | 0.1217 |
| | PMON80461 | ZM_M56728 | 2 | 47.92 | 46.86 | 0.7033 |
| 122 | PMON80500 | ZM_M56549 | −0.52 | 45.71 | 45.94 | 0.8613 |
| | PMON80500 | ZM_M56560 | 8.29 | 49.75 | 45.94 | 0.0053 |
| | PMON80500 | ZM_M56565 | 2.2 | 46.96 | 45.94 | 0.4535 |
| | PMON80500 | ZM_M56567 | 9.19 | 50.17 | 45.94 | 0.002 |
| | PMON80500 | ZM_M56568 | 10.82 | 50.92 | 45.94 | 3.00E−04 |
| | PMON80500 | ZM_M58003 | 4.2 | 47.88 | 45.94 | 0.1542 |

[0122] (2) Cold Shock assay—The experimental set-up for the cold shock assay was the same as described in the above cold germination assay except seeds were grown in potted media for the cold shock assay.

[0123] The desired numbers of 2.5″ square plastic pots were placed on flats (n=32, 4×8). Pots were filled with Metro Mix 200 soil-less media containing 19:6:12 fertilizer (6 lbs/cubic yard) (Metro Mix, Pots and Flat are obtained from Hummert International, Earth City, Mo.). After planting seeds, pots were placed in a growth chamber set at 23° C., relative humidity of 65% with 12 hour day and night photoperiod (300 uE/m2-min). Planted seeds were watered for 20 minute every other day by sub-irrigation and flats were rotated every third day in a growth chamber for growing corn seedlings.

[0124] On the 10^{th} day after planting the transgenic positive and wild-type negative (WT) plants were positioned in flats in an alternating pattern. Chlorophyll fluorescence of plants was measured on the 10^{th} day during the dark period of growth by using a PAM-2000 portable fluorometer as per the manufacturer's instructions (Walz, Germany). After chlorophyll measurements, leaf samples from each event were collected for confirming the expression of genes of the present invention. For expression analysis six VI leaf tips from each selection were randomly harvested. The flats were moved to a growth chamber set at 5° C. All other conditions such as humidity, day/night cycle and light intensity were held constant in the growth chamber. The flats were sub-irrigated every day after transfer to the cold temperature. On the 4^{th} day chlorophyll fluorescence was measured. Plants were transferred to normal growth conditions after six days of cold shock treatment and allowed to recover for the next three days. During this recovery period the length of the V3 leaf was measured on the 1^{st} and 3^{rd} days. After two days of recovery V2 leaf damage was determined visually by estimating percent of green V2 leaf.

[0125] Statistical differences in V3 leaf growth, V2 leaf necrosis and fluorescence during pre-shock and cold shock can be used for estimation of cold shock damage on corn plants.
[0126] (3) Early seedling growth assay—Three sets of seeds were used for the experiment. The first set consists of positive transgenic events (F1 hybrid) where the genes of the present invention were expressed in the seed. The second seed set was nontransgenic, wild-type negative control made from the same genotype as the transgenic events. The third seed set consisted of two cold tolerant and two cold sensitive commercial check lines of corn. All seeds were treated with a fungicide “Captan”, (3a,4,7,a-tetrahydro-2-[(trichloromethyl)thio]-1H-isoindole-1,3(2H)-dione, Drex Chemical Co. Memphis, Tenn.). Captan (0.43 mL) was applied per 45 g of corn seeds by mixing it well and drying the fungicide prior to the experiment.

[0127] Seeds were grown in germination paper for the early seedling growth assay. Three 12″×18″ pieces of germination paper (Anchor Paper #SD7606) were used for each entry in the test (three repetitions per transgenic event). The papers were wetted in a solution of 0.5% KNO₃ and 0.1% Thyram.

[0128] For each paper fifteen seeds were placed on the line evenly spaced down the length of the paper. The fifteen seeds were positioned on the paper such that the radical would grow downward, for example longer distance to the paper's edge. The wet paper was rolled up starting from one of the short ends. The paper was rolled evenly and tight enough to hold the seeds in place. The roll was secured into place with two large paper clips, one at the top and one at the bottom. The rolls were incubated in a growth chamber at 23° C. for three days in a randomized complete block design within an appropriate container. The chamber was set for 65% humidity with no light cycle. For the cold stress treatment the rolls were then incubated in a growth chamber at 12° C. for twelve days. The chamber was set for 65% humidity with no light cycle.

[0129] After the cold treatment the germination papers were unrolled and the seeds that did not germinate were discarded. The lengths of the radicle and coleoptile for each seed were measured through an automated imaging program that automatically collects and processes the images. The imaging program automatically measures the shoot length, root length, and whole seedling length of every individual seedling and then calculates the average of each roll.

[0130] After statistical analysis, the events that show a statistical significance at the p level of less than 0.1 relative to wild-type controls will advance to a secondary cold selection. The secondary cold selection is conducted in the same manner of the primary selection only increasing the number of repetitions to five. Statistical analysis of the data from the secondary selection is conducted to identify the events that show a statistical significance at the p level of less than 0.05 relative to wild-type controls.

TABLE 18

| | | | | | | | | | | | Seedlling length | | | |
|---|---|---|---|---|---|---|---|---|---|---|---|---|---|---|
| | | | | | | | | | | | | | Mean | |
| PEP | | | Root length | | | | Shoot length | | | | | | of | |
| SEQ | Construct | | Percent | | Mean of | | Percent | | Mean of | | Percent | | con- | |
| ID | ID | Event ID | change | Mean | controls | P-value | change | Mean | controls | P-value | change | Mean | trols | P-value |
| 88 | PMON68399 | ZM_M31143 | −4 | 9.5 | 9.85 | 0.5479 | −1 | 7.94 | 8.04 | 0.7666 | −3 | 17.45 | 17.9 | 0.6024 |
| | PMON68399 | ZM_M31143 | 7 | 11.15 | 10.41 | 0.1158 | 8 | 9.42 | 8.69 | 0.0536 | 8 | 20.57 | 19.1 | 0.0607 |
| | PMON68399 | ZM_M31146 | 11 | 11.52 | 10.41 | 0.0186 | 0 | 8.67 | 8.69 | 0.9668 | 6 | 20.2 | 19.1 | 0.1593 |
| | PMON68399 | ZM_M31146 | 14 | 9.9 | 8.66 | 0.011 | 6 | 7.37 | 6.99 | 0.2969 | 10 | 17.27 | 15.65 | 0.0396 |
| | PMON68399 | ZM_M31147 | 13 | 11.75 | 10.41 | 0.0051 | 12 | 9.69 | 8.69 | 0.0088 | 12 | 21.43 | 19.1 | 0.0034 |
| | PMON68399 | ZM_M31147 | 14 | 11.25 | 9.85 | 0.0185 | 4 | 8.33 | 8.04 | 0.3961 | 9 | 19.58 | 17.9 | 0.0513 |
| | PMON68399 | ZM_M31152 | −20 | 8.4 | 10.45 | 2.00E−04 | −7 | 7.44 | 7.96 | 0.3265 | −14 | 15.84 | 18.41 | 0.0087 |
| | PMON68399 | ZM_M31152 | 1 | 10.48 | 10.41 | 0.8793 | 6 | 9.17 | 8.69 | 0.1965 | 3 | 19.66 | 19.1 | 0.4697 |
| | PMON68399 | ZM_M31524 | 15 | 12.01 | 10.41 | 9.00E−04 | 10 | 9.54 | 8.69 | 0.0242 | 13 | 21.55 | 19.1 | 0.0021 |
| | PMON68399 | ZM_M31524 | 12 | 11.08 | 9.85 | 0.0385 | 8 | 8.69 | 8.04 | 0.0569 | 11 | 19.77 | 17.9 | 0.0306 |
| | PMON68399 | ZM_M32356 | 12 | 10.99 | 9.85 | 0.0533 | −1 | 7.99 | 8.04 | 0.8731 | 6 | 18.98 | 17.9 | 0.2052 |
| | PMON68399 | ZM_M32356 | 12 | 11.7 | 10.41 | 0.0068 | 7 | 9.32 | 8.69 | 0.096 | 10 | 21.01 | 19.1 | 0.0153 |
| | PMON68399 | ZM_M34171 | −24 | 8.6 | 11.39 | 4.00E−04 | −13 | 7.35 | 8.48 | 0.0331 | −20 | 15.95 | 19.87 | 0.0016 |
| | PMON68399 | ZM_M34171 | 13 | 11.72 | 10.41 | 0.006 | 6 | 9.23 | 8.69 | 0.1486 | 10 | 20.95 | 19.1 | 0.0187 |
| | PMON68399 | ZM_M38646 | 10 | 12.63 | 11.52 | 0.032 | 3 | 10.38 | 10.05 | 0.4864 | 7 | 23.01 | 21.57 | 0.106 |
| | PMON68399 | ZM_M38660 | 10 | 12.68 | 11.52 | 0.0249 | 3 | 10.37 | 10.05 | 0.4953 | 7 | 23.06 | 21.57 | 0.0947 |
| | PMON68399 | ZM_M38681 | 6 | 12.2 | 11.52 | 0.1829 | 3 | 10.31 | 10.05 | 0.5738 | 4 | 22.52 | 21.57 | 0.2835 |
| | PMON68399 | ZM_M38697 | 7 | 12.35 | 11.52 | 0.1053 | 0 | 10.03 | 10.05 | 0.9751 | 4 | 22.38 | 21.57 | 0.3563 |
| | PMON68399 | ZM_M39295 | 11 | 12.84 | 11.52 | 0.0115 | 11 | 11.12 | 10.05 | 0.0264 | 11 | 23.97 | 21.57 | 0.0084 |
| | PMON68399 | ZM_M39297 | 20 | 13.84 | 11.52 | 0 | 7 | 10.79 | 10.05 | 0.1203 | 14 | 24.63 | 21.57 | 0.001 |
| | PMON68399 | ZM_M39298 | 7 | 12.29 | 11.52 | 0.1342 | −1 | 9.91 | 10.05 | 0.7669 | 3 | 22.19 | 21.57 | 0.4785 |
| | PMON68399 | ZM_M39299 | 6 | 12.17 | 11.52 | 0.2051 | 1 | 10.13 | 10.05 | 0.8674 | 3 | 22.29 | 21.57 | 0.4118 |
| | PMON68399 | ZM_M39302 | −44 | 6.44 | 11.52 | 0 | −31 | 6.98 | 10.05 | 0 | −38 | 13.42 | 21.57 | 0 |
| 87 | PMON72494 | ZM_M26428 | 22 | 17.55 | 14.42 | 0 | 4 | 12.4 | 11.87 | 0.21 | 14 | 29.95 | 26.29 | 1.00E−04 |
| | PMON72494 | ZM_M26428 | 46 | 15.57 | 10.67 | 0 | 12 | 11.3 | 10.11 | 0.0033 | 29 | 26.86 | 20.78 | 0 |
| | PMON72494 | ZM_M26428 | 23 | 14.1 | 11.43 | 0 | 13 | 9 | 7.98 | 0.0704 | 19 | 23.1 | 19.4 | 8.00E−04 |
| | PMON72494 | ZM_M26428 | −6 | 10.7 | 11.43 | 0.2402 | 9 | 8.71 | 7.98 | 0.1938 | 0 | 19.41 | 19.4 | 0.9925 |
| | PMON72494 | ZM_M26428 | 3 | 11.02 | 10.67 | 0.5208 | 9 | 11.07 | 10.11 | 0.0163 | 6 | 22.09 | 20.78 | 0.1209 |
| | PMON72494 | ZM_M49327 | 8 | 12.13 | 11.23 | 0.2163 | 5 | 10.44 | 9.93 | 0.271 | 7 | 22.57 | 21.16 | 0.2103 |
| | PMON72494 | ZM_M49327 | 17 | 11.22 | 9.61 | 0.0189 | 4 | 8.28 | 7.93 | 0.5332 | 11 | 19.51 | 17.53 | 0.0853 |
| | PMON72494 | ZM_M49327 | 22 | 14.04 | 11.54 | 4.00E−04 | 21 | 9.73 | 8.06 | 0.0039 | 21 | 23.77 | 19.59 | 1.00E−04 |
| | PMON72494 | ZM_M49328 | 4 | 11.7 | 11.23 | 0.5112 | 11 | 11.03 | 9.93 | 0.0196 | 7 | 22.74 | 21.16 | 0.1618 |
| | PMON72494 | ZM_M49328 | 28 | 12.31 | 9.61 | 1.00E−04 | 17 | 9.27 | 7.93 | 0.0206 | 23 | 21.58 | 17.53 | 6.00E−04 |
| | PMON72494 | ZM_M49328 | 27 | 14.61 | 11.54 | 0 | 37 | 11.07 | 8.06 | 0 | 31 | 25.68 | 19.59 | 0 |
| | PMON72494 | ZM_M60546 | −2 | 12.67 | 12.95 | 0.7032 | 6 | 9.48 | 8.95 | 0.4795 | 1 | 22.15 | 21.91 | 0.8478 |
| 89 | PMON73765 | ZM_M35084 | 10 | 10.56 | 9.61 | 0.1621 | −2 | 7.8 | 7.93 | 0.8286 | 5 | 18.36 | 17.53 | 0.4667 |
| | PMON73765 | ZM_M35084 | 30 | 14.51 | 11.2 | 1.00E−04 | 27 | 9.25 | 7.27 | 0.0015 | 29 | 23.76 | 18.46 | 0 |
| | PMON73765 | ZM_M54013 | 42 | 13.61 | 9.61 | 0 | 13 | 8.96 | 7.93 | 0.0717 | 29 | 22.57 | 17.53 | 0 |
| | PMON73765 | ZM_M54013 | 32 | 14.78 | 11.2 | 0 | 49 | 10.82 | 7.27 | 0 | 39 | 25.6 | 18.46 | 0 |
| | PMON73765 | ZM_M54016 | 33 | 12.82 | 9.61 | 0 | 7 | 8.51 | 7.93 | 0.3051 | 22 | 21.33 | 17.53 | 0.0013 |
| | PMON73765 | ZM_M54016 | 34 | 14.98 | 11.2 | 0 | 39 | 10.09 | 7.27 | 0 | 36 | 25.07 | 18.46 | 0 |
| 91 | PMON73816 | ZM_M37183 | 21 | 12.1 | 9.96 | 0.0378 | 14 | 10.65 | 9.35 | 0.0587 | 18 | 22.75 | 19.31 | 0.0348 |
| | PMON73816 | ZM_M37183 | 33 | 11.5 | 8.66 | 0 | 21 | 9.82 | 8.09 | 0 | 27 | 21.32 | 16.75 | 0 |
| | PMON73816 | ZM_M37188 | 18 | 11.78 | 9.96 | 0.076 | 21 | 11.3 | 9.35 | 0.0051 | 20 | 23.08 | 19.31 | 0.021 |
| | PMON73816 | ZM_M37188 | 24 | 10.71 | 8.66 | 0 | 16 | 9.41 | 8.09 | 3.00E−04 | 20 | 20.11 | 16.75 | 0 |
| | PMON73816 | ZM_M37197 | 30 | 12.93 | 9.96 | 0.0044 | 6 | 9.88 | 9.35 | 0.4306 | 18 | 22.82 | 19.31 | 0.0313 |
| | PMON73816 | ZM_M37197 | 30 | 11.26 | 8.66 | 0 | 13 | 9.11 | 8.09 | 0.0047 | 22 | 20.37 | 16.75 | 0 |
| 90 | PMON73829 | ZM_M37805 | 29 | 9.46 | 7.32 | 1.00E−04 | 13 | 6.58 | 5.8 | 0.0171 | 22 | 16.04 | 13.12 | 1.00E−04 |
| | PMON73829 | ZM_M37805 | 18 | 11.78 | 9.96 | 0.076 | 15 | 10.74 | 9.35 | 0.0436 | 17 | 22.52 | 19.31 | 0.0484 |
| | PMON73829 | ZM_M37815 | 30 | 12.92 | 9.96 | 0.0046 | 13 | 10.57 | 9.35 | 0.0756 | 22 | 23.49 | 19.31 | 0.0109 |
| | PMON73829 | ZM_M37815 | 11 | 8.14 | 7.32 | 0.1117 | 13 | 6.54 | 5.8 | 0.0225 | 12 | 14.68 | 13.12 | 0.0241 |
| | PMON73829 | ZM_M38768 | 13 | 11.26 | 9.96 | 0.201 | −1 | 9.25 | 9.35 | 0.8842 | 6 | 20.51 | 19.31 | 0.4543 |
| | PMON73829 | ZM_M38768 | −2 | 7.2 | 7.32 | 0.8084 | 2 | 5.93 | 5.8 | 0.6854 | 0 | 13.13 | 13.12 | 0.9914 |
| | PMON73829 | ZM_M38797 | −39 | 4.49 | 7.32 | 0 | −19 | 4.68 | 5.8 | 8.00E−04 | −30 | 9.16 | 13.12 | 0 |
| | PMON73829 | ZM_M38797 | −11 | 8.83 | 9.96 | 0.2685 | 0 | 9.36 | 9.35 | 0.9827 | −6 | 18.2 | 19.31 | 0.4895 |
| | PMON73829 | ZM_M38798 | −62 | 3.75 | 9.96 | 0 | −35 | 6.07 | 9.35 | 0 | −49 | 9.82 | 19.31 | 0 |
| | PMON73829 | ZM_M38798 | −50 | 3.67 | 7.32 | 0 | −41 | 3.41 | 5.8 | 0 | −46 | 7.08 | 13.12 | 0 |
| | PMON73829 | ZM_M39692 | 3 | 7.54 | 7.32 | 0.6671 | −3 | 5.62 | 5.8 | 0.5857 | 0 | 13.16 | 13.12 | 0.9475 |
| | PMON73829 | ZM_M39692 | 17 | 11.69 | 9.96 | 0.0919 | 3 | 9.59 | 9.35 | 0.7181 | 10 | 21.28 | 19.31 | 0.2211 |
| 92 | PMON75305 | ZM_M35696 | 26 | 14.78 | 11.77 | 0 | 18 | 11.74 | 9.97 | 3.00E−04 | 22 | 26.52 | 21.74 | 0 |
| | PMON75305 | ZM_M35696 | 33 | 11.51 | 8.66 | 0 | 15 | 9.33 | 8.09 | 7.00E−04 | 24 | 20.84 | 16.75 | 0 |
| | PMON75305 | ZM_M36703 | 27 | 14.94 | 11.77 | 0 | 13 | 11.25 | 9.97 | 0.007 | 20 | 26.19 | 21.74 | 0 |
| | PMON75305 | ZM_M36703 | 40 | 12.15 | 8.66 | 0 | 22 | 9.84 | 8.09 | 0 | 31 | 21.99 | 16.75 | 0 |
| | PMON75305 | ZM_M36711 | 26 | 14.88 | 11.77 | 0 | 9 | 10.91 | 9.97 | 0.0455 | 19 | 25.78 | 21.74 | 2.00E−04 |
| | PMON75305 | ZM_M36711 | 35 | 11.68 | 8.66 | 0 | 16 | 9.38 | 8.09 | 4.00E−04 | 26 | 21.06 | 16.75 | 0 |
| 93 | PMON75306 | ZM_M35601 | 29 | 11.19 | 8.66 | 0 | 33 | 10.76 | 8.09 | 0 | 31 | 21.94 | 16.75 | 0 |
| | PMON75306 | ZM_M35601 | 11 | 13.05 | 11.77 | 0.0507 | 12 | 11.2 | 9.97 | 0.0097 | 11 | 24.24 | 21.74 | 0.0159 |
| | PMON75306 | ZM_M35604 | 24 | 14.64 | 11.77 | 0 | 16 | 11.57 | 9.97 | 9.00E−04 | 21 | 26.21 | 21.74 | 0 |
| | PMON75306 | ZM_M35604 | 42 | 12.29 | 8.66 | 0 | 35 | 10.92 | 8.09 | 0 | 39 | 23.21 | 16.75 | 0 |
| | PMON75306 | ZM_M35605 | 47 | 12.72 | 8.66 | 0 | 30 | 10.49 | 8.09 | 0 | 39 | 23.2 | 16.75 | 0 |
| | PMON75306 | ZM_M35605 | 18 | 13.92 | 11.77 | 0.0013 | 22 | 12.12 | 9.97 | 0 | 20 | 26.04 | 21.74 | 1.00E−04 |
| 94 | PMON75309 | ZM_M35865 | 21 | 10.45 | 8.66 | 0 | 3 | 8.3 | 8.09 | 0.5545 | 12 | 18.75 | 16.75 | 0.0017 |
| | PMON75309 | ZM_M35865 | 22 | 11.75 | 9.66 | 0.0038 | 17 | 10.68 | 9.1 | 0.0064 | 20 | 22.43 | 18.76 | 0.0031 |
| | PMON75309 | ZM_M35878 | 23 | 10.6 | 8.66 | 0 | 26 | 10.17 | 8.09 | 0 | 24 | 20.78 | 16.75 | 0 |
| | PMON75309 | ZM_M35878 | 18 | 11.38 | 9.66 | 0.0163 | 13 | 10.3 | 9.1 | 0.0362 | 16 | 21.68 | 18.76 | 0.017 |
| | PMON75309 | ZM_M36160 | 19 | 11.51 | 9.66 | 0.0099 | 19 | 10.79 | 9.1 | 0.0037 | 19 | 22.31 | 18.76 | 0.0041 |
| | PMON75309 | ZM_M36160 | 32 | 11.41 | 8.66 | 0 | 19 | 9.6 | 8.09 | 0 | 25 | 21.01 | 16.75 | 0 |
| 95 | PMON75312 | ZM_M35649 | 22 | 14.37 | 11.77 | 1.00E−04 | 12 | 11.18 | 9.97 | 0.0107 | 18 | 25.55 | 21.74 | 3.00E−04 |
| | PMON75312 | ZM_M35649 | 28 | 11.06 | 8.66 | 0 | 13 | 9.15 | 8.09 | 0.0034 | 21 | 20.21 | 16.75 | 0 |
| | PMON75312 | ZM_M37099 | 9 | 9.46 | 8.66 | 0.0458 | 13 | 9.11 | 8.09 | 0.0049 | 11 | 18.57 | 16.75 | 0.0042 |
| | PMON75312 | ZM_M37099 | 23 | 14.42 | 11.77 | 1.00E−04 | 10 | 10.97 | 9.97 | 0.0343 | 17 | 25.39 | 21.74 | 6.00E−04 |
| | PMON75312 | ZM_M37100 | 37 | 11.9 | 8.66 | 0 | 22 | 9.83 | 8.09 | 0 | 30 | 21.73 | 16.75 | 0 |
| | PMON75312 | ZM_M37100 | 9 | 12.85 | 11.77 | 0.0979 | 5 | 10.45 | 9.97 | 0.3064 | 7 | 23.29 | 21.74 | 0.1298 |
| 101 | PMON75515 | ZM_M43539 | 26 | 12.88 | 10.19 | 0 | 13 | 10.12 | 8.98 | 0.0097 | 20 | 23 | 19.17 | 0 |
| | PMON75515 | ZM_M43546 | −3 | 9.87 | 10.19 | 0.5762 | −5 | 8.55 | 8.98 | 0.3141 | −4 | 18.43 | 19.17 | 0.3786 |
| | PMON75515 | ZM_M50136 | 16 | 10.41 | 8.98 | 0.0441 | 14 | 7.42 | 6.51 | 0.2064 | 15 | 17.84 | 15.48 | 0.085 |
| | PMON75515 | ZM_M50136 | 24 | 13.2 | 10.68 | 0.0015 | 25 | 9.27 | 7.42 | 0.0053 | 24 | 22.47 | 18.1 | 4.00E−04 |
| | PMON75515 | ZM_M50142 | 25 | 11.25 | 8.98 | 0.0018 | 17 | 7.61 | 6.51 | 0.1294 | 22 | 18.87 | 15.48 | 0.0145 |
| | PMON75515 | ZM_M50142 | 31 | 13.94 | 10.68 | 1.00E−04 | 35 | 10 | 7.42 | 1.00E−04 | 32 | 23.94 | 18.1 | 0 |
| 105 | PMON75524 | ZM_M47998 | 17 | 11.23 | 9.61 | 0.0452 | 35 | 9.69 | 7.17 | 0.0012 | 25 | 20.91 | 16.79 | 0.0043 |
| | PMON75524 | ZM_M47998 | 15 | 13.3 | 11.54 | 0.0101 | 38 | 11.15 | 8.06 | 0 | 25 | 24.45 | 19.59 | 0 |
| | PMON75524 | ZM_M48003 | 4 | 9.99 | 9.61 | 0.6366 | 9 | 7.78 | 7.17 | 0.4187 | 6 | 17.77 | 16.79 | 0.4837 |
| | PMON75524 | ZM_M48003 | 28 | 14.77 | 11.54 | 0 | 15 | 9.22 | 8.06 | 0.0414 | 22 | 24 | 19.59 | 1.00E−04 |
| | PMON75524 | ZM_M48004 | 19 | 11.44 | 9.61 | 0.0245 | 29 | 9.24 | 7.17 | 0.007 | 23 | 20.68 | 16.79 | 0.0069 |
| | PMON75524 | ZM_M48004 | 5 | 12.11 | 11.54 | 0.3919 | 1 | 8.17 | 8.06 | 0.8374 | 4 | 20.28 | 19.59 | 0.5062 |
| | PMON75524 | ZM_M48005 | 18 | 11.37 | 9.61 | 0.0303 | 19 | 8.57 | 7.17 | 0.0654 | 19 | 19.93 | 16.79 | 0.0276 |
| | PMON75524 | ZM_M48005 | 33 | 15.38 | 11.54 | 0 | 29 | 10.4 | 8.06 | 1.00E−04 | 32 | 25.78 | 19.59 | 0 |
| | PMON75524 | ZM_M48007 | 20 | 11.51 | 9.61 | 0.0195 | 7 | 7.66 | 7.17 | 0.5152 | 14 | 19.17 | 16.79 | 0.0927 |
| | PMON75524 | ZM_M48007 | 28 | 14.78 | 11.54 | 0 | 46 | 11.78 | 8.06 | 0 | 36 | 26.55 | 19.59 | 0 |
| | PMON75524 | ZM_M48010 | 22 | 11.77 | 9.61 | 0.0083 | 12 | 8.05 | 7.17 | 0.2443 | 18 | 19.81 | 16.79 | 0.0339 |
| | PMON75524 | ZM_M48010 | 18 | 13.62 | 11.54 | 0.0026 | 25 | 10.08 | 8.06 | 6.00E−04 | 21 | 23.7 | 19.59 | 2.00E−04 |
| 107 | PMON75533 | ZM_M47453 | 55 | 14.93 | 9.61 | 0 | 54 | 11.03 | 7.17 | 0 | 55 | 25.96 | 16.79 | 0 |
| | PMON75533 | ZM_M47453 | 39 | 14.99 | 10.8 | 0 | 44 | 10.24 | 7.12 | 0 | 41 | 25.23 | 17.92 | 0 |
| | PMON75533 | ZM_M47460 | 15 | 11.03 | 9.61 | 0.0782 | 5 | 7.53 | 7.17 | 0.63 | 11 | 18.56 | 16.79 | 0.208 |
| | PMON75533 | ZM_M47460 | 36 | 14.65 | 10.8 | 0 | 21 | 8.6 | 7.12 | 0.0037 | 30 | 23.25 | 17.92 | 0 |
| | PMON75533 | ZM_M49275 | 23 | 11.82 | 9.61 | 0.0069 | 20 | 8.58 | 7.17 | 0.0636 | 22 | 20.4 | 16.79 | 0.0119 |
| | PMON75533 | ZM_M49275 | 30 | 14.09 | 10.8 | 0 | 21 | 8.65 | 7.12 | 0.0028 | 27 | 22.74 | 17.92 | 0 |
| | PMON75533 | ZM_M49278 | 14 | 10.96 | 9.61 | 0.093 | 7 | 7.68 | 7.17 | 0.4982 | 11 | 18.64 | 16.79 | 0.1885 |
| | PMON75533 | ZM_M49278 | 18 | 12.79 | 10.8 | 0.0014 | 13 | 8.01 | 7.12 | 0.0757 | 16 | 20.8 | 17.92 | 0.0023 |
| 114 | PMON75980 | ZM_M53387 | 17 | 13.08 | 11.23 | 0.0122 | 11 | 10.99 | 9.93 | 0.0247 | 14 | 24.08 | 21.16 | 0.0109 |
| | PMON75980 | ZM_M53389 | 13 | 12.69 | 11.23 | 0.0463 | 9 | 10.85 | 9.93 | 0.0503 | 11 | 23.54 | 21.16 | 0.0363 |
| | PMON75980 | ZM_M53390 | 5 | 11.8 | 11.23 | 0.4269 | 4 | 10.33 | 9.93 | 0.3908 | 5 | 22.13 | 21.16 | 0.3859 |
| | PMON75980 | ZM_M53392 | 20 | 13.42 | 11.23 | 0.0033 | 13 | 11.19 | 9.93 | 0.0079 | 16 | 24.62 | 21.16 | 0.0028 |
| | PMON75980 | ZM_M53396 | 14 | 12.75 | 11.23 | 0.0383 | 4 | 10.38 | 9.93 | 0.338 | 9 | 23.12 | 21.16 | 0.0831 |
| | PMON75980 | ZM_M53397 | 6 | 11.92 | 11.23 | 0.3398 | −4 | 9.59 | 9.93 | 0.455 | 2 | 21.51 | 21.16 | 0.7576 |
| | PMON75980 | ZM_M53398 | 4 | 11.66 | 11.23 | 0.5533 | 3 | 10.27 | 9.93 | 0.4659 | 4 | 21.93 | 21.16 | 0.4944 |
| 113 | PMON78232 | ZM_M55911 | −3 | 12.1 | 12.44 | 0.652 | 12 | 9.85 | 8.82 | 0.1004 | 3 | 21.94 | 21.27 | 0.5616 |
| | PMON78232 | ZM_M55911 | −5 | 13.18 | 13.83 | 0.3591 | 2 | 9.43 | 9.27 | 0.8057 | −2 | 22.61 | 23.09 | 0.6774 |
| | PMON78232 | ZM_M56069 | 14 | 14.13 | 12.44 | 0.031 | 7 | 9.44 | 8.82 | 0.3213 | 11 | 23.56 | 21.27 | 0.0511 |
| | PMON78232 | ZM_M56069 | 11 | 15.39 | 13.83 | 0.0296 | 12 | 10.38 | 9.27 | 0.0932 | 12 | 25.77 | 23.09 | 0.0237 |
| | PMON78232 | ZM_M56206 | −14 | 10.75 | 12.44 | 0.0307 | −9 | 8 | 8.82 | 0.1837 | −12 | 18.75 | 21.27 | 0.0333 |
| | PMON78232 | ZM_M56206 | 1 | 14.03 | 13.83 | 0.7776 | 5 | 9.73 | 9.27 | 0.4808 | 3 | 23.76 | 23.09 | 0.5663 |
| | PMON78232 | ZM_M56428 | 12 | 13.9 | 12.44 | 0.0606 | 11 | 9.83 | 8.82 | 0.1065 | 12 | 23.73 | 21.27 | 0.0367 |
| | PMON78232 | ZM_M56428 | 13 | 15.55 | 13.83 | 0.0164 | 18 | 10.91 | 9.27 | 0.0143 | 15 | 26.46 | 23.09 | 0.0048 |
| 106 | PMON79163 | ZM_M45011 | 16 | 11.88 | 10.25 | 0.0215 | 7 | 8.54 | 8 | 0.4508 | 12 | 20.42 | 18.26 | 0.0941 |
| | PMON79163 | ZM_M45011 | 20 | 12.98 | 10.8 | 0.0017 | 23 | 8.74 | 7.12 | 0.0046 | 21 | 21.71 | 17.92 | 4.00E−04 |
| | PMON79163 | ZM_M48217 | 16 | 11.89 | 10.25 | 0.0213 | 18 | 9.42 | 8 | 0.0487 | 17 | 21.3 | 18.26 | 0.0197 |
| | PMON79163 | ZM_M48217 | 28 | 13.81 | 10.8 | 0 | 20 | 8.51 | 7.12 | 0.0062 | 24 | 22.32 | 17.92 | 0 |
| 98 | PMON79174 | ZM_M47171 | 13 | 11.58 | 10.25 | 0.0602 | 20 | 9.61 | 8 | 0.0259 | 16 | 21.18 | 18.26 | 0.0247 |
| | PMON79174 | ZM_M47171 | 28 | 13.84 | 10.8 | 0 | 24 | 8.82 | 7.12 | 0.001 | 26 | 22.65 | 17.92 | 0 |
| | PMON79174 | ZM_M47941 | 18 | 12.09 | 10.25 | 0.0101 | 6 | 8.48 | 8 | 0.4971 | 13 | 20.57 | 18.26 | 0.0734 |
| | PMON79174 | ZM_M47941 | 25 | 13.53 | 10.8 | 0 | 16 | 8.24 | 7.12 | 0.026 | 21 | 21.77 | 17.92 | 1.00E−04 |
| 99 | PMON79413 | ZM_M48525 | 44 | 13.83 | 9.61 | 0 | 30 | 9.34 | 7.17 | 0.0049 | 38 | 23.17 | 16.79 | 0 |
| | PMON79413 | ZM_M48525 | 26 | 13.66 | 10.8 | 0 | 32 | 9.41 | 7.12 | 0 | 29 | 23.07 | 17.92 | 0 |
| | PMON79413 | ZM_M50333 | 25 | 12.05 | 9.61 | 0.0031 | 25 | 8.95 | 7.17 | 0.0197 | 25 | 21 | 16.79 | 0.0036 |
| | PMON79413 | ZM_M50333 | 27 | 13.75 | 10.8 | 0 | 34 | 9.55 | 7.12 | 0 | 30 | 23.3 | 17.92 | 0 |
| | PMON79413 | ZM_M53171 | 18 | 11.34 | 9.61 | 0.0331 | 27 | 9.13 | 7.17 | 0.0107 | 22 | 20.46 | 16.79 | 0.0106 |
| | PMON79413 | ZM_M53171 | 21 | 13.04 | 10.8 | 3.00E−04 | 37 | 9.78 | 7.12 | 0 | 27 | 22.82 | 17.92 | 0 |
| 112 | PMON79447 | ZM_M53825 | 16 | 12.45 | 10.71 | 0.0079 | 17 | 9.12 | 7.83 | 0.0281 | 16 | 21.57 | 18.53 | 0.0077 |
| | PMON79447 | ZM_M53825 | 30 | 14.57 | 11.2 | 1.00E−04 | 34 | 9.75 | 7.27 | 1.00E−04 | 32 | 24.32 | 18.46 | 0 |
| | PMON79447 | ZM_M53826 | 11 | 11.87 | 10.71 | 0.0705 | 0 | 7.84 | 7.83 | 0.9839 | 6 | 19.71 | 18.53 | 0.2903 |
| | PMON79447 | ZM_M53826 | 34 | 15 | 11.2 | 0 | 42 | 10.31 | 7.27 | 0 | 37 | 25.32 | 18.46 | 0 |
| | PMON79447 | ZM_M53835 | 6 | 11.31 | 10.71 | 0.342 | −5 | 7.42 | 7.83 | 0.4779 | 1 | 18.73 | 18.53 | 0.8568 |
| | PMON79447 | ZM_M53835 | 32 | 14.83 | 11.2 | 0 | 47 | 10.66 | 7.27 | 0 | 38 | 25.49 | 18.46 | 0 |

4. Cold Field Efficacy Trial

[0131] This example sets forth a cold field efficacy trial to identify gene constructs that confer enhanced cold vigor at germination and early seedling growth under early spring planting field conditions in conventional-till and simulated no-till environments. Seeds are planted into the ground around two weeks before local farmers are beginning to plant corn so that a significant cold stress is exerted onto the crop, named as cold treatment. Seeds also are planted under local optimal planting conditions such that the crop has little or no exposure to cold condition, named as normal treatment. The cold field efficacy trials are carried out in five locations, including Glyndon Minn. Mason Mich., Monmouth Ill., Dayton Iowa, Mystic Conn. At each location, seeds are planted under both cold and normal conditions with 3 repetitions per treatment, 20 kernels per row and single row per plot. Seeds are planted 1.5 to 2 inch deep into soil to avoid muddy conditions. Two temperature monitors are set up at each location to monitor both air and soil temperature daily.

[0132] Seed emergence is defined as the point when the growing shoot breaks the soil surface. The number of emerged seedling in each plot is counted everyday from the day the earliest plot begins to emerge until no significant changes in emergence occur. In addition, for each planting date, the latest date when emergence is 0 in all plots is also recorded. Seedling vigor is also rated at V3-V4 stage before the average of corn plant height reaches 10 inches, with 1=excellent early growth, 5=Average growth and 9=poor growth. Days to 50% emergence, maximum percent emergence and seedling vigor are calculated using SAS software for the data within each location or across all locations.

[0133] The following table lists the data that were collected and analyzed based on the procedure illustrated above. The analyzed data across all locations only include those from Glyndon Minn., Mason Mich., and Mystic Conn.

TABLE 19

| | | Days to 50% Emergence | | | | | | | | | | Maximum Percent Emergence | | | | | | | | | |
|---|---|---|---|---|---|---|---|---|---|---|---|---|---|---|---|---|---|---|---|---|---|
| | | Across Black | | | | | | | | | | Across Black | | | | | | | | | |
| PEP SEQ ID | | Dirt Trts | | Warm Trts | | Mason_Trt 2 | | Glyndon_Trt 2 | | Mystic_Trt 2 | | Dirt Trts | | Warm Trts | | Mason_Trt 2 | | Glyndon_Trt 2 | | Mystic_Trt 2 | |
| construct | Event1 | Delta | P value | Delta | P value | Delta | P value | Delta | P value | Delta | P value | Delta | P value | Delta | P value | Delta | P value | Delta | P value | Delta | P value |
| 88 | ZM_M31146 | 1.46 | 0.106 | 0.04 | 0.979 | 0.51 | 0.755 | 2.17 | 0.079 | 0.99 | 0.551 | −2.7 | 0.428 | 1.42 | 0.601 | 0.19 | 0.97 | −7.53 | 0.125 | 4.07 | 0.503 |
| pMON68399 | ZM_M31147 | 1.29 | 0.153 | 0.34 | 0.81 | 0.59 | 0.721 | 1.47 | 0.234 | 1.64 | 0.322 | −6.31 | 0.064 | −5.8 | 0.033 | −6.48 | 0.184 | −9.75 | 0.047 | 0.74 | 0.903 |
| | ZM_M31524 | −0.41 | 0.649 | 0.23 | 0.873 | −2.09 | 0.205 | −0.13 | 0.919 | 0.69 | 0.676 | −2.7 | 0.428 | −1.91 | 0.481 | 5.19 | 0.288 | −4.2 | 0.393 | −7.59 | 0.212 |
| | ZM_M32356 | −0.21 | 0.814 | 0.33 | 0.815 | −1.18 | 0.472 | −1.59 | 0.197 | 3.52 | 0.034 | 3.55 | 0.297 | −1.91 | 0.481 | 8.52 | 0.081 | 5.8 | 0.237 | −5.93 | 0.33 |
| | Construct | 0.53 | 0.302 | 0.24 | 0.772 | −0.54 | 0.563 | 0.48 | 0.495 | 1.71 | 0.071 | −2.04 | 0.293 | −2.05 | 0.185 | 1.85 | 0.505 | −3.92 | 0.161 | −2.18 | 0.53 |
| 90 | ZM_M37805 | 0.95 | 0.293 | −0.04 | 0.977 | −0.4 | 0.808 | 2.28 | 0.065 | −0.35 | 0.831 | −4.18 | 0.22 | 5.83 | 0.032 | 1.67 | 0.733 | −9.01 | 0.067 | −0.37 | 0.951 |
| pMON73829 | ZM_M37815 | −1.24 | 0.169 | 0.06 | 0.965 | −0.84 | 0.611 | −1.4 | 0.258 | −1.35 | 0.417 | 4.71 | 0.167 | −3.62 | 0.183 | 8.33 | 0.088 | 2.1 | 0.669 | 6.3 | 0.301 |
| | ZM_M38768 | 2.79 | 0.002 | 0.7 | 0.621 | 0.64 | 0.696 | 2.11 | 0.087 | 6.3 | 0 | −6.27 | 0.066 | −2.51 | 0.356 | −1.67 | 0.733 | −5.68 | 0.247 | −12.04 | 0.048 |
| | Construct | 0.83 | 0.145 | 0.24 | 0.788 | −0.2 | 0.849 | 1 | 0.2 | 1.53 | 0.144 | −1.91 | 0.374 | −0.1 | 0.954 | 2.78 | 0.368 | −4.2 | 0.177 | −2.04 | 0.596 |
| 92 | ZM_M35696 | 1.75 | 0.053 | 0.14 | 0.922 | −1.93 | 0.24 | 4.17 | 0.001 | 0.61 | 0.715 | −5.02 | 0.141 | 2.49 | 0.359 | 10 | 0.041 | −12.35 | 0.012 | −5.37 | 0.377 |
| pMON75305 | ZM_M36703 | −0.47 | 0.603 | 0.4 | 0.777 | −2.34 | 0.155 | −0.83 | 0.502 | 2.12 | 0.202 | 0.4 | 0.906 | −1.95 | 0.473 | 6.67 | 0.172 | 0.99 | 0.841 | −7.04 | 0.248 |
| | ZM_M36711 | −0.92 | 0.31 | 0.32 | 0.823 | −1.23 | 0.454 | −1.5 | 0.223 | 0.57 | 0.731 | 3.6 | 0.291 | 1.38 | 0.611 | 1.67 | 0.733 | 6.54 | 0.183 | −0.37 | 0.951 |
| | Construct | 0.12 | 0.832 | 0.29 | 0.749 | −1.84 | 0.078 | 0.61 | 0.432 | 1.1 | 0.295 | −0.34 | 0.875 | 0.64 | 0.709 | 6.11 | 0.048 | −1.6 | 0.605 | −4.26 | 0.268 |
| 93 | ZM_M35601 | −0.53 | 0.56 | −0.36 | 0.803 | −0.25 | 0.877 | −0.22 | 0.861 | −1.42 | 0.392 | −2.52 | 0.46 | 3.6 | 0.185 | 1.67 | 0.733 | −5.68 | 0.247 | −0.37 | 0.951 |
| pMON75306 | ZM_M35604 | −0.92 | 0.309 | 0.45 | 0.752 | 0.1 | 0.951 | −1.89 | 0.125 | −0 | 1 | 3.04 | 0.372 | −3.06 | 0.26 | 5 | 0.305 | 5.43 | 0.269 | −3.7 | 0.543 |
| | ZM_M35605 | 1.46 | 0.105 | −0.08 | 0.958 | −0.74 | 0.654 | 2.89 | 0.019 | 0.82 | 0.623 | −3.49 | 0.306 | −1.4 | 0.607 | 8.33 | 0.088 | −10.12 | 0.039 | −2.04 | 0.738 |
| | Construct | 0.01 | 0.992 | 0.01 | 0.994 | −0.3 | 0.776 | 0.26 | 0.738 | −0.2 | 0.847 | −0.99 | 0.647 | −0.28 | 0.869 | 5 | 0.105 | −3.46 | 0.266 | −2.04 | 0.596 |
| 94 | ZM_M35865 | −0.31 | 0.735 | −0.27 | 0.849 | −2.91 | 0.078 | 0.25 | 0.84 | 1.18 | 0.475 | −2.1 | 0.538 | −3.06 | 0.315 | 1.67 | 0.733 | −2.35 | 0.633 | −5.37 | 0.377 |
| pMON75309 | ZM_M35878 | −0.1 | 0.916 | 0.33 | 0.817 | 0.3 | 0.858 | −0.48 | 0.698 | 0.28 | 0.867 | −0.99 | 0.772 | 1.38 | 0.611 | −0 | 1 | −0.12 | 0.98 | −3.7 | 0.543 |
| | ZM_M36160 | −0.58 | 0.519 | −0.46 | 0.748 | −1.84 | 0.264 | −0.65 | 0.597 | 0.81 | 0.625 | 0.82 | 0.81 | 1.38 | 0.611 | 8.33 | 0.088 | 0.99 | 0.841 | −7.04 | 0.248 |
| | Construct | −0.33 | 0.566 | −0.13 | 0.882 | −1.48 | 0.155 | −0.29 | 0.707 | 0.76 | 0.47 | −0.76 | 0.726 | −0.1 | 0.955 | 3.33 | 0.28 | −0.49 | 0.874 | −5.37 | 0.163 |
| 107 | ZM_M49275 | −3.72 | 0.001 | 2.39 | 0.343 | −5.47 | 0.004 | −5.14 | 0 | X | X | 10.25 | 0.019 | 5.28 | 0.274 | 17.5 | 0.002 | 15 | 0.009 | X | X |
| pMON75533 | ZM_M49278 | −2.37 | 0.042 | 2.08 | 0.409 | −7.87 | 0 | −1.9 | 0.185 | X | X | 4.88 | 0.265 | −1.39 | 0.773 | 19.17 | 0.001 | 6.11 | 0.284 | X | X |
| | Construct | −3.04 | 0.001 | 2.24 | 0.241 | −6.67 | 0 | −3.52 | 0.003 | X | X | 7.56 | 0.03 | 1.94 | 0.594 | 18.33 | 0 | 10.56 | 0.024 | X | X |
| 119 | ZM_M53641 | 1.25 | 0.166 | 0.04 | 0.978 | 2.88 | 0.081 | −0.31 | 0.804 | 2.74 | 0.099 | −1.27 | 0.71 | 1.38 | 0.611 | 5 | 0.305 | 0.99 | 0.841 | −12.04 | 0.048 |
| pMON78235 | ZM_M53994 | −0.56 | 0.536 | −0.13 | 0.926 | −1.04 | 0.526 | 0.06 | 0.962 | −1.31 | 0.429 | 1.65 | 0.628 | −1.4 | 0.607 | 3.33 | 0.494 | 0.99 | 0.841 | 1.3 | 0.831 |
| | ZM_M53997 | −0.8 | 0.376 | 0.11 | 0.937 | 0.38 | 0.816 | −1.82 | 0.139 | 0.07 | 0.968 | 5.26 | 0.122 | 3.05 | 0.262 | 1.67 | 0.733 | 9.88 | 0.044 | −0.37 | 0.951 |
| | Construct | −0.04 | 0.95 | 0.01 | 0.994 | 0.74 | 0.478 | −0.69 | 0.376 | 0.5 | 0.635 | 1.88 | 0.382 | 1.01 | 0.557 | 3.33 | 0.28 | 3.95 | 0.203 | −3.7 | 0.336 |
| 104 | ZM_M45248 | −1.52 | 0.211 | 2.65 | 0.294 | −4.77 | 0.013 | −2.01 | 0.188 | X | X | −3.09 | 0.481 | 1.94 | 0.687 | 10.83 | 0.056 | −1.67 | 0.77 | X | X |
| pMON78936 | ZM_M45274 | −3.87 | 0.001 | 2.58 | 0.307 | −5 | 0.009 | −5.59 | 0 | X | X | 9.88 | 0.024 | 6.94 | 0.15 | 14.17 | 0.013 | 16.11 | 0.005 | X | X |
| | Construct | −2.69 | 0.004 | 2.61 | 0.171 | −4.89 | 0.002 | −3.8 | 0.002 | X | X | 3.39 | 0.331 | 4.44 | 0.223 | 12.5 | 0.007 | 7.22 | 0.121 | X | X |
| 110 | ZM_M50823 | −2 | 0.057 | −0.17 | 0.921 | −5.85 | 0.002 | −2.51 | 0.08 | 2.87 | 0.136 | 4.65 | 0.24 | −0.83 | 0.792 | 10.83 | 0.056 | 7.22 | 0.206 | −6.67 | 0.346 |
| pMON79425 | ZM_M50856 | 0.01 | 0.993 | −0.6 | 0.714 | −5.19 | 0.007 | −0.31 | 0.839 | 6.23 | 0.001 | −6.88 | 0.082 | −0.83 | 0.792 | 5.83 | 0.304 | −8.33 | 0.144 | −16.67 | 0.019 |
| | ZM_M51300 | −1.91 | 0.068 | −0.02 | 0.989 | −4.43 | 0.021 | −2.42 | 0.091 | 1.61 | 0.402 | 3.54 | 0.371 | −0.83 | 0.792 | 4.17 | 0.462 | 8.33 | 0.144 | −6.67 | 0.346 |
| | ZM_M51302 | −3.5 | 0.001 | −0.21 | 0.899 | −6.08 | 0.002 | −5.38 | 0 | 2.85 | 0.139 | 12.85 | 0.001 | 0.83 | 0.792 | 14.17 | 0.013 | 19.44 | 0.001 | −1.67 | 0.814 |
| | ZM_M51313 | −4.06 | 0 | −0.12 | 0.94 | −4.16 | 0.03 | −5.38 | 0 | −1.31 | 0.496 | 9.51 | 0.016 | −0.83 | 0.792 | 15.83 | 0.005 | 12.78 | 0.025 | −3.33 | 0.637 |
| | ZM_M51608 | −2.84 | 0.007 | −0.27 | 0.87 | −3.74 | 0.051 | −4.88 | 0.001 | 2.15 | 0.265 | 5.49 | 0.166 | 0.83 | 0.792 | 10.83 | 0.056 | 7.22 | 0.206 | −3.33 | 0.637 |
| | ZM_M51623 | −2.09 | 0.047 | −0.15 | 0.926 | −5.14 | 0.007 | −3.15 | 0.028 | 3.09 | 0.11 | 1.6 | 0.687 | 3.06 | 0.333 | 17.5 | 0.002 | 2.78 | 0.626 | −16.67 | 0.019 |
| | Construct | −2.34 | 0.001 | −0.22 | 0.838 | −4.94 | 0 | −3.43 | 0 | 2.5 | 0.048 | 4.39 | 0.09 | 0.2 | 0.923 | 11.31 | 0.002 | 7.06 | 0.059 | −7.86 | 0.09 |
| 116 | ZM_M53939 | −2.66 | 0.022 | 2.55 | 0.313 | −3.3 | 0.085 | −4.63 | 0.001 | X | X | 6.36 | 0.147 | 1.94 | 0.687 | 12.5 | 0.028 | 11.67 | 0.041 | X | X |
| pMON79697 | ZM_M54371 | −1.02 | 0.378 | 2.71 | 0.282 | −3.56 | 0.063 | −2.04 | 0.154 | X | X | 0.06 | 0.989 | 3.61 | 0.454 | 2.5 | 0.659 | 7.22 | 0.206 | X | X |
| | ZM_M54374 | −2.79 | 0.016 | 2.67 | 0.29 | −4.36 | 0.023 | −4.3 | 0.003 | X | X | 10.06 | 0.022 | −1.39 | 0.773 | 12.5 | 0.028 | 17.22 | 0.003 | X | X |
| | Construct | −2.16 | 0.01 | 2.64 | 0.11 | −3.74 | 0.009 | −3.66 | 0.001 | X | X | 5.49 | 0.081 | 1.39 | 0.66 | 9.17 | 0.03 | 12.04 | 0.005 | X | X |
| 111 | ZM_M51598 | −2.19 | 0.071 | 2.23 | 0.376 | −4.51 | 0.019 | −3.25 | 0.033 | X | X | 4.13 | 0.345 | −1.39 | 0.773 | 19.17 | 0.001 | 5 | 0.381 | X | X |
| pMON79718 | ZM_M52937 | −1.8 | 0.138 | 3.07 | 0.224 | −5.32 | 0.006 | −2.14 | 0.162 | X | X | −1.42 | 0.745 | 6.94 | 0.15 | 15.83 | 0.005 | −1.67 | 0.77 | X | X |
| | Construct | −2 | 0.037 | 2.65 | 0.165 | −4.92 | 0.002 | −2.69 | 0.028 | X | X | 1.36 | 0.698 | 2.78 | 0.446 | 17.5 | 0 | 1.67 | 0.72 | X | X |
| 120 | ZM_M53455 | 0.14 | 0.873 | 0.29 | 0.838 | 3.04 | 0.065 | −1.71 | 0.166 | 0.95 | 0.565 | 1.65 | 0.628 | −1.95 | 0.473 | −3.33 | 0.494 | 7.65 | 0.119 | −5.37 | 0.377 |
| pMON80452 | ZM_M53456 | −0.56 | 0.532 | −0.51 | 0.719 | 0.97 | 0.555 | −1.18 | 0.337 | −0.86 | 0.602 | 3.04 | 0.372 | 0.27 | 0.921 | −5 | 0.305 | 8.77 | 0.074 | −0.37 | 0.951 |
| | ZM_M53694 | 0.88 | 0.332 | 0.25 | 0.859 | 2.06 | 0.211 | 1.04 | 0.401 | −0.62 | 0.706 | −0.15 | 0.964 | 0.83 | 0.761 | −1.67 | 0.733 | −0.12 | 0.98 | 1.3 | 0.831 |
| | ZM_M53695 | 1.47 | 0.104 | 0 | 0.998 | 3.07 | 0.062 | 0.22 | 0.857 | 2.37 | 0.154 | −3.9 | 0.252 | 1.38 | 0.611 | 1.67 | 0.733 | −3.46 | 0.481 | −10.37 | 0.089 |
| | ZM_M53696 | 0.95 | 0.295 | −0.2 | 0.888 | 0.46 | 0.78 | 0.74 | 0.55 | 1.85 | 0.265 | 0.96 | 0.779 | 2.49 | 0.359 | 6.67 | 0.172 | 2.1 | 0.669 | −7.04 | 0.248 |
| | Construct | 0.57 | 0.23 | −0.03 | 0.965 | 1.92 | 0.028 | −0.18 | 0.783 | 0.74 | 0.402 | 0.32 | 0.86 | 0.6 | 0.675 | −0.33 | 0.897 | 2.99 | 0.25 | −4.37 | 0.175 |
| 118 | ZM_M53218 | −1.55 | 0.087 | −0.02 | 0.988 | −3.54 | 0.032 | −2.09 | 0.09 | 1.55 | 0.351 | 3.46 | 0.31 | −0.84 | 0.757 | 8.33 | 0.088 | 8.77 | 0.074 | −12.04 | 0.048 |
| pMON80461 | ZM_M53235 | −1.42 | 0.117 | 0.34 | 0.808 | −0.5 | 0.761 | −1.86 | 0.131 | −1.44 | 0.386 | 3.6 | 0.291 | 0.83 | 0.761 | −3.33 | 0.494 | 9.88 | 0.044 | −2.04 | 0.738 |
| | ZM_M53848 | −0.36 | 0.69 | −0.02 | 0.988 | −1.11 | 0.5 | −0.6 | 0.624 | 0.88 | 0.595 | 4.98 | 0.143 | 3.05 | 0.262 | 6.67 | 0.172 | 7.65 | 0.119 | −2.04 | 0.738 |
| | ZM_M54282 | −0.98 | 0.279 | 0.16 | 0.909 | −3.97 | 0.016 | 0.32 | 0.796 | −0.58 | 0.727 | −0.57 | 0.867 | −3.62 | 0.183 | 6.67 | 0.172 | −3.46 | 0.481 | −2.04 | 0.738 |
| | ZM_M54284 | −1.06 | 0.24 | 0.05 | 0.972 | −0.35 | 0.832 | −1.21 | 0.328 | −1.49 | 0.37 | 4.98 | 0.143 | −1.19 | 0.679 | 10 | 0.041 | 0.99 | 0.841 | 7.96 | 0.191 |
| | Construct | −1.07 | 0.025 | 0.1 | 0.891 | −1.89 | 0.03 | −1.09 | 0.095 | −0.21 | 0.806 | 3.29 | 0.068 | −0.35 | 0.807 | 5.67 | 0.028 | 4.77 | 0.067 | −2.04 | 0.527 |

E. Screens for Transgenic Plant Seeds with Increased Protein and/or Oil Levels

[0134] This example sets forth a high-throughput selection for identifying plant seeds with improvement in seed composition using the Infratec 1200 series Grain Analyzer, which is a near-infrared transmittance spectrometer used to determine the composition of a bulk seed sample. Near infrared analysis is a non-destructive, high-throughput method that can analyze multiple traits in a single sample scan. An NIR calibration for the analytes of interest is used to predict the values of an unknown sample. The NIR spectrum is obtained for the sample and compared to the calibration using a complex chemometric software package that provides a predicted values as well as information on how well the sample fits in the calibration. Infratec Model 1221, 1225, or 1227 with transport module by Foss North America is used with cuvette, item #1000-4033, Foss North America or for small samples with small cell cuvette, Foss standard cuvette modified by Leon Girard Co. Corn and soy check samples of varying composition maintained in check cell cuvettes are supplied by Leon Girard Co. NIT collection software is provided by Maximum Consulting Inc. Software. Calculations are preformed automatically by the software. Seed samples are received in packets or containers with barcode labels from the customer. The seed is poured into the cuvettes and analyzed as received.

TABLE 20

| | |
|---|---|
| Typical sample(s): | Whole grain corn and soybean seeds |
| Analytical time to run | Less than 0.75 min per sample |
| method: | |
| Total elapsed time per run: | 1.5 minute per sample |
| Typical and minimum sample | Corn typical: 50 cc; minimum 30 cc |
| size: | Soybean typical: 50 cc; minimum 5 cc |
| Typical analytical range: | Determined in part by the specific |
| | calibration. |
| | Corn - moisture 5-15%, oil 5-20%, |
| | protein 5-30%, starch 50-75%, and density |
| | 1.0-1.3%. |
| | Soybean - moisture 5-15%, oil 15-25%, |
| | and protein 35-50%. |

[0135] TABLE 21

| | Kernel Protein Content of Transgenic plant seeds in Midwest Hybrid Trials in 2003, 2004, and 2005. | | | | | | | | | | | | | |
|---|---|---|---|---|---|---|---|---|---|---|---|---|---|---|
| | | | Hybrid 2003 | | | | Hybrid 2004 | | | | Hybrid 2005 | | | |
| PEP | | | Mean | | | | Mean | | | | Mean | Mean | | |
| SEQ | | | Trans- | Mean | % | | Trans- | Mean | % | | Trans- | Con- | % | |
| ID | Construct | Event | genic | Control^{a} | Change | Pvalue | genic | Control^{a} | Change | Pvalue | genic | trol^{b} | Change | Pvalue |
| 84 | PMON69462 | ZM_M17475 | 9.2 | 8.7 | 6.9 | 0.00 | 8.8 | 8.1 | 8.8 | 0.00 | 9.5 | 9.0 | 6.4 | 0.00 |
| | PMON69462 | ZM_M17512 | 9.4 | 8.7 | 8.0 | 0.00 | 8.9 | 8.1 | 10.3 | 0.00 | 9.6 | 9.0 | 6.8 | 0.00 |
| | PMON69462 | ZM_M19779 | 8.6 | 8.7 | −1.1 | 0.37 | 8.0 | 8.1 | −1.8 | 0.20 | — | — | — | — |
| | PMON69462 | ZM_M19792 | 8.9 | 8.7 | 2.3 | 0.17 | 8.1 | 8.1 | −0.1 | 0.92 | — | — | — | — |
| | PMON69462 | ZM_M19775 | 8.5 | 8.7 | −2.3 | 0.17 | 8.0 | 8.1 | −1.4 | 0.32 | — | — | — | — |
| | PMON69462 | ZM_M19755 | — | — | — | — | 8.1 | 8.1 | 0.3 | 0.83 | 8.7 | 9.0 | −2.5 | 0.09 |
| | PMON69462 | ZM_M19263 | — | — | — | — | 7.9 | 8.1 | −2.1 | 0.12 | — | — | — | — |
| | PMON69462 | ZM_M19752 | — | — | — | — | 8.1 | 8.1 | 0.0 | 0.97 | — | — | — | — |
| 126 | PMON83769 | ZM_M75771 | — | — | — | — | — | — | — | — | 9.6 | 9.1 | 5.9 | 0.00 |
| | PMON83769 | ZM_M73623 | — | — | — | — | — | — | — | — | 9.1 | 9.1 | 0.2 | 0.92 |
| | PMON83769 | ZM_M73624 | — | — | — | — | — | — | — | — | 9.8 | 9.1 | 7.7 | 0.00 |
| | PMON83769 | ZM_M74392 | — | — | — | — | — | — | — | — | 9.6 | 9.1 | 5.0 | 0.00 |
| | PMON83769 | ZM_M74394 | — | — | — | — | — | — | — | — | 9.9 | 9.1 | 8.8 | 0.00 |
| | PMON83769 | ZM_M74395 | — | — | — | — | — | — | — | — | 9.5 | 9.1 | 4.5 | 0.01 |
| | PMON83769 | ZM_M75255 | — | — | — | — | — | — | — | — | 9.8 | 9.1 | 8.0 | 0.00 |
| | PMON83769 | ZM_M75260 | — | — | — | — | — | — | — | — | 9.5 | 9.1 | 4.1 | 0.01 |
| 124 | PMON80868 | ZM_M59335 | — | — | — | — | — | — | — | — | 9.2 | 9.0 | 2.1 | 0.24 |
| | PMON80868 | ZM_M59391 | — | — | — | — | — | — | — | — | 9.3 | 9.0 | 3.0 | 0.10 |
| | PMON80868 | ZM_M59764 | — | — | — | — | — | — | — | — | 9.0 | 9.0 | 0.0 | 0.98 |

Kernel protein reported on a 100% dry matter basis
^{a}Control for 2003 and 2004 was recurrent parent
^{b}Control for 2005 trial was pollinator for pMON69462 and recurrent parent for pMON83769 and pMON80868

[0136] TABLE 22

| | Kernel Protein Content of Transgenic plant seeds in Hawaii Inbred Trials^{a} | | | | | | |
|---|---|---|---|---|---|---|---|
| PEP SEQ | | | | Mean | Mean | | |
| ID | Construct | Event | Year | Transgenic | Control^{b} | % Change | Pvalue |
| 84 | PMON69462 | ZM_M17475 | 2002 | 14.2 | 10.7 | 32.7 | 0.02 |
| | PMON69462 | ZM_M17512 | 2002 | 12.6 | 11.8 | 6.8 | 0.10 |
| | PMON69462 | ZM_M19779 | 2002 | 11.4 | 10.7 | 6.5 | 0.10 |
| | PMON69462 | ZM_M19792 | 2002 | 12.5 | 11.6 | 7.8 | 0.10 |
| | PMON69462 | ZM_M19775 | 2002 | 12.9 | 11.9 | 8.4 | 0.10 |
| | PMON69462 | ZM_M19755 | 2003 | 12.0 | 11.3 | 6.4 | 0.44 |
| | PMON69462 | ZM_M19263 | 2003 | 10.8 | 11.0 | −2.2 | 0.77 |
| | PMON69462 | ZM_M19752 | 2003 | 11.1 | 11.9 | −7.0 | 0.23 |
| | PMON69462 | ZM_M19270 | 2002 | 13.0 | 10.5 | 23.8 | 0.02 |
| | PMON69462 | ZM_M19781 | 2002 | 12.4 | 10.3 | 20.4 | 0.02 |
| | PMON69462 | ZM_M19257 | 2003 | 12.7 | 11.4 | 11.4 | 0.30 |
| 126 | PMON83769 | ZM_M73624 | 2004 | 13.4 | 9.4 | 42.9 | 0.00 |
| | PMON83769 | ZM_M74380 | 2004 | 11.9 | 11.7 | 1.4 | 0.88 |
| | PMON83769 | ZM_M74392 | 2004 | 10.7 | 12.0 | −10.5 | 0.21 |
| | PMON83769 | ZM_M74394 | 2004 | 11.8 | 10.7 | 10.5 | 0.05 |
| | PMON83769 | ZM_M74395 | 2004 | 13.6 | 11.8 | 14.8 | 0.00 |
| | PMON83769 | ZM_M75255 | 2004 | 12.5 | 11.0 | 13.2 | 0.27 |
| | PMON83769 | ZM_M75771 | 2004 | 12.3 | 12.5 | −2.2 | 0.83 |
| 124 | PMON80868 | ZM_M59335 | 2004 | 13.3 | 12.1 | 10.4 | 0.07 |
| | PMON80868 | ZM_M59764 | 2004 | 12.8 | 11.5 | 10.8 | 0.27 |
| | PMON80868 | ZM_M59765 | 2004 | 13.7 | 11.8 | 15.5 | 0.00 |

^{a}kernel protein reported on a 100% dry matter basis
^{b}Control was negative isoline for each event

### EXAMPLE 6

[0137] This example illustrates the preparation of transgenic plant cells containing recombinant DNA (SEQ ID NO:82) expressing a maize phytochrome A protein (PHYA). A full-length cDNA encoding a corn PHYA protein was cloned from corn. The cDNA clone contained 3396 bp of nucleotides encoding a 1131 amino acid PHYA protein with molecular weight at 125.2 kD. Based on the cDNA sequences, primers were designed to clone a genomic DNA, illustrated in FIG. 1, from a maize inbred LH172 genomic library. Recombinant DNA comprising a rice actin promoter operably linked to the genomic DNA encoding the corn PHYA protein followed by a Hsp 17 terminator was inserted into transformation vector of pMON74916 as set forth in SEQ ID NO: 10030. Corn plant cells were transformed with recombinant DNA expressing PHA using pMON74916 and used to regenerate a population of transgenic plants. Transgenic plants were regenerated from about 100 events of transformed plant cells; plants from 90 of the events with various expression levels were selected for pollination to produce R1and F1 seeds; and plants from 31 events were selected for screening for an enhanced trait.

Seed Germination and Seedling Development

[0138] Five events were selected to be analyzed phenotypic effect on seed germination and seedling development in the dark condition along with other transgenic material. 12 inbred seeds of each wild-type and transgenic maize events were germinated in a wetted and rolled germination paper in a complete dark growth chamber for 10 days. The length of mesocotyl, coleoptiles and root were measured for every seedling. The transgenic maize seedlings were identified showing great elongation growth of both mesocotyl and expanded coleoptiles imparted from recombinant DNA expressing PHYA protein as compared to non-transgenic controls. Density Study

[0139] Transgenic plants were grown in fields at three densities: high density at 42,000 plants per acre; medium density at 35,000 plants per acre; and low density at 28,000 plants per acre. Plants from three plant cell events expressing PHYA were selected for studying physiological and yield responses to different densities. The physiological data from the density trial Y1130 is summarized in the Table 23 shown below. Event ZM_S83483 under high planting density showed significant decrease in plant height, ear height, and internode length and had a significant increase in chlorophyll content.

TABLE 23

| | Low Density YI130 JV 2004 | | | | High Density YI130 JV 2004 | | | | |
|---|---|---|---|---|---|---|---|---|---|
| | | | | Internode | | | | | Photo |
| Event ID | Plant Height | Ear Height | Stem Diameter | Length | Plant Height | Ear Height | Internode Length | SPAD | rate |
| ZM_S83483 | not | Significant | not | Significant | not | Significant | increase not | Significant | NA |
| | significant | Decrease | significant | Decrease | significant | Decrease | significant | Increase | |
| | P = 0.727 | P = 0.085 | P = 0.9436 | P = 0.0370 | P = 0.5866 | P = 0.0185 | P = 0.2412 | P = 0.0762 | |
| ZM_S83897 | not | decrease not | not | Significant | Significant | not | not | Significant | Significant |
| | significant | significant | significant | Increase | Decrease | significant | significant | Decrease | Decrease |
| | P = 0.8778 | P = 0.1937 | P = 0.2517 | P = 0.0421 | P = 0.0306 | P = 0.6542 | P = 0.5206 | P = 0.0153 | |
| ZM_S83907 | Highly | increase not | Significant | Highly | Significant | Significant | not | increase not | not |
| | Significant | significant | Increase | Significant | Increase | Increase | significant | significant | significant |
| | Increase | P = 0.2426 | P = 0.0633 | Increase | P = 0.0016 | P = 0.015 | P = 0.898 | P = 0.3208 | |
| | P = 0.0021 | | | P = 0.001 | | | | | |

Kernel Trait Analysis

[0140] As shown in Table 24, events ZM_S83444, ZM_S83446, ZM_S83473, ZM_S83480, ZM_S83483, and ZM_S83907 show significant increases in single kernel weight. Event ZM_S83452 shows significant increases in single kernel weight and total kernel weight. The screening data show that plant cells with stably-integrated, non-natural, recombinant DNA expressing a phytochrome A protein can be regenerated into plants exhibiting increased yield as compared to control plants.

| event | Trait | Mean_TRAN | Mean_CON | TRAN − CON | % change | Pvalue | Result |
|---|---|---|---|---|---|---|---|
| ZM_S83416 | Total kernel weight, g | 151.3 | 140.21 | 11.09 | 8 | 0.1452 | Non Signifincant |
| | Total kernel number | 876 | 830.22 | 45.78 | 6 | 0.3118 | Non Signifincant |
| | Singel kernel weight, g | 0.17 | 0.17 | 0.01 | 6 | 0.3551 | Non Signifincant |
| ZM_S83444 | Total kernel weight, g | 147.14 | 144.65 | 2.49 | 2 | 0.753 | Non Signifincant |
| | Total kernel number | 664.38 | 930.47 | −266.1 | −29 | 0 | Highly Significant |
| | Singel kernel weight, g | 0.25 | 0.16 | 0.09 | 56 | 0 | Highly Significant |
| ZM_S83446 | Total kernel weight, g | 152.12 | 158.27 | −6.15 | −4 | 0.3931 | Non Signifincant |
| | Total kernel number | 718.88 | 918.94 | −200.07 | −22 | 0 | Highly Significant |
| | Singel kernel weight, g | 0.2 | 0.17 | 0.03 | 18 | 0.0008 | Highly Significant |
| ZM_S83452 | Total kernel weight, g | 166.94 | 140.21 | 26.72 | 19 | 0.0014 | Highly Significant |
| | Total kernel number | 888.89 | 830.22 | 58.67 | 7 | 0.2123 | Non Signifincant |
| | Singel kernel weight, g | 0.19 | 0.17 | 0.02 | 12 | 0.0045 | Highly Significant |
| ZM_S83473 | Total kernel weight, g | 145.87 | 146.47 | −0.6 | −0 | 0.9451 | Non Signifincant |
| | Total kernel number | 784.71 | 885.21 | −100.5 | −11 | 0.0099 | Highly Significant |
| | Singel kernel weight, g | 0.18 | 0.16 | 0.02 | 13 | 0.0618 | Signifincant at 10% |
| ZM_S83480 | Total kernel weight, g | 157.23 | 149.44 | 7.79 | 5 | 0.3769 | Non Signifincant |
| | Total kernel number | 856.67 | 924.28 | −67.61 | −7 | 0.0982 | Signifincant at 10% |
| | Singel kernel weight, g | 0.18 | 0.16 | 0.02 | 13 | 0.0018 | Highly Significant |
| ZM_S83483 | Total kernel weight, g | 164.86 | 158.27 | 6.6 | 4 | 0.3599 | Non Signifincant |
| | Total kernel number | 820.4 | 918.94 | −98.54 | −11 | 0.0165 | Significant |
| | Singel kernel weight, g | 0.19 | 0.17 | 0.02 | 12 | 0.0317 | Significant |
| ZM_S83897 | Total kernel weight, g | 132.62 | 149.44 | −16.83 | −11 | 0.0617 | Signifincant at 10% |
| | Total kernel number | 743.5 | 924.28 | −180.78 | −20 | 0.0001 | Highly Significant |
| | Singel kernel weight, g | 0.18 | 0.16 | 0.02 | 13 | 0.0125 | Significant |
| ZM_S83907 | Total kernel weight, g | 146.23 | 146.47 | −0.24 | −0 | 0.9807 | Non Signifincant |
| | Total kernel number | 733.44 | 833.41 | −99.97 | −12 | 0.0703 | Signifincant at 10% |
| | Singel kernel weight, g | 0.19 | 0.17 | 0.02 | 12 | 0.0792 | Signifincant at 10% |
| ZM_S83416 | Total kernel weight, g | 157.3 | 146.47 | 10.83 | 7 | 0.2666 | Non Signifincant |
| | Total kernel number | 881.8 | 833.41 | 48.39 | 6 | 0.3558 | Non Signifincant |
| | Singel kernel weight, g | 0.18 | 0.17 | 0 | 0 | 0.6827 | Non Signifincant |

### Example 7

[0141] This example illustrates the preparation of transgenic plant cells containing recombinant DNA (SEQ ID NO:77) expressing a soybean MADS box transcription factor protein and identified as G1760.

[0142] The DNA encoding the soybean MADS box transcription factor was cloned from a soybean library and inserted into a recombinant DNA construct comprising a CaMV 35S promoter operably linked to the DNA encoding the transcription factor followed by a terminator. The recombinant DNA construct was inserted into a transformation vector plasmid to produce plasmid pMON74470, as set forth in SEQ ID NO: 10029 which was used for Agrobacterium-mediated transformation of soybean plant cells.

[0143] Soybean plant cells were transformed with recombinant DNA expressing the MADS box transcription factor using MON74470 and used to regenerate a population of transgenic plants. Transgenic soybean plants were regenerated and selected for screening for an enhanced trait.

[0144] Transgenic soybean plants exhibited flowers with highly enlarged sepals and a winding stem. The main stem exhibited reduced lateral branching and increased raceme formation. Flowering time was decreased by about 2 to 4 days as compared to control plants under short day (10 hr) and long day (14 hr) conditions. Transgenic plants also flowered by 5 weeks when placed under non-inductive 20 hr light; wild-type control plants did not flower under such conditions. Floral and pod abscission was greatly reduced in the transgenic plants resulting in an increase in the number of pods per plant. Wild type control plants produced on the order of 100 pods, specific transgenic plants produced at least 125 pods per plant and plants regenerated from plant cells of one transgenic event produced greater than 200 pods per plant. There was also a delay in maturity ranging from one week exhibited by plants from single copy event A29204 to a month exhibited by plants from a multi-copy event A28877. Over 95% of the pods on transgenic plants from event A29204 mature in a time period; but only 50% of the pods on transgenic plants from event A28877 mature in the same time period. Seeds from transgenic plants were smaller than seed from control plants and greater in number than seeds from control plants, e.g. about 1800 more seed per pound. Transgenic plants were also shown to be have enhanced water use efficiency.

[0145] In testing soybeans for drought tolerance, 4.5″ pots were prepared with Metromix 200 and the pots were adjusted to the same weight. Pots were saturated with water. R2 or R3 homozygous seeds were placed in the soil in the pots, 15 pots per event, 3 to 6 events per construct. Plants were grown with a light intensity of 600 μEM⁻²S⁻¹; Temperature: 28° C.; Relative humidity (RH): 60%. A gene check with gene check strip (Trait RUR Lateral Flow 50 tests, from Strategic Diagnostics, Inc.) for the presence of the CP4 gene was done on selected plants. Unwanted negative plants were discarded. When plants reached the V1 stage. Pots were saturated with water by thorough irrigation. A picture was taken of the plant in the water saturated pot. Excess water was drained and further water was withheld until the pot water content of 50% and 10% of the water capacity for well watered controls and drought treated plants, respectively (monitor the water content by measuring soil moisture or pot weight every 3-5 days). At approximately 10% of the saturated water weight, the plants began to show the onset of the wilting phenotype. Limited-watering was continued every 1-2 days to maintain pot water content at 50 or 10%. The drought injury phenotype was determined for next 14 days (see the table of measurements). Photograph of plants and physiological assays were run on each at 14 days after the onset of drought treatment. Theses included, but were not limited to, plant height, leaf relative water content, leaf water potential, chlorophyll content and chlorophyll fluorescence. Pot were saturated with nutrient solution and resume regular watering schedule after 14 days.

TABLE 25

| Measurement | Protocol |
|---|---|
| Agronomic measurements | Emergence, early season vigor, height (cm) |
| Visual drought score | Score of 1 to 4: 1. Healthy plants, no |
| | difference from control plants 2. On sight |
| | of wilting, leaves become wilt; 3. Wilted |
| | plants, still green and recoverable; 4. |
| | Severely wilted, chlorotic and not |
| | recoverable |

[0146] Drought assay measurements as described in Table 25 taken on transgenic soybean plants showed that transgenic soybean plants from transgenic plant cells of event GM 29204 exhibited enhanced water use efficiency.

[0147] R0 plants regenerated from one transgenic plant cell event (28877) of 41 transgenic plant cells events produced a large number of pods per node and seeds/plant −531 R1 seeds per plant compared to an average of 150 seeds per plant, i.e. increased yield.

### EXAMPLE 6

### Consensus Sequence

[0148] This example illustrates the identification of consensus amino acid sequence for the proteins and homologs encoded by DNA that is used to prepare the transgenic seed and plants of this invention having enhanced agronomic traits.

[0149] ClustalW program was selected for multiple sequence alignments of the amino acid sequence of SEQ ID NO: 136 and its nine homologs, and SEQ ID NO: 151 and its 11 homologs. Three major factors affecting the sequence alignments dramatically are (1) protein weight matrices; (2) gap open penalty; (3) gap extension penalty. Protein weight matrices available for ClustalW program include Blosum, Pam and Gonnet series. Those parameters with gap open penalty and gap extension penalty were extensively tested. On the basis of the test results, Blosum weight matrix, gap open penalty of 10 and gap extension penalty of 1 were chosen for multiple sequence alignment. FIG. 2 shows the sequences of SEQ ID NO: 136, its homologs and the consensus sequence (SEQ ID NO: 10031) at the end. FIG. 3 shows the sequences of SEQ ID NO: 151, its homologs and the consensus sequence (SEQ ID NO: 10032) at the end. The symbols for consensus sequence are (1) uppercase letters for 100% identity in all positions of multiple sequence alignment output; (2) lowercase letters for >=70% identity; symbol; (3) “X” indicated <70% identity; (4) dashes “-” meaning that gaps were in >=70% sequences.

[0150] The consensus amino acid sequence can be used to identify DNA corresponding to the full scope of this invention that is useful in providing transgenic plants, for example corn and soybean plants with enhanced agronomic traits, for example improved nitrogen use efficiency, improved yield, improved water use efficiency and/or improved growth under cold stress, due to the expression in the plants of DNA encoding a protein with amino acid sequence identical to the consensus amino acid sequence.

### EXAMPLE 7

### Identification of Amino Acid Domain by Pfam Analysis

[0151] The amino acid sequence of the expressed proteins that were shown to be associated with an enhanced trait were analyzed for Pfam protein family against the current Pfam collection of multiple sequence alignments and hidden Markov models using the HMMER software in the appended computer listing. The Pfam protein families for the proteins of SEQ ID NO:84 through 166 are shown in Table 26. The Hidden Markov model databases for the identified patent families are also in the appended computer listing allowing identification of other homologous proteins and their cognate encoding DNA to enable the full breadth of the invention for a person of ordinary skill in the art. Certain proteins are identified by a single Pfam domain and others by multiple Pfam domains. For instance, the protein with amino acids of SEQ ID NO: 91 is characterized by two Pfam domains, i.e. SRF-TF and K-box; and, the protein with amino acids of SEQ ID NO: 165 is characterized by six Pfam domains, i.e. GAF, Phytochrome, PAS, a repeated PAS, HisKA, and HATPase.

TABLE 26

| NUC SEQ ID | PEP SEQ ID | Pfam domain name | begin | stop | score | E-value |
|---|---|---|---|---|---|---|
| 3 | 86 | Pkinase | 79 | 337 | 343 | 4.30E−100 |
| 5 | 88 | FA_desaturase | 99 | 319 | 206.2 | 6.60E−59 |
| 2 | 85 | Ras | 10 | 178 | 297.9 | 1.60E−86 |
| 1 | 84 | Glyoxalase | 27 | 171 | 130.1 | 5.40E−36 |
| 8 | 91 | SRF-TF | 9 | 59 | 121.4 | 2.30E−33 |
| 8 | 91 | K-box | 75 | 176 | 151.7 | 1.70E−42 |
| 7 | 90 | K-box | 4 | 104 | 145.6 | 1.20E−40 |
| 83 | 166 | SRF-TF | 9 | 59 | 99.2 | 1.10E−26 |
| 83 | 166 | K-box | 75 | 172 | 92.4 | 1.20E−24 |
| 82 | 165 | GAF | 219 | 404 | 105.6 | 1.30E−28 |
| 82 | 165 | Phytochrome | 415 | 595 | 407.6 | 1.60E−119 |
| 82 | 165 | PAS | 622 | 738 | 88.9 | 1.40E−23 |
| 82 | 165 | PAS | 753 | 878 | 101.1 | 2.80E−27 |
| 82 | 165 | HisKA | 898 | 957 | 27.6 | 4.00E−05 |
| 82 | 165 | HATPase_c | 1012 | 1124 | 66.9 | 5.80E−17 |
| 9 | 92 | Homeobox | 97 | 158 | 68 | 2.80E−17 |
| 10 | 93 | AP2 | 5 | 68 | 127.5 | 3.30E−35 |
| 11 | 94 | GATA | 196 | 231 | 71.3 | 2.70E−18 |
| 12 | 95 | AT_hook | 57 | 69 | 7.4 | 1.1 |
| 12 | 95 | DUF296 | 84 | 208 | 183.6 | 4.30E−52 |
| 24 | 107 | Synaptobrevin | 128 | 215 | 137.6 | 2.90E−38 |
| 31 | 114 | Pyridoxal_deC | 28 | 381 | 194.6 | 2.10E−55 |
| 36 | 119 | Metallophos | 63 | 258 | 161 | 2.80E−45 |
| 21 | 104 | Pkinase | 12 | 267 | 346 | 5.40E−101 |
| 21 | 104 | Pkinase_Tyr | 12 | 265 | 88.5 | 1.80E−23 |
| 21 | 104 | NAF | 310 | 369 | 98.6 | 1.60E−26 |
| 26 | 109 | MtN3_slv | 9 | 98 | 96.7 | 6.10E−26 |
| 26 | 109 | MtN3_slv | 132 | 218 | 116.8 | 5.70E−32 |
| 27 | 110 | Lactamase_B | 94 | 252 | 125.1 | 1.80E−34 |
| 33 | 116 | HSP20 | 53 | 157 | 159.9 | 5.80E−45 |
| 28 | 111 | RTC | 3 | 353 | 275.2 | 1.10E−79 |
| 28 | 111 | RTC_insert | 184 | 300 | 120.8 | 3.40E−33 |
| 37 | 120 | PDZ | 200 | 284 | 37.6 | 3.80E−08 |
| 37 | 120 | Peptidase_S41 | 320 | 483 | 244.5 | 1.90E−70 |
| 35 | 118 | E2F_TDP | 167 | 232 | 131 | 2.90E−36 |
| 41 | 124 | Pkinase | 63 | 341 | 199.5 | 7.00E−57 |
| 41 | 124 | Pkinase_Tyr | 63 | 341 | 243 | 5.60E−70 |
| 43 | 126 | zf-C2H2 | 72 | 94 | 25.6 | 0.00016 |
| 43 | 126 | zf-C2H2 | 149 | 171 | 20.5 | 0.0054 |
| 4 | 87 | zf-C2H2 | 85 | 107 | 22.1 | 0.0018 |
| 17 | 100 | PRA1 | 10 | 161 | 181.8 | 1.50E−51 |
| 22 | 105 | AAA | 154 | 352 | 85 | 2.10E−22 |
| 14 | 97 | CBFD_NFYB_HMF | 31 | 96 | 134.4 | 2.80E−37 |
| 34 | 117 | Peptidase_C15 | 11 | 219 | −72.2 | 3.50E−07 |
| 20 | 103 | Pkinase | 13 | 267 | 345.5 | 7.80E−101 |
| 20 | 103 | Pkinase_Tyr | 13 | 265 | 75.2 | 1.80E−19 |
| 20 | 103 | NAF | 312 | 371 | 104.7 | 2.50E−28 |
| 32 | 115 | HSF_DNA-bind | 49 | 225 | 212.2 | 1.00E−60 |
| 19 | 102 | Pkinase | 37 | 291 | 353.9 | 2.30E−103 |
| 19 | 102 | RIO1 | 50 | 208 | −88.1 | 0.0038 |
| 19 | 102 | NAF | 375 | 432 | 101.8 | 1.80E−27 |
| 40 | 123 | Aldo_ket_red | 7 | 284 | 448.1 | 1.00E−131 |
| 42 | 125 | FBPase | 13 | 337 | 691.6 | 5.30E−205 |
| 6 | 89 | SRF-TF | 9 | 59 | 119.7 | 7.20E−33 |
| 18 | 101 | DNA_photolyase | 6 | 173 | 163.3 | 5.70E−46 |
| 18 | 101 | FAD_binding_7 | 205 | 476 | 425.8 | 5.50E−125 |
| 30 | 113 | Pkinase | 41 | 327 | 326.6 | 3.80E−95 |
| 23 | 106 | NIF | 95 | 291 | 90.6 | 4.10E−24 |
| 15 | 98 | Got1 | 30 | 130 | 237 | 3.60E−68 |
| 16 | 99 | RRM_1 | 21 | 89 | 67.1 | 5.00E−17 |
| 29 | 112 | Di19 | 13 | 206 | 365.4 | 8.00E−107 |
| 25 | 108 | CorA | 90 | 467 | 408.2 | 1.00E−119 |
| 39 | 122 | SPC25 | 12 | 190 | 252.3 | 9.00E−73 |
| 44 | 127 | Response_reg | 18 | 139 | 151.1 | 2.60E−42 |
| 44 | 127 | HisKA | 320 | 385 | 101.5 | 2.30E−27 |
| 44 | 127 | HATPase_c | 432 | 565 | 138.4 | 1.70E−38 |
| 44 | 127 | Response_reg | 740 | 862 | 128 | 2.40E−35 |
| 44 | 127 | Hpt | 922 | 1013 | 63.4 | 6.60E−16 |
| 45 | 128 | Response_reg | 18 | 139 | 151.1 | 2.60E−42 |
| 45 | 128 | HisKA | 320 | 385 | 101.5 | 2.30E−27 |
| 45 | 128 | HATPase_c | 432 | 565 | 138.4 | 1.70E−38 |
| 45 | 128 | Response_reg | 740 | 862 | 128 | 2.40E−35 |
| 45 | 128 | Hpt | 922 | 1013 | 63.4 | 6.60E−16 |
| 46 | 129 | NAM | 9 | 135 | 313.7 | 2.90E−91 |
| 47 | 130 | Aminotran_1_2 | 183 | 576 | 55.7 | 1.40E−13 |
| 48 | 131 | Catalase | 18 | 401 | 960.1 | 7.80E−286 |
| 49 | 132 | BRO1 | 10 | 172 | 177.8 | 2.40E−50 |
| 69 | 152 | Got1 | 30 | 130 | 211.8 | 1.40E−60 |
| 70 | 153 | Got1 | 30 | 130 | 174.9 | 1.80E−49 |
| 71 | 154 | Cystatin | 36 | 124 | 87.6 | 3.40E−23 |
| 72 | 155 | Cystatin | 36 | 124 | 87.6 | 3.40E−23 |
| 73 | 156 | RRM_1 | 22 | 87 | 32.4 | 1.40E−06 |
| 74 | 157 | Pkinase_Tyr | 55 | 304 | 86.2 | 9.10E−23 |
| 74 | 157 | Pkinase | 55 | 306 | 362 | 8.40E−106 |
| 75 | 158 | SPX | 1 | 167 | 88.9 | 1.30E−23 |
| 75 | 158 | zf-C3HC4 | 238 | 286 | 17 | 0.0024 |
| 76 | 159 | Pkinase_Tyr | 19 | 271 | 70.8 | 4.00E−18 |
| 76 | 159 | Pkinase | 19 | 273 | 359.7 | 4.10E−105 |
| 76 | 159 | NAF | 324 | 381 | 105.6 | 1.30E−28 |
| 77 | 160 | SRF-TF | 9 | 59 | 100.8 | 3.60E−27 |
| 77 | 160 | K-box | 73 | 173 | 95.3 | 1.60E−25 |
| 50 | 133 | Peptidase_S10 | 1 | 227 | −42.7 | 6.00E−11 |
| 51 | 134 | Ank | 44 | 76 | 47.3 | 4.70E−11 |
| 51 | 134 | Ank | 77 | 109 | 33.5 | 6.40E−07 |
| 51 | 134 | Ank | 111 | 144 | 15.7 | 0.14 |
| 51 | 134 | Ank | 185 | 217 | 39.7 | 9.00E−09 |
| 51 | 134 | Ank | 228 | 260 | 30.7 | 4.50E−06 |
| 52 | 135 | Pkinase_Tyr | 51 | 341 | 158.7 | 1.40E−44 |
| 52 | 135 | Pkinase | 63 | 341 | 104.4 | 3.00E−28 |
| 54 | 137 | GATase_2 | 2 | 162 | 11.8 | 6.10E−12 |
| 54 | 137 | Asn_synthase | 211 | 479 | 334.3 | 1.80E−97 |
| 55 | 138 | HSP20 | 56 | 164 | 168.2 | 1.90E−47 |
| 78 | 161 | Lactamase_B | 93 | 251 | 129 | 1.20E−35 |
| 56 | 139 | UPF0057 | 11 | 62 | 102.9 | 8.40E−28 |
| 57 | 140 | Oxidored_FMN | 6 | 341 | 302.1 | 9.10E−88 |
| 58 | 141 | Pkinase | 39 | 325 | 309.2 | 6.40E−90 |
| 59 | 142 | Pyridoxal_deC | 33 | 381 | −546 | 3.40E−161 |
| 60 | 143 | Pyridoxal_deC | 33 | 381 | 546 | 3.40E−161 |
| 61 | 144 | HSP20 | 57 | 160 | 178.8 | 1.20E−50 |
| 38 | 121 | PDZ | 200 | 284 | 37.6 | 3.80E−08 |
| 38 | 121 | Peptidase_S41 | 320 | 483 | 244.5 | 1.90E−70 |
| 62 | 145 | Cpn60_TCP1 | 59 | 562 | 578.6 | 5.40E−171 |
| 63 | 146 | DSPc | 50 | 188 | 142.9 | 7.70E−40 |
| 64 | 147 | Isoamylase_N | 61 | 149 | 94.9 | 2.10E−25 |
| 64 | 147 | Alpha-amylase | 209 | 589 | −36.4 | 1.30E−07 |
| 79 | 162 | Pkinase | 45 | 299 | 360.3 | 2.80E−105 |
| 79 | 162 | NAF | 384 | 441 | 105.2 | 1.70E−28 |
| 65 | 148 | DUF1685 | 38 | 146 | 184.5 | 2.40E−52 |
| 80 | 163 | GAF | 219 | 404 | 108.4 | 1.90E−29 |
| 80 | 163 | Phytochrome | 415 | 595 | 409.1 | 5.70E−120 |
| 80 | 163 | PAS | 622 | 737 | 96.6 | 6.50E−26 |
| 80 | 163 | PAS | 752 | 877 | 107.4 | 3.80E−29 |
| 80 | 163 | HisKA | 897 | 956 | 26.7 | 7.10E−05 |
| 80 | 163 | HATPase_c | 1011 | 1123 | 64.4 | 3.30E−16 |
| 66 | 149 | Glyco_hydro_1 | 74 | 558 | 1024.9 | 0 |
| 67 | 150 | ArfGap | 17 | 133 | 174.4 | 2.50E−49 |
| 81 | 164 | AP2 | 6 | 69 | 132 | 1.50E−36 |

[0152] TABLE 27

| | accession | gathering | |
|---|---|---|---|
| pfam domain name | number | cutoff | domain description |
| AAA | PF00004.17 | 10 | ATPase family associated with various |
| | | | cellular activities (AAA) |
| AP2 | PF00847.9 | 0 | AP2 domain |
| Aldo_ket_red | PF00248.10 | −97 | Aldo/keto reductase family |
| Alpha-amylase | PF00128.11 | −93 | Alpha amylase, catalytic domain |
| Aminotran_1_2 | PF00155.9 | −57.5 | Aminotransferase class I and II |
| Ank | PF00023.17 | 21.6 | Ankyrin repeat |
| ArfGap | PF01412.8 | −17 | Putative GTPase activating protein for Arf |
| Asn_synthase | PF00733.10 | −52.8 | Asparagine synthase |
| BRO1 | PF03097.6 | 25 | BRO1-like domain |
| CBFD_NFYB_HMF | PF00808.12 | 18.4 | Histone-like transcription factor (CBF/NFY) |
| | | | and archaeal histone |
| Catalase | PF00199.8 | −229 | Catalase |
| CorA | PF01544.8 | −61.3 | CorA-like Mg2+ transporter protein |
| Cpn60_TCP1 | PF00118.13 | −223.4 | TCP-1/cpn60 chaperonin family |
| Cystatin | PF00031.10 | 17.5 | Cystatin domain |
| DNA_photolyase | PF00875.7 | −10 | DNA photolyase |
| DSPc | PF00782.9 | −21.8 | Dual specificity phosphatase, catalytic |
| | | | domain |
| DUF1685 | PF07939.1 | 25 | Protein of unknown function (DUF1685) |
| DUF296 | PF03479.4 | −11 | Domain of unknown function (DUF296) |
| Di19 | PF05605.2 | 25 | Drought induced 19 protein (Di19) |
| E2F_TDP | PF02319.9 | 17 | E2F/DP family winged-helix DNA- |
| | | | binding domain |
| FAD_binding_7 | PF03441.3 | 25 | FAD binding domain of DNA photolyase |
| FA_desaturase | PF00487.13 | −46 | Fatty acid desaturase |
| FBPase | PF00316.9 | −170.3 | Fructose-1-6-bisphosphatase |
| GAF | PF01590.14 | 23 | GAF domain |
| GATA | PF00320.15 | 28.5 | GATA zinc finger |
| GATase_2 | PF00310.10 | −106.2 | Glutamine amidotransferases class-II |
| Glyco_hydro_1 | PF00232.8 | −301.8 | Glycosyl hydrolase family 1 |
| Glyoxalase | PF00903.14 | 12.1 | Glyoxalase/Bleomycin resistance |
| | | | protein/Dioxygenase superfamily |
| Got1 | PF04178.2 | 25 | Got1-like family |
| HATPase_c | PF02518.13 | 22.4 | Histidine kinase-, DNA gyrase B-, and |
| | | | HSP90-like ATPase |
| HSF_DNA-bind | PF00447.7 | −70 | HSF-type DNA-binding |
| HSP20 | PF00011.9 | 13 | Hsp20/alpha crystallin family |
| HisKA | PF00512.13 | 10.2 | His Kinase A (phosphoacceptor) domain |
| Homeobox | PF00046.17 | −4.1 | Homeobox domain |
| Hpt | PF01627.11 | 25 | Hpt domain |
| Isoamylase_N | PF02922.7 | −6.5 | Isoamylase N-terminal domain |
| K-box | PF01486.7 | 0 | K-box region |
| Lactamase_B | PF00753.15 | 22.3 | Metallo-beta-lactamase superfamily |
| Metallophos | PF00149.16 | 22 | Calcineurin-like phosphoesterase |
| MtN3_slv | PF03083.5 | −0.8 | MtN3/saliva family |
| NAF | PF03822.4 | 25 | NAF domain |
| NAM | PF02365.5 | −19 | No apical meristem (NAM) protein |
| NIF | PF03031.7 | −81 | NLI interacting factor-like phosphatase |
| Oxidored_FMN | PF00724.8 | −147.7 | NADH: flavin oxidoreductase/NADH |
| | | | oxidase family |
| PAS | PF00989.12 | 20 | PAS fold |
| PDZ | PF00595.11 | 12.1 | PDZ domain (Also known as DHR or |
| | | | GLGF) |
| PRA1 | PF03208.8 | 25 | PRA1 family protein |
| Peptidase_C15 | PF01470.7 | −100 | Pyroglutamyl peptidase |
| Peptidase_S10 | PF00450.11 | −198 | Serine carboxypeptidase |
| Peptidase_S41 | PF03572.7 | −25.8 | Peptidase family S41 |
| Phytochrome | PF00360.9 | 11 | Phytochrome region |
| Pkinase | PF00069.14 | −70.8 | Protein kinase domain |
| Pkinase_Tyr | PF07714.4 | 65 | Protein tyrosine kinase |
| Pyridoxal_deC | PF00282.8 | −158.6 | Pyridoxal-dependent decarboxylase |
| | | | conserved domain |
| RIO1 | PF01163.11 | −89.1 | RIO1 family |
| RRM_1 | PF00076.10 | 15.2 | RNA recognition motif. (a.k.a. RRM, |
| | | | RBD, or RNP domain) |
| RTC | PF01137.11 | −36.9 | RNA 3′-terminal phosphate cyclase |
| RTC_insert | PF05189.3 | 25 | RNA 3′-terminal phosphate cyclase |
| | | | (RTC), insert domain |
| Ras | PF00071.11 | 18 | Ras family |
| Response_reg | PF00072.11 | −14.4 | Response regulator receiver domain |
| SPC25 | PF06703.1 | 25 | Microsomal signal peptidase 25 kDa |
| | | | subunit (SPC25) |
| SPX | PF03105.9 | −20 | SPX domain |
| SRF-TF | PF00319.8 | 11 | SRF-type transcription factor (DNA- |
| | | | binding and dimerisation domain) |
| Synaptobrevin | PF00957.9 | 25 | Synaptobrevin |
| UPF0057 | PF01679.7 | 25 | Uncharacterized protein family UPF0057 |

### EXAMPLE 8

### Selection of Transgenic Plants with Enhanced Agronomic Trait(s)

[0153] This example illustrates the preparation and identification by selection of transgenic seeds and plants derived from transgenic plant cells of this invention where the plants and seed are identified by screening a having an enhanced agronomic trait imparted by expression of a protein selected from the group including the homologous proteins identified in Example 4, SEQ ID NO: 121, 128, 152-160, 162 and 164. Transgenic plant cells of corn, soybean, cotton, canola, wheat and rice are transformed with recombinant DNA for expressing each of the homologs identified in Example 4. Plants are regenerated from the transformed plant cells and used to produce progeny plants and seed that are screened for enhanced water use efficiency, enhanced cold tolerance, increased yield, enhanced nitrogen use efficiency, enhanced seed protein and enhanced seed oil. Plants are identified exhibiting enhanced traits imparted by expression of the homologous proteins.

What is claimed is:

1. A plant cell with stably integrated, recombinant DNA comprising a promoter that is functional in plant cells and that is operably linked to DNA from a plant, bacteria or yeast that encodes a protein having at least one domain of amino acids in a sequence that exceeds the Pfam gathering cutoff for amino acid sequence alignment with a protein domain family identified by a Pfam name in the group of Pfam names consisting of AAA, AP2, Aldo ket red, Alpha-amylase, Aminotran 1 2, Ank, ArfGap, Asn synthase, BRO1, CBFD NFYB HMF, Catalase, CorA, Cpn60 TCP1, Cystatin, DNA photolyase, DSPc, DUF1685, DUF296, Dil9, E2F TDP, FAD binding 7, FA desaturase, FBPase, GAF, GATA, GATase 2, Glyco hydro 1, Glyoxalase, Got1, HATPase c, HSF DNA-bind, HSP20, HisKA, Homeobox, Hpt, Isoamylase N, K-box, Lactamase B, Metallophos, MtN3 slv, NAF, NAM, NIF, Oxidored FMN, PAS, PDZ, PRA1, Peptidase C15, Peptidase S10, Peptidase S41, Phytochrome, Peinase, Pkinase Tyr, Pyridoxal deC, RIO1, RRM 1, RTC, RTC insert, Ras, Response reg, SPC25, SPX, SRF-TF, Synaptobrevin, UPF0057, zf-C2H2, and zf-C3HC4; wherein the Pfam gathering cuttoff for said protein domain families is stated in Table 28; wherein said plant cell is selected from a population of plant cells with said recombinant DNA by screening plants that are regenerated from plant cells in said population and that express said protein for an enhanced trait as compared to control plants that do not have said recombinant DNA; and wherein said enhanced trait is selected from group of enhanced traits consisting of enhanced water use efficiency, enhanced cold tolerance, increased yield, enhanced nitrogen use efficiency, enhanced seed protein and enhanced seed oil.

2. A plant cell of claim 1 wherein said protein has an amino acid sequence with at least 90% identity to a consensus amino acid sequence in the group of consensus amino acid sequences consisting of the consensus amino acid sequence constructed for SEQ ID NO:84 and homologs thereof listed in Table 2 through the consensus amino acid sequence constructed for SEQ ID NO: 166 and homologs thereof listed in Table 2.

3. A plant cell of claim 1 wherein said protein is selected from the group of proteins identified in Table 1.

4. A plant cell of claim 1 further comprising DNA expressing a protein that provides tolerance from exposure to an herbicide applied at levels that are lethal to a wild type of said plant cell.

5. A plant cell of claim 4 wherein the agent of said herbicide is a glyphosate, dicamba, or glufosinate compound.

6. A transgenic plant comprising a plurality of the plant cell of claim 1

7. A transgenic plant of claim 6 which is homozygous for said recombinant DNA.

8. A transgenic seed comprising a plurality of the plant cell of claim 1.

9. A transgenic seed of claim 8 from a corn, soybean, cotton, canola, alfalfa, wheat or rice plant.

10. Non-natural, transgenic corn seed of claim 9 wherein said seed can produce corn plants that are resistant to disease from the Mal de Rio Cuarto virus or the Puccina sorghi fungus or both.

11. A transgenic pollen grain comprising a haploid derivative of a plant cell of claim 1.

12. A method for manufacturing non-natural, transgenic seed that can be used to produce a crop of transgenic plants with an enhanced trait resulting from expression of stably-integrated, recombinant DNA comprising a promoter that is (a) functional in plant cells and (b) is operably linked to DNA from a plant, bacteria or yeast that encodes a protein having at least one domain of amino acids in a sequence that exceeds the Pfam gathering cutoff for amino acid sequence alignment with a protein domain family identified by a Pfam name in the group of Pfam names consisting of AAA, AP2, Aldo ket red, Alpha-amylase, Aminotran 1 2, Ank, ArfGap, Asn synthase, BRO1, CBFD NFYB HMF, Catalase, CorA, Cpn60 TCP1, Cystatin, DNA photolyase, DSPc, DUF1685 DUF296, Dil9, E2F TDP, FAD binding 7, FA desaturase, FBPase, GAF, GATA, GATase 2, Glyco hydro 1, Glyoxalase, Got1, HATPase c, HSF DNA-bind, HSP20, HisKA, Homeobox, Hpt, Isoamylase N, K-box, Lactamase B, Metallophos, MtN3 slv, NAF, NAM, NIF, Oxidored FMN, PAS, PDZ, PRA1, Peptidase C15, Peptidase S10, Peptidase S41, Phytochrome, Peinase, Pkinase Tyr, Pyridoxal deC, RIO1, RRM 1, RTC, RTC insert, Ras, Response reg, SPC25, SPX, SRF-TF, Synaptobrevin, UPF0057, zf-C2H2, and zf-C3HC4; wherein the gathering cutoff for said protein domain families is stated in Table 28; and wherein said enhanced trait is selected from the group of enhanced traits consisting of enhanced water use efficiency, enhanced cold tolerance, increased yield, enhanced nitrogen use efficiency, enhanced seed protein and enhanced seed oil, said method for manufacturing said seed comprising:
(a) screening a population of plants for said enhanced trait and said recombinant DNA, wherein individual plants in said population can exhibit said trait at a level less than, essentially the same as or greater than the level that said trait is exhibited in control plants which do not express the recombinant DNA,
(b) selecting from said population one or more plants that exhibit the trait at a level greater than the level that said trait is exhibited in control plants,
(c) verifying that said recombinant DNA is stably integrated in said selected plants,
(d) analyzing tissue of a selected plant to determine the production of a protein having the function of a protein encoded by nucleotides in a sequence of one of SEQ ID NO: 1-83; and
(e) collecting seed from a selected plant.

13. A method of claim 12 wherein plants in said population further comprise DNA expressing a protein that provides tolerance to exposure to an herbicide applied at levels that are lethal to wild type plant cells, and wherein said selecting is effected by treating said population with said herbicide.

14. A method of claim 13 wherein said herbicide comprises a glyphosate, dicamba, or glufosinate compound.

15. A method of claim 12 wherein said selecting is effected by identifying plants with said enhanced trait.

16. A method of claim 12 wherein said seed is corn, soybean, cotton, alfalfa, wheat or rice seed.

17. A method of producing hybrid corn seed comprising:
(a) acquiring hybrid corn seed from a herbicide tolerant corn plant which also has stably-integrated, recombinant DNA comprising a promoter that is (a) functional in plant cells and (b) is operably linked to DNA that encodes a protein having at least one domain of amino acids in a sequence that exceeds the Pfam gathering cutoff for amino acid sequence alignment with a protein domain family identified by a Pfam name in the group of Pfam names consisting of AAA, AP2, Aldo ket red, Alpha-amylase, Aminotran 1 2, Ank, ArfGap, Asn synthase, BRO1, CBFD NFYB HMF, Catalase, CorA, Cpn60 TCP1, Cystatin, DNA photolyase, DSPc, DUF1685, DUF296, Dil9, E2F TDP, FAD binding 7, FA desaturase, FBPase, GAF, GATA, GATase 2, Glyco hydro 1, Glyoxalase, Got1, HATPase c, HSF DNA-bind, HSP20, HisKA, Homeobox, Hpt, Isoamylase N, K-box, Lactamase B, Metallophos, MtN3 slv, NAF, NAM, NIF, Oxidored FMN, PAS, PDZ, PRA1, Peptidase C15, Peptidase S10, Peptidase S41, Phytochrome, Peinase, Pkinase Tyr, Pyridoxal deC, RIO1, RRM 1, RTC, RTC insert, Ras, Response reg, SPC25, SPX, SRF-TF, Synaptobrevin, UPF0057, zf-C2H2, and zf-C3HC4; wherein the gathering cuttoff for said protein domain families is stated in Table 28;
(b) producing corn plants from said hybrid corn seed, wherein a fraction of the plants produced from said hybrid corn seed is homozygous for said recombinant DNA, a fraction of the plants produced from said hybrid corn seed is hemizygous for said recombinant DNA, and a fraction of the plants produced from said hybrid corn seed has none of said recombinant DNA;
(c) selecting corn plants which are homozygous and hemizygous for said recombinant DNA by treating with an herbicide;
(d) collecting seed from herbicide-treated-surviving corn plants and planting said seed to produce further progeny corn plants;
(e) repeating steps (c) and (d) at least once to produce an inbred corn line;
(f) crossing said inbred corn line with a second corn line to produce hybrid seed.

18. The method of selecting a plant comprising cells of claim 1 wherein an immunoreactive antibody is used to detect the presence of said protein in seed or plant tissue.

19. Anti-counterfeit milled seed having, as an indication of origin, a plant cell of claim 1.

20. A method of growing a corn, cotton or soybean crop without irrigation water comprising planting seed having plant cells of claim 1 which are selected for enhanced water use efficiency.

21. A method of claim 20 comprising providing up to 300 millimeters of ground water during the production of said crop.

22. A method of growing a corn, cotton or soybean crop without added nitrogen fertilizer comprising planting seed having plant cells of claim 1 which are selected for enhanced nitrogen use efficiency.

The application's sequence listing, which the Patent Office published only in electronic form, follows.

SEQUENCE LISTING (10032 sequences)

SEQ ID NO: 1 - DNA, 558 bp, Glycine max
atggctgcggaacccaaggaatcgccttccaacaaccccggtctccatacaactcctgacgaagccaccaagggttacatcatgcaacaaactatgtttagaatcaaagaccccaaagtgagcctcgatttttattctcgagtcttgggcatgtctttgcttaagagattggattttccggagatgaagttcagcctgtacttcatgggctatgagaatacggcagaagctccaagtaatccaattgataaagtggtttggaccttttctcagaaggctacaattgaactgacacataattggggtactgaaagcgatccagagttcaaagggtaccacaatggcaattctgaacctcgtggctttggacacattggtgtaactgttgatgacacatacaaggcatgtgaaagatttcagaatctgggagttgagtttgttaagaaaccagaagatgggaaaatgaaaggtatagcatttattaaagatcctgatggatactggattgaaatctttgatcggaaaacaataggaaatgtaacacaaactgctgcttag

SEQ ID NO: 2 - DNA, 618 bp, Arabidopsis thaliana
atgccgtcccgtagacgtaccctcctcaaggtcatcatcctcggtgatagcggggtgggaaaaacctctttgatgaatcagtatgttaataaaaagttcagcaaccagtacaaggcaaccattggagccgacttcttgaccaaggaagtacagtttgaagatcgacttttcactttacagatctgggatacagctggacaggaaaggtttcagagccttggtgtagccttttaccgtggtgctgattgctgtgttcttgtatatgatgtcaattccatgaaatcatttgaaaatctgaacaactggagggaagaatttctgatccaggcgagtccatcagatccagagaattttccatttgttcttatcggaaacaaggttgacgtggatgatggaaacagcagagtggtttcagagaaaaaggctaaagcttggtgtgcttcaaaggggaacattccttactttgagacctctgccaaggtaggtactaatgtggaggaagctttccaatgcattgccaaggacgcattgaagagcggagaagaagaagaactatacttgccagacacaatcgatgtagggacgagcaatcaacagaggtctacagggtgtgaatgc

SEQ ID NO: 3 - DNA, 1038 bp, Zea mays
atggggaaccaatgcccaaacgggacccttgggagtgactactacaaccgccccgcttccaggttcgctgatggttgccttgaggacgatcgctactctgacttgaagaagtttgacaagccatggcctgaggtgaactcgtttaagcccactgctgttggtattttgaagaggggattggatccaacgtcaatcactgtccttgaaaggaagacggccgacgtaagggaacattatatcatcggtcggaggcttggtcaaggccagtttggcacaacattcctctgcaccgagatcagtacagggtgtgagtatgcatgcaagacaatcccaaagcgaaagctcatcaccaaggaggatgttgaggatgtgcgccgtgagatccagataatgcaccatttgtcaggccacaagaatgttgtttccatcaaggatgtatacgaggatgggcaggcggtgtatattgtgatggagctctgcgccggtggggagctctttgatcgaattcaggagaaagggcattacagcgaacagaaggctgcagatctcataagaatcattattagccttgtggctatgtgccattcacttggggttatgcaccgtgatctaaagccagaaaacttcctcctttgggataaagaagatgacctgtcaataaaagcaatcgattttggtctatctgtgttcttcaaaccaggtcaggttttcactgagctggttggaagtccatactacgttgctcctgaggtactacacaaacggtacggaccagaagcggatgtgtggtcagctggagtgatactgtatgttttgcttagcggggtgccacctttttgggcagagacgcaacaaggtatatttgatgctgtcttgaaggggcacattgattttgactcggacccatggcctaagatatctgaaagtgcaaagaatctcataaggaagatgctctgcccttgtccttcagagcgtctgaaagcccatgaagtactacgccatccttggatctgtgaaaatggagtggctactgattag

SEQ ID NO: 4 - DNA, 720 bp, Glycine max
atggctttggaagctctcaactcaccaacaacaaccgctccatcttttccctttgacgacccaactattccatgggcgaaacgaaaacgttcaaagcgttctcgcgaccatccttctgaagaagagtacctcgccctctgcctcatcatgctcgctcgcggcggcaccacctccgtcaacaaccgccacgtcagccctccaccgccacagccacagccacagccgacaccagatccttccaccaagctcagttacaaatgctccgtttgcgacaagagcttcccctcttaccaagcgctcggtggacacaaggccagtcaccggaaactcgccgccgccgccgaagaccaaccccccagcaccaccacttcctccgccgccgccaccagctccgcctccggaggtaaggcccatgagtgctccatttgccacaaatccttccccaccggacaggcccttggcggacacaaacgttgtcactacgaaggtaacggtaacggaaataacaacaacagtaacagcgttgtcaccgtcgcctcggaaggcgtggggtccacccacactgtcagtcacggccaccaccgcgacttcgatctcaacatcccggcctttccggatttttcgaccaaggtcggagaagacgaggttgagagccctcaccctgtcatgaagaagcctcgcctcttcgtcattcccaagatcgaaatcccccaatttcaa

SEQ ID NO: 5 - DNA, 1023 bp, Synechococcus elongatus PCC 6301
atggcttctatgatatcctcttccgctgtgacaacagtcagccgtgcctctagggggcaatccgccgcagtggctccattcggcggcctcaaatccatgactggattcccagtgaagaaggtcaacactgacattacttccattacaagcaatggtggaagagtaaagtgcatgcctgcaggtcgacatatgacccttgctatccgacccaagcttgccttcaactggccgaccgccctgttcatggtcgccattcacattggagcactgttagcgttcctgccggccaactttaactggcccgctgtgggcgtgatggttgcgctgtattacattaccggttgttttggcatcaccctaggctggcaccggctaatttcgcaccgtagctttgaagttcccaaatggctggaatacgtgctggtgttctgtggcaccttggccatgcagcacggcccgatcgaatggatcggtctgcaccgccaccatcacctccactctgaccaagatgtcgatcaccacgactccaacaagggtttcctctggagtcacttcctgtggatgatctacgaaattccggcccgtacggaagtagacaagttcacgcgcgatatcgctggcgaccctgtctatcgcttctttaacaaatatttcttcggtgtccaagtcctactgggggtacttttgtacgcctggggcgaggcttgggttggcaatggctggtctttcgtcgtttgggggatcttcgcccgcttggtggtggtctaccacgtcacttggctggtgaacagtgctacccacaagtttggctaccgctcccatgagtctggcgaccagtccaccaactgctggtgggttgcccttctggcctttggtgaaggctggcacaacaaccaccacgcctaccagtactcggcacgtcatggcctgcagtggtgggaatttgacttgacttggttgatcatctgcggcctgaagaaggtgggtctggctcgcaagatcaaagtggcgtctccaaacaac

SEQ ID NO: 6 - DNA, 216 bp, Arabidopsis thaliana
atgggaagaggaaagatagaaataaagaggatagagaactcaacaaatcgacaagtgacgttttgcaaaagaagaaatggacttctgaagaaagcctatgagctttcggtcctttgcgatgcagaagttgcgctcattgttttctccactcgtggccgtctctatgaatacgccaataacaacataagatcaaccattgagaggtacaagaaagct

SEQ ID NO: 7 - DNA, 498 bp, Oryza sativa
atggcaaacagtgacacctccaactctggcacagttgcagaagtcaatgcccagcactaccagcaggagtcctccaaactgcgccaacaaatcagtagcttacagaacgcaaacagtaggaccatagtgggggattctatcaacaccatgagcctcagggaccttaaacaggtagagaacaggctggagaaaggcatagctaagataagggctagaaagaatgagctgttatatgctgaagttgagtacatgcagaaaagggaagttgagctgcagaatgacaacatgtacctgaggagcaaggttgttgagaatgagaggggacagcagccactgaacatgatgggggcagcatcaacaagtgaatacgatcatatggttaataacccatatgattccaggaactttcttcaagtgaacatcatgcagcagcctcagcattacgcccatcagctgcagccaactacccttcaactcgggcagcagccggccttcaat

SEQ ID NO: 8 - DNA, 732 bp, Zea mays
atggggaggggccgggtggagctgaagcggatcgagaacaagatcaaccgccaggtcaccttcgccaagcgccgcaacggcctgctcaagaaggcgtacgagctctccgtgctctgcgacgccgaagtcgcgctcatcgtcttctccaaccgcggcaagctatacgagttctgtagcggaccgagcatcacgagaacacttgagaggtacgaaaaaaacagttatgcaggcccagatactgctgtacagaacaaagagaacgagttagtccagaacagccgcaatgagtaccttaaactgaaagcaaaggtggataatttacagaggactcagaggaatttgcttggtgaagatctgggttcacttggtgtcaaagagcttgatcagcttgagaagcaaattgattcatccttaagtcacataagatccacaaggacacagcatatgcttgatcagctcactgatcttcagaggagggagcaaatgatgtgtgaagcaaataagtgccttagaagaaagctggaggagaccagcaaccaggtgcatggccaagtgtgggagcacggtgccaacttattactcggctacgagcggcactcctcgccacagcaagccccatcacatgttggcaatggattattctttcatcccctggaagctgcagcagagccaaccctgcagatcgggttcgctcccgagcatatgaataacttcatgccggcatggctaccc

SEQ ID NO: 9 - DNA, 807 bp, Arabidopsis thaliana
atggctatggaatgggataatcagctacaacccaataaccatcactcttctaatcttcaagggatcgacgttaatggcggctccggcgccggaggaggaatgtacgtgaaggtgatgaccgatgagcagtatgaaactctcaggaaacagattgctatttacggcaccatttgtgagcgtcttgttgagatgcataaaactctcactgctcaacaagatcttgcaggagggagaatgggaggactatatgcagacccaatgatgtcatctttaggtcataagatgacagctagacagaggtggactcctacgccagtccagcttcagattctggaacgtatattcgatcaaggcacgggaacaccgagcaagcagaagatcaaagacataacagaagagctgagccaacacggccagattgctgaacaaaatgtctataactggttccagaaccgacgtgctcgatccaagaggaagcagcatggtggaggttcttctggaaataataatggtgagtctgaggtagagactgaagttgaagcattgaatgagaagagagtagtgaggccagagagtcttcttggtcttccagatggaaatagcaacaataatgggttagggacaacaacagcaacaactactgctcctaggcctgaagatctttgctttcagagccctgagattagctcagaccttcacttgctagatgttctatcaaacccaagggatgagcatcttgttggaaagatgggactggcggaaagttacaacctttatgatcatgttgaagattatggcatgtcaggc

SEQ ID NO: 10 - DNA, 567 bp, Arabidopsis thaliana
atggtacattcgaggaagttccgaggtgtccgccagcgacaatggggttcttgggtctctgagattcgccatcctctattgaagagaagggtgtggcttggaactttcgaaacggcagaagcggctgcaagagcatacgaccaagcggctcttctaatgaacggccaaaacgctaagaccaatttccctgtcgtaaaatcagaggaaggctccgatcacgttaaagatgttaactctccgttgatgtcaccaaagtcattatctgagcttttgaacgctaagctaaggaagagctgcaaagacctaacgccttctttgacgtgtctccgtcttgatactgacagttcccacattggagtttggcagaaacgggccgggtcgaaaacaagtccgacttgggtcatgcgcctcgaacttgggaacgtagtcaacgaaagtgcggttgacttagggttgactacgatgaacaaacaaaacgttgagaaagaagaagaagaagaagaagctattattagtgatgaggatcagttagctatggagatgatcgaggagttgctgaattggagt

SEQ ID NO: 11 - DNA, 822 bp, Arabidopsis thaliana
atggaaatggaatcattcatggacgaccttttgaacttctctgtaccggaagaggaagaagacgacgacgaacatacgcaaccaccgaggaatattactcgccggaaaactggattacggccaacagactccttcggtctctttaataccgacgaccttggagtggttgaagaagaggatttggaatggatttcaaacaaaaatgcttttccggtgattgaaacattcgtcggtgtattaccgtcggagcattttcctataacgtctcttctggaaagagaagcgactgaggtaaaacagctgagtccggtttcagtacttgagacgagtagccatagctccacaacgactacctcaaacagtagcggcggaagtaacggaagcacggccgtggctacgaccaccaccactccaacaataatgagctgttgcgttggttttaaagcgccggctaaagcgagaagcaagcgtcgtcgtacaggacgccgtgatttacgagttttgtggacaggaaacgagcaaggaggaatacagaagaagaagacgatgactgtggcggcggctgcgttgattatgggaaggaagtgtcaacactgtggagcggagaagactccgcaatggagggcaggaccagcggggcctaagactctgtgtaacgcttgtggcgtgaggtataagtccgggaggctagttccggagtatcgtccagcgaacagtccaactttcacggcggagttacattcgaattctcaccggaagattgtagagatgaggaagcagtatcagtccggtgacggtgacggtgatcggaaagattgtgga

SEQ ID NO: 12 - DNA, 831 bp, Arabidopsis thaliana
atggctaaaggtgaatacagagagcaaaagagtaacgaaatgttttccaagcttcctcatcatcaacaacaacagcaacaacaacaacaacaacactctcttacctctcacttccacctctcctccaccgtaacccccaccgtcgatgactcctccatcgaagtggtccgacgtccacgtggcagaccaccaggttccaaaaacaaacctaaaccacccgtcttcgtcacacgtgacaccgaccctcctatgagtccttacatcctcgaagttccttcaggaaacgacgtcgtcgaagccatcaaccgtttctgccgccgtaaatccatcggagtctgcgtccttagtggctctggctctgtagctaacgtcactttacgtcagccatcaccggcagctcttggctctaccataactttccatggaaagtttgatctcctctccgtctccgcaacgtttctccctcctccgcctcgtacttccttgtctcctcccgtttctaacttcttcaccgtctctctcgctggacctcaaggacaaatcatcggagggttcgtcgctggtccacttatttcggcaggaacagtttacgtcatcgccgcaagtttcaacaacccttcttatcaccggttaccggcggaagaagagcaaaaacactcggcggggacaggggaaagagagggacaatctccgccggtctctggtggcggtgaagagtcaggacagatggcgggaagtggaggagagtcgtgtggggtatcaatgtacagttgccacatgggtggctctgatgttatttgggcccctacagccagagctccaccgccatac

SEQ ID NO: 13 - DNA, 1536 bp, Oryza sativa
atggcgaccttcttccgcagcgccaacctcgcctccagggtcttcgaccgccagttcctctccccacgccccggcgctactgttaacactgttagacagttctatgagaacttggttccgagttacactatatgtgacatagattgcccagattattcatttcgtaaattcactgatgatggcaactatcttgtggcttttagccggaaccaccaagatttaatcgtgtaccgtcccatctggccaacattttcatgcaatgagccatgcgactctcatgatcttccacccaaagcaaagaaattcgacagcttctttaagcagctctactcaatttcacttgcatctagcaatgaatacatctgcaaggactttttcctttacatggagtgccatcagtttggcttatttgccacatcaactgcacaaagcaacgattcaagtgccactgagggtgctattcatggggtaccatcaattgagaaaattactttctatcttgtcaggctagacgatggcgcaatactagatgagaaagctttccgcaatgattttatcaatctggctcatagtattggagcttacttgtatgaggacctgctatgcattgtctctcttcgatatcaaacaattcatgtcctacagatacgagattcaggcaaccttgttgaagtacgcaaaattggtgcattttgccaggaagatgatgagctatttctccattcacatggtcaggctgcacgaggtgtttcttttcttcctggcatcaagcaacggttgttgtcatttatttttcgcaagacatggaatgaggaatctgatcagaccttgagagtccagcatctgaagaagaagttctattttcactttcaagactatgttgatcttatcatatggaaggtgcagtttttggatcgtcatcacctatttatcaagtttggtagtgtggatggaggggtttctcgcagcactgaacagaattcagcattctttgctgtgtacaacatggagacgacagatattgtttcactctatcagaattcttcggaggagctctattcattgtttgaatatttttatgaccattttcacacaaatccacaaaattcatcgcatggaaattttatctcgtcacattccaataatgttcatgctctcgatcaacttcggacaattaaaaataaagcaaacagcacctcacagtttgtgaaaaagatgatggcgtcactaccttacacttgtcaatcacaaagtccttcgccatactttgacctatcattgtttcggtatgatgagaagctgatttcagcgattgatcggcacagacactgtacagagcatccaataaaatttatatcagtgaaacagccaaatgttgtcaaattcaagataaaaccaggttcagattctggtgcttctgacagcagggcaaaaagaatatcttccttcttgtttcacccatttttccctctcgcactttctattcagcagacatatatgcagccaactgttgtcaatttacatttcaggagatag

SEQ ID NO: 14 - DNA, 525 bp, Glycine max
atgtcggatgcaccggcgagtccgagtcacgagagtggtggcgagcagagccctcgcggctcgttgtccggcgcggctagagagcaggaccggtaccttcccattgccaacatcagccgcatcatgaagaaggctctgcctcccaatggcaagattgcgaaggatgcaaaagacacaatgcaagaatgcgtttctgaattcatcagcttcattaccagcgaggcgagtgagaaatgccagaaggagaagagaaagacaatcaatggagacgatttactatgggccatggcaactttagggtttgaagactacattgagccgcttaaggtgtacctggctaggtacagagaggcggagggtgacactaaaggatctgctagaagtggtgatggatctgctagaccagatcaagttggccttgcaggtcaaaatgctcagcttgttcatcagggttcgctgaactatattggtttgcaggtgcaaccacaacatctggttatgccttcaatgcaaggccatgaatag

SEQ ID NO: 15 - DNA, 423 bp, Arabidopsis thaliana
atgatgtcctttgaaatgaatgaccggaaaaaaatcgggttaggcctgacaggatttggcgtattcttctcgtttttgggaatagtctttgtctttgataagggattacttgccatgggaaatattcttttcatctcgggggttagtctaaccattggcttcaagtctaccatgcagttcttcatgaagcgtcaaaattataagggaaccatctcttttggcgtcggtttcttctttgttatcatcgggtggcctatcttgggaatgatgttggagacctatggctttttcgtactcttcagtggcttctggcctaccttggcagtctttgctcagaagatacccgttctcggttggattattcagcaaccatatattagatcgttctttgacaagtaccggggcaagcgagtgccggtctag

SEQ ID NO: 16 - DNA, 393 bp, Zea mays
atggcggcggcgggcctgaggaaggggaatgcgcgcctcccgccggaggtgaaccgggtgctctacgtgcggaacctgccgttcaacatctcgagcgaggagatgtacgacatcttcggcaagtacggcgcgatccggcagatccgtctgggcaacgccaaggacacgcgcgggaccgcttacgttgtctacgaggacatctacgacgccaagaacgccgtcgaccacctctccggcttcaacgtcgccaaccgctaccttatcgtgctctactaccagcccgccaagatgtccaagaagtcggatatcaagaagaaggaggacgagatcaccaggctccaggagaagtacggaatcgggtccaagacgcccggcccgggctccagcgactag

SEQ ID NO: 17 - DNA, 540 bp, Glycine max
atgtcgtccattaacccctcacgagctaccgctccctccgccttcgccacgcgccggccgtgggaggagttcttcgcgctccactcgttcacgcgcccctacaccctcggcgagaccacgctccgtgtgaagcgcaacctcggccacttccgcgtgaactacgccatggtcgtgctcctcttcgtgttccttagcctcctctggttccctatctccctcgtcgtcttcctcgccgtcttcgccgcgtggttcttcctctactttttccgcgatggccccatcgtcgtgctccgccgcgagcttgacgaccgcctcgtcctcgcggcgctctccgccgtcaccgtcgccgggcttgtccttaccggcgtctggctcaacgttgtggtggcgctgctcttcgcggcggcggcggtggcgctgcatgcggcgcttcggaacaccgaggatttgtacgtggatgaattggaagtttctgatggaggtttggtttcggttgttggtggtagccctacgaaacgaacagggtacgctagaatatag

SEQ ID NO: 18 - DNA, 1440 bp, Agrobacterium tumefaciens
atgtcgctaaaaaccgcccccgtcatcgtctggttccgcaaggatctgcgtctttctgacaatcttgctttgctcgccgcagtggagcatggcgggccagttattccggtctatatcagggaaaaatccgccggtcccttagggggtgcgcaggaatggtggctccaccattcgcttgccgctctctcctcctcgcttgaaaaagccggcggccgcctcgtgctcgcaagcggcgatgcagagaggatactgcgtgacctgatatccgaaaccggggcagacaccgtggtctggaaccgccgttatgatccgaccggcatggccaccgacaaggcgctcaaacagaagctccgggacgacgggctgacggttcgaagcttctccggccagctgctgcatgagccatcgcggctgcagacgaaatcgggcgggccttaccgcgtctatacgcccttctggcgggcgctggaggggagcgacgagccccatgcgccggcggatccgccaaagagcctgacagcaccgaaagtatggccgaagtccgagaaactctccaactggaagctgctacccaccaagccggactgggcaaaggatttcagcgatatctggacccccggcgaaaccggtgcgttggacaaactcgatgatttcatcgatggcgccctgaaaggttatgaagaaggccgggattttccggcaaaacccgcgacgtcgctgctttcaccgcatcttgccgcgggtgagatatcgccggcggccgtctggcacgccacgaaagggctttcgcgacatatcgcctccaatgatatcagccgtttccgcaaggaaatcgtctggcgggaattctgctaccatttgctgttccatttcccggagctgggcgaaaagaactggaacgacagtttcgacgccttttcctggcgggacgatgaaaaatccttcaaggcctggacgcgcggcatgacgggttacccgatcgtcgatgccggcatgcggcaattgtggcaacatggcaccatgcataaccgggtgcgcatgatcgtggcgtccttcctcatcaaacatctgctgatcgactggcggaagggcgagaagtggtttcgcgatacgctcgtcgatgcggacccggcgtccaatgccgccaactggcaatgggtggcaggttcaggggcggacgcctcgccgttcttccgcatcttcaaccccatattgcagggagagaaattcgacggcgatggggattatgtgcgcaggttcgtgcccgagcttgaaaagctcgagcggaaatacatccacaagccgttcgaagcgcccaaagatgcgctgaaaaaggcgggcgtcgaactcggcaagacctatccgctaccgatcgttgaccatggaaaagcgcgggaaagagcgcttgccgcctatgccgcagtgaagaagaccacatag

SEQ ID NO: 19 - DNA, 1527 bp, Oryza sativa
atggccgcgaccccgccgtcgtcgcagcaccggcggccgctgtcctcctccgcctccgccgcctccctcgctggcaagccgcgggggggcgggctcctgctcgggcggtacgagctcggccgcctcctcggccacggcaccttcgccaaggtgtaccaggcgcggagcgcggattccggggagccggtcgcgatcaaggtgctcgacaaggagaaggcgatgcggcacggcctcgtcccgcacatcaagcgggagatcgccatcctccgccgcgtccgccaccccaacatcgtgaggctgttcgaggtgatggccaccaagtccaagatctacttcgtgatggagctcgtccgcggcggggagctgttcggccgcgtcgccaaggggcggctcaaggaggacaccgcgcggcgctacttccagcagctcgtctccgccgtcgggttctgccacgcgcgcggcgtgttccaccgcgacctcaagcccgagaacctcctcgtcgacgagcacggcgacctcaaggtctccgacttcggcctctccgccgtcgccgaccagttccaccccgacggcctcctccacaccttctgcggcacgccctcctacgtcgcgcccgaggtgctcgcgcgccgcggctacgacggcgccaaggcggacatatggtcctgcggcatcatcctcttcgtgctcatggctggctaccttccgttccatgaccagaatctcatggccatgtaccgaaagatttacaggggggaattccggtgcccgagatggttctccaaggatctttccagtctactgaatcgcatccttgacacgaacccagagacaaggatcactgtcaaagaggtcatggagagcaggtggttccagaagggattccggccggtcagattctatgttgaggatgatcaggttcacagcttggcagatggtgataatgatatgccggagttggaacctagtgagcctcctcctcctcctccgtttccgccgccgccgccgcagcaagatgatgacggtgaggagtcgggatgggagtcggactcatccgtggcatcatgtcctgccacattgtcatctgaggagcgtcggcaaagacctctcgggtctctcacacggccagcaagtcttaatgcgttcgatatcatatcgttctcaaagggatttgatttgtcggggttgtttgaggagcgagggagtgaagtgaggttcatatcggcagagcctatgcaaacaatcatcacaaaattggaggagatcgcaaaggtgaagagcttcttcgttcggcgaaaagactggcgagtgagcatagaaggcacgagggaaggtttgaagggtccattgacaatcggcgctgagatatttgagctcacaccaagcctggtggtagtggaggtgaagaagaaggcaggggataaggaagaatatgatgacttctgtaacagggagttgaaacctgggatgcagcatctcgtacaccatatgggatcagttccaaatataccttctgatacggagtag

SEQ ID NO: 20 - DNA, 1356 bp, Zea mays
atggcagagcataaagggaacgttctcttgcacaagtatgagatggggaaattgcttggtcaaggcacctttgccaaggtttaccatgctcgtaacacggcgacttcggaaagtgtcgcgatcaaagtgattgataaggagaaggttatgaaggttggtctcattgatcaaatccagcgagaaatttctgtgatgaagcttgttaggcatccaaacatcgtacagctctatgaggtcatggccaccaaaaccaaaatatactttgtgctggaacatgttaaaggtggagagctgttcaacaagattcagcgaggaaggctcaaggaagacgcagcgaggaagtacttccagcagttgatctgtgcggtggacttctgccacagcaggggtgtctatcatcgagatttgaagccagaaaatcttttgctcgatgagaatagcaacctgaaggtatcagattttggtctaagcgcacttgctgaatgccatagacaagacggcctgctccacacgacttgtggcacgcctgcttatgttgccccagaggtgattaacagaaagggttatgatggtgcaaaggctgacatatggtcttgtggggtcatcctgtttgtgctattggctggttatcttccgttccatgataagaacttgatggacatgtataagaagattgagaaagctgacttcaaatgtccaagttggttttctaccgatgttcggaggcttttgcaaaggattcttgatcctaaccctagtagaaggatctcggtgaaaaaaatcatggagaatccatggtttaggaagggtttaggtgcaaagctacttaggtacgatttacagaataagaatgcccctcatgtggacaagaaggcagattttgattcactgagcaccaacgtaacaactgagagcaagcaacatgaagaaaagaagcctaccaacatgaatgcatttgatataatatctctatcaactggtttggacctctctggtttatttgaagaatctaacaagaagagagaatccaaattcacatctaccaacacaagctcgacaatcatatcgaagatcgaagatattgcaaagaatttgcggttgaatttgacaaaaaaggatggtggcttgttaaagatggaagcttcaaagcccggaaggaaaggggtaatgggtatcgatgccgaagtatttgaggttagccccaacttccatcttgtggagataaagaagacgaatggcgacactctagagtatcaaaaggtcctgaaccaagaaatgaggcccgcactcaaggaaatagtgtgggcttggcaaggtgagcaatcaaagcaaaagcaggaacaacagtcgtgttag

SEQ ID NO: 21 - DNA, 1314 bp, Zea mays
atggatgggaggaggacaattttgatgggacgatatgaaattggtaaacagctgggacaaggaacctttgcaaaggtcttttatgctcgtaatcttactactggcctggctgttgccataaagatgattaacaaggacaaggtcatgaaggttgggctcatggagcagataaagagggagatctcaataatgaggttagtgaagcatccaaatattcttcagctttatgaggttatggctagcaagagcaaaatttattttgttctggagtatgctaaaggtggcgagcttttcaacaaaattgctaaggggggaaagctcagtgaggatgttgcgaggaaatatttccaacagttggtcagtgctgttgatttttgccacagccgaggtgtctatcaccgtgatttgaagcctgaaaaccttctacttgatgagaatgaaaaccttaaagtctcagattttggcctaagtgctctagctgagtccaagaggcaagatggtctcctgcatacaacatgtggaactccagcttatgttgctcctgaagtgctgagtagaaaaggttatgatggtgcaaaggcagatgtttggtcttgtggagtaattctttttgtgcttgtggctggttaccttcctttccatgacacaaatttgatagagatgtacaggaagatttccagagccgagtttagatgccctcgttttttctcaactgagctgaaggatctgctacataaaatccttgttccagatccaagcactagaatttctatctcgaggataaagaggagtgcttggtacagaaaaccggttgaagcacatgcaaagaaaaatgaggcagaaacaagcgagaatacttgtaccggtgaaggtacaacttctgtctcaacagagtgcagtacgtctgagggaaatcaagggccattaagcctcccaaacttgaatgcatttgacatcatctgtctctcaacaggttttaatctttctgggttttttgaggataagtatggtcgcagggaagagagatttactaccagacagcctgtaacaacagtatttacaaagctgaaggagcttgccaaacgcctaaagttgaaggtcaataagaaagaaaatgggaccttgaaattggcagctccgaaggaaggaaagaagggtatgcttgagcttgatgcagagatttttgaggttgctccttctttgctcttagttgagttgaaaaaaaaccaatggggacacgctggagtatcaaaagctagtgaaagaggagataaggccggcactgaaggatattgtttgggtttggcaagatag

SEQ ID NO: 22 - DNA, 1392 bp, Zea mays
atggctgccgctgcagctttctcctccacttccgtcgtcgctgctctcgcggcgagcggcttcctcggcaagaagctcgtcaccagcatcatcatcaggaataagaagaaggggtacgactccctgcatggcgccacgaccaccatcagagtcagagccatggcggtgaacaaggagacggagcaggacaggtggaggggcctggccttggacacctcggacgaccagcaggacatcaccagggggaagggccgcgtggacccgctgttccaggcgcccatgggggacggcacccacgtcgccgtgctcagctcctacgactacatcagccaggggctcaggcactacagcttggacaacatgatggatggctactacatcgctcccgcgttcatggacaagctcgttgtccacatcgccaagaacttcatgcccctgccaaacatcaaggtgcccctcatcctgggtatctggggaggcaagggccaagggaagtccttccaatgtgagcttgtcttggccaagatgggaatcaaccccatcgttatgagcgccggcgagctggagagcggcaacgccggcgagcctgcgaagctgatccgccagcgctaccgcgaggcggccgacatgatcaagaagggcaagatgtgcgtgctgttcatcaacgacctggacgccggcgcggggcggatgggcggcacgacgcagtacacggtgaacaaccagatggtgaacgcgacgctgatgaacatcgccgacaaccccaccaacgtgcagctcccggggatgtacaacaaggaggagaacccccgcgtgcccatcatcgtcacgggcaacgacttctcgacgctgtatgcgccgctgatccgcgacgggcgcatggacaagttctactgggctcccacccgcgaggaccgcgtgggcgtgtgcaagggcatcttccgcagcgacggcgtccccgacgaggacgtggtgaggctggtggacgccttcccgggccagtccatcgacttcttcggcgccctccgcgccagggtgtacgacgacgaggtgcggcggtgggtggccgagaccggcgtggagaacatcgccaggaggctcgtcaactccaaggagggcccgcccacgttcgagcagccgaggatgacgctggacaagctcatggagtacgggcgcatgctggtggaggagcaggagaacgtgaagcgcgtgcagctggcagacaagtacctcagcgaggcggcgctgggcgacgcaaacgacgacgacgacttgtatggcaaggcggcgcagcatgtccgcgtgcccgtgccggaggggtgcactgaccccaaggccggcaacttcgaccctaccgccaggagcgacgacggcagctgcgtgtacaactag

SEQ ID NO: 23 - DNA, 923 bp, Zea mays
atggcggctacggaggtgtactcgccgaccacggcggcggcagcgcagcagcagcgggggaaggcggcatcgcaggcgtggcgagcggtggtagggtggatcggcttcttcctccaagtcctgcttcagatcctccggggcacgccctcctgcgcacagctcctgtccttcgttggtttccgctatccgctcctctccggacctgcggcctcggagccgttgccggaggtggccttcatgccgctccactccgagatccctgctgacgcggcgcctgccccgaaacctgcgtctgagcccctgggccgcctcacggtagtgcttgacttggatgagactttagtttctgcatatgaatcatctagtcttcctgccattgtgcgcacacaagctgttgaagcaggattacattgctttgatatggaatgtatatcgtctgataaggatgttgaaggcaaacaaaaggtcaatcatgtgactgtttttgagcgccctggtttgcatgagttcttgcggaaaactagtgaatttgcagaccttatcctttttacagcaggtttagaaggttatgctagacctttagttgaccgaatagatgttcacaatagattcagacttcgtctctatcgcccatcaactgttaccacggaatatagagaacatgtgaaagatcttactcgcgtgtcaaaagattttggcaggattgtcattgtcgacaacaatccgttcagtttcattcttcagcctttgaatggaataccttgtgttccattttcagctggacaacattctgatgatcagctcatgacggttatatttccactcctgaagcatctttccctccagaaagacgtcagacccgtattgcgtgaaagatttcatatgccagaatggttccaaaaccatgggatcccccaagttag

SEQ ID NO: 24 - DNA, 663 bp, Zea mays
atggggcagcagtcgctgatctacgcgttcgtggcccgtggcacggtcatactggccgagtacacggagttcaccggcaacttcaccaccatcgcctcccagtgcctcatgaagctccccgcaagcaacaacaagttcacctacaactgcgacggtcacactttcaattacctcgtggaagacggattcacatactgtgttgttgctgttgaatcggtggggcaacaaattcctattgctttcatggatagggttaaggaggatttcacaaaaaggtatggtggtgggaaagctgctactgctgcagctaacagcctcaatcgagagtttggatcaaaacttaaagaacacatgcagtattgtgtggatcaccctgaagaggttagcaagctggccaaagtgaaggcgcaggtttcagaagtcaagggtgttatgatggaaaacattgaaaaggttctggatcgtggagagaagattgagctgcttgtcgacaagaccgagaatcttcgctcacaggcacaagatttcagacagcagggaacaaatgtcaggagaaagatgtggttacagaacatgaaaatcaagctcatcgtcctgggaataatcatcgcactcattctgatcattatcctctctgtctgtcatggtttcaaatgccattag

SEQ ID NO: 25 - DNA, 1410 bp, Zea mays
atggggaagcgatccggcggccggaagctgccgttcttcaccagatcctcctcgtcctcgtccaagcggaatcgctccgcccgccgcctcccttccctccccaagcaggacaacgcgacgagggctcttctcgcctccccctctgctgcctcgccgtccgcgaccccgggatcggcggcggcggggcagaccgcccagctgccccctcccctctcagttaccgcgggcggcggggttgccgtgtcggggaaggtcaacaagaagaaggccggcacgcgcctatggatgcggttggaccgctggagtgcctccgagatcgtcgagctcgacaaggcctccataatccgccgcgccggactgcccccgcgcgacctacgcatcctcggccccgttttctctcgctcctccagcatcctcgctagggagaaggcgatggtgatcaacctcgaattcatcagggcgatagttactgccgaggaggtgctcctgttggaccctctcatgcacgaagtgctccctttcgttgaccaattgaggcagcacctgcctctgaggagccgggtgggtgagaatggtgagtgtgcccctgatggcaatggggaaaaacagaagggctcgcttaatgaagcgaccggggcagagcatgagctgccattcgagttccatgtgctggaggtagcactcgaggttgtgtgctcatcgttggaccttagcgtgtctgaccttgagaggcatgctactccagtgcttgacgaactgaccaagaatgtaagcacaaggaaccttgagcgagtgcggaaccttaagagtcatcttacccgtttgcttgcccgtgtgcaaaaggtcagggatgaaatagaacatcttctagatgataatgaagacatggaacatctgtatctaacaaggaagcaagtacaaaaccaacaggttgaggctttaatgtcatctgctgcttccaacagcattgttcttgccggaacaggtgtgcccaggctgaactctagcttccggcgtagcctgagcattgctactagcatgcatttggataatgatgtggaggacctagagatgttacttgaggcctacttcatgcagctggatggaattcgcaacagaattttgtcggttcgggagtatattgatgacacagaagactacgtcaacattcaactcgacaaccagcgtaacgaactcattcaactccagcttacacttacgattgcatcctttggcatagctgccaacactttcattgctggagcttttgcgatgaacatcccgggctctctgttcaacaccgatggcagcctcttctggccatttgtcgggagcacctcatctggctgctttgtaatcaccgtcctcttgttggggtatgcctggtggaagaagttgctgggtccttag

SEQ ID NO: 26 - DNA, 735 bp, Zea mays
atgatctccccggacgcagcccgcaacgtagtcggcatcatcggcaatgtcatctccttcggcctcttcctgtccccagtgctgacgttctggcggatctacaaggccaaggacgtggaggagttcaagccggacccttacctggcgacgctgctcaactgcatgctctgggtgttctatggcatccccgtcgtccaccccaacagcattctcgtcgtcaccatcaacggcatcggcctcgtcatcgaggccgtctacctcactatcttcttcctctattccgacagccagaagcgcaagaaggcgttcgcgatcctggccgtggagattctgttcatgctcgccgtggtgctcggtgtgatcctcggcgcgcacactcacgagaaacgttccatgatcgtcggcatcctctgcgtcatcttcggctcgatgatgtacgcctcaccactcactatcatgagtcgagtgatcaagaccaagagcgttgagtacatgcccttcctcctgtcgctggtgagcttcctcaacggctgctgctggacggcctacgcgctcatccgcttcgacctctacgtcacgatcccaaacgccctgggcgcattcttcggactcatccagctgatcctctacttctgctactacaagtcgacccccaagaatgagaagaacgtggagctgcccaccgtctccagcaacgtcggcggcggcaacgtcaccgtcagcgttgagcgatag

SEQ ID NO: 27 - DNA, 1014 bp, Zea mays
atgaggatgctgtcgaaggcgtgctcgattgtggcctcctccctcccgcgctgctcctcctccgccgccgcccccacgatgagggggcagccgtccttgctgccaagcgtgcggaagcaatggcccgggaagccactgctgtatggaatcggcaccctgttggtcatgccactgaggacactgtatggagtgggtcgtgtttttggcgcaggacggtttctctgcaacatgaccaacgtctcttcgtcgctgcaaattgagcttgtaccatgccttcgagataactatgcgtatatcctgcatgatgttgatactggaacagttggagtagtggatccttctgaggctatgcctattataaatgcattggaaaagagaaaccagaacttgacttatatactgaacacccatcatcactatgatcatactggtggaaacttggaattgaaggcaaaatatggtgcaaaggtaattggttctgagaaggataaggacagaatacctggcattgacatcacgcttaaggagggtgacacatggatgttcgctggccatcaagttcttgtactggaaactcctgggcatacaacaggtcatgtgtgctattatttcgctggttctggagctatatttacaggtgacaccttgttcaatctatcatgcggaaagctttttgaagggactccacagcagatgtatgcctcactccagaaaattacagctctacccgatgatacaaaagtatactgtgggcatgaatataccttgagtaatgcaaagtttgccttgagtgtagaaccgggaaataaagcattgcaggaatatgctgcaaatgcagctgagctgcgtaataagaatatacccacggtgccaacaacaattggaagggagaaggaatgcaatcctttcttgcggacctccaatccagaaattaagagaacactgtccgttccagatcatttcgatgaagatcgggtgcttggagttgtccgtcgagcaaaagataacttctag

SEQ ID NO: 28 - DNA, 1134 bp, Zea mays
atggggcgagacaagagccggcgtctatacggcagccgccatttccggcagcggctggtgctggcgacgctcacctctaccgctgtcaccatcgaggacatccgctcaggggacgcttcgccggggctccgcccttacgaggtctccctcctccgcctcctcgacaagatctcagaccatcacaccattgacctcaacgagacaggaacgaagctgaggtaccggccgggggtgattatagggggaaagggccttgagcacgactgcggggtgcaccggggtattggctactttcttgagccactcatactgcttggtctattttcgagggcccctatatcgattcggcttaaaggaatcactaatgatacaaaggatccttctgtggatactttccggacaacaaccttgcatatgctcaagcactttggtgttcctctggatggtttcgatctaaatattgacagccgtggatctcctcctcttggtggtggtgaggtgtttctccgggttcgcaatataaatagcacattgacggcagcaaattgggtagatgaaggtatggtgaagaggataaggggtgtttcgttctccaccagagtatctccacagttggaaaaccgcatcatttatgctgcacgtggaatcttcaatcgtttcattcctgatgttcatatacacacggatcatagatctggttctgctggtgggaggtcaccaggctatggtgtatcgttagttgctgagaccactacgggatgcctgctctctgtagatgtcactgtgagttatcctagtgttgatgaaataaatgaagaatctgagaagcctgagctgacttctccggaggatcttggtgttcaagctgcatcaatgctactagaagaggtggctcaaggaggtgttgttgattctacacatcagggcctcctatttattctgtgtgctttatgcccaccggatgtatcaaaggttcgtgtgggacagttgactccatatggtatagagacacttcgaaacatcagagattttcttgacgtcaagttcatcatcaagcctgatcccaattcaaacaccgttactttaaaatgtgttggcgcgggagtgaagaatcttgctcggaagatttcatag

SEQ ID NO: 29 - DNA, 627 bp, Oryza sativa
atggaagtggaggctcaccatggcttcctaccaccagcagcagggaggcagcacctttatggccatccccactatcaactttcaggagatgatgagtggtgggagtacatcccttgccccttctgctacattgaggtggaggttcatttcctttgtgaccatctccaggaggagcattgctttgacatgaaaaatgctgtgtgtccaatctgcgccgacaaccttgacaaggacactgatgaacatttcagggttcagcactcacatctactcaagaggaggaagtcttcttctttttcttgcaagccaagctcagcagcagctgacaagggatcatatgaagaggactcctactttgaagcaccctcacactgcatgggcaggccggctcctgattcctctcctgaccctcttctctcccagttcatctgctgcagcctcgctcctccggtcgattcgccgcgccgcagcgaagccgatgccgagggccatggttcatcttcctcagatgatcaaaaaaggagagagcagggtgtgatggatgatgcatcaaaggaggagcttgaggagaggttgcagagaatcgagttcgtgaagcagatgctgatgacaacaattgcttattag

SEQ ID NO: 30 - DNA, 1128 bp, Glycine max
atgggtagcaaaggcaaacgcaaagagcaagaatcaataataacgagggttatggctcacggaggtagatacgtgcaatacaacgtgtacggaaacttgttcgaggtctcctccaagtatgtccctcccattcgccctgtcggtagaggcgcatacggcatcgtttgtgctgctgttaattgcgatacgcacgaggaagttgccataaagaagattggtaacgcctttgacaacatcattgacgctaaacgaactttgagggaaatcaagctccttcgccacatggaccatgaaaatataattgccattagggatatcatacgacctcccagaaaggatgccttcaatgatgtttacattgtttatgaattgatggacactgatcttcatcagattattcgttctgaccaacctcttaacgatgaccactgtcagtactttttatatcagctgttacgggggctgaaatatgtgcattctgctaatatcttgcaccgtgatcttaagcccagtaatttgcttctcaattcaaactgtgaccttaaaattgcggactttggtctggcaaggacaacatctgaaacggatttcatgacggagtatgttgtcacacgatggtaccgagccccagaattgcttcttaattgttcagagtacacctccgcgattgatgtttggtctgttggttgcatatttggtgaaattatgaccagagaacccttgtttcctggaaaagattatgttcatcaactgaggcttataacagagttattaggttcacctgatgatgccagccttggatttctccgaagtggaaatgccaaaagatatgttcgacagcttccacaatataggaagcaaaatttctccgctagattcccaaatatgtctcctgaggcattggatctactagaaaagatgcttatctttgatcccaacaaacgcattacagttgatgaagcactatgtcatccatatctttcatcacttcatgacatcaatgatgaaccggttggtcctgggcaattcaattttgattttgagcagccaacatgcactgaagagcacatcaaggagctcatctggagggaatcggtgaagtacaatccagatccacccagtcagtag

SEQ ID NO: 31 - DNA, 1407 bp, Cupriavidus metallidurans
atgtcaacgttacgaggggtatccatgagcgacatgcaagagcacaaggtcacaccgtacgaccagttcaactacgaggtgcctgaaaacgtcttcccgcgcgaaggcatctcggcgaatgcagcggccgcgatcgtgatcagtgacgaatggaccgacaccaaccccatgctcaacatgtcgtcgttcgtcaccacgttcgcggaaccggaagcccgggaagtcgccgcgcgcaatatcttcaagaactatatcgaccacgacatgtatccgcggctcttcgccatggaaggccgcatggtgcgctggctgcatgaactgtggaacggtccgaagggcgtggagccgtacggcacgtgtacggtaggctcatccgaagcctgcatgctcgggggcctggcgcacaagtggaactggcgccagcgccgccaggccgaaggcaaggatgccacccgcccgaacatggtgacgggcggcaacgtgcagatcgtgtggaagaagtttctgcgctacttcgacgtcgagccgcgcatcgtgccgctgaagccgggcaactactgcctgaccgccgaagacctggacaagtacgtcgatgagaacacgatctgcgtcgtggccatcgccgggcagaccttcacgggcgaggatgacgacatccagggcattcacgactggctcgatgcctacgagaagcgcacgggcatctcgatccccatgcatatcgacggcgcctccggcggcttcgtcaacccgttcctctaccccgactacaagtgggacttccgcctgccgcgcgtgcagtcgatcaacgcctcgggccacaagtacgggctgacgccgccgggcctcggctgggtggtgttccgcgaacgcaagatcttcaacgaggaactggtgttctacgtgaactacttgggcggagaaatgcccacggccacgctcaacttcagccgcaacgcattccaggtggccgtgcagtactaccagttcctgcggctcgggttcgacggctacaaacgcgtgatgcagcacacgctggacaacgcgatcttcctgcgccagcagctcgtcgacagcgggtacttcgacatcatgaacaccacgcagcgcattccggtggtggcagtgacgctgaacaagaagtacaagaacttcaacgagttcgatgtctccaacaaggtccgcgagaaaggctgggtgctgtccgcgtacacgatgccgcccaacgccgaatcggtcacgagcctgcgcgtggtggtgcgtccgcatgtgaaccacaacgtggcgcaactgcttgccaacgatatcattaacgcctgcaagttcctcgaggccaacggtggcaatgccaagcctcccgcattgcacaaacatgccgaagcgcaatcgacgtcgttgaagtgctag

SEQ ID NO: 32 - DNA, 1221 bp, Oryza sativa
atgggctctaagaagcggtcgcctcagcatccggccgccgcggcgccccctcccgccgtcggcggcggcggcggcggcgaggtctccggcgatggtggcgcctcgacggcgaacgggccggtggtgccgaagccgtcggaggtggcgccgttcctgacgaaggtgtacgacatggtctcggaccccgcgaccgacaacgttatctcgtgggccgagggcggcggcagcttcgtgatctgggactcgcacgccttcgagcgcgacctccacaggcacttcaagcacagcaatttcaccagcttcatacgccagctcaacacctatggatttcgtaaagttcaccctgatagatgggagtgggccaatgaaggttttattatgggccaaaaacatcttctgaagaccattaagaggaggaagaagtcttctcaggaatcacctagcgagatacagaaggcgcctgtcaaaactgcacctggtactgaaaatattgagataggaaaatatggtggccttgaaaaggaggttgaaacccttaagagggataaagctcttctcatgcagcagcttgtagatctcaggcactaccagcaaacatctaaccttgaagtgcagaatttaattgaacggcttcaagtaatggaacagaaccagcagcagatgatggcacttctagcaatcgttgtccagaatcctagttttctcaaccagcttgtgcagcaacagcagcagcagcgcagatccaactggtggagtcctgatggaagcaagaaaaggagatttcatgctcttgagcagggccctgtaactgatcaggagacctctggccgtggggcacatattgttgaatatctcccacctgtcccagaaacatcaggtcaagtaaatccagtggaaggagccatttgttcggccaactcacaaccagttccaagtcctgcagttgccacacccatggacatgcaaacgtctaacgttgctgatactctcggttcatctgaggagcctttcgctgataactctactctacatgaatgggatgataacgacatgcagcttctgtttgatgataacctagacccaatacttccaccatttgagaatgatggtcaaatgggccctcctttgagtgttcaagattatgattttccgcagttagagcaggattgtctgatggaagcacaatataactccaacaatcctcaatatggtaatgactag

SEQ ID NO: 33 - DNA, 480 bp, Glycine max
atgtcgttgattccaagtttcttcggcaccgggcgaagaaccaacgtcttcgaccccttctccctcgacgtgtgggacccattccatggcttccccggcaccaccgccctctccgctccgcgctccgagacggcggccttcgccaacacgcgcatcgactggaaggagacggcggaggcgcacgtgttcaaggcagacctgccggggctgaagaaggaagaggtgaaggtggagatcgaggaggagggaagggtgctgcagataagcggacagagaacaaaggagaaggaggacaagaacgacacgtggcaccgcctcgaacgctccagcggcagctttctccgccgcttccgcctgccggagaacgcgaaactcgatcaggtgaaggccggcatggagaacggagtgctcactgtcactgttcccaaggtggatgtcaagaagcccgatgtcaagcccgttcagatcactgaaggctag

SEQ ID NO: 34 - DNA, 663 bp, Zea mays
atgggatcagaagggccttcagttgtcactgtccatgttactggatttaagaagttccatggggttgctgagaacccaaccgagaaaattgtgaccaatcttaaatctttcttggaaaagcgagggttgccaaaaaatcttgtcctcggaagctgcacagttctcgaaacagcaggggaaggggcacttgccacattatataaggttttagagtctgctgttgcagacagaggaactgggtcctcggcacagggacaagtaatttggatccactttggggtcaacagtggcgcaataaggtttgcccttgagaaccaagctgttaatgaggctaccttccggtgtccagatgagctaggatggaaaccacagagggtccctattgtgccctctgatggaagcatctcacggacgagagagactaccctgccagtcaatgaattaaccaagtcactccggaagataggctacgacgtggtgccctccggcgacgccggtcggtttgtatgcaactacgtgtactaccactctcttcggttcgcggagcaacacggcatcaaatccctgttcgtgcatgttcccctcttcttgacgatcgacgaggaggtccagatgcacttcgtcgcttccctccttgaagtcatcgctttctcatccaactag

SEQ ID NO: 35 - DNA, 1461 bp, Arabidopsis thaliana
atggccggtgtcgtacgatcttctcccggttcttctcagccgccaccgccgccgccgcaccatccaccgtcatctccggttccggttacatctacgccggttataccacctatacgtcgtcacttagctttcgcctcaacaaaacctccgtttcatccttccgatgattaccatcgatttaacccttcttcgctcagtaataataacgacaggagcttcgttcatggttgtggtgttgtagatcgggaggaagatgctgtcgttgttagatctccttcacgaaagagaaaggcgacaatggatatggttgttgctccatctaataatggattcacgagttctggtttcactagcatacctagcagtccctgtcaaactcctagaaaagggggcagagtcaacatcaagtcaaaggccaaaggcaacaagtcaactcctcaaacacccatctcgacaaacgctggttctcctatcacacttactccatcaggaagttgtcgttatgacagttctttaggtctccttacaaaaaagttcgtcaatctaattaaacaagccaaagatggaatgctggacctaaacaaagctgcagaaacattggaggtgcagaaacgacgtatatatgatattacaaacgttttggaggggatagatctcattgaaaagcctttcaagaatcgaatactttggaagggagttgatgcgtgtcctggcgatgaagatgctgacgtatctgtattacagctgcaggcagaaattgaaaacctcgccctcgaagagcaagcattagacaaccaaatcagacaaacagaggaaagattaagagacctgagcgaaaatgaaaagaatcagaaatggctttttgtaactgaagaggatatcaagagtttaccaggtttccagaaccagactctgatagccgtcaaagctcctcatggcacaactttggaagtgcctgatccagatgaagcggctgatcacccacaaaggagatacaggatcattcttagaagtacaatgggacctattgacgtatacctcgtcagcgaatttgaagggaaattcgaagacacaaatgggagtggtgcagcaccaccagcatgcttgcctattgcttctagctcaggatctacaggacaccatgacatcgaagccttaactgttgacaacccagaaactgctattgtgtctcatgatcatcctcatcctcaacccggcgatacctctgatcttaattatttgcaagagcaagtaggaggaatgcttaagattactccctctgatgttgataatgatgagtcggactactggcttctctcaaatgctgagattagcatgacggatatttggaaaactgactctggtatcgattgggattatggaatagccgacgtgagtactccaccaccaggaatgggcgaaatagcaccaacagctgttgactcaaccccgagatgctag

SEQ ID NO: 36 - DNA, 939 bp, Arabidopsis thaliana
atggcgcaacaagggcagggaagcatggaccctgccgctctcgatgatatcattcgtcgtttgttggattacagaaaccctaagcctggtaccaaacaggctatgctcaacgagtctgagatccgtcagctttgcatcgtctctagagagatttttcttcaacagcctaaccttcttgagctcgaagctcctatcaagatctgcggtgatattcatggacaatactcagatctattgaggctgtttgagtatggaggcttcccacctacagctaactatttattcttaggagattacgtagacaggggcaagcagagtttggagactatttgtcttctgcttgcttacaaaatcaaataccctgagaacttttttcttctaagaggaaaccacgaatgtgcttctattaacagaatctatggattctatgatgaatgtaaacgtcgattcagtgtgagactctggaaagtgtttacagattcttttaactgtctccctgttgctgctgttatagacgataagatattatgtatgcacggtggcctttctcccgatttgaccaacgtggaacagattaagaacattaagcgacctactgatgttcctgactctggtttgctctgtgatctgctttggtctgatccaagcaaagatgtcaaaggttgggggatgaatgaccgtggagtctcttacacgtttggccctgacaaagtcgcggagtttctaataaagaatgatatggatctcatctgccgtgcccaccaggttgtagaggatggatatgagtttttcgccgatagacagcttgttacgatattttctgctcccaactactgtggtgaatttgacaatgctggtgctatgatgagtgttgatgaaagtttaatgtgctctttccaaattcttaagcctgctgatcgaaagccccggttcttatag

SEQ ID NO: 37 - DNA, 1548 bp, Arabidopsis thaliana
atggaggtccttgcgagctcttcattatccccaatttcttttactaagcctaacaaaataaaccctaatttctcaatccaggtgaaattgtgggtaaaacaacctccaaagatttcaaaagctagcaaatttagttatgctcgtagtcgtagtaacatttcaaggagcaatgcagcaaacccaggagtcgtgttcgtctgtaatagatttctgtgtgttatcgaaagaaatgatcagaggaaattatctgggaaggttatgatgaaatcttctgttaatttcagacagaatctctctgttgcattagttcggatcgtttctgttctgcttgtctcttccatttctgttgttaccactgattcaccaccatcatggggtcttactgaagagaatcttctcttcctcgaggcttggagaacaattgatcgtgcttatattgataaaacctttaatggacaaagctggtttcgttacagagagactgctttacgaaatgagcctatgaacactcgagaagagacatacatggctatcaagaaaatggtggcaacactagatgatccttttactcgattcttggagcccggaaagttcaagagtttgcggtcggggactcaaggggcggttacgggtgttgggctgtcgataggttaccccactgcatcagatggaccaccagctgggcttgttgttatatcagctgctccaggaggtcctgcaaatagggcggggatattacctggcgatgttattcaaggaattgataatacaaccacagaaactcttaccatatacgatgctgcacagatgttgcagggacctgaaggaagtgcagtggagctagcgattcgcagtggacctgaaacgagactcttaactttgacgcgagagcgggtttctgtgaatccagtgaagtcaagattatgtgaacttcctggttctgggagtaactcccctaagattggctatatcaagctaacaacattcaatcaaaatgcttctagtgcggtaagggaagctattgaaaccttgagaggcaacaatgtaaacgcattcgtcttggaccttcgagacaatagtggaggttctttcccagaaggaattgagattgctaaattttggttagataaaggagtgattgtgtatatttgcgatagtcgaggtgttagagatatatatgatactgatggaagcaatgctatagcaacctctgagcctcttgccgttcttgttaacaaaggcaccgcgagtgccagcgagatattagcaggtgccttgaaagataataaacgtgctctggtttatggagaaccaacttacggaaaaggcaagatacagtcggtttttgagctttctgatggttcgggcttggcagtaacagttgctcgatatgaaacaccagctcacacagatatagacaaagtcggtgtaactcctgatcatccattgccaaagtcgtttccgaaagatgaagaggcgttctgtggatgccttaaggatcctacagctgcttgttatctcaatcaaggcctacttttttctagatag

SEQ ID NO: 38 - DNA, 1573 bp, Arabidopsis thaliana
ggtaccggcgcgccaccatggaggtccttgcgagctcttcattatccccaatttcttttactaagcctaacaaaataaaccctaatttctcaatccaggtgaaattgtgggtaaaacaacctccaaagatttcaaaagctagcaaatttagttatgctcgtagtcgtagtaacatttcaaggagcaatgcagcaaacccaggagtcgtgttcgtctgtaatagatttctgtgtgttatcgaaagaaatgatcagaggaaattatctgggaaggttatgatgaaatcttctgttaatttcagacagaatctctctgttgcattagttcggatcgtttctgttctgcttgtctcttccatttctgttgttaccactgattcaccaccatcatggggtcttactgaagagaatcttctcttcctcgaggcttggagaacaattgatcgtgcttatattgataaaacctttaatggacaaagctggtttcgttacagagagactgctttacgaaatgagcctatgaacactcgagaagagacatacatggctatcaagaaaatggtggcaacactagatgatccttttactcgattcttggagcccggaaagttcaagagtttgcggtcggggactcaaggggcggttacgggtgttgggctgtcgataggttaccccactgcatcagatggaccaccagctgggcttgttgttatatcagctgctccaggaggtcctgcaaatagggcggggatattacctggcgatgttattcaaggaattgataatacaaccacagaaactcttaccatatacgatgctgcacagatgttgcagggacctgaaggaagtgcagtggagctagcgattcgcagtggacctgaaacgagactcttaactttgacgcgagagcgggtttctgtgaatccagtgaagtcaagattatgtgaacttcctggttctgggagtaactcccctaagattggctatatcaagctaacaacattcaatcaaaatgcttctagtgcggtaagggaagctattgaaaccttgagaggcaacaatgtaaacgcattcgtcttggaccttcgagacaatagtggaggttctttcccagaaggaattgagattgctaaattttggttagataaaggagtgattgtgtatatttgcgatagtcgaggtgttagagatatatatgatactgatggaagcaatgctatagcaacctctgagcctcttgccgttcttgttaacaaaggcaccgcgagtgccagcgagatattagcaggtgccttgaaagataataaacgtgctctggtttatggagaaccaacttacggaaaaggcaagatacagtcggtttttgagctttctgatggttcgggcttggcagtaacagttgctcgatatgaaacaccagctcacacagatatagacaaagtcggtgtaactcctgatcatccattgccaaagtcgtttccgaaagatgaagaggcgttctgtggatgccttaaggatcctacagctgcttgttatctcaatcaaggcctacttttttctagataggcgatcgc

SEQ ID NO: 39 - DNA, 579 bp, Zea mays
atggcgagcgacggcgcggcggctacgccagcgaaggttaccccaaagaaggccaatctcctcgacccgcactccatcaagcaccttctcgacgagaccatctccgaggtcgtgaagagtaagggctacaccgaggacacgcggctgggcaactggaagctggggatcggagccgccgtgattgctgtcgccctcctcgctcagttttaccccaagaagttcccgcagaaccgcgatttcctccttggctgcatcgccctgtatgtggtgctgaatgtggtgctgctgatccttagctacaccaaggagaaggatgccatcctattcacgcaccctcctatgggttctttcagcagcactggcctcactatttcttctaaattaccaagattctcggacatgtacactctcacaatagcaagtgcggatccacagtctatctctgcaaacaagccagttcatttcactaagagcgtaacaaagtggtttacaaaggaaggagttcttgtggagggcctgttctggaaggatgtcgagaagctgattgatgactacaacagtgagcgcaagagtaaatag

SEQ ID NO: 40 - DNA, 936 bp, Oryza sativa
atggcgaagcacttcgtgctcaacaccggcgccaagatcccctccgtgggcctcggcacctggcagtccgaccccggcgtcgtcggcaacgccgtctacgccgccgtcaaggcggggtatcggcacatcgattgcgccagtgcgtacaacaacgaaaaggaggtagggttggctctgaagaagctatttgaagagggtgtggtcaaacgcgaagatctgtttatcacgtctaagctatggtgtgatcatcatgccccagaggatgtgcctgaggcactagatgctaccttgaatgacttacagcttgagtacctggatctttacctcattcattggccattcagaaccaagaagggatccagcattggcaaacctgaaagctacttaccacctgacatcccatctacctgggcagcaatggagaagttatatgattctggcaaaagtcgtgccattggtgtgagtaacttctcatcgaaaaaattgggtgacctgcttgctgcagcccgtgtacctccagctgttgaccaggtggagtgccatcctggttggcagcagatgaagctgcataacttttgccagtcaacgggcattcatctttctgcatactcgccgctaggttcacctggttcaacatttatgaacggcaatgtccttaaggaacccatcattatctcgattgcagagaagcttggcaaaactcctgcacaagtggcgctgcgctggaacattcagatgggtcacagtgtactcccaaaaagtgtgagtgaagaaaggataaagcagaacttagatgtttatgactggtctattccagaggacttgcttgctaagttctcggagattaagcaggttaggctgctcaggggcaacttcattgtcaatccacagagcgtttacaagacccatgaggagctctgggacagggaaatttag

SEQ ID NO: 41 - DNA, 1201 bp, Zea mays
aaagcaggctcctgcaggacctgttggaagccggtccagggccgcgatgacgtcgaccgccgccggcgcgtcgtcgtcggcggcgaagagcgagtcctacctgcgggccgacaagatcgacctcgagagcctggacatccagctggagaagcagctggccaagacctgggagaagcacaaggggtcgtacaaccaggggcccagggaggactgggagatcgacctcgccaagctcgagattcgctacgtcatagcgcagggcacctacggcacggtgtatcgcggcacgtatgatgggcaggacgtcgcagtaaaactattggattggggtgaagatggctttgcgtcagaaactgaaactgccacactgcgagcatcatttaagcaggaggttgctgtctggcatgagctcaaccatccgaatgttacaaagtttgttggtgcatcaatgggtactacagaccttaagattccagccaatagttctaacagtggtgggcgcactgagctgccgccaagagcatgttgtgttgtggtcgaatatctcgctggaggatcactgaagcagtatttaataaagaacaggcgaaggaagcttgcatacaaggttgttgttcagatagcactggatcttgccagaggattgaactatctacattcaagaaagatagtacatcgggatgtaaaaactgaaaatatgctgctcgatacacagcgaaaccttaagattgctgattttggtgttgctcgtgttgaggctcagaatccaaaggacatgacaggcgcgactgggacacttggctacatggccccagaggtgcttgaaggcaagccatacaacagaaagtgtgatgtctacagttttggcatatgcttatgggaaatatactgctgtgacatgccatatccagacctcagttttgcagacgtctcgtccgccgtcgttcaccagaacctgcggcctgacatccctcgctgctgcccaagcccaatggcgaacatcatgcggaagtgctgggacgcaaacccggataagcgccctgacatggacgacgtggtgcggttcctggaggccctcgacacgagcaagggcggtggcatgataccagaaggccaggcaggcgggtgcttgtgtttcttcagagcccgtggtccttagaaccaaccaaccctttccagccatagctcgagacccagcttt

SEQ ID NO: 42 - DNA, 1026 bp, Zea mays
atggaccacgcggcggaggcgcagcggacggacctgatgacgatcacgcggcacgtgctcaacgagcagagccgccacccggagtcccgcggcgacttcaccatcctcctctcccacatcgtcctcggctgcaagttcgtcgccgccgcggtcaacaaggccggcctcgccaagctcatcggcctcgccggagagaccaacgtccagggcgaggagcaaaagaagctggatgtactgtccaacgaggtcttcgtgaaggcgctcgtcagcagcggccgcacctgtgtcctcgtgtctgaagagaacgaggaggccatcttcgtcgacccggccctccgcgggaagtactgcgtctgtttcgacccgctggatggctcctccaacatcgactgtggtgtctcaatcggaacgatctttgggatttacatggtcaaagacaaggacaacgtgaccttggaggatgtgctgcagcctggaacaaacatgcttgctgctggctactgcatgtacgggagttcatgcacgcttgtgctgagcactgggaacggagtcaatggcttcactctcgatccttcccttggagagttcattttgactcatccaaatatcaagataccaaggaaagggaagatctattcagtcaacgaagggaacgccaaaaactgggatgggcctacagccaaattcgtggagaaatgcaagtatcctgaggatggttcaccgcctagatccttgagatatatcggaagtatggttgctgatgtccatcgcaccttactatacgggggcatatttttgtacccagcagaccagaagagtccaaacgggaaactacgcgttctgtatgaagtcttcccgatgtcattcctgatggaacaagctggaggccaggctttcacaggcaaacaacgggcgcttgaacttgctcccgctaaacttcacgacagatccccagtgttcctcgggagctacgatgacgttgaggagatcaaagcactgtacgcttcaatgtcaaacagcggttag

SEQ ID NO: 43 - DNA, 1368 bp, Glycine max
atgtctaatttgacttctgcatccggtgaagctagtgcatcttcaggcaacagaaccgaaattggcactgattactcacaacaatactttgctccaccactaagtcaagcacagcctcctccactaaagaaaaagagaaaccttcctggcaacccagacccggaagctgaagttgtcgccttgtctccaaagactctcttggcaactaataggttcatttgtgagatctgcaacaagggatttcaaagagaccagaatctccaacttcacagaagagggcacaatttaccatggaagctgaagcagagatcaagcaacgagattataaggaagaaggtgtatgtgtgcccagaagccagttgcgtgcaccacgacccttcaagggctcttggggacctcactggcatcaagaagcacttctgcagaaagcacggcgagaagaagtggaaatgtgacaaatgctccaagaagtatgctgttcaatcagattggaaagctcactccaagacctgtggcactagagagtacagatgtgactgtggaaccctcttctcaaggagggacagtttcataacacacagagccttctgtgatgcattagcagaggagagttcaagatcagtgacaggcataggcatagtagccaactcaacttcaactcaaccaactgcagcagcagcctctcatcaacaagacatcatccatggtaatagtaacaatttctcattgaagaaagagcaacaagcaggtttcagaccaccttggattggacaaccatcaccctcttctgcttcatcattcttggtctctcatcaagaaaaccctaaccctagaggtggtggtcctggtcccactcttcttcctccttaccaaacagctcctcacatgtcagccacagcgttgctgcagaaagcatcccaaatgggtgcgacgatgagcaaaaccgggtccatgattgggacccaccaacaacaggctcacgtgtctgccaatgccgctttgaatttgtcctcacgtgaccaccagatgacccccactctccatggcttggtacctttcgggaataaagctgttcctgctgttggtaatggtgtttctccttcactccttcaccatatcatcgactctttctcttcaccctttgaagggacttcttttgaggacacttttggtggtgctggtggcgatgccatgacgaaaacaaccaccgccgatgacggtgccagaggaaacaataatgaagccctgacaagagatttcttgggtcttagacctctctctcacactgatatcctcaacattgctggtatgggaagttgcatcaactcctcccaacataaccaaaccccaaacccttggcaaggttag

SEQ ID NO: 44 - DNA, 3070 bp, Synechocystis sp. PCC 6803
ggtaccggcgcgccaccatgtccccatcccagccccacccacccattgctacttttgagccggagagttttctcattctggtggtggatgacgtaaaagagaatatttatgtgatttcggaactgttggaaggggaaggttacagcactacttttgtgacctccgggccggaagctttgcaacgggtgacccaggcccaaccggatctcattctgctggatttgatgatgcccggcatggatgggctggaggtgtgcgatcgccttaaacaagatccccaaaccagggatattccggtaatttttctcactgctagcaacgaaaaacaagatttgctgcaagcctttgccaagggggcagtggactatgtcaccaaaccctttagcccgccggaactgttggctagggtaaaaacccacctggaactgaaacaaaccagggataatctacaccacactctcctggaacaggccaggaccgccgaagccctggcctgtacttccacccgcctgggtatcctggtgcaaaatatgcaagcaggggtgttgatgaccgacgcccagggcaccattgtggtggtcaatcccgaatttgcccggctgtttaatctgggttttcccgccgaccttctgctgggcaaaaatttaacggcgatcgccccccgcattaatggcttgatatcccatggccagggggtaacccacaactttttggcgatcgagtccccggaacccctgctaaaagtggaacttgccctagaggatgggcgcttttttgagcgagattatgtgccgatcatgttgggggatagctcccagggtcatttttggccttaccgggacatcagccaacgtaaacaggtggaaatgattcagggacagtccctggaaatggaacggcgcatgcggcaacaattggccgaacaaaatcaggaattggtggcggccaccacggcggcggaggcagctaatcggtctaaaagtgaatttttggccaccatgagccacgaaattcgcacccccatgaatgccatcatcggcatgaccggattattactagacacggacctaaccactcaacaaaaatatttcgcccaaaccatccgcaacagcggggaaaccctgctcaccttaattaacgatattttagatttttccaagattgaggccggcaaattagacctggaagtgtatccctttgatttggggcaatgcctggaggaagccttggacgtggtggtgccgagcgcccggcaaaaatccctcactctgatccgacgttttctcacccccattccccccaacctccagggggatgtgactcgcctcaggcaaattttggttaatctcctcagcaatgcggtcaaattcaccgaggcaggacaggtcaaggtgacggtggaagtggtggaccacgacgcagctaagggggaatatcaaatctgttttgcggtgcaggatacgggcattggcattgctcctaaccaacaacaggctttgttccaggcctttagccagggcaattcttccattacccgtcgctttggcggcactgggttaggcttggccatttgtgtgcggttgactgctttgatggggggcaccatctgggctgaaagtaatggctgtgtggtgggaaatccccctgaactttggcagatagggcaaccgacgatcgagggttcgactttctatttcacagtcaatttaacggtgctgcccagttgtgcctattctgtccataatttgcgccactccctcttcattgggcgatcagtgttagtggcagattacgatgagggccggggcaccagaatgcgaaatcttttggccagttggcgtctccaagcggagcaaattaccttttcctcccccgctaaactaggggaagatctcaaaagcagattaactcaaaaaaactatggtgccctcatcctccattgcccctatccagagggccggggaaagcagttcaccgattttgacttagggaaaattacaacctgggcccctacggaacaggacattccagtgttagtagccacggatatttatctatccccaggggagcgctacagcggcgacaaaccaccggtgcaagcctggatcaagagtcccattaaccccgatgagcttgaaaataccttggtggacgtgttggggcaaactgagcccccgaccctggtgtctacggaggcaattagcgggcctttgtttccctattcctcctctaatttaactattttgttggcggaggataacctaatcaatcagcaggtagctaagcttttactgaaaaagttggggtacccagtggatgtggtcaataacggtcaagaagctttatcggctttggcaaaaggtgattatgacgtggtgttgatggatgtggaaatgccagaaatggacggtttaaccgccacggagcatattcgacggtcccagggccggagtgaaaggccttggatcattgcggtgacagcctattccatggaaggcgatcgggaaaggtgtttggccagcggcatgaatgattatgtcagtaagcccattcgcctagaagccttacaacaggccctacaagtggccgccactgcgctccagtccaccagccaagatcggatggctactgtttcctgtgttagtgcttttgaggctaaaccatccccttctagtccctgcccagaagatccggctggcacaactttaccccccattgaccaagacataatctgttctctacgggacttggatcgagagaatggtcagttaattcttcgggagattatcgatatctattgccaaacggcgccggaactattgcaacggatcaaactggcgatcgccaatcaagattggggaaatttgagttcggccgcccatacattgggttctagcagtgctaatttaggggcggtactcctggcacaacaggctaaaactttggaaaatctgacccgccaacgggactcccgggccatggacccagggcatttcccgaccttagcggccagctacgaaagggtgcagggagaactgaaaactatgcttgatcgcctctaggcgatcgc

SEQ ID NO: 45 - DNA, 3045 bp, Synechocystis sp. PCC 6803
atgtccccatcccagccccacccacccattgctacttttgagccggagagttttctcattctggtggtggatgacgtaaaagagaatatttatgtgatttcggaactgttggaaggggaaggttacagcactacttttgtgacctccgggccggaagctttgcaacgggtgacccaggcccaaccggatctcattctgctggatttgatgatgcccggcatggatgggctggaggtgtgcgatcgccttaaacaagatccccaaaccagggatattccggtaatttttctcactgctagcaacgaaaaacaagatttgctgcaagcctttgccaagggggcagtggactatgtcaccaaaccctttagcccgccggaactgttggctagggtaaaaacccacctggaactgaaacaaaccagggataatctacaccacactctcctggaacaggccaggaccgccgaagccctggcctgtacttccacccgcctgggtatcctggtgcaaaatatgcaagcaggggtgttgatgaccgacgcccagggcaccattgtggtggtcaatcccgaatttgcccggctgtttaatctgggttttcccgccgaccttctgctgggcaaaaatttaacggcgatcgccccccgcattaatggcttgatatcccatggccagggggtaacccacaactttttggcgatcgagtccccggaacccctgctaaaagtggaacttgccctagaggatgggcgcttttttgagcgagattatgtgccgatcatgttgggggatagctcccagggtcatttttggccttaccgggacatcagccaacgtaaacaggtggaaatgattcagggacagtccctggaaatggaacggcgcatgcggcaacaattggccgaacaaaatcaggaattggtggcggccaccacggcggcggaggcagctaatcggtctaaaagtgaatttttggccaccatgagccacgaaattcgcacccccatgaatgccatcatcggcatgaccggattattactagacacggacctaaccactcaacaaaaatatttcgcccaaaccatccgcaacagcggggaaaccctgctcaccttaattaacgatattttagatttttccaagattgaggccggcaaattagacctggaagtgtatccctttgatttggggcaatgcctggaggaagccttggacgtggtggtgccgagcgcccggcaaaaatccctcactctgatccgacgttttctcacccccattccccccaacctccagggggatgtgactcgcctcaggcaaattttggttaatctcctcagcaatgcggtcaaattcaccgaggcaggacaggtcaaggtgacggtggaagtggtggaccacgacgcagctaagggggaatatcaaatctgttttgcggtgcaggatacgggcattggcattgctcctaaccaacaacaggctttgttccaggcctttagccagggcaattcttccattacccgtcgctttggcggcactgggttaggcttggccatttgtgtgcggttgactgctttgatggggggcaccatctgggctgaaagtaatggctgtgtggtgggaaatccccctgaactttggcagatagggcaaccgacgatcgagggttcgactttctatttcacagtcaatttaacggtgctgcccagttgtgcctattctgtccataatttgcgccactccctcttcattgggcgatcagtgttagtggcagattacgatgagggccggggcaccagaatgcgaaatcttttggccagttggcgtctccaagcggagcaaattaccttttcctcccccgctaaactaggggaagatctcaaaagcagattaactcaaaaaaactatggtgccctcatcctccattgcccctatccagagggccggggaaagcagttcaccgattttgacttagggaaaattacaacctgggcccctacggaacaggacattccagtgttagtagccacggatatttatctatccccaggggagcgctacagcggcgacaaaccaccggtgcaagcctggatcaagagtcccattaaccccgatgagcttgaaaataccttggtggacgtgttggggcaaactgagcccccgaccctggtgtctacggaggcaattagcgggcctttgtttccctattcctcctctaatttaactattttgttggcggaggataacctaatcaatcagcaggtagctaagcttttactgaaaaagttggggtacccagtggatgtggtcaataacggtcaagaagctttatcggctttggcaaaaggtgattatgacgtggtgttgatggatgtggaaatgccagaaatggacggtttaaccgccacggagcatattcgacggtcccagggccggagtgaaaggccttggatcattgcggtgacagcctattccatggaaggcgatcgggaaaggtgtttggccagcggcatgaatgattatgtcagtaagcccattcgcctagaagccttacaacaggccctacaagtggccgccactgcgctccagtccaccagccaagatcggatggctactgtttcctgtgttagtgcttttgaggctaaaccatccccttctagtccctgcccagaagatccggctggcacaactttaccccccattgaccaagacataatctgttctctacgggacttggatcgagagaatggtcagttaattcttcgggagattatcgatatctattgccaaacggcgccggaactattgcaacggatcaaactggcgatcgccaatcaagattggggaaatttgagttcggccgcccatacattgggttctagcagtgctaatttaggggcggtactcctggcacaacaggctaaaactttggaaaatctgacccgccaacgggactcccgggccatggacccagggcatttcccgaccttagcggccagctacgaaagggtgcagggagaactgaaaactatgcttgatcgcctctag

SEQ ID NO: 46 - DNA, 798 bp, Arabidopsis thaliana
atggaagtaacttcccaatctaccctccctccagggttcagatttcatcctaccgacgaagaactcatcgtttactatcttcgaaaccagaccatgtctaaaccatgccctgtctccatcatcccagaagttgatatctacaaattcgacccatggcaattacccgagaaaacagagtttggagaaaatgagtggtatttcttcagccctagagaaagaaaatatccaaacggagtcagaccaaaccgggcagctgtttccggttattggaaagcaaccggtacagacaaagccattcacagcggttcaagtaacgtaggtgtcaagaaagctctagtcttctacaaaggtagacctcctaaaggaatcaaaactgactggatcatgcatgagtatcgtctccatgattcacgtaaagcatcaacgaaacgtaacggttccatgaggttagatgaatgggtactgtgtaggatatacaagaagagaggagcaagtaagcttctgaatgagcaagagggtttcatggacgaagtactaatggaggatgagacaaaagttgtagttaacgaagcagagagaagaactgaagaagagataatgatgatgacgtcgatgaaacttccaaggacgtgttcgctggctcatttgttggaaatggattacatgggacccgtctctcacattgataattttagtcagttcgatcatcttcatcaacctgattcggagtctagttggttcggggaccttcagtttaaccaagacgagatcttaaaccatcatcgtcaagactatgtt

SEQ ID NO: 47 - DNA, 1838 bp, Saccharomyces cerevisiae
aaaaaagcaggctcctgcaggaccatgttatcactgtctgccaaaaatcacttcacagtgagtaattctataactcacgttattaagtcatatcatataaggactctcacttcaagcgcagaaaaaatgccacatatcactactcctttttctacctcagccagtagtacaaagttaaaagctttcaggaaagttagacccgtcctacagagacatagctcttcctggattgttgctcaaaatcatagacgttcattatctggtcaatcttcgctaaacgacctgcgtcatttgaatcgctttccacaccacacgttgaaaacttcgaataacgagttttatcccgccgaacaattgactttggaagacgtaaatgaaaatgtcttgaaggctaagtacgccgttagaggtgccatcccaatgagagctgaagaattgaaagctcaactggagaaggatcctcaatctctgccatttgacaggattatcaacgccaatattggtaatcctcagcaactacaacagaaacctctgacttactacagacaggtcttgtctctcttacaatacccagaactattaaaccaaaacgaacagcagctagttgattcgaaattgtttaaactagatgccattaaacgtgcaaagagtttaatggaagatatcggtggttctgttggtgcttactcttcttctcaaggtgtagaaggtataaggaaaagtgtcgctgaatttataacgaagagggacgaaggcgagatatcatacccagaggatattttcctaactgctggtgcatccgcagctgtcaattacttgttatcaattttctgtagagggccagaaacgggtgtcttgattccaattcctcaatatccattatataccgctactctagctttgaacaattctcaagctttaccatactatttagatgagaattcaggttggtcaactaatccagaagaaattgaaactgtcgtcaaagaggctatacagaacgaaatcaaacctacagttctagtggttatcaatccaggtaatcctacaggagctgtcctatcacctgagtctatagctcagatttttgaagtcgcagccaagtacggtacagtagtgatagctgacgaagtttatcaagaaaatatcttcccgggcaccaagttccattctatgaagaaaattttgagacatttacagagggaacatccaggtaaattcgataatgttcagctagcttctttgcattcgacttctaagggtgtttctggtgaatgtggtcaaaggggtggctacatggaactcactggattcagccatgagatgagacaagttatcttgaaactagcctcgatttcattgtgtcccgttgtcacaggtcaagctttggttgatttgatggttcgtccaccagtggaaggggaggaatcattcgagtcggaccaagcagaacgtaactccatccatgaaaagttaattacaagagcaatgacactgtatgagacatttaactctttagaaggcattgaatgtcaaaagcctcaaggtgccatgtatttattccctaagatagacttacctttcaaggcagttcaagaagctcgccacttagagttaactccggatgaattttattgtaagaagttgttagaatctactggcatttgcactgttcccggttctgggtttggtcaagaacctggtacttaccatttaagaacaacatttttggcacctggtctggaatggattaagaaatgggaaagtttccataaagaattttttgaccaataccgtgactagctcgagcctgcagggacccagctttcttgtacaaa

SEQ ID NO: 48 - DNA, 1538 bp, Glycine max
aaaaaagcaggctcctgcaggaccatggatccttacaagctccggccatccagcgccttcaattctcccttctggactacaaattctggtgctcctgtttggaacaacaactcctctttaaccgttggagctagaggtccaattctgcttgaggattatcatcttgtggagaagcttgcaaactttgacagggaacgtatcccagaacgtgttgtccatgccaggggagctagtgcaaagggtttctttgaggtcacacatgacatttctcacctgacatgtgcagatttccttcgagcccctggagttcagacgcctgtaattgttcgtttctcaactgtcattcatgagcgtggtagccctgaaaccttgagggaccctcgaggttttgccgtgaagttttacaccagagagggtaactttgaccttgttggaaacaaccttcccgtcttctttgtacgtgacggcatgaaatttccagatatggttcatgctcttaaacccaatcccaagaaccacatccaagagaattggaggatccttgacttcttctctcactttccagaaagccttcacatgttcacctttttatttgatgatttgggtgttccacaagattacaggcatatggatggttttggagttaacacatatacgctgatcaacaaggctgggaaagcagtgtatgtgaaatttcactggaagaccactagtggtataaagtgtctattggaggaagaggccattaaggtgggaggagccaaccacagccatgccactcaagacctccatgattcaattgctgctggtaactatcctgagtggaaactgtttgttcagacaatagatcctgagcacgaagacaaatttgactttgaccctcttgatgttactaagacttggcctgaggacattatacccttgcagcctgttggtcgcttggtcctgaataagaacatagataatttctttgctgagaatgaacaacttgcattttgccctgccattgtggttcctggtgtatactactcagatgataagatgcttcaaaccaggatattctcttatgctgattcacaaaggcacagacttggaccaaactatctgcaacttcctgctaatgctcccaagtgtgctcaccacaacaatcatcatgaaggtttcatgaatttcattcacagggatgaggaggttaattacttcccttcaaggtatgatcctgttcgtcatgcagaaacgttccccatacctcctgctatctgcagtggaaggcgtgaaaagtgtggaattgagaaggagaacaactttaagcagcccggagagagataccgatcttgggcacctgacaggcaagatagatttaatcgccgatgggttgatgctttatctgacccacgggtcacccatgaaatccgcagtgtctggatatcttactggtctcaggctgaccgttctctaggccaaaagatagcatctcgtctgagcatgaggccaaatatttagctcgagcctgcagggacccagctttcttgtacaaa

SEQ ID NO: 49 - DNA, 2695 bp, Zea mays
acaagtttgtacaaaaaagcaggctcctgcaggacccgtccgcctccgatggcgtcggcggcggggtcctcgaacgtgatgctcgcgatcaacgagaagaaaacgatcaccactgacctctaccgcccgctgcgcctctacatcgcctccacctactcggaacgcgaggccgctgcggccgacgacgaccttagcgtggtgtgcgacctccgcgctgctgtcgagaagccctccctcccggatccgtcctccctcgagcagcgccgcgacgcgctcctcgcctacgcgcgggctctggcactcgtggagccccgcttccccatctcccccgatcgcgcccacgtccactccctcaccttcacctggcacgacgcattcaaggggaacaagaagtgcgccctcgcctccatccacctcgagaaggcatccgtgctctttaacctcggcgccgtctactcccagatcgcgctcgccgcggaccgctcgactgacgtcgggatcaggatcgcgtgcggcgccttccagagtgcggcgggggcgttcgcgtggctcagggagagcggggccgcggcgaaggctgtcgctgcggggaccaccaccgtggacatcacgcccgagtgcgccggcatgctggagaaactcatgctcgcgcaggcgcaagaatgcttcttcgagaaggtcataggtggagggaagccacccgcgctgtgctccaaggtggcgcggcaggttggcatactctatgaagaagcatacacagctctcagtgcatctcctctaagtcagcactttgataagacatgggtgtcccatgtccagcttaaagctgctcaattctacgccgatgcttgctacaggtattcactggatcttcatgagaaagaagaaattgctgaggaaattgcacgtttaaagattggtatgagtgccttggcagatgctaagaagactacgaagggagttgctgcccaacttctggattccgtcaacaagctggaaagtaacatgaaaaccaacttggaaagggctatgaaggagaatgatcgtgtttacttgatgcgggttccagctgctggttccttgggtgccctccctgcagcgtcccttgtaaaacctacctctttggctgaagttttagatgccagcaaggaaaggcttttttcatcacttgtgcctgatggcagcatgaaagcactttctaagtacacagagatggtagataatagtatccggacccaggctgagaaattgcagcaagctagtgagatcactagagtcaggctgaaggaaatggacttaccagattctattctttcattggaaggaaatataaccttgcccatggatctgaaggaagacgtagaggctgtgcagataagcggtggccctgctggcttagaatctgagttgcagcaacttagggatttgagcagggtcaatcaggaactacttgtccagactgaagagcttctacagaaggaggcgaatgaagacgctcaatttcgtacacaatttgggagtcgttggactagacctcaatcaagcaccctaacaaagaatattcaggatagattgaatctgtttgcttctaatttgaagagagctgctgatagtgattctctgattgaacgaggcgtgaaggagaactattcattgatgtctatccttgacaaaagaccgatagagtctgcacttccaagtatttccaggcctatcatgtccttggatggaaatgaagatgccattgttggagccctgaaacaaagcttgagacaactggagtctcttggcgcacaaagggcaggtcttgaagacatgctcaaagaaatgaaaagaaaggatgatatattgcctaagttgatggttggcgtgggatcacatgatgatcttttcaagaaggagattgctaagtatgatcctatatgtgctgatattgctgataacattgtggcacaggaacaattgttgctacaaatacaggcacaaaacgagcaatttgctgctgtattcaacctagaggattacaaagctgcccgtgagagatgttacaagcaaatcgctgctgctgttgtgaaataccaggagtttaaaaagaacatcaacgagggcctaaacttttatgtgactttacaggaagcaattggcaaaataaaacagcagtgcagcgacttcataatgacccgaaacattcagtgccgtgaaatgatggaagatgtgcagaggaagctacccggcttcagattctcgtcgtccagccgctcctctatgcagaggaatgctgcttctgtgccacctgacgagagcagcccatcaccgccaccgccgcatgcccaggctccctatgcctctccaccaggggtagactcgaggcatggatattctcaaccggaggcaagacctgcatactcgcagccataccccccatcctatggcgcgacaccgcaacagccgacgtatggtgcacaacaccccgggcagtaccagccgcctcctggccatgactgcggtcagccggcatatcctggatggcgcgggccatacccatactacaatgccccccagccgcagcaatctgtgccatgtccacaggcgccgtacaatgccactggggcttaccctccgcaccagagcaactattaccgacctcaataagtgctgcaatagctcgagacccagctttcttgtacaaagtggt

SEQ ID NO: 50 - DNA, 719 bp, Zea mays
atgggacttgtatccgatgaactttacaagaatgctagggagaactgtggtggaaagtatagtgctccactgaatgctgtatgtgcagaggctgtccaagctatcaacaattgcacacgggatatcaataagcaatacatcttggatcctgcttgcccggatgatgatctgttgagccccaagactgtagcagagacagatggaacgagcaggttgatgctagagtctgcagattttctacttggttccaaatgtgcagaagctttatacattctatcctacgcttgggggaatgatgatacagttcaggagagcctcggtatccgcaaggggacaattggagcatggaaacgatgcagccatgcattgccttacaattatgatatccagagtgtagtggattaccattcaaggctagccacaaaaggatacagggcgctgatatacagcggcgaccacgatgctgttgtaccccatgttggcacacaagcatggattagatacctcaacttgacaatcgttgatgattggcgaccatggtacgttggaggccaagttgctggattcacaaggagttatgcgagcggcctaacatttgccactgtgaagggtgctggacatgttgcgccgttgtataagaccttggaatgccaaaaaatgtttataacatggatttcagggaatcctctttagctcgagacccagctttcttgtacaaa

SEQ ID NO: 51 - DNA, 1658 bp, Zea mays
acaagtttgtacaaaaaagcaggctcctgcaggacctcctctctgccggcgccggcgatgggcaactcgctggggtgctcggcctccggcgagcggctcgtctcggcggcgcgcgacggggacgccatcgaggcgcggatgctgctggagctcagccccgcgctcgcgcgctactccaccttcggcggcctcaacactccgctacacttcgccgccgccaagggccatctcgacattgtcacgatgctgctggagaaaggcgctgacgttaacgcccgcaactactgcggccagactgcgctgatgcatgcttgtcggcatgggcactgggaggtggtgcagatgcttcttctatttagatgcaatgttactagggcagattacttgagtggtcgaacagcactgcattttgctgcacatgatggatttgttcggtgtattagacttttagttgcagactttgtcccgagtgtggccttggaggatattgcttcttctgtggtggatggtggtgattgccagacaaacagtgggagcagtcctaattcatcgtcggggcagaagtttaatgaatcggcccgtgtgaggtacatcaacaaacctgcagatggtggtgttacagcacttcacatggcagcattgaacggtcacttagattgcatgcagttgttgattgacttgggcgctaatgtctcagctgtctcattcccctatggcactactgcaaatttgataggagctggcagtacaccgttgcattatgcagcaggtggggggaaacaagaatgctgtgagctactaatatcaaaaggcgctagcaggttgacactcaattgcaatgggtggcttcccgttgatgttgctagaatatttggacggcgctctttggagccattactttctccaaattcacactcgaatgtccctgtatttcaaccgtccagttatcttgccttgccactcatgagtatacttaatatagccagagaatttgggttgcagcataccacaccctcgattgatgataatgatctatgttcagtttgtctagaaaggtcttgttctgttgttgctgaaggttgcagtcatgaattctgcatcaaatgtgctctctacctctgctcaaccagcaacatccgtgtcgagttcacaggcccacctgggtccatcccgtgccctctttgtcggaacggcataatgtctttcaccaagttaccaagcacaccaacagaagggcttaaatcaggttcagcgctcacattctgcaacccatgcatactgaacacccggtccatggactcgccagccactttctccaaagccgaaatcagacggaaccgtgtggcagctgtctcttcggagctggtctgtccaatcacctgcagcccattcccgtcgtccgccctcccaacctgcaggtgcagcgacgacgatccatgcggcgatacagacgtgcaggatggtcccgagttccagtctccccggccctcgcacagcgcaagcatggagctggacaagaggggggagggggatctagaccgggccagctgctcaggcatgttctggagccgaagaagctgccacagggagcagcagtgtgatgcggagatcaacgcttgattcttagctcgagacccagctttcttgtacaaagtggt

SEQ ID NO: 52 - DNA, 1121 bp, Zea mays
atgcgccggtggttttgctgcacgaggtttaatgcttcataccgtgaacatgaaaatgaacgtcccatcactccagaggagaaagaaggaaatggtttttctgttaaaagtgatcccatcaaggcaccaccttccattgaagtccctgaattatcatttgaagaattgaaagaaaagaccgacaattttggttcaaaggctttgattggtgaggggtcatatggaagagtatattatgctattctggacagcggaaaacatgttgctgttaaaaagcttgacgcttcaacagaccctgaacttgataatgagtttttgacacaggtatccattgcctcaaaactaaaacatgataattttgtggagatgcttggatattgtgtggaaggaaatcagcgtctagtggtctatgaatttgcgacaatgggttctctgcatgatatcttgcatggaagaaagggtgttccaggtgcacagcctggcccagcacttgattggatgcagcgggttaagattgctattgatgctgctaaagggctagagtatcttcatgaaaaggtgcagccttcaatagtccaccgggacatacggtctagcaatattcttctgtttgaggactacagagcgaaaattgcagatttcaatctttcgaatcagtctccagatatggctgctcgtttgcattctactcgtgtccttggaaccttcggctaccatgctcccgagtatgccatgactggccagctaactcagaagagtgatgtatatagctttggggttgttcttttagagcttctaacaggaaggaaaccagtagatcatacaatgcctagaggtcagcagagtctggttacatgggcaacacctagattgactgaggacacagttaaacaatgtgttgatccaagattgaagggagaatatcctccaaagggagttgccaagcttgcggctgtggcggcactgtgtgtgcaatatgaatctgaatttagacccagcatgagcatcgtagttaaggcactctctccccttcttcaacataaaccgcaaccaccggcagccactactgacgctacagcaccgtcagatgcctagctcgagacccagctttcttgtacaaa

SEQ ID NO: 53 - DNA, 941 bp, Zea mays
aaaaaagcaggctcctgcaggaccatggagacctctgcagcaaccccgacccggccgccacaccaggcggccacttccccatcgccatcgccctcgtcgtcgctgaggctgtggaggccagcggcgcagcgcaacatgcgcaatcagtggtcccatctgagcgccgccaaggagcagtggctggccgccgttgctgacggccgtgcccacgcctccgcgctcgtcaacgtccacctctcctgcaggaacatgccgacgatggatttgggggtgctcaaggatatgccggggatccgcgataaggcgaactccaagttggcgcttagagaggagcaatacagcggcatgcttctgtcggcctacaaggagatggtccgtcagctgtcctacttggttgaagcttcccattctatgcgccgtttttctaaagcggctccaaattgccccatcacacagttttctgaccgccaagataatttgaatgattcaggggatggtggaggagccccagtattcaaatggttctctgtattagaatttgagagtcttgcccaggagcttgttcagatgtttgtttcagagcaaaagttgaagaggctgctactcttggaatttctctcgattgctttaaaggaaggtgtagaactccagacatcattaaattggggtgatgaactatatgatggtgaatcaaataaacttcagagtattggccttcagtcaggagatgcctactcaccgcctgaaaattggtgtgcagaacgtttagggagtcagagacctggcaatctccctctgcacgaagttttacaggtttatttaaccacttggcatgctaatatgaacatcaaccggagtagaattgatgaaatatttgagcttgttgaggaggagatgaagattaaactgtcttagctcgagacccagctttcttgtacaaa

SEQ ID NO: 54 - DNA, 1769 bp, Saccharomyces cerevisiae
aaaaaagcaggctcctgcaggaccatgtgtggtattttcgccgctttcaggcacgaagacgtgcatagatataagccaaaggctctacaactatcaaaaagaatcagacaccgtggtccagattggtccggtaatgctatcaagaactccactatatttgttcatgaaagactagccattgtcggtgtggaatccggtgctcaaccaattacttcttcagacggagagtacatgctatgtgttaacggtgaaatctacaaccacattcaattaagagaagaatgcgcagactacgagtttggaacactgagtgactgtgagcctatcatcccaatgtacttaaagcacgatatcgacgctcctaagtacttggatggtatgtttgcttggactctttacgacgctaaacaagatcgtattgtggcagccagagacccaatcggtattacgacattatatatgggacgctcttccgcttctccaaagaccgtttattttgcatccgaactaaaatgtttgactgacgactgtgacactatcactgcattcccaccgggccacgtatacgattctaagactgacaagatcacccgttacttcacaccagattggctggacgaaaaacgcattccttccaccccaatagattacatggcaattagacactccttagaaaaagccgttagaaagagattaatggccgaagtcccatacggtgttctattgtcgggtggtttggactcctctttaatcgcttccattgctgcccgtgaaactgcaaaggccactaacgatgtcgaaccatcaacttacgatagtaaggcaagacatctagcaggtatcgacgatgacggtaagctacacactgctggttggacaagtctccattcctttgccatcggtttaccaaatgctccagatttgcaagccgcaagaaaggttgccaaattcatcggctctattcatcatgaacacacctttacattacaagaaggtttggatgctttggacgacgtgatctaccatttggaaacttacgacgttaccactatcagagcttccactccaatgttcttactatccagaaagattaaggcccaaggggtcaagatggttctttccggtgaaggttccgatgaaatcttcggtggttatctatatttcgcacaagctccttctgcggcagaatttcacactgaatccgtgcaacgtgtcaagaacttgcatttggcagattgtttgagagctaacaagtctacgatggcttggggtctagaagctcgtgttccattcttagacagagaatttttgcaattgtgtatgaacatcgatccaaatgaaaagatgattaaaccaaaggaaggacgtattgaaaagtacattctaaggaaggcattcgacaccacaggagaaccagatgctaagccatatttaccagaagaaattttatggagacaaaaagaacaattttccgacggtgttggttactcctggatcgacggattaaaagataccgccgaagcagtcatttcagatgaaatgtttgccagtccaaaggccgaatggggtagtgacattccaaccacaaaagaggctttctggtacagactaaaattcgatgctttgttccctcaaaagaccgtggctgacaccgttatgagatggattccaaaggccgactggggttgtgctgaagatccttctggtagatatgcccaaattcatgaaaaacatatcgaatagctcgagacccagctttcttgtacaaa

SEQ ID NO: 55 - DNA, 568 bp, Oryza sativa
acaagtttgtacaaaaaagcaggctcctgcaggaccatggagagcgccatgttcgggctggagacgccgctgatgacggcgctgcagcacctgctcgacatccccgacggcgagggcggcgccgccgggaagcagggcgcgaccggtggcccgacgcgtgcgtacgtgcgcgacgcccgcgccatggcggcgacccccgccgacgtgaaggatctgcccggggcgtacgcgttcgtggtggacatgcctgggctcaagtcctccgacatcaaggtgcaggtggaggaggagaggctgctggtgatcagcggggagcggcggcgcggcggcggggaggaggagaaggaggagtcgtgcaagtacctgcggatggagcggcggatgggcaagttcatgcgcaagttcgtgctccccgacaacgccgacgtcgacaagatctccgccgtgtgccaggacggcgtgctcaccgtcaccgtcgagaagctcccgccgccggagcccaagaagcccaagaccatcgaggtcaaggtcgcgtagctcgagacccagctttcttgtacaaagtggt

SEQ ID NO: 56 - DNA, 473 bp, Saccharomyces cerevisiae
aaaaaagcaggctcctgcaggaccatgtgttgctactgtgtttgttgtaccgtttctgactttatactgtatattgttgcgttttttttccccccagctgcagtccttcttcgatctgggccttgttcatctgatttcctcctgaatgtattgctaacgctactgggatttttgcccggtatgttacacgcattctactacatcacaattacaagtcctttaaggaacgctgaatacgtctattattaccagcaaggctgggtggatagcgaaagaaacgttccttcgaatcgtcctcaaaactcgcagaccccccaaaaccgcccacaacaaggaagctccgctagaaacgtatacccgagcgttgaaactcctctgttacaaggcgcagctccccatgacaacaaacagtctctggttgagtctcctcctccttatgtgccatagctcgagacccagctttcttgtacaaa

SEQ ID NO: 57 - DNA, 1154 bp, Oryza sativa
aaaaaagcaggctcctgcaggaccatgagcagcacagctccactcctcacaccctacaagatgggaagatttgatctttcccacagggtagttctcgcaccactgacaaggcagcgatcctatggtaatgttcctcagcctcatgccattctgtactatcagcagagaacaaccaaaggaggccttttgattgctgaggccactggaatctcggacactgctcaagggtacaaagatactcctggtatttggacaaaggagcaagtggaagcgtggaagccaatcgtagacggcgttcatgccaaaggaggaatatttttctgtcagatttggcacgtaggaagagtctctaataacacttttcagcctaatgggcaggctccaatttcgagcaccaataagtcactaaaacctgcagtaagagccaacggcatagatgtggctactttctcaactcctaggcgattagagactgatgagatcccttttgtcgtgaatgattacagggttgctgctagaaatgcaattgaagcaggatttgatggtgttgaaatccatggagctcatggttatttgatcgatcagtttctaaaagaccaagtcaatgatcgttctgacaaatatggtgggagcttagagaatcgctgccggtttgcgctagaagtggtccaagccgtaactgatgaaattggagctgacaaggttgggataaggctgtcaccctttgccagctattcagaggcagcagactcaaacccagaagctctaggcctatacatggcaaatgcactaaacaagtttggtatcctctattgtcacatggtggagccacggatggtaaagcttggtgaaaagtttgaaaccccccatagtcttcgtccaatcagggatgctttcaagggaacgtttattgctgctggtggctacaataaggaggatggaaataaagcagtctccactggatatactgatttggttgcttatgggcgcttgtttttgtctaatcctgatttgcctgagaggtttgaaatagatgctcctctcaacaaatacaacagagagactttctacatctctgatccagttattggatacactgactacccatttcttccatcagatgtctagctcgagacccagctttcttgtacaaa

SEQ ID NO: 58 - DNA, 1172 bp, Glycine max
aaaaaagcaggctcctgcaggaccatggctcttgagtcagctcctgcttcagctgacatcagaggagttcacactcatggtggaggctatgttcagtataatatctatggaaacctctttgaggtctctaggaagtatgtccctcctattcgccctgtgggaagaggagcatatggaattgtttgtgctgctgtaaatgcagagacgcatgaagaagttgccattaagaaggttggcaatgcatttgacaacagaatagatgccaaaaggaccctacgagaaattaaacttcttcggcacatggaacatgaaaatgtgatagcccttaaagacattattcgaccaccacaaaggtataacttcaatgacgtgtacattgtttatgagttaatggatactgatctgcatcaaataattcaatccaatcaacaattgactgatgatcattgtcggtattttctgtatcagttgttacgaggactcaaatatgtacactcagcaaatgttctgcaccgtgatctaaagcctagcaacttgctactgaatgccaactgtgatcttaagattgcagactttggtctcgctagaactacatctgagactgatttcatgactgagtatgtggttactcggtggtaccgagctccagagttacttcttaattgctcagaatatactgccgccattgatatttggtctgttggttgcatccttggtgaaatcataacaagacaacccctatttctggggaaagattatgttcatcagctcaggctgattacggagctcataggctcacctgatgacactagccttggatttctacgaagtgataatgctcgtagatatgtgagacagcttccacaatatccaaggcaacaatttgctgctagatttccaagtatgtctcctggtgctgttgatttgttagagaagatgcttgtctttgatccaaataggcgcatcacagttgaagaagctctgtgtcacccatacttggctcctcttcatgatattaatgaggaacctgcttgcgttagacctttcagttttgattttgagcaaccatctttcactgaagaagatatcaaggaactcatctggagagaatctgtgttattcaatcctgatccacctatttattagctcgagacccagctttcttgtacaaa

SEQ ID NO: 59 - DNA, 1559 bp, Arabidopsis thaliana
aaaaaagcaggctcctgcaggaccatggtgctctcccacgccgtatcggagtcggacgtctccgtccactccacattcgcatcacgttacgtccgtacttcacttcctaggttcaagatgccggaaaactcgattcctaaggaagcggcgtatcagatcatcaacgacgagctgatgcttgacgggaatccacggttgaacttagcctcctttgtgacgacatggatggagcctgagtgtgataaactcatcatgtcctccatcaacaagaactatgttgacatggacgagtaccccgtcaccaccgaacttcagaaccgatgtgtgaacatgattgcacatctattcaatgcaccgttagaagaggcggagaccgccgtcggagtaggaaccgttggatcatcggaggccataatgttggccggtttggccttcaagcgtaaatggcagaacaagcgcaaagctgaaggcaaacccgtcgataaacccaacattgtcaccggagccaatgttcaagtgtgttgggagaaattcgctaggtactttgaggttgaacttaaggaagtgaaattgagtgaaggatactatgtgatggaccctcaacaagctgttgatatggttgatgagaacaccatttgtgttgcggccattcttggttccactcttaatggagaattcgaagatgttaaactcttgaacgatctcttggtcgaaaagaacaaagaaaccggatgggatacaccaatccacgtggatgcggcaagtggaggattcattgcaccgtttttgtatccggaattggaatgggactttagacttcccttggtgaagagtatcaatgtgagtggtcacaagtatggacttgtgtacgcagggattggttgggtgatctggagaaacaaagaggatttgcctgaggaactcatcttccatatcaattatcttggtgctgaccaacccacctttactctcaatttctccaaaggttcaagtcaagtcattgctcaatactaccaacttatccgattgggccacgagggttacagaaatgtgatggagaattgcagagagaatatgatcgtcctaagggaaggacttgagaagacagaaaggttcaacatcgtctcaaaggacgagggagtgccacttgtcgctttctccttgaaagatagcagctgtcacactgagttcgaaatctccgacatgcttcgcaggtatggatggatagtgccggcctacacaatgcctccaaatgcacaacacatcactgttcttcgtgtggttatcagagaagatttctcgagaacactcgctgagagacttgtgatcgatatagagaaagtgatgcgtgagctcgatgagcttccttcgagagtgattcacaaaatatcacttggacaagagaagagtgaatctaacagcgataacttgatggtcacggtgaagaagagcgatatcgacaagcagagagatatcatcactggctggaagaagtttgtcgccgacaggaagaagacgagtggtatctgctagctcgagacccagctttcttgtacaaa

SEQ ID NO: 60 - DNA, 1594 bp, Arabidopsis thaliana
ggaagttcatttcatttggagaggaccaggtggtaccatggtgctctcccacgccgtatcggagtcggacgtctccgtccactccacattcgcatcacgttacgtccgtacttcacttcctaggttcaagatgccggaaaactcgattcctaaggaagcggcgtatcagatcatcaacgacgagctgatgcttgacgggaatccacggttgaacttagcctcctttgtgacgacatggatggagcctgagtgtgataaactcatcatgtcctccatcaacaagaactatgttgacatggacgagtaccccgtcaccaccgaacttcagaaccgatgtgtgaacatgattgcacatctattcaatgcaccgttagaagaggcggagaccgccgtcggagtaggaaccgttggatcatcggaggccataatgttggccggtttggccttcaagcgtaaatggcagaacaagcgcaaagctgaaggcaaacccgtcgataaacccaacattgtcaccggagccaatgttcaagtgtgttgggagaaattcgctaggtactttgaggttgaacttaaggaagtgaaattgagtgaaggatactatgtgatggaccctcaacaagctgttgatatggttgatgagaacaccatttgtgttgcggccattcttggttccactcttaatggagaattcgaagatgttaaactcttgaacgatctcttggtcgaaaagaacaaagaaaccggatgggatacaccaatccacgtggatgcggcaagtggaggattcattgcaccgtttttgtatccggaattggaatgggactttagacttcccttggtgaagagtatcaatgtgagtggtcacaagtatggacttgtgtacgcagggattggttgggtgatctggagaaacaaagaggatttgcctgaggaactcatcttccatatcaattatcttggtgctgaccaacccacctttactctcaatttctccaaaggttcaagtcaagtcattgctcaatactaccaacttatccgattgggccacgagggttacagaaatgtgatggagaattgcagagagaatatgatcgtcctaagggaaggacttgagaagacagaaaggttcaacatcgtctcaaaggacgagggagtgccacttgtcgctttctccttgaaagatagcagctgtcacactgagttcgaaatctccgacatgcttcgcaggtatggatggatagtgccggcctacacaatgcctccaaatgcacaacacatcactgttcttcgtgtggttatcagagaagatttctcgagaacactcgctgagagacttgtgatcgatatagagaaagtgatgcgtgagctcgatgagcttccttcgagagtgattcacaaaatatcacttggacaagagaagagtgaatctaacagcgataacttgatggtcacggtgaagaagagcgatatcgacaagcagagagatatcatcactggctggaagaagtttgtcgccgacaggaagaagacgagtggtatctgctaggcgatcgcgggccctgatcacctgtcgtacagtatttctacatttgat

SEQ ID NO: 61 - DNA, 553 bp, Glycine max
acaagtttgtacaaaaaagcaggctcctgcaggaccatgtctctaatcccaaacttcttcggtggccggagaaacaatgtgttcgatcctttctcactggacgtgtgggatcccttcaaggattttcctttcccaaatacgctttcttcagcttccttccctgaattttctcgggaaaattcagcatttgtgagcacccgtgtggactggaaggagaccccagaggcgcacgtgttcaaggcagatattccaggactgaagaaggaggaagtgaaggtgcagattgaagacgataaggttcttcagataagcggagagaggaacgttgagaaggaagataagaacgacacgtggcatcgagtggagcgtagcagtggcaagttcatgagaaggttcagattgccggagaacgctaaagtggagcaagtgaaggcttctatggaaaatggggttcttactgtcactgtccccaaggaagaggttaagaagcctgatgttaaggccatagaaatctctggttagctcgagacccagctttcttgtacaaagtggt

SEQ ID NO: 62 - DNA, 1840 bp, Zea mays
acaagtttgtacaaaaaagcaggctcctgcaggaccacaccgccgaccatgtaccgggcggcggctgtcatctcgaggtcctcatcagcactgcggaggcagctcgcgcggggcgtggccggggagctgccgcgtctgttggcgcgagggtatgcggccacggcgaaggaggtgtccttcggcgttggcgcccgcgccgccatgctgcagggcgtcaacgacctcgccgacgccgtcaaggtcaccatgggccccaaggggcgcactgtgatcatcgaggggtcccataaaggtcccaaggtcacgaaggacggggtcactgttgcaaaaagcgtggagttcgaggatagcgcgaagaatgttggggcgaatctggtgaagcaagttgctgatgctacgaacaaagctgcaggggatggtaccacctgtgcaactgtgcttacacaggcaattcttactgaaggatgcaaggccgtggcagccggtgtcaacgttatggacttgcggaatggtataaacaaggcaataaatgctatcactgctcacctcaaaagtaaagcgtggaagattaattctccagaagaaattaaccaggtagcaaccatttctgcaaacggtgaaaaggaaattggagatctaatatcaaaagccatggaaaaagttggaaaggatggagtcattactattgttgatggcaaaacattggacaatgagcttgaagcagtacagggaatgaagctgtccagaggatacatatctccttactttgtgactgatcaaaagactcagaaatgtgagatggagaaccctcttattcttatccatgacaagaaaatctcaaacatggattctctccttccagcattagaaatttctatcaagaatcgcaagcctcttctcattgttgctgaggatgttgaaggagatgctctgtcaatgcttgtactgaacaagcatcgtgctggactcaaggtatgtgctgtcaaagctcctggatttggtgaaaatagaaggcacaatctagatgacatggctgtgatgactggaggagaggttattagcgaggaacgcggtcttgatcttggcaaagttcaattacaaatgcttggcactgctaaaaaggtaactgtatcccttgatgatactatcatcctagatggtggaggtgacaaacagcagatagatgagaggtgccaacagcttagagaatcaattgacacaagcactgctgtattcgacaaagaaaaggcccaagagcgtttatctaagttatctggaggtgttgctgtactcaagattggtggagctagtgaagctgaagttggtgagaaaaaagatagggtgacagatgctctaaatgctgcaagggctgctgtggaggagggcattgtgccaggtggtggagttgcccttctttatgccaccaaggagcttgacaagattagcacagcaaacgaggacgaaaagattggagttcaaattatcaagaattctttgaaggctcccttgatgaccatagctgcaaatgctggcattgatggagctatagtcatagggaagctgattgaacaagaggacctcagtttgggctatgatgcagcaaaaggggagtacgtagacatgatcaaggccggcatcatcgatcccgtgaaggtgatccgcaccgcacttcaagacgctgcaagtgtttccctgctgatggcaaccacggaggccgctgtctccgagctcccggcaaccaagtccagaatagccagccgtatgccgcagatgagcgggatggacttctgaggaaattcaggcgcctagctcgagacccagctttcttgtacaaagtggt

SEQ ID NO: 63 - DNA, 1847 bp, Glycine max
ccgccgccgccgcgccggtaaccaccccgcccctctcctctttctttctccgttttttttttccgtctcggtctcgatctttggccttggtagtttgggtgggcgagaggcggcttcgtgcgcgcccagatcggtgcgcgggaggggcgggatctcgcggctggggctctcgccggcgtggatccggcccggatctcgcggggaatggggctctcggatgtagatctgcgatccgccgttgttgggggagatgatggggggtttaaaatttccgccatgctaaacaagatcaggaagaggggaaaagggcactatggtttatatttttatatatttctgctgcttcgtcaggcttagatgtgctagatctttctttcttctttttgtgggtagaatttgaatccctcagcattgttcatcggtagtttttcttttcatgatttgtgacaaatgcagcctcgtgcggagcttttttgtaggtagaccgcgggatatcacaagtttgtacaaaaaagcaggctcctgcaggacctctcttctctcctccaaaaatgatgaaaactactatgaatatctcaaatgctaaccacgagaaagtggagaaagcgtttgcgttcttgactggcaatcatttcatcaaccatcattatggagccatcctcagcaagtgcttgaaaggtcttcctgtgagagattttgatgcacaagagatcattcccggtttatatttaggggatgtatatgctgcacataacacaaaagaattgaaatcacgtaacttcacccacattgtgacctgcactgtaggagttgtccctccctttcccgatgctttcaagtacatgcatttgaaaattttggattttgcaggagagaccattgacgtacactttacttcaacaactgatttcattggggatgctattgctaatggaggaaaagtgttggttcactgtattcgtggagtgtcaagatcagccactattgtttcagcttatttaatgaagagtatgagtttatctgcagaggatgctgttgagcatgttagaagagttcgtgctattgctcgtcccaactatggttttatgatgcaattacaattgtatcacaaagaattgaataaaggaatgatgaatgtggaaatttcagatgagcaaaatttaccagctgccgaatggtaacatagctcgagacccagctttcttgtacaaagtggtgatggggatcccccaccctgcaatgtgaccctagacttgtccatcttctggattggccaacttaattaatgtatgaaataaaaggatgcacacatagtgacatgctaatcactataatgtgggcatcaaagttgtgtgttatgtgtaattactaattatctgaataagagaaagagatcatccatatttcttatcctaaatgaatgtcacgtgtctttataattctttgatgaaccagatgcattttattaaccaattccatatacatataaatattaatcatatataattaatatcaattgggttagcaaaacaaatctagtctaggtgtgttttgctaattattgggggatagtgcaaaaagaaatctacgttctcaataattcagatagaaaacttaataaagtgagataatttacatagattgcttttatcctttgatatatgtgaaaccatgcatgatataaggaaaatagatagagaaataattttttacatcgttgaatatgtaaacaatttaattcaagaagctaggaatataaatattgaggagtttatgattattattattattttgatgttcaatgaagttttttttaatttcatatgaagtatacaaaaattcttcat

SEQ ID NO: 64 - DNA, 2182 bp, Saccharomyces cerevisiae
acaagtttgtacaaaaaagcaggctcctgcaggaccatgtacaacattccagataatgtcaaaggggctgtagaatttgatccatggttgaaaccgtttgccgatgtactttctgaaagaagatacctagctgacaagtggttgtacgacataactcatgctacgcctgatggttcgtatcagtcactcagtaagtttgctagagattcatacaagtcatatgggttgcatgccaatccggaaaccaaagaaatcacttacaaagagtgggcacccaatgcggaacgtgcatttctagtgggagatttcaataactgggataccacatctcatgagctcaagaacaaggacgaatttggaaattttacaatcacacttcatcctttacctaacggcgatttcgccatccctcatgattcgaagattaaagtcatgtttattttgccagatggttccaagatctttcgtttacctgcgtggatcacaagggctacacagccttctaaggaaacttctaaacagttcgggcccgcatatgaaggtaggttttggaatccagagaacccctacaaatttgtacatccaaggccaaagtttagtgaatctgtagattccttaaggatttatgaagcccacgtcggtatttcgagtccagaaccaaagataaccacatataaagaatttactgagaaggtcttacccagaatcaaatatcttggctacgatgcaattcaattaatggctattatggaacatgcttattatgcatcatttggctaccaagtgaccaatttttttgcggcgagctcccgtttcggcacccctgaggaattaaaggagctgattgatactgcacattctatgggcatcctagttttattggatgtagttcatagccatgcttctaaaaacgtcgaggatgggttgaacatgtttgacggttctgatcatcagtatttccattctataagctccggtaggggtgagcatccgctgtgggattcccgtctttttaattacggaaaatttgaagtgcagcgattcttattagcaaacctggcattttatgttgacgtttatcagtttgatgggtttagattcgatggtgtcacatcaatgttatacgttcatcatggtgttggtgccggtgggtcttttagcggtgactataacgaatatctttctcgtgacaggtccttcgtcgatcatgaagccttagcttatttaatgttagccaatgatttggttcacgaaatgttgccaaatctggctgtaactgttgcagaagatgtctctggttatccaactttatgtttaccccgctccataggtggtactggtttcgactacagattagcaatggctttgcctgatatgtggatcaaactaatcaaggagaagaaagatgatgaatgggagatgggaagtattgtatacactttaactaatagacgatatggtgaaaaagtggttgcttattgtgagtcgcacgaccaagctttagttggtgataagacattagcgttttggttgatggatgccgctatgtacaccgatatgactgtattgaaggaaccatccatcgttattgaccgtggtattgctctacacaagatgattaggctgatcactcactcgctgggaggcgaggcttatttgaacttcgaaggtaatgagttcggtcatccagaatggttggatttccctaatgttaacaatggcgatagctacaagtatgctcgtaggcagtttaatttggctgatgatcccttactgcgttaccagaatttaaatgagtttgatagatcaatgcaattatgtgagaaaaggcataagtggctgaacacgaaacaggcttatgtttcattaaaacatgaaggtgacaaaatgattgtgtttgaaagaaataatctgttgtttattttcaacttccatcctacaaacagctacagcgattatagagttggtgtcgaaaaagctggtacttatcacatcgtgttgaactcagatcgtgctgaatttggtggacataacagaatcaacgaaagttccgaattctttaccaccgatttggaatggaacaacaggaagaacttcctccaagtttatattcctagtagagtcgctttggtgcttgccttaaaagaatagctcgagacccagctttcttgtacaaagtggt

SEQ ID NO: 65 - DNA, 637 bp, Arabidopsis thaliana
acaagtttgtacaaaaaagcaggctcctgcaggaccatgggttgtgttcgctgcaaatcatcagatccatggcaaacatctgccaatgcctttgaatccgtcgatgaatccggaatcaacgaagcctgggttgagatctccagccgcagatcatttgtcgccggcgaaggtagtcggaagaagctagagaggaagaagagccaagtgttactggaaggttacgttgagactgcttcttcttcctcggtggatgatcaaaaggacgatctgacgagatccaagagtttgacggatgacgacctcgaagatcttagaggttgtttagatctagggtttggttttagctacgacgagatccctgagctctgcaacactttacctgctttggagctttgctattcaatgagccagaagttcttagacgataagcaaaataaatcaccggaaacttcgtcggtggaagattgtccgtcgcctccactggtcaccgccactccgattgccaattggaagatctctagtcccggtgataatccggatgatgtgaaagctaggctcaaatactgggcacaagccgttgcctgtactgtccaattgtgcagctagctcgagacccagctttcttgtacaaagtggt

SEQ ID NO: 66 - DNA, 1768 bp, Zea mays
acaagtttgtacaaaaaagcaggctcctgcaggaccatggctccgcttctcgctgctgccatgaaccacgctgcagcccatcctggccttaggagccacctagtaggacccaacaatgagagtttctcacggcaccacctgccgtcttcttctccacagagcagcaagcgaaggtgtaaccttagctttactacacgatctgcaagagtaggcagccaaaatggagtccaaatgttgagcccctcggaaatcccacaaagggactggttcccctctgacttcaccttcggtgccgccacttcagcgtaccaaattgaaggtgcttggaatgaagatggaaagggggaaagcaactgggatcacttctgccacaatcatccggaaaggatactggacgggagcaattcagacattggagcgaattcgtaccatatgtacaaaacggacgtcagattgctcaaggaaatgggcatggacgcatataggttctctatctcttggcccagaatactgccgaagggaaccaaagaaggaggtattaacccggatggcatcaagtactacagaaacctcatcaacttgttgctggaaaacggcatagagccatatgtaacaattttccactgggatgtacctcaagcactagaagagaagtacggcggcttcctagataagagtcataagagcattgtagaagattacacctacttcgctaaggtgtgctttgataacttcggcgacaaggtgaagaattggttgacctttaatgagccccagacatttacttccttttcctacggaactggggtctttgccccagggcggtgctcacctggactagactgtgcctacccaactgggaattcactcgtcgagccttacactgctggccataacattctcctagcccacgctgaggctgttgatctttacaacaagcattacaagcgcgacgacacccgcatagggcttgcgtttgacgtaatgggtcgtgtgccatacggaacatcgtttctggataaacaggccgaagaaaggtcatgggacatcaacctaggatggttcttagagccagtggttcgtggtgactaccccttctccatgagatcattggctagggaacgactacccttcttcaaggacgagcagaaggagaagctcgccggttcctataacatgttggggttaaactactacacctcacggttctccaaaaacatcgacatctcaccaaactactcacctgtgctcaacactgacgacgcctacgccagtcaagaagttaacgggcctgacgggaagcccattggtcctcctatgggaaatccatggatctacatgtaccctgagggcttgaaggatctccttatgataatgaagaacaaatacggaaacccacctatctacatcaccgagaacggaatcggggatgttgataccaaagagacacctctacccatggaggctgccttaaatgactacaaaaggctagattacatccagcgccacatcgctactcttaaggaatcaatagacttgggatcaaatgtgcaaggctacttcgcttggtctctgctggacaactttgaatggtttgccggcttcaccgaacgttatggcattgtctacgtcgaccgcaacaataactgcacgcgctacatgaaggagtctgccaagtggttgaaagagttcaacaccgcgaaaaagcccagcaagaagattcttacgccagcttagctcgagacccagctttcttgtacaaagtggt

SEQ ID NO: 67 - DNA, 1347 bp, Zea mays
acaagtttgtacaaaaaagcaggctcctgcaggaccagaagcagctagccatggcggcggcggcggcggcggcggccttcgatgcctacaccgacaagaacgccatcttccgccgcctcaaggccaagcccgagaacaagatgtgcttcgactgcaacgccaagaaccccacctgggcctccgtcacctacggcatcttcctctgcctcgactgctcggccgtccaccgcagccttggggtccacatcaccttcgtcaggtcaacgaacctcgactcatggactccagatcagctgaaaatgatggcgttcggaggcaacaaccgggcacatgctttcttcaagcagcatggatggactgatggtggcaaggttgaggcgaaatacacatcaagagctgctgaactgtacaggcagatgctcaacaaggaggtcgctaagagtgccattaccgataatgccctgccgtcctcacctgtcactgcgtctgaggcttccaagccatctgatgactttcctgaattcaagctctcagacgcaccagcaccgccggcggagaatctgaatgggaagcatgaacccaagtcccccaaagctgctccacgttcaccaaaagctgctactcatcccacctttgccacttccgtgaagaagcccattggcgcaaagaaggttggaggcaagactggagggcttggtgttcgtaaactcacaacaaagccaaatgaaagcctgtatgagcagaaaccagaagagccaaaacctgctatacctgccttgactgctccaactgcaaaaggtggtccatccttgcattcacgttttgaatatgtggataacgaacaatcatctgtttcaagaaccgggggatctggatctcgtgtaaccggtcatgtagcaccaccaaaatcatctgacttcttccaagagtatgggatgggtaatggattccaaaagaaatcaagcaacgcctcaaaagctcagattgaggaaactgatgaagcaaggaaaaaattctctaatgctaaggcaatttcgtcatctcagttttttggtactcaaaacagagaagagaaagaggctcagctatcccttcagaaattcgcgggttcttcatccatttcaagctctgatctttttggccgtaccaatgtggacgattctaacctggacctaagcgctgcagatctcatcaacagaatatctttccaggcgtcacaggatctgtcttcactcaaggacatagctggagagactggaaagaagctgacatctttcgcctccaatttcatcagcgacctggacagaatcctttagctcgagacccagctttcttgtacaaagtggt

SEQ ID NO: 68 - DNA, 259 bp, Zea mays
acaagtttgtacaaaaaagcaggctcctgcaggaccatgagggaggccatcagggccgccaggaaggaattctcggtctgcactggtccagcgaactccgccatcacgttccagatggacgtgccggcaacgatgcctgtcgtcaaggagctctgcggcctggatgtcgttgagaggtacctggagagcgtgtcggctgccagcccaacaaacaccgctaaagcatagctcgagacccagctttcttgtacaaagtggt

SEQ ID NO: 69 - DNA, 423 bp, Zea mays
atggtttctttcgagatgaatgacctcaagaagattgggctaggcctaacaggctttggaatattcttctccttcctgggaatcattttcttctttgacaagggtcttattgcaatgggcaatatcctctttctatctggtttgggtttgacaattggtttgaaatccactatgcagttcttcaccaagcctaagaactacaagggtactatctcatttggtgctggcttttttctggttcttattgggtggccctttcttggcatgctcttagaagcatatggctttgttgtactcttcagtggattttggccaacccttgctgttttcctccaaaggattcctattattggatggatttttcaacaaccgtttgtcacatcgttccttgaccgctacagaggaaaacgagttccggtttag

SEQ ID NO: 70 - DNA, 423 bp, Zea mays
atggtttccttcgagatgaacgacctcaagaagattgggctgggcttgactggatttggagttctattcacattgctcgggatcattatgttgtttgacaagggattcctggcgatggggaatattctcttcgtttctggcgtcttactgaccattgggttgaagccaactgtgcagttcttcaccaagcctaagaatcacaagggttcaatatttttcgggtttggctttttcctggttctcattggatggcctgtctcaggaatgctggtggagtcgtatggcttcatcacgctcttcagcggcttctggccaacagctgctgtttacctgcaaaagagcccctccttcggttggatattccaccaccctcttgtgacttcgctgatcactcggttcagaggaagacgggtcccggtgtag

SEQ ID NO: 71 - DNA, 437 bp, Arabidopsis thaliana
aaaaaagcaggctcctgcaggaccatggaatcaaagacgttctggatcgttactcttcttctctgtggaacaattcaattagcgatttgcagatcagaagagaaaagcacagagaagacgatgatgctaggaggcgttcatgatctccgaggaaatcagaacagtggagagatcgagagtctcgctcgatttgccattcaagaacataacaaacaacagaacaaaattcttgagttcaagaagattgtcaaagcaagggagcaggtagttgcaggaacgatgtaccacttaaccctagaagcaaaagaaggtgatcagactaagaattttgaagccaaagtgtgggtgaagccatggatgaacttcaaacagttgcaggagttcaaggaatcatcttcttagctcgagcctgcagggacccagctttcttgtacaaa

SEQ ID NO: 72 - DNA, 442 bp, Arabidopsis thaliana
ggtaccggcgcgcctcagcagtcgctgtcgttaccatggaatcaaagacgttctggatcgttactcttcttctctgtggaacaattcaattagcgatttgcagatcagaagagaaaagcacagagaagacgatgatgctaggaggcgttcatgatctccgaggaaatcagaacagtggagagatcgagagtctcgctcgatttgccattcaagaacataacaaacaacagaacaaaattcttgagttcaagaagattgtcaaagcaagggagcaggtagttgcaggaacgatgtaccacttaaccctagaagcaaaagaaggtgatcagactaagaattttgaagccaaagtgtgggtgaagccatggatgaacttcaaacagttgcaggagttcaaggaatcatcttcttagaacccagcggtactcgctgaggcgatcgc

SEQ ID NO: 73 - DNA, 365 bp, Arabidopsis thaliana
aaaaaagcaggctcctgcaggaccatgcctcctcgcacgggaaaggataaacaaaaccccaggctcccaccggaggtgactcgcctactctacatttgtaaccttccctttagcataacaagcgaagatacgtacgatcttttcggaaggtacagtacgattcgtcaggttcgaatcggttgtgaaaagggcacaaaaggtacggctttcgtcgtatacgaggatatctacgatgctaagaaagctgtcgaccatctctggcttcaacatagcgaaccggtaccttatcgtgcactattaccaacatgcgaagatgagcaagaagtttagctcgagcctgcagggacccagctttcttgtacaaa

SEQ ID NO: 74 - DNA, 1928 bp, Saccharomyces cerevisiae
atgagcagtaacaacaacacaaacacagcacctgccaatgcaaattctagccaccaccaccaccatcaccaccatcaccaccaccatcacggtcatggcggaagcaactcgacgctaaacaatcccaagtcgtccttagcggatggtgcacatatcgggaactaccaaatcgtcaaaacgctgggagaggggtcctttggtaaagttaaattggcatatcataccactacgggccaaaaagttgctctaaaaatcattaataagaaggttttggcaaagagtgatatgcagggcagaattgaaagagaaatatcttatctgagactcttaagacacccccacatcatcaaactgtatgatgttatcaaatccaaagatgaaatcattatggttatagagtacgccgggaacgaattgtttgactatattgttcagagagacaaaatgagcgagcaagaggcaagaagatttttccagcagatcatcagtgccgtcgagtactgccataggcacaaaattgtccatagagatctgaagcctgaaaacttactactagatgagcatctgaatgtaaagattgccgattttggtttgtcaaacatcatgactgatggtaatttcttaaagacttcttgtggttctcccaattatgcggctcctgaagttatcagcggtaagctgtacgcaggcccagaagtggacgtgtggtcatgtggggttatcctttatgttatgctttgtcgtcgtctaccgtttgacgatgaaagcatcccagtgcttttcaagaatatcagcaacggtgtttacaccttgcctaaatttttatctcctggagctgctgggctaatcaaaagaatgttaatcgttaatccattgaacagaataagcattcatgaaattatgcaagacgattggttcaaagttgacctgccagaatatctacttccaccagatttgaaaccacacccagaagaagagaatgaaaataatgactcaaaaaaggatggcagcagcccagataacgatgaaattgatgacaaccttgtcaatattttatcatcgaccatgggttacgaaaaagacgagatttatgagtccttagaatcatcagaagacactcctgcattcaacgaaattagggacgcgtacatgttgattaaggagaataaatctttgatcaaggatatgaaggcaaacaaaagcgtcagtgatgaactggatacctttctgtcccagtcacctccaacttttcaacaacaaagcaaatcccatcaaaagagtcaagtagatcatgaaactgccaagcaacacgcaagaaggatggcaagtgctatcactcaacaaaggacatatcaccaatcacccttcatggatcagtataaagaagaagactctacagtttccattttgcctacatctttacctcagatccacagagctaatatgttagcacaaggttcgccagctgcctctaaaatatctcctcttgtaacgaaaaaatctaaaacgagatggcattttggtatacgatctcgctcatatccattagacgttatgggtgaaatttatattgccttgaagaatttgggtgccgaatgggccaagccatctgaagaggatttatggactatcaaattaaggtggaaatatgatattggaaacaagacaaacactaatgaaaaaatacctgatttaatgaaaatggtaattcaattatttcaaattgaaaccaataattatttggtggatttcaaatttgacggctgggaaagtagttatggagatgatactactgtttctaatatttctgaagatgaaatgagtactttttcagcctacccatttttacatttaacaacaaaactaattatggaattagccgttaacagtcaaagcaattagctcgagacccagctttcttgtacaaa

SEQ ID NO: 75 - DNA, 1088 bp, Glycine max
aaaaaagcaggctcctgcaggaccatgaagttcggcgccacatatgaggagtatctccgggcagagcgggacaaattcctagggcaatgctcccatgtagaatacaaacgcctcaaaaaggtattgaagaaatgtagagttggtcgctcactgcaagcagatggcacaaatggtgatgagcagcaggaggggagagacgaatcttcaaacatttgtgaatgcaactcatgcacattgtgtgatgagatgttctttacagaactcaacaaggaagcatcagaaatagcaggttgtttcagatctagagtacaacgtctcctccatcttcatgttccttcaggactacaacgctgtatatggcgttttaggcagtgtttcatagatgatcagcaaataatggttcaagaaggcagaatgcttctcaattatgtgaccatgaatgctattgctattcgcaaaattctcaagaaatatgacaagatacatggttctgtgagtggcagagatttcaagagcaagatgcaaactgagcatattgaactgttgcagtcaccttggctgatagagctatgcgctttccatcttaactgcgatgattcagatgctgatgaacctagagctggagagttcttcaagaatggattcttcaagaatttttcctgtgacctgagtggagcacagccactactaacaatgaccatttctgaaactctgaagtatgagtacagcctaacttgtccaatttgcttggacactttgttcaacccttatgcgcttagctgtgggcatctgttctgcaaagcctgtgcatgtggtgctgcttctgtctacatcttccagggtgtcaagtcggcacctccggaggccaagtgccctgtctgccgagcggttggtgtgtttgatcgtgctgtgcgtatgactgaactagaattgctcctcaagagaagggacaaagattactttctgcagagactgcgcgaagagcgaagtgtgatggtgaagcaggccaaagaatactgggactcacaggcaatgctatcgatggggatttagctcgagcctgcagggacccagctttcttgtacaaa

SEQ ID NO: 76 - DNA, 1580 bp, Glycine max
atggcagaggtggcgccgccgaagaaggaaaacccgaaccttctcctggggcggttcgagctcgggaagctcctcgggcacggaaccttcgcgaaggtccaccacgcgcgcaacatcaaaaccggagaaggagtcgccatcaagatcatcaacaaggagaaaatcctaaaggggggtttggtctcccacataaagcgcgagatctccattctccggcgcgtgcgccaccccaacatcgtgcaactcttcgaagtgatggccaccaagaccaagatctacttcgtcatggagtacgtgcgtggcggcgaactcttcaacaaggtcgcaaagggaagattaaaagaagaagttgcgagaaattactttcagcagttagtttccgcggtggagttttgccacgcgcgcggcgtgttccacagggacctgaagcccgagaacctgttgctggacgaggatgggaaccttaaagtctccgactttggtctcagtgccgtgtcggatcagataaggcaggacgggctgttccacacgttttgtgggacacctgcgtatgttgctcctgaggtcttgtcgcggaaaggctacgatggtgcaaaggttgatatttggtcttgtggggttgttttgtttgttctgatggccggctatttgcccttcaatgaccgtaacgttatggctatgtataagaagatttacaagggtgagtttcggtgtcccaggtggttttcttctgaacttacaagacttctctctaggcttcttgatactaaccctcagacaaggatttctattcctgaagtcatggagaatcgctggttcaagaagggtttcaagcagattaagttttatgtggaggatgatagagtttgtagttttgacgagaaactgttacttcatcatgatgatgatttggcaacatcggattctgaggttgagattaggaggaagaatagtaatggttcgttgccgaggcctgcgagtttgaatgcgtttgacatcatatcgttttctcagggctttgatctatcagggttgtttgaggaaaagggtgatgaggcgaggtttgtgtcatctgctccggtgtcgaagattatatcaaaattggaggaggttgctcagttggttagtttcagtgtgaggaagaaagattgcagggtgagcttggaggggtgtagagaaggtgtgaaggggcctttgactattgctgctgaggtttttgagttgacaccttccttggtggtggtggaggtcaagaaaaagggaggggataaggccgagtatgagaagttttgtaactctgagttgagacccgcgttggagaatttagggatggaggaatctgcttcttcttcttcttcttgtcatcaatctacacacactcaatctgaattccaacaacatcgaacactttctgactctgcccttaacagacattcagataatgaatgtttgttcgaacgagagttaggtctagcagatgagactagtatctcacaacatggtgaatcaaagttcgaatgtcaacaggaaaatatggccatgtttactatctagctcgagacccagctttcttgtacaaa

SEQ ID NO: 77 - DNA, 1508 bp, Glycine max
acaagtttgtacaaaaaagcaggctcctgcaggaccatggggagaggtaagatcgtgataaggaggatcgacaattccacgagcaggcaagtgacgttctcgaagcgaaggaacggtttgctgaagaaggcgaaggagcttgcgatcttgtgcgatgctgaagtcggagttatgatcttctccagcaccggaaaactctacgatttcgccagctccagcatgaaatcagtaatggaccgatacagcaaatcaaaagaagaaccttgtcaacttgggagttcagcctctgaaattaagttttggcaaagggaggcagcaatgttaaggcaacaattacacaatttgcaagaaagtcaccgcaggaaaatgatgggggaagaactgtcaggcttgacagtcaaagaattacaaaatttggagaaccaattagaaattagccttcatggtgtccgaatgaaaaaggatcaacttttaatgggtgaaatacaagagctaaatcgaaagggaaacctcatacaccaagaaaatgtggaactgtataagaaggtctatggaacacaagatgataacgaaacaaacagagattctgttctgacaaatggtctaggcataggagaggatttgcaagtgcctgtgaatctccagctaagccagccacagcaacagcaacaacactacaaggcatcttcaggaactacaaaattgggattgcaattgcattagctcgagacccagctttcttgtacaaagtggtacaagtttgtacaaaaaagcaggctcctgcaggaccatggggagaggtaagatcgtgataaggaggatcgacaattccacgagcaggcaagtgacgttctcgaagcgaaggaacggtttgctgaagaaggcgaaggagcttgcgatcttgtgcgatgctgaagtcggagttatgatcttctccagcaccggaaaactctacgatttcgccagctccagcatgaaatcagtaatggaccgatacagcaaatcaaaagaagaaccttgtcaacttgggagttcagcctctgaaattaagttttggcaaagggaggcagcaatgttaaggcaacaattacacaatttgcaagaaagtcaccgcaggaaaatgatgggggaagaactgtcaggcttgacagtcaaagaattacaaaatttggagaaccaattagaaattagccttcatggtgtccgaatgaaaaaggatcaacttttaatgggtgaaatacaagagctaaatcgaaagggaaacctcatacaccaagaaaatgtggaactgtataagaaggtctatggaacacaagatgataacgaaacaaacagagattctgttctgacaaatggtctaggcataggagaggatttgcaagtgcctgtgaatctccagctaagccagccacagcaacagcaacaacactacaaggcatcttcaggaactacaaaattgggattgcaattgcattagctcgagacccagctttcttgtacaaagtggt

SEQ ID NO: 78 - DNA, 1061 bp, Oryza sativa
aaaaaagcaggctcctgcaggaccatgcggatgctgtccaaggcgtgctcgctcgtggcctcctccctcccgcggtgctcatcctccgctgcccccacgatcagagggcagccgtcgttgctgccaagcgtgcgcaaggaatggcttggcaagccgctgctgtacggaatcggcacgctgctcgtcatgcctctgaggacgctgcacggggtgggacggatgtttggcgctgggcggttcctctgcaacatgaccagcgtctcgtcgtcgctgcaaattgagctcgtaccctgccttcaagataactatgcttacatcctacatgatgttgatactggaacagttggagttgtggacccttctgaagcaacgccaatcataaatgcactagaaaaaagaaaccagaacttgacctacatactgaacacccatcatcactatgaccatactggtggcaacttggaactgaaggcaaaatatggtgcaaaggtgattggttctgcaaaggatagggatagaattccaggcattgacataactcttagtgagggtgacacatggatgtttgctggtcatcaagttcttgtaatggaaactcctggtcatacatcaggtcatgtgtgctaccacttccctggatctggagcaatatttacaggggacacattgtttagtttgtcatgtggaaagctttttgaagggactccacaacagatgtactcttcactccagaaaattatagcacttccggatgagacaagagtgtattgcggacatgaatatacattgagcaattcaaagtttgccttgagcatagaaccaggaaataaagacttacaggaatacgctgcaaatgccgctgatctccgcaagaggaatacacccacggtgccaacaacaattgggagagagaagcagtgcaatccttttctgaggacctcaagtccagagataaagaataccctgtccatcccagaccattttgatgatgcacgcgttcttgaagttgttcgacgagcgaaggataacttttagctcgagacccagctttcttgtacaaa

SEQ ID NO: 79 - DNA, 1661 bp, Zea mays
acaagtttgtacaaaaaagcaggctcctgcaggaccccgcgcttgttttcccaccgcccgatggccgccatcacgccgccgacgcagtcggagccgtcgccgcagacggggcgcccggcctcgtctgccgccgccgcggccaagcgtggagggggcggggctggtgccgccggcgggccgctgatggggaagtacgagctggggcgcctcctggggcacggcaccttcgcgaaggtgtaccacgcgcggcacgtcgacacgggggacaacgttgccatcaaggtgctcgacaaggagaaggccgtgaagagcgggctcgtcccgcacatcaagcgcgagatcgctgtgctacgccgcgtgcgccacccgaacatcgtgcacctgttcgaggttatggccacaaagactaagatctacttcgtcatggagctcgtccgcggcggcgagctcttctcccgcgtctccaagggccgactcagggaggacaccgcgcgccgctacttccagcagctcgtctccgccgtggggttctgccacgcccgcggcgtcttccaccgcgacctgaagcccgagaatctactcgtcgacgagcaggggaacctcaaggtatcggattttgggctctccgccgtcgccgagcagttccgtcccgacggcctgctccacaccttctgcggcacgccggcctatgtggcccccgaagtgctcggccgccgcgggtacgacggcgccaaggcagacgtgtggtcgtgcggtgtcatcctctttgtgctcatggccggatatctccctttccatgacaaaaacatcatggccatgtacaagaagatttacaagggcgagttccgctgtgcgaggtggttctccaaagaccttaccagcttgctgatgcgcattcttcacactaatcccaacactcggatcactttgccggagatcatggagtcccgctggttcaagaaaggattcaagcctgtcaagttctatatcgaggatgaccagctgcataacgttatagatgacgaagatggcctgttagatatgggacctgctggtcctgttcctccaccattgccacctccaccgccacctctacctccaccaaaggttgatggtgatgaatcagggtctgactcagactcgtcgatctcatcctgccctgcttcaatgttatctgatgagagccaaaggccccgtggctctctaccacgtccagcaagtcttaatgcctttgatatcatatcattttcaaggggatttaacttatcagggttatttgaggagaaaggggatgaagtgaggttcatctcggctgagcccatgtcagatatcataaccaaattggaggacatagcgaagctgaagagcttcaagttgcggaggaaggactggcgcatctgcctggagggtacaagggaaggagttaaggggccattaacaattggcgcggagatatttgaactcacacctccccttgtaatggtggaggtaaaaaagaaggcaggggataatgaagagtacgagaacttctgtgacaaggaattgaagccagggatgcagcaccttgtccaccatatggtccgagctccaagtatgctgcttactgatgccaagtagatcgaaaggctagctcgagacccagctttcttgtacaaagtggt

SEQ ID NO: 80 - DNA, 3412 bp, Oryza sativa
ggtaccggcgcgccaccatgtcttcttcaagacctactcaatgttccagttcatccagcaggacccgccaaagctcccgggcaaggatattagcacaaacaactcttgatgctgaactcaatgctgaatatgaagaatatggcgactcctttgattactccaaattggttgaagcacagagaactactggacctgagcagcaagctcgttctgagaaggtcatagcttacttgcatcacattcagagagcaaagctaatccaaccatttggttgcttgttggcccttgatgagaagaccttcaatgttatagcgctcagcgagaatgcaccagagatgcttacaactgtcagccatgcagtgccaagtgttgatgatcccccaaagctacgcattggcaccaatgtatggtctcttttcactgacccaggtgccacagcactgcagaaggcactgggatttgctgatgtttccttgctgaaccctatcctagttcaatgcaagacctcaggcaagcctttctatgccattgttcatcgggcaactggttgtttggtggtagactttgagcctgtgaaacctacagaatttccagcaactgccgctggggctttgcaatcttacaaacttgctgccaaggcaatctctaagatccagtcactgccaggtggaagcatggaggtgctatgcaatacggtggtcaaggaactctttgacctcacaggatatgatagagttatggcttataagttccatgaagatgaccatggtgaagtctttgctgagatcacaaagcctggtcttgaaccttatcttggcctgcattatccagctactgatatccctcaggcagccaggtttcttttcatgaagaacaaagtccggatgatttgtgattgccgtgcaagatctatcaagattatcgaagatgagtcgctccacttggatattagcttatgtggttcaacactgagggcaccacacagttgtcatcttcagtatatggagaacatgaactcgattgcatcccttgtcatggctgttgtggttaatgagaatgaggatgatgatgaagttggggctgatcaacctgcacaacagcagaagaggaagaaactatggggactccttgtttgccaccatgagagccccagatatgttcctttcccattgcggtatgcctgtgagttcttagcacaagtgtttgctgtccatgttaacaaggagtttgaattagagaggcaagtacgcgagaaaagcatattgaggatgcaaacaatgctctctgacatgcttctcagggaatcctctcctctgagtatagtatcagggactcccaacatcatggaccttgtgaaatgtgatggtgctgctcttttgtatgggggaaaagtgtggcggctacagaatgctccaactgagtctcagatacgtgatattgccttctggctgtcagatgtccacagggattccactggcctgagtactgatagcctacatgatgctggatatccaggagctgctgctcttggtgatatgatttgtggaatggcagtagctaaaataaattccaaggatatcctgttctggttcaggtcacatacagctgctgaaatcagatggggaggtgcaaaacatgatccatcagacaaggatgacagcagaagaatgcaccctaggctgtccttcaaggcattccttgaggttgtcaagatgaagagcttgccttggaatgactatgagatggatgctattcactcattacaacttatacttagagggacactgaatgatgacatcaagccaacaagggccgctagtttagataatcaggttggtgatctcaagcttgatgggcttgctgaattgcaggcagttacaagtgaaatggttcgtctcatggaaacagcaactgtcccaatcttggctgtagatagcaatggattggtcaatggatggaatcagaaggttgctgagttgacagggttgagagtagatgaggctattggaagacacatacttaccgttgtagaggaatcttctgtaccagttgtccagaggatgctgtatttagctttgcaaggcaaagaagagaaggaagtgaaatttgaggtgaaaactcatggctccaagagagatgatggccctgttatcttggttgtgaatgcctgtgccagccgggaccttcacgaccatgttgttggtgtgtgctttgttgcacaagatatgactgttcataagttggtcatggacaaatttactcgggttgagggagactacaaagcaattattcacaatccaagcccgcttattcctcccatatttggtgctgacgaatttggatggtgctctgagtggaatgctgccatgacgaaattgaccgggtggcatagagatgaggtgatcaataagatgcttcttggtgaggtgtttgatagcaccaacgcctcctgtcttgtgaagaataaagatgcatttgtaagtctctgcattcttatcaacagtgcattagctggtgatgaaacagaaaaggctccattcagcttcttcgaccggaacgggaagtatatcgagtgccttctttctgttaacagaaaagtaaatgcagatggtgtcatcactggagtattttgtttcattcaagttcctagtcatgagctgcaacatgcactacatgtgcagcaagcctcacagcagaatgcactaacaaagttgaaagcttactcctacatgagacatgcaatcaacaaccctctctcaggtatgctttactctaggaaagcactgaagaacacaggtctgaatgaagagcagatgaaggaggtcaatgttgcagatagttgtcaccgccagctgaataaaatactttctgacttggatcaagatagcgtcatgaacaagtctagttgcttggatttggagatggttgagtttgtattgcaagatgtgtttgtggctgctgtaagtcaagtactcataacttgccagggaaaagggattagagtctcttgcaacctaccggagagatatatgaagcaaacagtctacggggatggtgttcgactacagcagattctctctgacttcctattcgtctcagtgaagttctctcctgttgggggttctgttgagatctcttgtagcctgaccaagaacagcattggggaaaaccttcatctcatagacctagaacttaggatcaagcaccagggcaaaggagtcccagcagatctgctgtcacaaatgtacgaggatgacaataaggagcagtcggatgaaggcatgagtcttgcggtttctagaaacctgctgaggctcatgaatggcgatgtccgacatatgagggaagctggcatgtcaaccttcatcctcagcgtcgaacttgcttctgctccagcaaaataggcgatcgc

SEQ ID NO: 81 - DNA, 653 bp, Oryza sativa
gcagtcgctgtcgttaccatggtacagccaaagaagaagtttcgtggagtcaggcagcggcactggggctcctgggtctctgagatcagacaccccctccttaaaaggagggtgtggctgggcacctttgagacggccgaggaggctgcgcgagcctacgatgaggctgctgtgctgatgagtggccgcaacgccaagaccaacttccccgtgcagaggaactccaccggtgatctcgccacggccgcagaccaggacgcccgtagcaatggcggtagcaggaactcctccgcgggcaacctgtcacagattctcagtgctaagctccgcaagtgctgcaaggcgccatctccgtccttaacctgcctccgcctcgaccccgagaagtcccacattggcgtgtggcaaaagcgcgcaggggcccgtgctgactccaactgggtgatgacggtggagctcaacaaagaggtagaaccaactgaacctgcagctcagcccacatcaacagcaacagcttcgcaagtgacaatggatgatgaggaaaagattgcgctgcaaatgatcgaggagttgctgagcaggagcagtccagcttcaccctcacatggagagggagagggtagctttgtcatctagaacccagcggtactcgc

SEQ ID NO: 82 - DNA, 3840 bp, Zea mays
atgtcttcctcgaggcctgcccactcttcaagttcatccagcaggactcgccagagctcccgggcaaggatattagcacaaacaacccttgatgctgaactcaatgcagagtacgaagaatctggtgattcctttgattactccaagttggttgaagcacagcggagcactccacctgagcagcaagggcgatcgggaaaggtcatagcctacttgcagcatattcaaagaggaaagcttatccaaccatttggttgcctgttggcccttgacgagaagagcttcagggtcattgcattcagtgagaatgcacctgaaatgcttacaacggtcagccatgctgtgccaaacgttgatgatcccccgaagctaggaattggtaccaatgtgcgctcccttttcactgaccctggtgctacagcactgcagaaggcacttggatttgctgatgtttctttgctgaatcctatcctggttcagtgcaagacctcaggcaagccattctatgccattgttcacagggcaactggttgtctggtggtagattttgagcctgtgaagcctacagaatttcctgccactgctgctggggctttgcagtcctacaagcttgctgccaaggcaatctccaagatccagtcactactaggtggaagcatggaggccttatgcaataccgtggttaaggaagtctttgacctgacaggttatgacagggttatggcttacaagttccatgaagatgagcatggggaggtctttgctgagatcaccaaacctggtattgagccctatataggcctgcactatccagccactgatatccctcaagctgccaggtttctcttcatgaagaacaaagtcagaatgatctgtgattgccgtgcaagatccgtgaagattattgaagatgaggcactctccattgatattagcttgtgtggttcaactcttagagcaccacatagctgtcaccttaagtatatggagaacatgaactcgattgcatctcttgtcatggctgttgtggtcaatgaaaatgaagaggatgatgaacccgagcctgaacaaccaccacaacagcagaagaagaagaggctgtggggtctcattgtttgccaccatgagagccccagatatgtcccgttcccactgcggtatgcctgtgaattcttggcccaagtgtttgctgtccatgtaaacaaggagtttgaattggagaagcagatacgagagaaaaacattctgcgaatgcaaacaatgctctctgacatgctgttcaaggaatcatctcccttgagtatcgtgtctgggagtccaaatatcatggacctagttaagtgtgatggcgctgctcttttgtatggggacaaagtatggcggcttcaaacggctccaaccgagtctcagattcgtgatattgccttctggctttcagaagttcatggggattccactggcttgagtactgatagcctccaggatgctggatatccaggagctgcttcccttggtgacatgatttgtggaatggcagtggccaagatcacgtccaaggacattcttttctggttcaggtcacatacagctgctgaaatcaaatggggaggtgcaaagcatgatccatctgataaggatgacaacagaaggatgcaccctaggttatcctttaaggctttccttgaggttgtcaagacgaagagtttgccatggagtgactacgagatggatgctattcactcattgcagcttattcttagaggtacactgaatgatgcctcgaagccagcccaggcatctggtttagataaccagatcggtgatctaaaacttgatgggcttgctgaattgcaagcagtgacaagtgaaatggtccgcctgatggaaacagcaactgttccgatcttggcagtagatggcaatggattggtcaatggatggaaccaaaaggtagcggagttgtcaggtctgagagttgatgaggctataggaagacacatacttacacttgtggaggattcttctgtatcacttgttcagaggatgctatatttagctctgcaaggtgagtggaactaaaaggttttaagcacctttactgtctgcaccatttaattactattcttactgttaatagtcaaccctcagaaaaaatgaataaatttattgtattacgtattggtttctgaatatttcatcaattgagcaggcagagaagagaaggaagttcgatttgagctgaaaacacatggctccaagagggatgatggccctgttatcttggtcgtaaatgcttgtgccagtcgtgatcttcatgaccatgttgttggggtgtgctttgtagcccaggacatgactgttcacaagttggtcatggacaaatttactcgggtcgagggggactacaaggcaatcatccacaacccgaacccactcattcctcctatatttggtgctgaccagtttggatggtgctctgagtggaatgcagccatgaccaagcttaccgggtggcacagagatgaagtggttgataagatgctccttggcgaggtttttaacagcagcaatgcttcctgccttctgaagagcaaagatgcctttgtacgtctttgcattgtcatcaacagtgcattagctggtgaagaggcagaaaaggcttcattcggcttctttgaccgcaatgagaaatatgtcgaatgccttctgtcggtgaacaggaaagtaaatgcagatggtgttgtcactggagtgttctgtttcatccatgttcctagtgatgacctgcagcatgcgctacatgtgcagcaagcctctgagcagacagcacaaagaaagttgaaggctttctcgtacatgcgacatgccatcaacaaacctctctcaggtatgctttattctagggaaacactcaagagcacaggtctgaatgaagagcagatgaggcaggttcgcgtcggagacaattgccatcgccagctaagcaagatacttgccgacttggatcaagataacatcactgacaagtaaccttcttgccaagtcttttaaactgttctattaggttcttgtatttatttccgtcttcctcgtaatttgacaattttctgaacagtaggttgatggtatcacttaattttacttcactagctactgaagcttatagccatattcgttacaaccaacttaatatttctgtatcattatgttcacaggtcaagctgcttggatttggatatggctgaatttgtgttgcaagatgtggtggtgtctgctgtaagtcaagtgctgataggttgccaggctaaaggtatcagagttgcttgcaacctgccggagagatccatgaagcaaagggtttacggggatggtatccgactccagcagatcgtctccgacttcctatttgtttcggtgaagttctctcctgctggtggctctgttgacatctcttccaagctgactaagaacagcattggggaaaaccttcacctcatagacttcgaacttaggtatgctgggcatgctagtttgcaagcatacattcatttctgaactggaaagcatgaggtgtgaaggcttaagttactcttgtgtttatggctttatgattttcaggatcaagcaccgaggagcaggagtcccagcggaaatattgtcgcaaatgtatgaggaggacaataaagagcagtcagaggagggcttcagccttgctgtttctagaaaccttctgaggctcatgaatggtgacattcgtcacctcagggaagctggcatgtcaaccttcattctcactgctgaacttgctgctgctccttcagcagttggacgatgatgaat

SEQ ID NO: 83 - DNA, 687 bp, Arabidopsis thaliana
atgggaagagggaagattgtgatccaaaggatcgatgattcaacgagtagacaagtcactttctccaaacgaagaaagggccttatcaagaaagccaaagagctagctattctctgtgatgccgaggtcggtctcatcatcttctctagcaccggaaagctctatgactttgcaagctccagcatgaagtcggttattgatagatacaacaagagcaagatcgagcaacaacaactattgaaccccgcatcagaagtcaagttttggcagagagaagctgctgttctaagacaagaactgcatgctttgcaagaaaatcatcggcaaatgatgggagaacagctaaatggtttaagtgttaacgagctaaacagtcttgagaatcaaattgagataagtttgcgtggaattcgtatgagaaaggaacaactgttgactcaagaaatccaagaactaagccaaaagaggaatcttattcatcaggaaaacctcgatttatctaggaaagtacaacggattcatcaagaaaatgtggagctctacaagaaggcttatatggcaaacacaaacgggtttacacaccgtgaagtagctgttgcggatgatgaatcacacactcagattcggctgcaactaagccagcctgaacattccgattatgacactccaccaagagcaaacgaataa

SEQ ID NO: 84 - protein, 185 aa, Glycine max
MAAEPKESPSNNPGLHTTPDEATKGYIMQQTMFRIKDPKVSLDFYSRVLGMSLLKRLDFPEMKFSLYFMGYENTAEAPSNPIDKVVWTFSQKATIELTHNWGTESDPEFKGYHNGNSEPRGFGHIGVTVDDTYKACERFQNLGVEFVKKPEDGKMKGIAFIKDPDGYWIEIFDRKTIGNVTQTAA

SEQ ID NO: 85 - protein, 206 aa, Arabidopsis thaliana
MPSRRRTLLKVIILGDSGVGKTSLMNQYVNKKFSNQYKATIGADFLTKEVQFEDRLFTLQIWDTAGQERFQSLGVAFYRGADCCVLVYDVNSMKSFENLNNWREEFLIQASPSDPENFPFVLIGNKVDVDDGNSRVVSEKKAKAWCASKGNIPYFETSAKVGTNVEEAFQCIAKDALKSGEEEELYLPDTIDVGTSNQQRSTGCEC

SEQ ID NO: 86 - protein, 345 aa, Zea mays
MGNQCPNGTLGSDYYNRPASRFADGCLEDDRYSDLKKFDKPWPEVNSFKPTAVGILKRGLDPTSITVLERKTADVREHYIIGRRLGQGQFGTTFLCTEISTGCEYACKTIPKRKLITKEDVEDVRREIQIMHHLSGHKNVVSIKDVYEDGQAVYIVMELCAGGELFDRIQEKGHYSEQKAADLIRIIISLVAMCHSLGVMHRDLKPENFLLWDKEDDLSIKAIDFGLSVFFKPGQVFTELVGSPYYVAPEVLHKRYGPEADVWSAGVILYVLLSGVPPFWAETQQGIFDAVLKGHIDFDSDPWPKISESAKNLIRKMLCPCPSERLKAHEVLRHPWICENGVATD

SEQ ID NO: 87 - protein, 240 aa, Glycine max
MALEALNSPTTTAPSFPFDDPTIPWAKRKRSKRSRDHPSEEEYLALCLIMLARGGTTSVNNRHVSPPPPQPQPQPTPDPSTKLSYKCSVCDKSFPSYQALGGHKASHRKLAAAAEDQPPSTTTSSAAATSSASGGKAHECSICHKSFPTGQALGGHKRCHYEGNGNGNNNNSNSVVTVASEGVGSTHTVSHGHHRDFDLNIPAFPDFSTKVGEDEVESPHPVMKKPRLFVIPKIEIPQFQ

SEQ ID NO: 88 - protein, 341 aa, Synechococcus elongatus PCC 6301
MASMISSSAVTTVSRASRGQSAAVAPFGGLKSMTGFPVKKVNTDITSITSNGGRVKCMPAGRHMTLAIRPKLAFNWPTALFMVAIHIGALLAFLPANFNWPAVGVMVALYYITGCFGITLGWHRLISHRSFEVPKWLEYVLVFCGTLAMQHGPIEWIGLHRHHHLHSDQDVDHHDSNKGFLWSHFLWMIYEIPARTEVDKFTRDIAGDPVYRFFNKYFFGVQVLLGVLLYAWGEAWVGNGWSFVVWGIFARLVVVYHVTWLVNSATHKFGYRSHESGDQSTNCWWVALLAFGEGWHNNHHAYQYSARHGLQWWEFDLTWLIICGLKKVGLARKIKVASPNN

SEQ ID NO: 89 - protein, 72 aa, Arabidopsis thaliana
MGRGKIEIKRIENSTNRQVTFCKRRNGLLKKAYELSVLCDAEVALIVFSTRGRLYEYANNNIRSTIERYKKA

SEQ ID NO: 90 - protein, 166 aa, Oryza sativa
MANSDTSNSGTVAEVNAQHYQQESSKLRQQISSLQNANSRTIVGDSINTMSLRDLKQVENRLEKGIAKIRARKNELLYAEVEYMQKREVELQNDNMYLRSKVVENERGQQPLNMMGAASTSEYDHMVNNPYDSRNFLQVNIMQQPQHYAHQLQPTTLQLGQQPAFN

SEQ ID NO: 91 - protein, 244 aa, Zea mays
MGRGRVELKRIENKINRQVTFAKRRNGLLKKAYELSVLCDAEVALIVFSNRGKLYEFCSGPSITRTLERYEKNSYAGPDTAVQNKENELVQNSRNEYLKLKAKVDNLQRTQRNLLGEDLGSLGVKELDQLEKQIDSSLSHIRSTRTQHMLDQLTDLQRREQMMCEANKCLRRKLEETSNQVHGQVWEHGANLLLGYERHSSPQQAPSHVGNGLFFHPLEAAAEPTLQIGFAPEHMNNFMPAWLP

SEQ ID NO: 92 - protein, 269 aa, Arabidopsis thaliana
MAMEWDNQLQPNNHHSSNLQGIDVNGGSGAGGGMYVKVMTDEQYETLRKQIAIYGTICERLVEMHKTLTAQQDLAGGRMGGLYADPMMSSLGHKMTARQRWTPTPVQLQILERIFDQGTGTPSKQKIKDITEELSQHGQIAEQNVYNWFQNRRARSKRKQHGGGSSGNNNGESEVETEVEALNEKRVVRPESLLGLPDGNSNNNGLGTTTATTTAPRPEDLCFQSPEISSDLHLLDVLSNPRDEHLVGKMGLAESYNLYDHVEDYGMSG

SEQ ID NO: 93 - protein, 189 aa, Arabidopsis thaliana
MVHSRKFRGVRQRQWGSWVSEIRHPLLKRRVWLGTFETAEAAARAYDQAALLMNGQNAKTNFPVVKSEEGSDHVKDVNSPLMSPKSLSELLNAKLRKSCKDLTPSLTCLRLDTDSSHIGVWQKRAGSKTSPTWVMRLELGNVVNESAVDLGLTTMNKQNVEKEEEEEEAIISDEDQLAMEMIEELLNWS

SEQ ID NO: 94 - protein, 274 aa, Arabidopsis thaliana
MEMESFMDDLLNFSVPEEEEDDDEHTQPPRNITRRKTGLRPTDSFGLFNTDDLGVVEEEDLEWISNKNAFPVIETFVGVLPSEHFPITSLLEREATEVKQLSPVSVLETSSHSSTTTTSNSSGGSNGSTAVATTTTTPTIMSCCVGFKAPAKARSKRRRTGRRDLRVLWTGNEQGGIQKKKTMTVAAAALIMGRKCQHCGAEKTPQWRAGPAGPKTLCNACGVRYKSGRLVPEYRPANSPTFTAELHSNSHRKIVEMRKQYQSGDGDGDRKDCG

SEQ ID NO: 95 - protein, 277 aa, Arabidopsis thaliana
MAKGEYREQKSNEMFSKLPHHQQQQQQQQQQHSLTSHFHLSSTVTPTVDDSSIEVVRRPRGRPPGSKNKPKPPVFVTRDTDPPMSPYILEVPSGNDVVEAINRFCRRKSIGVCVLSGSGSVANVTLRQPSPAALGSTITFHGKFDLLSVSATFLPPPPRTSLSPPVSNFFTVSLAGPQGQIIGGFVAGPLISAGTVYVIAASFNNPSYHRLPAEEEQKHSAGTGEREGQSPPVSGGGEESGQMAGSGGESCGVSMYSCHMGGSDVIWAPTARAPPPY

SEQ ID NO: 96 - protein, 511 aa, Oryza sativa
MATFFRSANLASRVFDRQFLSPRPGATVNTVRQFYENLVPSYTICDIDCPDYSFRKFTDDGNYLVAFSRNHQDLIVYRPIWPTFSCNEPCDSHDLPPKAKKFDSFFKQLYSISLASSNEYICKDFFLYMECHQFGLFATSTAQSNDSSATEGAIHGVPSIEKITFYLVRLDDGAILDEKAFRNDFINLAHSIGAYLYEDLLCIVSLRYQTIHVLQIRDSGNLVEVRKIGAFCQEDDELFLHSHGQAARGVSFLPGIKQRLLSFIFRKTWNEESDQTLRVQHLKKKFYFHFQDYVDLIIWKVQFLDRHHLFIKFGSVDGGVSRSTEQNSAFFAVYNMETTDIVSLYQNSSEELYSLFEYFYDHFHTNPQNSSHGNFISSHSNNVHALDQLRTIKNKANSTSQFVKKMMASLPYTCQSQSPSPYFDLSLFRYDEKLISAIDRHRHCTEHPIKFISVKQPNVVKFKIKPGSDSGASDSRAKRISSFLFHPFFPLALSIQQTYMQPTVVNLHFRR

SEQ ID NO: 97 - protein, 174 aa, Glycine max
MSDAPASPSHESGGEQSPRGSLSGAAREQDRYLPIANISRIMKKALPPNGKIAKDAKDTMQECVSEFISFITSEASEKCQKEKRKTINGDDLLWAMATLGFEDYIEPLKVYLARYREAEGDTKGSARSGDGSARPDQVGLAGQNAQLVHQGSLNYIGLQVQPQHLVMPSMQGHE

SEQ ID NO: 98 - protein, 140 aa, Arabidopsis thaliana
MMSFEMNDRKKIGLGLTGFGVFFSFLGIVFVFDKGLLAMGNILFISGVSLTIGFKSTMQFFMKRQNYKGTISFGVGFFFVIIGWPILGMMLETYGFFVLFSGFWPTLAVFAQKIPVLGWIIQQPYIRSFFDKYRGKRVPV

SEQ ID NO: 99 - protein, 130 aa, Zea mays
MAAAGLRKGNARLPPEVNRVLYVRNLPFNISSEEMYDIFGKYGAIRQIRLGNAKDTRGTAYVVYEDIYDAKNAVDHLSGFNVANRYLIVLYYQPAKMSKKSDIKKKEDEITRLQEKYGIGSKTPGPGSSD

SEQ ID NO: 100 - protein, 179 aa, Glycine max
MSSINPSRATAPSAFATRRPWEEFFALHSFTRPYTLGETTLRVKRNLGHFRVNYAMVVLLFVFLSLLWFPISLVVFLAVFAAWFFLYFFRDGPIVVLRRELDDRLVLAALSAVTVAGLVLTGVWLNVVVALLFAAAAVALHAALRNTEDLYVDELEVSDGGLVSVVGGSPTKRTGYARI

SEQ ID NO: 101 - protein, 479 aa, Agrobacterium tumefaciens
MSLKTAPVIVWFRKDLRLSDNLALLAAVEHGGPVIPVYIREKSAGPLGGAQEWWLHHSLAALSSSLEKAGGRLVLASGDAERILRDLISETGADTVVWNRRYDPTGMATDKALKQKLRDDGLTVRSFSGQLLHEPSRLQTKSGGPYRVYTPFWRALEGSDEPHAPADPPKSLTAPKVWPKSEKLSNWKLLPTKPDWAKDFSDIWTPGETGALDKLDDFIDGALKGYEEGRDFPAKPATSLLSPHLAAGEISPAAVWHATKGLSRHIASNDISRFRKEIVWREFCYHLLFHFPELGEKNWNDSFDAFSWRDDEKSFKAWTRGMTGYPIVDAGMRQLWQHGTMHNRVRMIVASFLIKHLLIDWRKGEKWFRDTLVDADPASNAANWQWVAGSGADASPFFRIFNPILQGEKFDGDGDYVRRFVPELEKLERKYIHKPFEAPKDALKKAGVELGKTYPLPIVDHGKARERALAAYAAVKKTT

SEQ ID NO: 102 - protein, 508 aa, Oryza sativa
MAATPPSSQHRRPLSSSASAASLAGKPRGGGLLLGRYELGRLLGHGTFAKVYQARSADSGEPVAIKVLDKEKAMRHGLVPHIKREIAILRRVRHPNIVRLFEVMATKSKIYFVMELVRGGELFGRVAKGRLKEDTARRYFQQLVSAVGFCHARGVFHRDLKPENLLVDEHGDLKVSDFGLSAVADQFHPDGLLHTFCGTPSYVAPEVLARRGYDGAKADIWSCGIILFVLMAGYLPFHDQNLMAMYRKIYRGEFRCPRWFSKDLSSLLNRILDTNPETRITVKEVMESRWFQKGFRPVRFYVEDDQVHSLADGDNDMPELEPSEPPPPPPFPPPPPQQDDDGEESGWESDSSVASCPATLSSEERRQRPLGSLTRPASLNAFDIISFSKGFDLSGLFEERGSEVRFISAEPMQTIITKLEEIAKVKSFFVRRKDWRVSIEGTREGLKGPLTIGAEIFELTPSLVVVEVKKKAGDKEEYDDFCNRELKPGMQHLVHHMGSVPNIPSDTE

SEQ ID NO: 103 - protein, 451 aa, Zea mays
MAEHKGNVLLHKYEMGKLLGQGTFAKVYHARNTATSESVAIKVIDKEKVMKVGLIDQIQREISVMKLVRHPNIVQLYEVMATKTKIYFVLEHVKGGELFNKIQRGRLKEDAARKYFQQLICAVDFCHSRGVYHRDLKPENLLLDENSNLKVSDFGLSALAECHRQDGLLHTTCGTPAYVAPEVINRKGYDGAKADIWSCGVILFVLLAGYLPFHDKNLMDMYKKIEKADFKCPSWFSTDVRRLLQRILDPNPSRRISVKKIMENPWFRKGLGAKLLRYDLQNKNAPHVDKKADFDSLSTNVTTESKQHEEKKPTNMNAFDIISLSTGLDLSGLFEESNKKRESKFTSTNTSSTIISKIEDIAKNLRLNLTKKDGGLLKMEASKPGRKGVMGIDAEVFEVSPNFHLVEIKKTNGDTLEYQKVLNQEMRPALKEIVWAWQGEQSKQKQEQQSC

SEQ ID NO: 104 - protein, 438 aa, Zea mays
  misc_feature (407)..(407): Xaa can be any naturally occurring amino acid
MDGRRTILMGRYEIGKQLGQGTFAKVFYARNLTTGLAVAIKMINKDKVMKVGLMEQIKREISIMRLVKHPNILQLYEVMASKSKIYFVLEYAKGGELFNKIAKGGKLSEDVARKYFQQLVSAVDFCHSRGVYHRDLKPENLLLDENENLKVSDFGLSALAESKRQDGLLHTTCGTPAYVAPEVLSRKGYDGAKADVWSCGVILFVLVAGYLPFHDTNLIEMYRKISRAEFRCPRFFSTELKDLLHKILVPDPSTRISISRIKRSAWYRKPVEAHAKKNEAETSENTCTGEGTTSVSTECSTSEGNQGPLSLPNLNAFDIICLSTGFNLSGFFEDKYGRREERFTTRQPVTTVFTKLKELAKRLKLKVNKKENGTLKLAAPKEGKKGMLELDAEIFEVAPSLLLVELXKKTNGDTLEYQKLVKEEIRPALKDIVWVWQD

SEQ ID NO: 105 - protein, 463 aa, Zea mays
MAAAAAFSSTSVVAALAASGFLGKKLVTSIIIRNKKKGYDSLHGATTTIRVRAMAVNKETEQDRWRGLALDTSDDQQDITRGKGRVDPLFQAPMGDGTHVAVLSSYDYISQGLRHYSLDNMMDGYYIAPAFMDKLVVHIAKNFMPLPNIKVPLILGIWGGKGQGKSFQCELVLAKMGINPIVMSAGELESGNAGEPAKLIRQRYREAADMIKKGKMCVLFINDLDAGAGRMGGTTQYTVNNQMVNATLMNIADNPTNVQLPGMYNKEENPRVPIIVTGNDFSTLYAPLIRDGRMDKFYWAPTREDRVGVCKGIFRSDGVPDEDVVRLVDAFPGQSIDFFGALRARVYDDEVRRWVAETGVENIARRLVNSKEGPPTFEQPRMTLDKLMEYGRMLVEEQENVKRVQLADKYLSEAALGDANDDDDLYGKAAQHVRVPVPEGCTDPKAGNFDPTARSDDGSCVYN

SEQ ID NO: 106 - protein, 307 aa, Zea mays
MAATEVYSPTTAAAAQQQRGKAASQAWRAVVGWIGFFLQVLLQILRGTPSCAQLLSFVGFRYPLLSGPAASEPLPEVAFMPLHSEIPADAAPAPKPASEPLGRLTVVLDLDETLVSAYESSSLPAIVRTQAVEAGLHCFDMECISSDKDVEGKQKVNHVTVFERPGLHEFLRKTSEFADLILFTAGLEGYARPLVDRIDVHNRFRLRLYRPSTVTTEYREHVKDLTRVSKDFGRIVIVDNNPFSFILQPLNGIPCVPFSAGQHSDDQLMTVIFPLLKHLSLQKDVRPVLRERFHMPEWFQNHGIPQV

SEQ ID NO: 107 - protein, 220 aa, Zea mays
MGQQSLIYAFVARGTVILAEYTEFTGNFTTIASQCLMKLPASNNKFTYNCDGHTFNYLVEDGFTYCVVAVESVGQQIPIAFMDRVKEDFTKRYGGGKAATAAANSLNREFGSKLKEHMQYCVDHPEEVSKLAKVKAQVSEVKGVMMENIEKVLDRGEKIELLVDKTENLRSQAQDFRQQGTNVRRKMWLQNMKIKLIVLGIIIALILIIILSVCHGFKCH

SEQ ID NO: 108 - protein, 469 aa, Zea mays
MGKRSGGRKLPFFTRSSSSSSKRNRSARRLPSLPKQDNATRALLASPSAASPSATPGSAAAGQTAQLPPPLSVTAGGGVAVSGKVNKKKAGTRLWMRLDRWSASEIVELDKASIIRRAGLPPRDLRILGPVFSRSSSILAREKAMVINLEFIRAIVTAEEVLLLDPLMHEVLPFVDQLRQHLPLRSRVGENGECAPDGNGEKQKGSLNEATGAEHELPFEFHVLEVALEVVCSSLDLSVSDLERHATPVLDELTKNVSTRNLERVRNLKSHLTRLLARVQKVRDEIEHLLDDNEDMEHLYLTRKQVQNQQVEALMSSAASNSIVLAGTGVPRLNSSFRRSLSIATSMHLDNDVEDLEMLLEAYFMQLDGIRNRILSVREYIDDTEDYVNIQLDNQRNELIQLQLTLTIASFGIAANTFIAGAFAMNIPGSLFNTDGSLFWPFVGSTSSGCFVITVLLLGYAWWKKLLGP

SEQ ID NO: 109 - protein, 244 aa, Zea mays
MISPDAARNVVGIIGNVISFGLFLSPVLTFWRIYKAKDVEEFKPDPYLATLLNCMLWVFYGIPVVHPNSILVVTINGIGLVIEAVYLTIFFLYSDSQKRKKAFAILAVEILFMLAVVLGVILGAHTHEKRSMIVGILCVIFGSMMYASPLTIMSRVIKTKSVEYMPFLLSLVSFLNGCCWTAYALIRFDLYVTIPNALGAFFGLIQLILYFCYYKSTPKNEKNVELPTVSSNVGGGNVTVSVER

SEQ ID NO: 110 - protein, 337 aa, Zea mays
MRMLSKACSIVASSLPRCSSSAAAPTMRGQPSLLPSVRKQWPGKPLLYGIGTLLVMPLRTLYGVGRVFGAGRFLCNMTNVSSSLQIELVPCLRDNYAYILHDVDTGTVGVVDPSEAMPIINALEKRNQNLTYILNTHHHYDHTGGNLELKAKYGAKVIGSEKDKDRIPGIDITLKEGDTWMFAGHQVLVLETPGHTTGHVCYYFAGSGAIFTGDTLFNLSCGKLFEGTPQQMYASLQKITALPDDTKVYCGHEYTLSNAKFALSVEPGNKALQEYAANAAELRNKNIPTVPTTIGREKECNPFLRTSNPEIKRTLSVPDHFDEDRVLGVVRRAKDNF

SEQ ID NO: 111 - protein, 377 aa, Zea mays
MGRDKSRRLYGSRHFRQRLVLATLTSTAVTIEDIRSGDASPGLRPYEVSLLRLLDKISDHHTIDLNETGTKLRYRPGVIIGGKGLEHDCGVHRGIGYFLEPLILLGLFSRAPISIRLKGITNDTKDPSVDTFRTTTLHMLKHFGVPLDGFDLNIDSRGSPPLGGGEVFLRVRNINSTLTAANWVDEGMVKRIRGVSFSTRVSPQLENRIIYAARGIFNRFIPDVHIHTDHRSGSAGGRSPGYGVSLVAETTTGCLLSVDVTVSYPSVDEINEESEKPELTSPEDLGVQAASMLLEEVAQGGVVDSTHQGLLFILCALCPPDVSKVRVGQLTPYGIETLRNIRDFLDVKFIIKPDPNSNTVTLKCVGAGVKNLARKIS

SEQ ID NO: 112 - protein, 208 aa, Oryza sativa
MEVEAHHGFLPPAAGRQHLYGHPHYQLSGDDEWWEYIPCPFCYIEVEVHFLCDHLQEEHCFDMKNAVCPICADNLDKDTDEHFRVQHSHLLKRRKSSSFSCKPSSAAADKGSYEEDSYFEAPSHCMGRPAPDSSPDPLLSQFICCSLAPPVDSPRRSEADAEGHGSSSSDDQKRREQGVMDDASKEELEERLQRIEFVKQMLMTTIAY

SEQ ID NO: 113 - protein, 375 aa, Glycine max
MGSKGKRKEQESIITRVMAHGGRYVQYNVYGNLFEVSSKYVPPIRPVGRGAYGIVCAAVNCDTHEEVAIKKIGNAFDNIIDAKRTLREIKLLRHMDHENIIAIRDIIRPPRKDAFNDVYIVYELMDTDLHQIIRSDQPLNDDHCQYFLYQLLRGLKYVHSANILHRDLKPSNLLLNSNCDLKIADFGLARTTSETDFMTEYVVTRWYRAPELLLNCSEYTSAIDVWSVGCIFGEIMTREPLFPGKDYVHQLRLITELLGSPDDASLGFLRSGNAKRYVRQLPQYRKQNFSARFPNMSPEALDLLEKMLIFDPNKRITVDEALCHPYLSSLHDINDEPVGPGQFNFDFEQPTCTEEHIKELIWRESVKYNPDPPSQ

SEQ ID NO: 114 - protein, 468 aa, Cupriavidus metallidurans
MSTLRGVSMSDMQEHKVTPYDQFNYEVPENVFPREGISANAAAAIVISDEWTDTNPMLNMSSFVTTFAEPEAREVAARNIFKNYIDHDMYPRLFAMEGRMVRWLHELWNGPKGVEPYGTCTVGSSEACMLGGLAHKWNWRQRRQAEGKDATRPNMVTGGNVQIVWKKFLRYFDVEPRIVPLKPGNYCLTAEDLDKYVDENTICVVAIAGQTFTGEDDDIQGIHDWLDAYEKRTGISIPMHIDGASGGFVNPFLYPDYKWDFRLPRVQSINASGHKYGLTPPGLGWVVFRERKIFNEELVFYVNYLGGEMPTATLNFSRNAFQVAVQYYQFLRLGFDGYKRVMQHTLDNAIFLRQQLVDSGYFDIMNTTQRIPVVAVTLNKKYKNFNEFDVSNKVREKGWVLSAYTMPPNAESVTSLRVVVRPHVNHNVAQLLANDIINACKFLEANGGNAKPPALHKHAEAQSTSLKC

SEQ ID NO: 115 - protein, 406 aa, Oryza sativa
MGSKKRSPQHPAAAAPPPAVGGGGGGEVSGDGGASTANGPVVPKPSEVAPFLTKVYDMVSDPATDNVISWAEGGGSFVIWDSHAFERDLHRHFKHSNFTSFIRQLNTYGFRKVHPDRWEWANEGFIMGQKHLLKTIKRRKKSSQESPSEIQKAPVKTAPGTENIEIGKYGGLEKEVETLKRDKALLMQQLVDLRHYQQTSNLEVQNLIERLQVMEQNQQQMMALLAIVVQNPSFLNQLVQQQQQQRRSNWWSPDGSKKRRFHALEQGPVTDQETSGRGAHIVEYLPPVPETSGQVNPVEGAICSANSQPVPSPAVATPMDMQTSNVADTLGSSEEPFADNSTLHEWDDNDMQLLFDDNLDPILPPFENDGQMGPPLSVQDYDFPQLEQDCLMEAQYNSNNPQYGND

SEQ ID NO: 116 - protein, 159 aa, Glycine max
MSLIPSFFGTGRRTNVFDPFSLDVWDPFHGFPGTTALSAPRSETAAFANTRIDWKETAEAHVFKADLPGLKKEEVKVEIEEEGRVLQISGQRTKEKEDKNDTWHRLERSSGSFLRRFRLPENAKLDQVKAGMENGVLTVTVPKVDVKKPDVKPVQITEG

SEQ ID NO: 117 - protein, 220 aa, Zea mays
MGSEGPSVVTVHVTGFKKFHGVAENPTEKIVTNLKSFLEKRGLPKNLVLGSCTVLETAGEGALATLYKVLESAVADRGTGSSAQGQVIWIHFGVNSGAIRFALENQAVNEATFRCPDELGWKPQRVPIVPSDGSISRTRETTLPVNELTKSLRKIGYDVVPSGDAGRFVCNYVYYHSLRFAEQHGIKSLFVHVPLFLTIDEEVQMHFVASLLEVIAFSSN

SEQ ID NO: 118 - protein, 486 aa, Arabidopsis thaliana
MAGVVRSSPGSSQPPPPPPHHPPSSPVPVTSTPVIPPIRRHLAFASTKPPFHPSDDYHRFNPSSLSNNNDRSFVHGCGVVDREEDAVVVRSPSRKRKATMDMVVAPSNNGFTSSGFTSIPSSPCQTPRKGGRVNIKSKAKGNKSTPQTPISTNAGSPITLTPSGSCRYDSSLGLLTKKFVNLIKQAKDGMLDLNKAAETLEVQKRRIYDITNVLEGIDLIEKPFKNRILWKGVDACPGDEDADVSVLQLQAEIENLALEEQALDNQIRQTEERLRDLSENEKNQKWLFVTEEDIKSLPGFQNQTLIAVKAPHGTTLEVPDPDEAADHPQRRYRIILRSTMGPIDVYLVSEFEGKFEDTNGSGAAPPACLPIASSSGSTGHHDIEALTVDNPETAIVSHDHPHPQPGDTSDLNYLQEQVGGMLKITPSDVDNDESDYWLLSNAEISMTDIWKTDSGIDWDYGIADVSTPPPGMGEIAPTAVDSTPRC

SEQ ID NO: 119 - protein, 312 aa, Arabidopsis thaliana
MAQQGQGSMDPAALDDIIRRLLDYRNPKPGTKQAMLNESEIRQLCIVSREIFLQQPNLLELEAPIKICGDIHGQYSDLLRLFEYGGFPPTANYLFLGDYVDRGKQSLETICLLLAYKIKYPENFFLLRGNHECASINRIYGFYDECKRRFSVRLWKVFTDSFNCLPVAAVIDDKILCMHGGLSPDLTNVEQIKNIKRPTDVPDSGLLCDLLWSDPSKDVKGWGMNDRGVSYTFGPDKVAEFLIKNDMDLICRAHQVVEDGYEFFADRQLVTIFSAPNYCGEFDNAGAMMSVDESLMCSFQILKPADRKPRFL

SEQ ID NO: 120 - protein, 515 aa, Arabidopsis thaliana
MEVLASSSLSPISFTKPNKINPNFSIQVKLWVKQPPKISKASKFSYARSRSNISRSNAANPGVVFVCNRFLCVIERNDQRKLSGKVMMKSSVNFRQNLSVALVRIVSVLLVSSISVVTTDSPPSWGLTEENLLFLEAWRTIDRAYIDKTFNGQSWFRYRETALRNEPMNTREETYMAIKKMVATLDDPFTRFLEPGKFKSLRSGTQGAVTGVGLSIGYPTASDGPPAGLVVISAAPGGPANRAGILPGDVIQGIDNTTTETLTIYDAAQMLQGPEGSAVELAIRSGPETRLLTLTRERVSVNPVKSRLCELPGSGSNSPKIGYIKLTTFNQNASSAVREAIETLRGNNVNAFVLDLRDNSGGSFPEGIEIAKFWLDKGVIVYICDSRGVRDIYDTDGSNAIATSEPLAVLVNKGTASASEILAGALKDNKRALVYGEPTYGKGKIQSVFELSDGSGLAVTVARYETPAHTDIDKVGVTPDHPLPKSFPKDEEAFCGCLKDPTAACYLNQGLLFSR

SEQ ID NO: 121 - protein, 515 aa, Arabidopsis thaliana; identical to SEQ ID NO: 120

SEQ ID NO: 122 - protein, 192 aa, Zea mays
MASDGAAATPAKVTPKKANLLDPHSIKHLLDETISEVVKSKGYTEDTRLGNWKLGIGAAVIAVALLAQFYPKKFPQNRDFLLGCIALYVVLNVVLLILSYTKEKDAILFTHPPMGSFSSTGLTISSKLPRFSDMYTLTIASADPQSISANKPVHFTKSVTKWFTKEGVLVEGLFWKDVEKLIDDYNSERKSK

SEQ ID NO: 123 - protein, 311 aa, Oryza sativa
MAKHFVLNTGAKIPSVGLGTWQSDPGVVGNAVYAAVKAGYRHIDCASAYNNEKEVGLALKKLFEEGVVKREDLFITSKLWCDHHAPEDVPEALDATLNDLQLEYLDLYLIHWPFRTKKGSSIGKPESYLPPDIPSTWAAMEKLYDSGKSRAIGVSNFSSKKLGDLLAAARVPPAVDQVECHPGWQQMKLHNFCQSTGIHLSAYSPLGSPGSTFMNGNVLKEPIIISIAEKLGKTPAQVALRWNIQMGHSVLPKSVSEERIKQNLDVYDWSIPEDLLAKFSEIKQVRLLRGNFIVNPQSVYKTHEELWDREI

SEQ ID NO: 124 - protein, 370 aa, Zea mays
MTSTAAGASSSAAKSESYLRADKIDLESLDIQLEKQLAKTWEKHKGSYNQGPREDWEIDLAKLEIRYVIAQGTYGTVYRGTYDGQDVAVKLLDWGEDGFASETETATLRASFKQEVAVWHELNHPNVTKFVGASMGTTDLKIPANSSNSGGRTELPPRACCVVVEYLAGGSLKQYLIKNRRRKLAYKVVVQIALDLARGLNYLHSRKIVHRDVKTENMLLDTQRNLKIADFGVARVEAQNPKDMTGATGTLGYMAPEVLEGKPYNRKCDVYSFGICLWEIYCCDMPYPDLSFADVSSAVVHQNLRPDIPRCCPSPMANIMRKCWDANPDKRPDMDDVVRFLEALDTSKGGGMIPEGQAGGCLCFFRARGP

SEQ ID NO: 125 - protein, 341 aa, Zea mays
MDHAAEAQRTDLMTITRHVLNEQSRHPESRGDFTILLSHIVLGCKFVAAAVNKAGLAKLIGLAGETNVQGEEQKKLDVLSNEVFVKALVSSGRTCVLVSEENEEAIFVDPALRGKYCVCFDPLDGSSNIDCGVSIGTIFGIYMVKDKDNVTLEDVLQPGTNMLAAGYCMYGSSCTLVLSTGNGVNGFTLDPSLGEFILTHPNIKIPRKGKIYSVNEGNAKNWDGPTAKFVEKCKYPEDGSPPRSLRYIGSMVADVHRTLLYGGIFLYPADQKSPNGKLRVLYEVFPMSFLMEQAGGQAFTGKQRALELAPAKLHDRSPVFLGSYDDVEEIKALYASMSNSG

SEQ ID NO: 126 - protein, 455 aa, Glycine max
MSNLTSASGEASASSGNRTEIGTDYSQQYFAPPLSQAQPPPLKKKRNLPGNPDPEAEVVALSPKTLLATNRFICEICNKGFQRDQNLQLHRRGHNLPWKLKQRSSNEIIRKKVYVCPEASCVHHDPSRALGDLTGIKKHFCRKHGEKKWKCDKCSKKYAVQSDWKAHSKTCGTREYRCDCGTLFSRRDSFITHRAFCDALAEESSRSVTGIGIVANSTSTQPTAAAASHQQDIIHGNSNNFSLKKEQQAGFRPPWIGQPSPSSASSFLVSHQENPNPRGGGPGPTLLPPYQTAPHMSATALLQKASQMGATMSKTGSMIGTHQQQAHVSANAALNLSSRDHQMTPTLHGLVPFGNKAVPAVGNGVSPSLLHHIIDSFSSPFEGTSFEDTFGGAGGDAMTKTTTADDGARGNNNEALTRDFLGLRPLSHTDILNIAGMGSCINSSQHNQTPNPWQG

SEQ ID NO: 127 - protein, 1014 aa, Synechocystis sp. PCC 6803
MSPSQPHPPIATFEPESFLILVVDDVKENIYVISELLEGEGYSTTFVTSGPEALQRVTQAQPDLILLDLMMPGMDGLEVCDRLKQDPQTRDIPVIFLTASNEKQDLLQAFAKGAVDYVTKPFSPPELLARVKTHLELKQTRDNLHHTLLEQARTAEALACTSTRLGILVQNMQAGVLMTDAQGTIVVVNPEFARLFNLGFPADLLLGKNLTAIAPRINGLISHGQGVTHNFLAIESPEPLLKVELALEDGRFFERDYVPIMLGDSSQGHFWPYRDISQRKQVEMIQGQSLEMERRMRQQLAEQNQELVAATTAAEAANRSKSEFLATMSHEIRTPMNAIIGMTGLLLDTDLTTQQKYFAQTIRNSGETLLTLINDILDFSKIEAGKLDLEVYPFDLGQCLEEALDVVVPSARQKSLTLIRRFLTPIPPNLQGDVTRLRQILVNLLSNAVKFTEAGQVKVTVEVVDHDAAKGEYQICFAVQDTGIGIAPNQQQALFQAFSQGNSSITRRFGGTGLGLAICVRLTALMGGTIWAESNGCVVGNPPELWQIGQPTIEGSTFYFTVNLTVLPSCAYSVHNLRHSLFIGRSVLVADYDEGRGTRMRNLLASWRLQAEQITFSSPAKLGEDLKSRLTQKNYGALILHCPYPEGRGKQFTDFDLGKITTWAPTEQDIPVLVATDIYLSPGERYSGDKPPVQAWIKSPINPDELENTLVDVLGQTEPPTLVSTEAISGPLFPYSSSNLTILLAEDNLINQQVAKLLLKKLGYPVDVVNNGQEALSALAKGDYDVVLMDVEMPEMDGLTATEHIRRSQGRSERPWIIAVTAYSMEGDRERCLASGMNDYVSKPIRLEALQQALQVAATALQSTSQDRMATVSCVSAFEAKPSPSSPCPEDPAGTTLPPIDQDIICSLRDLDRENGQLILREIIDIYCQTAPELLQRIKLAIANQDWGNLSSAAHTLGSSSANLGAVLLAQQAKTLENLTRQRDSRAMDPGHFPTLAASYERVQGELKTMLDRL

SEQ ID NO: 128 - protein, 1014 aa, Synechocystis sp. PCC 6803; identical to SEQ ID NO: 127

SEQ ID NO: 129 - protein, 266 aa, Arabidopsis thaliana
MEVTSQSTLPPGFRFHPTDEELIVYYLRNQTMSKPCPVSIIPEVDIYKFDPWQLPEKTEFGENEWYFFSPRERKYPNGVRPNRAAVSGYWKATGTDKAIHSGSSNVGVKKALVFYKGRPPKGIKTDWIMHEYRLHDSRKASTKRNGSMRLDEWVLCRIYKKRGASKLLNEQEGFMDEVLMEDETKVVVNEAERRTEEEIMMMTSMKLPRTCSLAHLLEMDYMGPVSHIDNFSQFDHLHQPDSESSWFGDLQFNQDEILNHHRQDYV

SEQ ID NO: 130 - protein, 592 aa, Saccharomyces cerevisiae
MLSLSAKNHFTVSNSITHVIKSYHIRTLTSSAEKMPHITTPFSTSASSTKLKAFRKVRPVLQRHSSSWIVAQNHRRSLSGQSSLNDLRHLNRFPHHTLKTSNNEFYPAEQLTLEDVNENVLKAKYAVRGAIPMRAEELKAQLEKDPQSLPFDRIINANIGNPQQLQQKPLTYYRQVLSLLQYPELLNQNEQQLVDSKLFKLDAIKRAKSLMEDIGGSVGAYSSSQGVEGIRKSVAEFITKRDEGEISYPEDIFLTAGASAAVNYLLSIFCRGPETGVLIPIPQYPLYTATLALNNSQALPYYLDENSGWSTNPEEIETVVKEAIQNEIKPTVLVVINPGNPTGAVLSPESIAQIFEVAAKYGTVVIADEVYQENIFPGTKFHSMKKILRHLQREHPGKFDNVQLASLHSTSKGVSGECGQRGGYMELTGFSHEMRQVILKLASISLCPVVTGQALVDLMVRPPVEGEESFESDQAERNSIHEKLITRAMTLYETFNSLEGIECQKPQGAMYLFPKIDLPFKAVQEARHLELTPDEFYCKKLLESTGICTVPGSGFGQEPGTYHLRTTFLAPGLEWIKKWESFHKEFFDQYRD

SEQ ID NO: 131 - protein, 492 aa, Glycine max
MDPYKLRPSSAFNSPFWTTNSGAPVWNNNSSLTVGARGPILLEDYHLVEKLANFDRERIPERVVHARGASAKGFFEVTHDISHLTCADFLRAPGVQTPVIVRFSTVIHERGSPETLRDPRGFAVKFYTREGNFDLVGNNLPVFFVRDGMKFPDMVHALKPNPKNHIQENWRILDFFSHFPESLHMFTFLFDDLGVPQDYRHMDGFGVNTYTLINKAGKAVYVKFHWKTTSGIKCLLEEEAIKVGGANHSHATQDLHDSIAAGNYPEWKLFVQTIDPEHEDKFDFDPLDVTKTWPEDIIPLQPVGRLVLNKNIDNFFAENEQLAFCPAIVVPGVYYSDDKMLQTRIFSYADSQRHRLGPNYLQLPANAPKCAHHNNHHEGFMNFIHRDEEVNYFPSRYDPVRHAETFPIPPAICSGRREKCGIEKENNFKQPGERYRSWAPDRQDRFNRRWVDALSDPRVTHEIRSVWISYWSQADRSLGQKIASRLSMRPNI

SEQ ID NO: 132 - protein, 867 aa, Zea mays
MASAAGSSNVMLAINEKKTITTDLYRPLRLYIASTYSEREAAAADDDLSVVCDLRAAVEKPSLPDPSSLEQRRDALLAYARALALVEPRFPISPDRAHVHSLTFTWHDAFKGNKKCALASIHLEKASVLFNLGAVYSQIALAADRSTDVGIRIACGAFQSAAGAFAWLRESGAAAKAVAAGTTTVDITPECAGMLEKLMLAQAQECFFEKVIGGGKPPALCSKVARQVGILYEEAYTALSASPLSQHFDKTWVSHVQLKAAQFYADACYRYSLDLHEKEEIAEEIARLKIGMSALADAKKTTKGVAAQLLDSVNKLESNMKTNLERAMKENDRVYLMRVPAAGSLGALPAASLVKPTSLAEVLDASKERLFSSLVPDGSMKALSKYTEMVDNSIRTQAEKLQQASEITRVRLKEMDLPDSILSLEGNITLPMDLKEDVEAVQISGGPAGLESELQQLRDLSRVNQELLVQTEELLQKEANEDAQFRTQFGSRWTRPQSSTLTKNIQDRLNLFASNLKRAADSDSLIERGVKENYSLMSILDKRPIESALPSISRPIMSLDGNEDAIVGALKQSLRQLESLGAQRAGLEDMLKEMKRKDDILPKLMVGVGSHDDLFKKEIAKYDPICADIADNIVAQEQLLLQIQAQNEQFAAVFNLEDYKAARERCYKQIAAAVVKYQEFKKNINEGLNFYVTLQEAIGKIKQQCSDFIMTRNIQCREMMEDVQRKLPGFRFSSSSRSSMQRNAASVPPDESSPSPPPPHAQAPYASPPGVDSRHGYSQPEARPAYSQPYPPSYGATPQQPTYGAQHPGQYQPPPGHDCGQPAYPGWRGPYPYYNAPQPQQSVPCPQAPYNATGAYPPHQSNYYRPQ

SEQ ID NO: 133 - protein, 230 aa, Zea mays
MGLVSDELYKNARENCGGKYSAPLNAVCAEAVQAINNCTRDINKQYILDPACPDDDLLSPKTVAETDGTSRLMLESADFLLGSKCAEALYILSYAWGNDDTVQESLGIRKGTIGAWKRCSHALPYNYDIQSVVDYHSRLATKGYRALIYSGDHDAVVPHVGTQAWIRYLNLTIVDDWRPWYVGGQVAGFTRSYASGLTFATVKGAGHVAPLYKTLECQKMFITWISGNPL

SEQ ID NO: 134 - protein, 520 aa, Zea mays
MGNSLGCSASGERLVSAARDGDAIEARMLLELSPALARYSTFGGLNTPLHFAAAKGHLDIVTMLLEKGADVNARNYCGQTALMHACRHGHWEVVQMLLLFRCNVTRADYLSGRTALHFAAHDGFVRCIRLLVADFVPSVALEDIASSVVDGGDCQTNSGSSPNSSSGQKFNESARVRYINKPADGGVTALHMAALNGHLDCMQLLIDLGANVSAVSFPYGTTANLIGAGSTPLHYAAGGGKQECCELLISKGASRLTLNCNGWLPVDVARIFGRRSLEPLLSPNSHSNVPVFQPSSYLALPLMSILNIAREFGLQHTTPSIDDNDLCSVCLERSCSVVAEGCSHEFCIKCALYLCSTSNIRVEFTGPPGSIPCPLCRNGIMSFTKLPSTPTEGLKSGSALTFCNPCILNTRSMDSPATFSKAEIRRNRVAAVSSELVCPITCSPFPSSALPTCRCSDDDPCGDTDVQDGPEFQSPRPSHSASMELDKRGEGDLDRASCSGMFWSRRSCHREQQCDAEINA

SEQ ID NO: 135 - protein, 364 aa, Zea mays
MRRWFCCTRFNASYREHENERPITPEEKEGNGFSVKSDPIKAPPSIEVPELSFEELKEKTDNFGSKALIGEGSYGRVYYAILDSGKHVAVKKLDASTDPELDNEFLTQVSIASKLKHDNFVEMLGYCVEGNQRLVVYEFATMGSLHDILHGRKGVPGAQPGPALDWMQRVKIAIDAAKGLEYLHEKVQPSIVHRDIRSSNILLFEDYRAKIADFNLSNQSPDMAARLHSTRVLGTFGYHAPEYAMTGQLTQKSDVYSFGVVLLELLTGRKPVDHTMPRGQQSLVTWATPRLTEDTVKQCVDPRLKGEYPPKGVAKLAAVAALCVQYESEFRPSMSIVVKALSPLLQHKPQPPAATTDATAPSDA

SEQ ID NO: 136 - protein, 296 aa, Zea mays
METSAATPTRPPHQAATSPSPSPSSSLRLWRPAAQRNMRNQWSHLSAAKEQWLAAVADGRAHASALVNVHLSCRNMPTMDLGVLKDMPGIRDKANSKLALREEQYSGMLLSAYKEMVRQLSYLVEASHSMRRFSKAAPNCPITQFSDRQDNLNDSGDGGGAPVFKWFSVLEFESLAQELVQMFVSEQKLKRLLLLEFLSIALKEGVELQTSLNWGDELYDGESNKLQSIGLQSGDAYSPPENWCAERLGSQRPGNLPLHEVLQVYLTTWHANMNINRSRIDEIFELVEEEMKIKLS

SEQ ID NO: 137 - protein, 572 aa, Saccharomyces cerevisiae
MCGIFAAFRHEDVHRYKPKALQLSKRIRHRGPDWSGNAIKNSTIFVHERLAIVGVESGAQPITSSDGEYMLCVNGEIYNHIQLREECADYEFGTLSDCEPIIPMYLKHDIDAPKYLDGMFAWTLYDAKQDRIVAARDPIGITTLYMGRSSASPKTVYFASELKCLTDDCDTITAFPPGHVYDSKTDKITRYFTPDWLDEKRIPSTPIDYMAIRHSLEKAVRKRLMAEVPYGVLLSGGLDSSLIASIAARETAKATNDVEPSTYDSKARHLAGIDDDGKLHTAGWTSLHSFAIGLPNAPDLQAARKVAKFIGSIHHEHTFTLQEGLDALDDVIYHLETYDVTTIRASTPMFLLSRKIKAQGVKMVLSGEGSDEIFGGYLYFAQAPSAAEFHTESVQRVKNLHLADCLRANKSTMAWGLEARVPFLDREFLQLCMNIDPNEKMIKPKEGRIEKYILRKAFDTTGEPDAKPYLPEEILWRQKEQFSDGVGYSWIDGLKDTAEAVISDEMFASPKAEWGSDIPTTKEAFWYRLKFDALFPQKTVADTVMRWIPKADWGCAEDPSGRYAQIHEKHIE

SEQ ID NO: 138 - protein, 166 aa, Oryza sativa
MESAMFGLETPLMTALQHLLDIPDGEGGAAGKQGATGGPTRAYVRDARAMAATPADVKDLPGAYAFVVDMPGLKSSDIKVQVEEERLLVISGERRRGGGEEEKEESCKYLRMERRMGKFMRKFVLPDNADVDKISAVCQDGVLTVTVEKLPPPEPKKPKTIEVKVA

SEQ ID NO: 139 - protein, 140 aa, Saccharomyces cerevisiae
MCCYCVCCTVSDFILYIVAFFFPPAAVLLRSGPCSSDFLLNVLLTLLGFLPGMLHAFYYITITSPLRNAEYVYYYQQGWVDSERNVPSNRPQNSQTPQNRPQQGSSARNVYPSVETPLLQGAAPHDNKQSLVESPPPYVP

SEQ ID NO: 140 - protein, 367 aa, Oryza sativa
MSSTAPLLTPYKMGRFDLSHRVVLAPLTRQRSYGNVPQPHAILYYQQRTTKGGLLIAEATGISDTAQGYKDTPGIWTKEQVEAWKPIVDGVHAKGGIFFCQIWHVGRVSNNTFQPNGQAPISSTNKSLKPAVRANGIDVATFSTPRRLETDEIPFVVNDYRVAARNAIEAGFDGVEIHGAHGYLIDQFLKDQVNDRSDKYGGSLENRCRFALEVVQAVTDEIGADKVGIRLSPFASYSEAADSNPEALGLYMANALNKFGILYCHMVEPRMVKLGEKFETPHSLRPIRDAFKGTFIAAGGYNKEDGNKAVSTGYTDLVAYGRLFLSNPDLPERFEIDAPLNKYNRETFYISDPVIGYTDYPFLPSDV

SEQ ID NO: 141 - protein, 373 aa, Glycine max
MALESAPASADIRGVHTHGGGYVQYNIYGNLFEVSRKYVPPIRPVGRGAYGIVCAAVNAETHEEVAIKKVGNAFDNRIDAKRTLREIKLLRHMEHENVIALKDIIRPPQRYNFNDVYIVYELMDTDLHQIIQSNQQLTDDHCRYFLYQLLRGLKYVHSANVLHRDLKPSNLLLNANCDLKIADFGLARTTSETDFMTEYVVTRWYRAPELLLNCSEYTAAIDIWSVGCILGEIITRQPLFLGKDYVHQLRLITELIGSPDDTSLGFLRSDNARRYVRQLPQYPRQQFAARFPSMSPGAVDLLEKMLVFDPNRRITVEEALCHPYLAPLHDINEEPACVRPFSFDFEQPSFTEEDIKELIWRESVLFNPDPPIY

SEQ ID NO: 142 - protein, 502 aa, Arabidopsis thaliana
MVLSHAVSESDVSVHSTFASRYVRTSLPRFKMPENSIPKEAAYQIINDELMLDGNPRLNLASFVTTWMEPECDKLIMSSINKNYVDMDEYPVTTELQNRCVNMIAHLFNAPLEEAETAVGVGTVGSSEAIMLAGLAFKRKWQNKRKAEGKPVDKPNIVTGANVQVCWEKFARYFEVELKEVKLSEGYYVMDPQQAVDMVDENTICVAAILGSTLNGEFEDVKLLNDLLVEKNKETGWDTPIHVDAASGGFIAPFLYPELEWDFRLPLVKSINVSGHKYGLVYAGIGWVIWRNKEDLPEELIFHINYLGADQPTFTLNFSKGSSQVIAQYYQLIRLGHEGYRNVMENCRENMIVLREGLEKTERFNIVSKDEGVPLVAFSLKDSSCHTEFEISDMLRRYGWIVPAYTMPPNAQHITVLRVVIREDFSRTLAERLVIDIEKVMRELDELPSRVIHKISLGQEKSESNSDNLMVTVKKSDIDKQRDIITGWKKFVADRKKTSGIC

SEQ ID NO: 143 - protein, 502 aa, Arabidopsis thaliana; identical to SEQ ID NO: 142

SEQ ID NO: 144 - protein, 161 aa, Glycine max
MSLIPNFFGGRRNNVFDPFSLDVWDPFKDFPFPNTLSSASFPEFSRENSAFVSTRVDWKETPEAHVFKADIPGLKKEEVKVQIEDDKVLQISGERNVEKEDKNDTWHRVERSSGKFMRRFRLPENAKVEQVKASMENGVLTVTVPKEEVKKPDVKAIEISG

SEQ ID NO: 145 - protein, 580 aa, Zea mays
MYRAAAVISRSSSALRRQLARGVAGELPRLLARGYAATAKEVSFGVGARAAMLQGVNDLADAVKVTMGPKGRTVIIEGSHKGPKVTKDGVTVAKSVEFEDSAKNVGANLVKQVADATNKAAGDGTTCATVLTQAILTEGCKAVAAGVNVMDLRNGINKAINAITAHLKSKAWKINSPEEINQVATISANGEKEIGDLISKAMEKVGKDGVITIVDGKTLDNELEAVQGMKLSRGYISPYFVTDQKTQKCEMENPLILIHDKKISNMDSLLPALEISIKNRKPLLIVAEDVEGDALSMLVLNKHRAGLKVCAVKAPGFGENRRHNLDDMAVMTGGEVISEERGLDLGKVQLQMLGTAKKVTVSLDDTIILDGGGDKQQIDERCQQLRESIDTSTAVFDKEKAQERLSKLSGGVAVLKIGGASEAEVGEKKDRVTDALNAARAAVEEGIVPGGGVALLYATKELDKISTANEDEKIGVQIIKNSLKAPLMTIAANAGIDGAIVIGKLIEQEDLSLGYDAAKGEYVDMIKAGIIDPVKVIRTALQDAASVSLLMATTEAAVSELPATKSRIASRMPQMSGMDF

SEQ ID NO: 146 - protein, 209 aa, Glycine max
MMKTTMNISNANHEKVEKAFAFLTGNHFINHHYGAILSKCLKGLPVRDFDAQEIIPGLYLGDVYAAHNTKELKSRNFTHIVTCTVGVVPPFPDAFKYMHLKILDFAGETIDVHFTSTTDFIGDAIANGGKVLVHCIRGVSRSATIVSAYLMKSMSLSAEDAVEHVRRVRAIARPNYGFMMQLQLYHKELNKGMMNVEISDEQNLPAAEW

SEQ ID NO: 147 - protein, 704 aa, Saccharomyces cerevisiae
MYNIPDNVKGAVEFDPWLKPFADVLSERRYLADKWLYDITHATPDGSYQSLSKFARDSYKSYGLHANPETKEITYKEWAPNAERAFLVGDFNNWDTTSHELKNKDEFGNFTITLHPLPNGDFAIPHDSKIKVMFILPDGSKIFRLPAWITRATQPSKETSKQFGPAYEGRFWNPENPYKFVHPRPKFSESVDSLRIYEAHVGISSPEPKITTYKEFTEKVLPRIKYLGYDAIQLMAIMEHAYYASFGYQVTNFFAASSRFGTPEELKELIDTAHSMGILVLLDVVHSHASKNVEDGLNMFDGSDHQYFHSISSGRGEHPLWDSRLFNYGKFEVQRFLLANLAFYVDVYQFDGFRFDGVTSMLYVHHGVGAGGSFSGDYNEYLSRDRSFVDHEALAYLMLANDLVHEMLPNLAVTVAEDVSGYPTLCLPRSIGGTGFDYRLAMALPDMWIKLIKEKKDDEWEMGSIVYTLTNRRYGEKVVAYCESHDQALVGDKTLAFWLMDAAMYTDMTVLKEPSIVIDRGIALHKMIRLITHSLGGEAYLNFEGNEFGHPEWLDFPNVNNGDSYKYARRQFNLADDPLLRYQNLNEFDRSMQLCEKRHKWLNTKQAYVSLKHEGDKMIVFERNNLLFIFNFHPTNSYSDYRVGVEKAGTYHIVLNSDRAEFGGHNRINESSEFFTTDLEWNNRKNFLQVYIPSRVALVLALKE

SEQ ID NO: 148 - protein, 189 aa, Arabidopsis thaliana
MGCVRCKSSDPWQTSANAFESVDESGINEAWVEISSRRSFVAGEGSRKKLERKKSQVLLEGYVETASSSSVDDQKDDLTRSKSLTDDDLEDLRGCLDLGFGFSYDEIPELCNTLPALELCYSMSQKFLDDKQNKSPETSSVEDCPSPPLVTATPIANWKISSPGDNPDDVKARLKYWAQAVACTVQLCS

SEQ ID NO: 149 - protein, 566 aa, Zea mays
MAPLLAAAMNHAAAHPGLRSHLVGPNNESFSRHHLPSSSPQSSKRRCNLSFTTRSARVGSQNGVQMLSPSEIPQRDWFPSDFTFGAATSAYQIEGAWNEDGKGESNWDHFCHNHPERILDGSNSDIGANSYHMYKTDVRLLKEMGMDAYRFSISWPRILPKGTKEGGINPDGIKYYRNLINLLLENGIEPYVTIFHWDVPQALEEKYGGFLDKSHKSIVEDYTYFAKVCFDNFGDKVKNWLTFNEPQTFTSFSYGTGVFAPGRCSPGLDCAYPTGNSLVEPYTAGHNILLAHAEAVDLYNKHYKRDDTRIGLAFDVMGRVPYGTSFLDKQAEERSWDINLGWFLEPVVRGDYPFSMRSLARERLPFFKDEQKEKLAGSYNMLGLNYYTSRFSKNIDISPNYSPVLNTDDAYASQEVNGPDGKPIGPPMGNPWIYMYPEGLKDLLMIMKNKYGNPPIYITENGIGDVDTKETPLPMEAALNDYKRLDYIQRHIATLKESIDLGSNVQGYFAWSLLDNFEWFAGFTERYGIVYVDRNNNCTRYMKESAKWLKEFNTAKKPSKKILTPA

SEQ ID NO: 150 - protein, 421 aa, Zea mays
MAAAAAAAAFDAYTDKNAIFRRLKAKPENKMCFDCNAKNPTWASVTYGIFLCLDCSAVHRSLGVHITFVRSTNLDSWTPDQLKMMAFGGNNRAHAFFKQHGWTDGGKVEAKYTSRAAELYRQMLNKEVAKSAITDNALPSSPVTASEASKPSDDFPEFKLSDAPAPPAENLNGKHEPKSPKAAPRSPKAATHPTFATSVKKPIGAKKVGGKTGGLGVRKLTTKPNESLYEQKPEEPKPAIPALTAPTAKGGPSLHSRFEYVDNEQSSVSRTGGSGSRVTGHVAPPKSSDFFQEYGMGNGFQKKSSNASKAQIEETDEARKKFSNAKAISSSQFFGTQNREEKEAQLSLQKFAGSSSISSSDLFGRTNVDDSNLDLSAADLINRISFQASQDLSSLKDIAGETGKKLTSFASNFISDLDRIL

SEQ ID NO: 151 - protein, 63 aa, Zea mays
MREAIRAARKEFSVCTGPANSAITFQMDVPATMPVVKELCGLDVVERYLESVSAASPTNTAKA

SEQ ID NO: 152 - protein, 140 aa, Zea mays
MVSFEMNDLKKIGLGLTGFGIFFSFLGIIFFFDKGLIAMGNILFLSGLGLTIGLKSTMQFFTKPKNYKGTISFGAGFFLVLIGWPFLGMLLEAYGFVVLFSGFWPTLAVFLQRIPIIGWIFQQPFVTSFLDRYRGKRVPV

SEQ ID NO: 153 - protein, 140 aa, Zea mays
MVSFEMNDLKKIGLGLTGFGVLFTLLGIIMLFDKGFLAMGNILFVSGVLLTIGLKPTVQFFTKPKNHKGSIFFGFGFFLVLIGWPVSGMLVESYGFITLFSGFWPTAAVYLQKSPSFGWIFHHPLVTSLITRFRGRRVPV

SEQ ID NO: 154 - protein, 125 aa, Arabidopsis thaliana
MESKTFWIVTLLLCGTIQLAICRSEEKSTEKTMMLGGVHDLRGNQNSGEIESLARFAIQEHNKQQNKILEFKKIVKAREQVVAGTMYHLTLEAKEGDQTKNFEAKVWVKPWMNFKQLQEFKESSS

SEQ ID NO: 155 - protein, 125 aa, Arabidopsis thaliana; identical to SEQ ID NO: 154

SEQ ID NO: 156 - protein, 101 aa, Arabidopsis thaliana
MPPRTGKDKQNPRLPPEVTRLLYICNLPFSITSEDTYDLFGRYSTIRQVRIGCEKGTKGTAFVVYEDIYDAKKAVDHLWLQHSEPVPYRALLPTCEDEQEV

SEQ ID NO: 157 - protein, 633 aa, Saccharomyces cerevisiae
MSSNNNTNTAPANANSSHHHHHHHHHHHHHGHGGSNSTLNNPKSSLADGAHIGNYQIVKTLGEGSFGKVKLAYHTTTGQKVALKIINKKVLAKSDMQGRIEREISYLRLLRHPHIIKLYDVIKSKDEIIMVIEYAGNELFDYIVQRDKMSEQEARRFFQQIISAVEYCHRHKIVHRDLKPENLLLDEHLNVKIADFGLSNIMTDGNFLKTSCGSPNYAAPEVISGKLYAGPEVDVWSCGVILYVMLCRRLPFDDESIPVLFKNISNGVYTLPKFLSPGAAGLIKRMLIVNPLNRISIHEIMQDDWFKVDLPEYLLPPDLKPHPEEENENNDSKKDGSSPDNDEIDDNLVNILSSTMGYEKDEIYESLESSEDTPAFNEIRDAYMLIKENKSLIKDMKANKSVSDELDTFLSQSPPTFQQQSKSHQKSQVDHETAKQHARRMASAITQQRTYHQSPFMDQYKEEDSTVSILPTSLPQIHRANMLAQGSPAASKISPLVTKKSKTRWHFGIRSRSYPLDVMGEIYIALKNLGAEWAKPSEEDLWTIKLRWKYDIGNKTNTNEKIPDLMKMVIQLFQIETNNYLVDFKFDGWESSYGDDTTVSNISEDEMSTFSAYPFLHLTTKLIMELAVNSQSN

SEQ ID NO: 158 - protein, 342 aa, Glycine max
MKFGATYEEYLRAERDKFLGQCSHVEYKRLKKVLKKCRVGRSLQADGTNGDEQQEGRDESSNICECNSCTLCDEMFFTELNKEASEIAGCFRSRVQRLLHLHVPSGLQRCIWRFRQCFIDDQQIMVQEGRMLLNYVTMNAIAIRKILKKYDKIHGSVSGRDFKSKMQTEHIELLQSPWLIELCAFHLNCDDSDADEPRAGEFFKNGFFKNFSCDLSGAQPLLTMTISETLKYEYSLTCPICLDTLFNPYALSCGHLFCKACACGAASVYIFQGVKSAPPEAKCPVCRAVGVFDRAVRMTELELLLKRRDKDYFLQRLREERSVMVKQAKEYWDSQAMLSMGI

SEQ ID NO: 159 - protein, 517 aa, Glycine max
MAEVAPPKKENPNLLLGRFELGKLLGHGTFAKVHHARNIKTGEGVAIKIINKEKILKGGLVSHIKREISILRRVRHPNIVQLFEVMATKTKIYFVMEYVRGGELFNKVAKGRLKEEVARNYFQQLVSAVEFCHARGVFHRDLKPENLLLDEDGNLKVSDFGLSAVSDQIRQDGLFHTFCGTPAYVAPEVLSRKGYDGAKVDIWSCGVVLFVLMAGYLPFNDRNVMAMYKKIYKGEFRCPRWFSSELTRLLSRLLDTNPQTRISIPEVMENRWFKKGFKQIKFYVEDDRVCSFDEKLLLHHDDDLATSDSEVEIRRKNSNGSLPRPASLNAFDIISFSQGFDLSGLFEEKGDEARFVSSAPVSKIISKLEEVAQLVSFSVRKKDCRVSLEGCREGVKGPLTIAAEVFELTPSLVVVEVKKKGGDKAEYEKFCNSELRPALENLGMEESASSSSSCHQSTHTQSEFQQHRTLSDSALNRHSDNECLFERELGLADETSISQHGESKFECQQENMAMFTI

SEQ ID NO: 160 - protein, 239 aa, Glycine max
  misc_feature (198)..(198): Xaa can be any naturally occurring amino acid
MGRGKIVIRRIDNSTSRQVTFSKRRNGLLKKAKELAILCDAEVGVMIFSSTGKLYDFASSSMKSVMDRYSKSKEEPCQLGSSASEIKFWQREAAMLRQQLHNLQESHRRKMMGEELSGLTVKELQNLENQLEISLHGVRMKKDQLLMGEIQELNRKGNLIHQENVELYKKVYGTQDDNETNRDSVLTNGLGIGEDLQXACESPAKPATATATTLQGIFRNYKIGIAIALARDPAFLYKV

SEQ ID NO: 161 - protein, 336 aa, Oryza sativa
MRMLSKACSLVASSLPRCSSSAAPTIRGQPSLLPSVRKEWLGKPLLYGIGTLLVMPLRTLHGVGRMFGAGRFLCNMTSVSSSLQIELVPCLQDNYAYILHDVDTGTVGVVDPSEATPIINALEKRNQNLTYILNTHHHYDHTGGNLELKAKYGAKVIGSAKDRDRIPGIDITLSEGDTWMFAGHQVLVMETPGHTSGHVCYHFPGSGAIFTGDTLFSLSCGKLFEGTPQQMYSSLQKIIALPDETRVYCGHEYTLSNSKFALSIEPGNKDLQEYAANAADLRKRNTPTVPTTIGREKQCNPFLRTSSPEIKNTLSIPDHFDDARVLEVVRRAKDNF

SEQ ID NO: 162 - protein, 518 aa, Zea mays
MAAITPPTQSEPSPQTGRPASSAAAAAKRGGGGAGAAGGPLMGKYELGRLLGHGTFAKVYHARHVDTGDNVAIKVLDKEKAVKSGLVPHIKREIAVLRRVRHPNIVHLFEVMATKTKIYFVMELVRGGELFSRVSKGRLREDTARRYFQQLVSAVGFCHARGVFHRDLKPENLLVDEQGNLKVSDFGLSAVAEQFRPDGLLHTFCGTPAYVAPEVLGRRGYDGAKADVWSCGVILFVLMAGYLPFHDKNIMAMYKKIYKGEFRCARWFSKDLTSLLMRILHTNPNTRITLPEIMESRWFKKGFKPVKFYIEDDQLHNVIDDEDGLLDMGPAGPVPPPLPPPPPPLPPPKVDGDESGSDSDSSISSCPASMLSDESQRPRGSLPRPASLNAFDIISFSRGFNLSGLFEEKGDEVRFISAEPMSDIITKLEDIAKLKSFKLRRKDWRICLEGTREGVKGPLTIGAEIFELTPPLVMVEVKKKAGDNEEYENFCDKELKPGMQHLVHHMVRAPSMLLTDAK

SEQ ID NO: 163 - protein, 1128 aa, Oryza sativa
MSSSRPTQCSSSSSRTRQSSRARILAQTTLDAELNAEYEEYGDSFDYSKLVEAQRTTGPEQQARSEKVIAYLHHIQRAKLIQPFGCLLALDEKTFNVIALSENAPEMLTTVSHAVPSVDDPPKLRIGTNVWSLFTDPGATALQKALGFADVSLLNPILVQCKTSGKPFYAIVHRATGCLVVDFEPVKPTEFPATAAGALQSYKLAAKAISKIQSLPGGSMEVLCNTVVKELFDLTGYDRVMAYKFHEDDHGEVFAEITKPGLEPYLGLHYPATDIPQAARFLFMKNKVRMICDCRARSIKIIEDESLHLDISLCGSTLRAPHSCHLQYMENMNSIASLVMAVVVNENEDDDEVGADQPAQQQKRKKLWGLLVCHHESPRYVPFPLRYACEFLAQVFAVHVNKEFELERQVREKSILRMQTMLSDMLLRESSPLSIVSGTPNIMDLVKCDGAALLYGGKVWRLQNAPTESQIRDIAFWLSDVHRDSTGLSTDSLHDAGYPGAAALGDMICGMAVAKINSKDILFWFRSHTAAEIRWGGAKHDPSDKDDSRRMHPRLSFKAFLEVVKMKSLPWNDYEMDAIHSLQLILRGTLNDDIKPTRAASLDNQVGDLKLDGLAELQAVTSEMVRLMETATVPILAVDSNGLVNGWNQKVAELTGLRVDEAIGRHILTVVEESSVPVVQRMLYLALQGKEEKEVKFEVKTHGSKRDDGPVILVVNACASRDLHDHVVGVCFVAQDMTVHKLVMDKFTRVEGDYKAIIHNPSPLIPPIFGADEFGWCSEWNAAMTKLTGWHRDEVINKMLLGEVFDSTNASCLVKNKDAFVSLCILINSALAGDETEKAPFSFFDRNGKYIECLLSVNRKVNADGVITGVFCFIQVPSHELQHALHVQQASQQNALTKLKAYSYMRHAINNPLSGMLYSRKALKNTGLNEEQMKEVNVADSCHRQLNKILSDLDQDSVMNKSSCLDLEMVEFVLQDVFVAAVSQVLITCQGKGIRVSCNLPERYMKQTVYGDGVRLQQILSDFLFVSVKFSPVGGSVEISCSLTKNSIGENLHLIDLELRIKHQGKGVPADLLSQMYEDDNKEQSDEGMSLAVSRNLLRLMNGDVRHMREAGMSTFILSVELASAPAK

SEQ ID NO: 164 - protein, 205 aa, Oryza sativa
MVQPKKKFRGVRQRHWGSWVSEIRHPLLKRRVWLGTFETAEEAARAYDEAAVLMSGRNAKTNFPVQRNSTGDLATAADQDARSNGGSRNSSAGNLSQILSAKLRKCCKAPSPSLTCLRLDPEKSHIGVWQKRAGARADSNWVMTVELNKEVEPTEPAAQPTSTATASQVTMDDEEKIALQMIEELLSRSSPASPSHGEGEGSFVI

SEQ ID NO: 165 - protein, 1132 aa, Zea mays
MSSSRPAHSSSSSSRTRQSSRARILAQTTLDAELNAEYEESGDSFDYSKLVEAQRSTPPEQQGRSGKVIAYLQHIQRGKLIQPFGCLLALDEKSFRVIAFSENAPEMLTTVSHAVPNVDDPPKLGIGTNVRSLFTDPGATALQKALGFADVSLLNPILVQCKTSGKPFYAIVHRATGCLVVDFEPVKPTEFPATAAGALQSYKLAAKAISKIQSLLGGSMEALCNTVVKEVFDLTGYDRVMAYKFHEDEHGEVFAEITKPGIEPYIGLHYPATDIPQAARFLFMKNKVRMICDCRARSVKIIEDEALSIDISLCGSTLRAPHSCHLKYMENMNSIASLVMAVVVNENEEDDEPEPEQPPQQQKKKRLWGLIVCHHESPRYVPFPLRYACEFLAQVFAVHVNKEFELEKQIREKNILRMQTMLSDMLFKESSPLSIVSGSPNIMDLVKCDGAALLYGDKVWRLQTAPTESQIRDIAFWLSEVHGDSTGLSTDSLQDAGYPGAASLGDMICGMAVAKITSKDILFWFRSHTAAEIKWGGAKHDPSDKDDNRRMHPRLSFKAFLEVVKTKSLPWSDYEMDAIHSLQLILRGTLNDASKPAQASGLDNQIGDLKLDGLAELQAVTSEMVRLMETATVPILAVDGNGLVNGWNQKVAELSGLRVDEAIGRHILTLVEDSSVSLVQRMLYLALQAGREEKEVRFELKTHGSKRDDGPVILVVNACASRDLHDHVVGVCFVAQDMTVHKLVMDKFTRVEGDYKAIIHNPNPLIPPIFGADQFGWCSEWNAAMTKLTGWHRDEVVDKMLLGEVFNSSNASCLLKSKDAFVRLCIVINSALAGEEAEKASFGFFDRNEKYVECLLSVNRKVNADGVVTGVFCFIHVPSDDLQHALHVQQASEQTAQRKLKAFSYMRHAINKPLSGMLYSRETLKSTGLNEEQMRQVRVGDNCHRQLSKILADLDQDNITDKSSCLDLDMAEFVLQDVVVSAVSQVLIGCQAKGIRVACNLPERSMKQRVYGDGIRLQQIVSDFLFVSVKFSPAGGSVDISSKLTKNSIGENLHLIDFELRIKHRGAGVPAEILSQMYEEDNKEQSEEGFSLAVSRNLLRLMNGDIRHLREAGMSTFILTAELAAAPSAVGR

SEQ ID NO: 166 - protein, 228 aa, Arabidopsis thaliana
MGRGKIVIQRIDDSTSRQVTFSKRRKGLIKKAKELAILCDAEVGLIIFSSTGKLYDFASSSMKSVIDRYNKSKIEQQQLLNPASEVKFWQREAAVLRQELHALQENHRQMMGEQLNGLSVNELNSLENQIEISLRGIRMRKEQLLTQEIQELSQKRNLIHQENLDLSRKVQRIHQENVELYKKAYMANTNGFTHREVAVADDESHTQIRLQLSQPEHSDYDTPPRANE

SEQ ID NO: 167 - protein, 140 aa, Glycine max
  misc_feature (113)..(113): Xaa can be any naturally occurring amino acid
  misc_feature (126)..(126): Xaa can be any naturally occurring amino acid
MEEKKAESTNKNVKKANLLEHNSIKHILDESVSDIVKSRGYKEDVRLSNLKLILGTVIIVVALVAQFYNKKFPENRDFLIGCIASYVVLNGVLQLILYTKEKNAILFTNPPEXSFTSTGLVMSSKXLPRFSDEYTLTIDS

SEQ ID NO: 168 - protein, 369 aa, Pseudomonas aeruginosa PAO1
MSNLLLSPLAVGNLALRNRIVMAPMTRSRAQQPGDVPTALNALYYAQRAGAGLIVSEGTQISHLGQGYAYTPGIYSEAQLAGWRQVTEAVHAAGGLIAAQLWHVGRMSHRSLQAGGEAPIAPSPIQAKAQVFIADGQGGGSMAPADAPREMTLEDIRRVRDEFVRAARNALDAGFDLVELHGANGYLIDQFLASASNRRSDAYGGSLENRARFLLEIVDALVAAVGAERVGLRLSPWGTINDMHDDEPEAMTLYLAEALQRRGIAYLHLAEWEWSGGPAYPQGFRERLRERFRAPLIVCGNYDAERAEAILQAGLADAVAIGRPFIANPDLVERIRLGAPLAEANQARFYGGDAAGYTDYPTLGQSATA

SEQ ID NO: 169 - protein, 366 aa, Gibberella zeae PH-1
MPDSRLFQPMKIGNIQVQHRVGMAPMTRLRASVDRIPNALMKEYYSQRASTPGTLIITEGTLVSPAAGGGFARTPGIWNQEQVTAWKTITDEVHSKGSYIFVQLFAMGRAATVEVAKEEGIDIISASPVAFEGSNAQPRAMTLAEIHDMIDAFETASKNAVAAGFDGVEIHGANGYLLDQFLQDVSNHRDDEFGANIENRSRFISEIMERVVKAIGPERVGLRLSPWSTFQGMRMKDPIPQFTDIIGKAKTLDLAYLHLVESRICGSTDDINNGQEKLDFAYDIWKSPFLIAGGYKLQGAQDLVDSEHPDKEIMVMFGRDFVSNPDLVLKLQHGLDLTQGERNTYYTSDSAGYIDYPCAAKVAVSA

SEQ ID NO: 170 - protein, 487 aa, Oryza sativa (japonica cultivar-group)
MLRAAARALTVSSLNPKVLALADHHLGGLVARRAQSMQQELDANPASHPFSEIIYCNHSNPQSQGQQPNKFFREVLALCNHPHLLDRSEASFMFSSDAITRAREIVGFIPGKTTGGYSHCQGIEGLRDAIAAGIASRDGLPSYSEDIFLTDGAAAPVHMMMHLLIRGKKDGILCPIPSHSLYTDSMVLRGATLVPYYLDESRGWSVNISDLKKQLDGARAKGIDVRGLVVVNPGNPTGQVLVEENQCEIVELCKNECLVLLADEVYQENIYTDQKKFNSFKKVARSIGYGEGDISLVSFHSVSNGYYGECGRRGGYMEVTGFSSEVRGEVYKVASLSACSNISGQILMSLVMNPPKVGDESYPSYRAERDSILSSLSCCAEAMVSTFNSMEGMTCNKAEGGISVFPSVRLPPRAIEAAEAMNTEPDVFYALRLLESTGIVVVPGSVFGQVPGTWHFRCTILPQEEKTRQIISRFNVFHEAFMEEFRS

SEQ ID NO: 171 - protein, 557 aa, Magnaporthe grisea 70-15
MPRLAAPPLPVPSHNLLRFLRSQTDGLLSFDAASATTCRTSRVVPSAHGPLGPRALTCKAKTLALPPGRRSFCTSNLRPQRTEGDGSRNFIFDMNKILPRVFRRQRGSTSRGTQEGQYPDEDRPNAYPRATKPTWQEKLGWGGVKSLGSDMGGPGSSDDCGPDNNFTFGSRRAQLMRAPMDPRLRCTEVDENGEVILVDGEYKKSELIAKYGLLPRDLRKIDSSNLPHILVRPSAILINLLHLRVLIKSDRVLLFDVFGSKTSYNQSAFMYDLQGRLRQKQPAGSNAVLPYEFRALEAVLISVTSALEADLLTVREPVVRVLRELEDDINRDRLRILLVLSKKVSTFEQKAKLVRDAIDELLEADDDLAAMYLTEKRHDLYRGVDDHTEVEMLLESYHKICDEVVQEASSLVSSIRNTEEIIRAILDANRNSLMLLDLKFSIGTLGLAMGTFLAGLYGMNLENFIEETNWGFAGVTTFSIFFSLLVCRYGLVKLRKVQRVKMHGTDGGTTSSWFRENVQTIEQGNAPGLGGNMGSIDKFRRIKNKSNNTSSNPGKWI

SEQ ID NO: 172 - protein, 268 aa, Burkholderia vietnamiensis G4
MSKIPAFGLGTFRLQGQVVIDSVRNGLELGYRAIDTAQIYGNEAEVGAAIAASGVRREDLFVTTKIWVDNYAPDKLAASLEDSLRKLRTDYVDLTLIHWPAPDNGVSVDAFMTALADAKSKGLTREIGVSNFNIALTKEAIAAVGSDAIATNQIELSPYLQNRKLVEFLQSERIHVTSYMTLAYGKVLGDPVLDAIARRHRATPAQVALAWALQLGYSVIPSSTKREHLASNLLAQTLRLTDEDLAQIATLERNGREVDPAGLAPQWD

SEQ ID NO: 173 - protein, 371 aa, Burkholderia vietnamiensis G4
MNHDPLFQPLQFGALTLPNRIVMPPMTRSRATQPGDEANELMAEYYAQRASAGLIVSEGTYIAPLGKGYAWTPGIHTRSQVAGWRKVTDAVHAAQGRIFAQLWHVGRLSHTSLHGGAQPVSSSPIQAKGVNVFIAGDDGSTPGFVQASEPRALTVAEIGEIVAQYRAAARNAMEAGFDGVELHGANGYLVNQFIDSNANTRTDAYGGSLENRLRFLREVAQALIEGTGDASRVGIRLAPLTTLNGCVDDDPETTYLAAATLLGELGVGYLHIAEADWDDAPLMPPAFKQKLRAAFGGVLIYAGKYTAERAREAIAAGWADLIAFGRPFVANPDLPERLRSGAALAPHDRNTLFGGGAKGLTDYPALAQACA

SEQ ID NO: 174 - protein, 340 aa, Geobacillus kaustophilus HTA426
MNTMLFSPYTIRGLTLKNRIVMSPMCMYSCDTKDGAVRTWHKIHYPARAVGQVGLIIVEATGVTPQGRISERDLGIWSDDHIAGLRELVGLVKEHGAAIGIQLAHAGRKSQVPGEIIAPSAVPFDDSSPTPKEMTKADIEETVQAFQNGARRAKEAGFDVIEIHAAHGYLINEFLSPLSNRRQDEYGGSPENRYRFLGEVIDAVREVWDGPLFVRISASDYHPDGLTAKDYVPYAKRMKEQGVDLVDVSSGAIVPARMNVYPGYQVPFAELIRREADIPTGAVGLITSGWQAEEILQNGRADLVFLGRELLRNPYWPYAAARELGAKISAPVQYERGWRF

SEQ ID NO: 175 - protein, 252 aa, Arabidopsis thaliana
MAYQSELGGDSSPLRKSGRGKIEIKRIENTTNRQVTFCKRRNGLLKKAYELSVLCDAEVALIVFSSRGRLYEYSNNSVKGTIERYKKAISDNSNTGSVAEINAQYYQQESAKLRQQIISIQNSNRQLMGETIGSMSPKELRNLEGRLERSITRIRSKKNELLFSEIDYMQKREVDLHNDNQILRAKIAENERNNPSISLMPGGSNYEQLMPPPQTQSQPFDSRNYFQVAALQPNNHHYSSAGRQDQTALQLV

SEQ ID NO: 176 - protein, 247 aa, Ipomoea nil
MEFQSDQSREMSPQRKMGRGKIEIKRIENTTNRQVTFCKRRNGLLKKAYELSVLCDAEVALIVFSSRGRLYEYANNSVKATIDRYKKACSDSTNTGSISEANTQFYQQEANKLRQQISNLQNQNRNYMGEGLGGFNLRDLKNLESKIEKGISKIRAKKNELLFAEIDYMQKRQEIDLHNNNQYLRAKIIETERAQQQQQQMNLMPGSSSYHELAPPQQFDARNYLQLDGFQSTSSYSKQDHLPLQLV

SEQ ID NO: 177 - protein, 230 aa, Beta vulgaris
  misc_feature (199)..(199): Xaa can be any naturally occurring amino acid
  misc_feature (212)..(212): Xaa can be any naturally occurring amino acid
MGRGKIEIKRIENTTNRQVTFCKRRNGLLKKAYELSVLCDAEVALIVFSSRGRLYEYANHSVKGTIDRYKKACSNQSGAGSVAEANAQYYQQEAAKLRNQIRTATENNRLLSRHMMGEGLSSLSMKELKNLETKLERGISRIRSKKNELLFAEIEFMQKREIELHNNNQFLRARISENERAQQSMSLMPGGSDYDLVPXQSFDSRNYFQVNXLQPSSQYARQDQTPLQLV

SEQ ID NO: 178 - protein, 291 aa, Corynebacterium glutamicum ATCC 13032
MTFTLNNGLAIPDIGFGVFQTPPDETRNSVNAALEAGYRHIDTAAAYGNEREVGEAIAASGIGRDEITIETKIWVTDYGFEETLHAFDKATGKLGVDTLDILILHQAVPSSFDRTIAAYKALEKLLFDGAVRAIGVSNFMPEHLDKLLLETSIVPALNQIECHPYFQQRDVLARNEQLGILTQAWSPIGGITFYRDGQLPSTLENEVIAGIAAEVGKTPAQVMLRWHLQRRRHAIPKSVTPSRIVENFEIFDFELSDEQLQQIDALNTDLRGGPEPENITMENYYREIPEA

SEQ ID NO: 179 - protein, 244 aa, Ipomoea nil
MEFPNQALEEEESSHRKSGRGKIEIKRIENTTNRQVTFCKRRNGLLKKAYELSVLCDAEVALIVFSTRGRLYEYANNSVRATIDRYKKHHSDSTNTGSVSEANTQFYQQESAKLRRQIREIQTSNKQILGESLGVLNHKELKNLEGKVEKAIGRVRSKKNELLFSEIELMQKREIELQNANMYLRAKISEFERAQQQMNLMPGSEYQETMTTSQTYDAHNFLPLTLLEPNQHYSRHDQTALQLV

SEQ ID NO: 180 - protein, 446 aa, Oryza sativa
MAAAGAGSSEVAARVLLQRYQPFAPPPGEYHQFGSGGAAAAGDMTEAVLIRTPLKRKHDREENEAAESNDWMMSPGYTNPAGSPVPTPLSGKGSKAFAKSKAAKGQKSCPQTPLCASSPGNPVTPVGGCRYDSSLGLLTKKFLNLLKGAPGGIVDLNNAAETLEVQKRRIYDITNVLEGIGLIEKKLKNNIRWKGIDDSRPGEVSDDMSILQADIEALSLQEHSVDQQISEMRDKLRGLTEDENNQKWLYVTEDDIKSLPCFQNQTLIAIKAPHGTTLEVPDPDEVNDYPQRRYRIVLRSTMGPIDVYLVSQFEEMSGMETPPRTVQPVSMDSLENPRTPLAAEPNKAAESQPNIQDGLLMPSDAPSSSQDIGGMMKIVPSELDTDADYWLLSDAGVSITDMWKTAPEVEWEGIEKFNAEDFLEVSTPRQQDKPSSDIMDGDSCIS

SEQ ID NO: 181 - protein, 237 aa, Oryza sativa
MWRRDDPAASLLPSSAFALRRLSSAANVSRFAQLKRFDRARRFAPAAAMSTSSGPKEAPANNPGLQAPSEKDPATKGYFMQQTMFRVKDPKVSLDFYSRVMGMSLLKRLDFPEMKFSLYFLGYEDVESAPTDPVKRTVWTFGQRATLELTHNWGTENDPEFKGYHNGNSDPRGFGHIGVTVHDVYKACERFERLGVEFVKKPDDGKMKGIAFIKDPDGYWIEIFDLNRIGAVTAEAS

SEQ ID NO: 182 - protein, 542 aa, Methylococcus capsulatus str. Bath
MAAKEVRFSDDARHRMLAGVNILADAVKQTLGPKGRNVVLEKSFGAPVVTKDGVSVAKEIELKDKFENMGAQMVKEVASKTSDVAGDGTTTATVLAQAIVREGLKSVAAGANPMDIKRGIDQAVGVVVEELKKLSKPCTDSKAIAQVGTISANSDESIGQIIAQAMDTVGKEGVITVEEGSGLQNELDVVEGMQFDRGYLSPYFINKQDTMGVELENPYVLLHDKKISSIRDLLPVLEKTAKAGRSLLIIAEDVDGEALATLVVNNMRGILKVCAVKAPGFGDRRKAMLEDIAILTGGQVISEELGLSLEKVELTDLGQAKKIQINKETTTIVDGAGSADAIKARVEQIRKQIEDTTSDYDREKLQERVAKLAGGVAVIKVGAATEVEMKEKKARVEDALHATRAAVEEGIVPGGGVALIRAQQALKTLEGKNHDQTVGIAILRRAIEEPLRQIVANAGEEPSVVLAKVQEGTGTFGYNAGTAEYGDMIEMGILDPTKVTRSALQNAASVAGLMLTTEAMVAEMPKKEKGGMPAGGGMDDMM

SEQ ID NO: 183 - protein, 442 aa, Gibberella zeae PH-1
MTVQSQQQSQAIPVLSSQNGTEPQDANKEVVQNVAAKGVQYFNPEQLPAPGLGINGPNNTLPKVFTPIKIRGMTMPNRIWVSPMCQYSARDGFQQPWHFAHYGGLAQRGPGLIMLEATAVQARGRITPEDSGIWLDSHVEGLRKHVEFAHANNSLIGIQIGHAGRKASCVAPWLDAGLAAEKAAGGWPDDVVGPSNEPFAPGYPTPRAITLEEIEQLKEDFVSGVRRAVEAGFDTIDFHFAHGYLVSSFLSPATNKRTDKYGGSFENRVRLALEIVEAARAVMPEDMPLFTRISGTDWLENNPEYEGETWTLEQSIKLAHQLADRGVDVLDVSSGGIHKMQKVAAGPGYQAPLAKAIKKSVGDKMLISTVGSIKIGTLAEEIIAGGEDDTPLDLVASGRLFQKNTGLVWSWADDLNTSIQIAHQIAWGFGGRAKKNAPKLVL

SEQ ID NO: 184 - protein, 637 aa, Nicotiana tabacum
MMESCDCIEALLPNDDLLVKYQYLSDFFIAFAYFSIPLELIYFVHKSACFPYRWVLMQFGAFIVLCGATHFISLWTFFMHSKTVAVVMTIAKILTAAVSCITALMLVHIIPDLLSVKTRELFLKARAEELDKEMGLIIRQEETGRHVRMLTHEIRSTLDRHTILKTTLVELGRTLDLAECALWMPCQGGLNLQLSHNLNNLLPLGSTVPINLPIINEIFSSPGAIQIPHTNALARMRNTAGRYIPPEVVAVRVPLLHLSNFHINDWPELSARSYAVMVLILPMNGLRKWRDHELELVQVVADQVAVALSHAAILEESMRAHDQLMEQNIALDVARQEAEMAIHARNDFLAVMNHEMRTPMHAVIALCSLLLETDLTPEQRVMIETILKSSNLLATLINDVLDLSRLEDGILELENGTFNLHGILREAVNLIKPIASLKKLSITLALALDLPILAVGDAKRLIQTLLNVAGNAVKFTKEGHISIEASVAKPEYARDCHPPEVYPMPSDGQFYLRVQVRDSGCGISPQDIPFVFTKFAETRNTSNRSSGGEGLGLAICRRFIQLMKGNIWIESEGLGKGTTVTFVVKLGVCNHPNALPLLPMAPRGRLNQGSDDLFRYRQFRGDDGGMAVTVQRYQRSL

SEQ ID NO: 185 - protein, 212 aa, Haemophilus influenzae R2866
MNIEIIPVTAFQQNCSLIWDDEKNAAIIDPGGEAERLIQRIEELDLNLKVILITHGHLDHVGAAMQLKQHFGVEIWGSNEKDKFLFESLPEQAQRFGLPNIDAFLPDRWFNQEGEILKLDGFNFEILHLPGHTPGHIGFIEHEKKVAFTGDVLFQGGIGRTDFPRGDYETLISSIRTKLLPLNDDLIIIAGHGSYTTIGQEKRSNPFLNPKS

SEQ ID NO: 186 - protein, 161 aa, Zea mays
  misc_feature (13)..(13): Xaa can be any naturally occurring amino acid
  misc_feature (16)..(16): Xaa can be any naturally occurring amino acid
  misc_feature (30)..(30): Xaa can be any naturally occurring amino acid
  misc_feature (34)..(34): Xaa can be any naturally occurring amino acid
  misc_feature (36)..(36): Xaa can be any naturally occurring amino acid
  misc_feature (40)..(40): Xaa can be any naturally occurring amino acid
  misc_feature (65)..(65): Xaa can be any naturally occurring amino acid
  misc_feature (80)..(80): Xaa can be any naturally occurring amino acid
  misc_feature (92)..(92): Xaa can be any naturally occurring amino acid
  misc_feature (95)..(95): Xaa can be any naturally occurring amino acid
  misc_feature (104)..(104): Xaa can be any naturally occurring amino acid
  misc_feature (109)..(109): Xaa can be any naturally occurring amino acid
  misc_feature (116)..(116): Xaa can be any naturally occurring amino acid
  misc_feature (128)..(128): Xaa can be any naturally occurring amino acid
QKIYYLTGAKGTXDRXAAGEKAENATTAQXEGHXTXQEGXDAGEEANNQNETKDATTNRARTPTXEKTRKTKARGGKRRXPGEGPQEKTGGXPQXHKAPNKKEXQEETXRKKKAQXPQDGTRANKATXAWGGEAGDPIHDKRCNSGTTDMDPERNMRKRGR

SEQ ID NO: 187 - protein, 370 aa, Burkholderia sp. 383
MTALFSPFTLRGVTLPNRIVISPMCQYSAERGEATDWHMIHLGHLALSGAGLLCIEATAVEPDGRITHGDLGLWDDVTEAALKPVLAAIRKHSPVRVAMQLSHAGRKASSNVPWQGGQLVSVADGGWLPHAPSAVPHKDGETPPLALDAAGLNRIREAFAASAKRAARLGIDAIEVHAAHGYLLHQFLSPLANQRTDEYGGSLENRMRFPLEIFEIVRAAFPEGRPVGVRVSATDWVEGGWELDDTIAFAHELKRRGCDWIDVSSGGVSPLQKIPLSAGYQVPFAQAVKRAVGMPTIAVGLINEPAHANRLIEAGDADFVAMARAMLYDPRWPWHAAAELGAQVTAPPQYWRSQPREHKALFGDIAFGQR

SEQ ID NO: 188 - protein, 455 aa, Geobacillus kaustophilus HTA426
MSQQRKSIIPDDFLWGGAVTSFQTEGAWNEGGKGLSIVDARPIPKGHSDWKVAVDFYHRYKEDIALFKELGFTAYRTSIAWTRIFPDGEGEPNEAGLAFYDAVFDELRANGIEPVITLYHFDLPLALAKKYNGFASRKVVDLFERYARTVFERYRGKVNYWLTFNEQNLVLEQPHLWGAICPEDEDPEAFAYRVCHNVFIAHAKAVKALREIAPEAKIGGMVTYLTTYPATCRPEDALANVQAKELFIDFFFDVFARGAYPRYVTNQLEKKGICLPLEAGDEELLRSQTVDFLSFSYYQSQIVRHQEQDERIIKGLEPNPYLPKTKWGWAIDPIGLRIALKDVYARYEMPIFITENGIGLEEELNENGTVDDDERIDYLRRHIEQMKMAMEEGVEVIGYLMWGATDLLSSQGEMRKRYGVIFVNRDDENLRDLKRYKKKSFYWFQRVIRTNGEEL

SEQ ID NO: 189 - protein, 292 aa, Arabidopsis thaliana
MEKTLVGGCGGENEEVILGKELDFLGREQVSNIRRDSFVEPLGSILLQLEAFWVFPWLVFINGICITLSYHRNLSHRSFDLPKWLEYLFAYGGVLAFQGDPIEWVSNHRYHHKHCETQRDPHSPTQGFWFSHMAWIFDTSSILENCGGEENVDDLVRQPFYRFLQRTVLLHMMAYSFLFYFCGGMPLLVWGIGITIAVRLHLTFLVNSVCHIWGTRAWNTSDFSKNNWWVAILTLGEGWHNNHHAFEFSARHGLEWWQLDITWCLIRFLEAIGLATNVKLPTETQMKGKALV

SEQ ID NO: 190 - protein, 207 aa, Zea mays
  misc_feature (111)..(111): Xaa can be any naturally occurring amino acid
  misc_feature (135)..(135): Xaa can be any naturally occurring amino acid
MASRRRTLLKVIILGDSGVGKTSLMNQYVNKKFSNQYKATIGADFLTKEVQFEDRLFTLQIWDTAGQERFQSLGVAFYRGADCCVLVYDVNSMKSFDNLHNWREEFLIQAXSPSDPDNFPFVLLGNKVDVDGGSXRVVSEKKAKAWCASKGSIPYFETSAKDGTNVEDAFQCIVKNALKNEPEEELYVPDTVDVVGGNRAQRSSGCC

SEQ ID NO: 191 - protein, 524 aa, Solibacter usitatus Ellin6076
MKIRTSLQLALIVGGCTVLAPLYGPAISASAATTQDDLDKNIKSLAGALSILEDNYADKISSEKAIYQGAIPGMLRTLDPHSNFLDPSEYQDMQRKQRAQYFGIGMLISMDGPKVIAMEPFPGSPAWRADLRRGDVIVAVDGNDVTKKDSSAVADLLRGPRGSQVRVSVMREGAPAPVTVTVTRGEIETSLVDAFWIKPGIAFLKVTSFEAQNVARDVEAAMQKLGEANVKGLILDLRENRGGLVTEAVSLAGRFLRDGQVVVSHRGRAEKEQVFRANKANPAAQKYPIVVLVNGNSASASEIVSGALQDHDRALIMGETTFGKGLVQAQFPLSEGALLLTIAHYYTPSGRLIQRDYSKGSFFDYYYARKPIQNSDDIKATDTGRKMYGGGGITPDEKYDPEKSTMFERRVFSSSIIYRFANSYFGAAKPSLPANWTPDADLLSRFKDYLHTKNVAFTDAEFNRDKKWITEQIRDEFYLRAFDKKTSDRAQFLDDPEVHQAVESLPKAEAMHAEAQKVMAARRQ

SEQ ID NO: 192 - protein, 182 aa, Aspergillus nidulans FGSC A4
MSNLQPSSSEPSIFEVGAFLPGGHNTDPALPENSPTAGFKLNHFMLRIRDPKRSLHFYMNLMGMRTVFTMNTGPWTIYYLGYPSTPQDRADLPAWSAKVGGDNRTLTSTLGLLELYHVHGSEKPISEGGYEISTGNEPPNLGFGHLGFTVPDVPKALERLRGAGVRVIKELSVSTRESIPLK

SEQ ID NO: 193 - protein, 348 aa, Antirrhinum majus
LSFDLVEAWIRDNPKASICTPEGAYNFKNIANFQDYHGLPVFRNAVARFMEKVRGNRVRFDPDKIVMSGGATGAQETLAFCLADPGDALLVPTPYYPGNDRDITWRTGIQLLPVVCESSNEFKLTHEALESAYKKAQDSNIKVKGLLLNNPSNPLGIVLDKQTLTDSLNFTNDKNIHLICDEIYSATVFSQPSFTSIAEIVQENENYNRDLIHIVYSLSKDLGFPGFRVGIIYSYNQTVMNCARKMSSFGLVSTQTQHLIATMLSDSDFVDRFIDESAKRLGKRHGVLSRGLAQVGIGSLKSNAGLYCWMDLRRLLKEPTFEAELDLWRVILNEVKLNVSPGASFHCS

SEQ ID NO: 194 - protein, 306 aa, Gibberella zeae PH-1
MAPSTFKLNTGQEIPAVGLGTWQSPAGEVEKAVTYALKDGYKLIDCAYCYGNEEEVGAGLKAAFKAGVKREDIFVVTKAWATYNTRVELALDKSLKALGLDYVDLFLVHWPLLLNPDGNDDKFPKKPDGSRDVIRDYNHVDGWKLMEKLPATGKTRAVGVCNYSKKYLEELLPHATIVPAVNQIENHPELPQQEIVDFCKEKGIHIEAYSPLGSTGGPVMSAEPVVKIADKKGVSASTVLLSYHGNTVLAKSVNPERITANKTIVDLDDEDMKALNDYSAELQKNNQVKRYVYPPFGIDFGFPDKS

SEQ ID NO: 195 - protein, 444 aa, Campylobacter jejuni RM1221
MMELILKTKRFFAGLAGFATTFILCLFLTSHLQAKVDQKEEQVQKRLEALDKLTKTLAIVEQYYVDDQNISDLVDKSLSGLLSNLDAHSSFLNEKDFNDMKIQTNGEFGGLGITVGMKDGALTVVSPIEGTPADKAGIKSGDIILKINDEATLGINLNDAVDKMRGKPKTQITLTIFRKGATKPFDVTLTREIIKIESVYAKMIENENILYLRVTNFDKNVVDVASKELKKYPNVKGVILDLRNNPGGLLNQAIGLVNLFVDKGVIVSQKGRIASENQEYKADPKNKISNASLVVLVNGGSASASEIVSGALQDLKRGVIVGENTFGKGSVQQIIPINKTEALRLTIARYYLPSGRTIQAVGVKPDIEVFPGKVNTQEDGFSIKESDLKQHLESELEKIDKNKKEDKQENKDNKNLISQKQINDDAQLNSAIDTIKILNIKQGR

SEQ ID NO: 196 - protein, 832 aa, Frankia sp. EAN1pec
MNGRPDSVNLSRFTDTAVVDRPGVVERTGGADRPGGADPAAPNGAPDPAAAARPAGAPEPTGTPDPASAPPLGLPGEVLDRLAGGAHHDPHGVLGAHPTRGWTVIRALRPDATAVTVLVDGTRHPMTRLHSGGIFAVAVPGGIPDYRFEVTYPDSTHVVDDPYQHLPTLGEIDLHLIGEGRHERLWHVLGAHVRRLDRGPGGGGGGGTVAGVSFAVWAPNARGVRVVGDFDFWDGRGFPMRSLGSSGVWELFVPGIGAGTRYKYEILGSDGVWRQKADPLAFATEQPPATASVVHESSYTWDDAAWLERRASIPWHAAPVSVYEVHLASWRRGLSYLELAEQLVEYVRENGFTHVEMLPVAEHPFGGSWGYQVTSYYAPTSRFGSPDEFRHLVDALHAAGIGVIVDWVPAHFPRDAFALGRFDGTPLYEHPDPRRGEQPDWGTYVFDFGRSEVRNFLVANALYWLEEFHVDGLRVDAVASMLYLDYSRPSGEWVPNAHGGRENLEAVSLLQEVNATVYRRVPGAMMIAEESTAWPGVTRPTHLGGLGFGFKWNMGWMHDTLDYSSRAPLFRTYHHHQMTFSLMYAFSENFVLPFSHDEVVHGKGSLLRKMPGDRRAQLANLRALYGYMWAHPGKQLLFMGCEFAQDNEWSEATSLDWHLLGEAGHGGVARLVRDLNHTYREIPALWERDSDPSGFSWIDASDAENNVFAFVRWGEDGERALACVTNFAGVGQVGYRLGFPFPGRWREVLNTDALDYGGGGMGNLGGITAVADPSHGLPASAALSLPPLGTVWFVHEPADGGPAGDGPSADGQTDNELTASEPADGVRSDPEA

SEQ ID NO: 197 - protein, 473 aa, Clostridium longisporum
MSFDLSFPKSFLWGGATAANQFEGAYNEDGKGLSIQDIAPKGVMGPITEVPTEDNMKLIGIDFYHRYKEDIKLFAEMGFKTFRLSIAWSRIFPNGDDEIPNEKGLEFYDKVFDELQRYGIEPLVTLSHYETPLNLSKKYNGWANRDLIGFYERYVRTVFTRYKDKVKYWLTFNEINSAIHAPYMSAGIWTDKSELSKQDLYQAMHHELVASALAVKIGHEINPDFKIGCMILGIPVYPLTPHPDDLIEKMRVERESLFFADVHARGKYPRYMNRLFKENNIEIKWHEDDAEILSNVVDFISFSYYMSSCATADEEKKKAGAGNLLAGVPNPYLKASEWGWQIDPKGLRLILNELYDRYEKPLFIVENGLGAVDELVTDENGNKTVNDDYRIKYLNDHLVQVAEAIEDGVELMGYTTWGCIDLVSASTAELKKRYGFIYVDRHDDGSGTLERYKKKSFNWYKEVIATNGKSLER

SEQ ID NO: 198 - protein, 156 aa, Arabidopsis thaliana
MDLEFGRFPIFSILEDMLEAPEEQTEKTRNNPSRAYMRDAKAMAATPADVIEHPDAYVFAVDMPGIKGDEIQVQIENENVLVVSGKRQRDNKENEGVKFVRMERRMGKFMRKFQLPDNADLEKISPACNGGVLEVTNPKLPPPEPRNPRQNKVQFA

SEQ ID NO: 199 - protein, 552 aa, Glycine max
MALAPPSVFALYIVIDLKIEIYMTISAMCGILAVLGCVDNSQTKRARIIELSRRLRHRGPDWSGIHCYEDCYLAHQRLAIVDPTSGDQPLYNEDKTVIVTYEEHGEEFVNMLDGMFAFILLDTRDKSFIAARDAIGITPLYLGWGHDGSTWFASEMKALSDDCERFISFPPGHIYSSKQGGLRRWYNPPWFSEDIPSTPYDPTLLRETFERAVVKRMMTDVPFGVLLSGGLDSSLVAAVVNRYLAESESARQWGSQLHTFCIGLKGSPDLKAAKEVADYLGTRHHELYFTVQEGIDALEEVIYHIETYDVTTIRASTAMFLMSRKIKALGVKMVLSGEGSDEIFGVFMALMIWQIKALHLYDCLRANKSTAAWGVEARVPFLDKEFINVAMSIDPEWKMIRPDLGRIEKWVLRNAFDDDKNPYLPKHILYRQKEQFSDGVGYSWIDGLKDHANKQVTDATMMAANFIYPENTPTTKEGYLYRTIFEKFFPKNAAKATVPGGPSVACSTAKAVEWDAAWSKNLDPSGRAALGIHDAAYDAVDTKIDEPKNGTL

SEQ ID NO: 200 - protein, 250 aa, Salix discolor
MGRGRVQLKRIENKINRQVTFSKRRTGLLKKAHEISVLCDAEVALIVFSHKGKLFEYSTDDCMEKILERYERYSYEERQLAATDFDSPGNWTLEYNRLKAKVELLQRNHRNYLGEDLDSMSLKELQNLEQQIDTALKHIRARKNHLMSQSISELQRKEKAIQVQNNMLVKQIKEKEKKDKAVAQPALWDDQQNQGPHASSFLLSQPAGLPLPCLNIGGCYQEETDPEVRRNELDHALEPTYSFHLGGYGA

SEQ ID NO: 201 - protein, 261 aa, Triticum aestivum
  misc_feature (208)..(208): Xaa can be any naturally occurring amino acid
AYLGDSIRTSLYKKAGWHRSGIPGISSTHASGFDPLDGSSNIDCGVSIGTIFGIYMIKNQDTVTLEEVLQPGKDMIAAGYCMYGSSCTLVLSTGNGVNGFTLDPSLGEFIMTHPDIKIPPKGKIYSVNEGNAKNWDTPTAKYVEKCKYPTDGSSPKSLRYIGSMVADVHRTLLYGGIFLYPADKKSPSGKLRVMYEVFPMSFLMEGGXGAKSFTGKGRALDLDPHRTSTRESPIFPRRQRRRGRRSRRLYPEEATEGKDLP

SEQ ID NO: 202 - protein, 382 aa, Triticum aestivum
KAKAKPTCSRSVPPTPAQPASLPAPPPVPMAATPPSSRDPSPQPRRPAAAAGRPAASGTGTIGNGKRGGLLLGRYELGRVLGHGTFAKVYHARHADTGETVAIKVLDKEKALRAGLVPHIKREITILRRVRHPNIVRLFEVMATKSKIYFVMEFVRGGELFARVAKGRLKEDTARRYFQQLISAVGFCHARGVFHRDLKPENLLVDERGDLKVSDFGLSAVADQFHPDGLLHTFCGTPSYVAPEMLARRGYDGAKADIWSCGVILFVLMAGYLPFHDQNLMAMYRKIYRGEFRCPRWFSRDLTSLLNRLLDTNPETRITMAEVMQSRWFQKGFRPVRFYVEDDQLHSLGDSESEELGLVEPTEPPLPPPLSAAAAATTAARG

SEQ ID NO: 203 - protein, 347 aa, Antirrhinum majus
VSFDLLEEYLEKHSEATNCDSRNSGFRENALFQDYHGLLSFRKAMASFMEQIRGGRATFDPERVVITAGAPPANELLTFILANPGDALLIPTPYYPGFDRDLRWRTGVNIVPIHCDSSNNFEITPQALEAAYNEAESKNIKVKGVLITNPSNPLGATIKRAILEQILEFVTRKNIHLISDEIYSGSSFSPEEFVSIAEILEAQDYKNSERVHIVYSLSKDLGLPGFRVGTIYSYNDKVVTTARRMSSFTLISSQTQHLLASMLSDKEFTKEYININRSRLRKRYEMIVDGLKEAGIECLKGNAGLFCWMNLKPLLEKPTKEHEVELWKLIMYEVKLNISPGSSCHCS

SEQ ID NO: 204 - protein, 517 aa, Dianthus caryophyllus
MGSYKGVYDREILSKIATNDGHGENLEYFDGWKAYDRDPYHSTKNSNGVIQMGLAENQLCFDLVTEWLLKNPQASICTNEGVNKFMDIAIFQDYHGLPEFRSAVAKFMGKARDEKVIFNPDRIVMSGGASASETLLFCLANPGDAFLIPSPYYPAFNRDLRWRTGVNLIPFTCSSSNNFKITKEALQSAYEDALKKNIKVKGIIVTNPSNPLGTVLDKDTLKMLLTFVNAKNIHLVCDEIYATTVFNSPSFISVAEVIKDMPHVNQDLVHILYSLSKDMGMPGFRVGIIYSYNDRVVSTARRMSSFGLVSSQTQFMIAALLSDDDFVRRFLVESRDRLFRRHQHFTSELAKIGIGCLQGNAALFVWMDLRHLLDEATVERELKLWRVIINEVKINVSPGSSFLCSEPGWFRVCFANMDNATLDVALNRIRSFVTRGRVDNSTMTTTSARAAATTTTTTTTTTTTTTTTTTIKKKRGQMELRLSFNNRRFEDGLMSPHSILLSPHSPMPQSPLVKART

SEQ ID NO: 205 - protein, 1518 aa, Saccharomyces cerevisiae
MTGHVSKTSHVPKGRPSSLAKKAAKRAMAKVNSNPKRASGHLERVVQSVNDATKRLSQPDSTVSVATKSSKRKSRDTVGPWKLGKTLGKGSSGRVRLAKNMETGQLAAIKIVPKKKAFVHCSNNGTVPNSYSSSMVTSNVSSPSIASREHSNHSQTNPYGIEREIVIMKLISHTNVMALFEVWENKSELYLVLEYVDGGELFDYLVSKGKLPEREAIHYFKQIVEGVSYCHSFNICHRDLKPENLLLDKKNRRIKIADFGMAALELPNKLLKTSCGSPHYASPEIVMGRPYHGGPSDVWSCGIVLFALLTGHLPFNDDNIKKLLLKVQSGKYQMPSNLSSEARDLISKILVIDPEKRITTQEILKHPLIKKYDDLPVNKVLRKMRKDNMARGKSNSDLHLLNNVSPSIVTLHSKGEIDESILRSLQILWHGVSRELITAKLLQKPMSEEKLFYSLLLQYKQRHSISLSSSSENKKSATESSVNEPRIEYASKTANNTGLRSENNDVKTLHSLEIHSEDTSTVNQNNAITGVNTEINAPVLAQKSQFSINTLSQPESDKAEAEAVTLPPAIPIFNASSSRIFRNSYTSISSRSRRSLRLSNSRLSLSASTSRETVHDNEMPLPQLPKSPSRYSLSRRAIHASPSTKSIHKSLSRKNIAATVAARRTLQNSASKRSLYSLQSISKRSLNLNDLLVFDDPLPSKKPASENVNKSEPHSLESDSDFEILCDQILFGNALDRILEEEEDNEKERDTQRQRQNDTKSSADTFTISGVSTNKENEGPEYPTKIEKNQFNMSYKPSENMSGLSSFPIFEKENTLSSSYLEEQKPKRAALSDITNSFNKMNKQEGMRIEKKIQREQLQKKNDRPSPLKPIQHQELRVNSLPNDQGKPSLSLDPRRNISQPVNSKVESLLQGLKFKKEPASHWTHERGSLFMSEHVEDEKPVKASDVSIESSYVPLTTVATSSRDPSVLAESSTIQKPMLSLPSSFLNTSMTFKNLSQILADDGDDKHLSVPQNQSRSVAMSHPLRKQSAKISLTPRSNLNANLSVKRNQGSPGSYLSNDLDGISDMTFAMEIPTNTFTAQAIQLMNNDTDNNKINTSPKASSFTKEKVIKSAAYISKEKEPDNSDTNYIPDYTIPNTYDEKAINIFEDAPSDEGSLNTSSSESDSRASVHRKAVSIDTMATTNVLTPATNVRVSLYWNNNSSGIPRETTEEILSKLRLSPENPSNTHMQKRFSSTRGSRDSNALGISQSLQSMFKDLEEDQDGHTSQADILESSMSYSKRRPSEESVNPKQRVTMLFDEEEEESKKVGGGKIKEEHTKLDNKISEESSQLVLPVVEKKENANNTENNYSKIPKPSTIKVTKDTAMESNTQTHTKKPILKSVQNVEVEEAPSSDKKNWFVKLFQNFSSHNNATKASKNHVTNISFDDAHMLTLNEFNKNSIDYQLKNLDHKFGRKVVEYDCKFVKGNFKFKIKITSTPNASSVITVKKRSKHSNTSSNKAFEKFNDDVERVIRNAGRS

SEQ ID NO: 206 - protein, 254 aa, Sinapis alba
MGRGRVELKRIENKINRQVTFAKRRNGLLKKAYELSVLCDAEVALIIFSNRGKLYEFCSSSSMIRTLERYQKCNYGPPEPNVPSREALAVELSSQQEYLKLKERYDALQRTQRNLLGEDLGPLSTKELELLERQLDSSLKQIRALRTQFMLDQLNDLQSKERMLNETNKTLRLRLADGYQMPLQLNPNQEDHHVDYGRHDQQQQQNSHHAFFQPLECEPILQMGYQGQQDHGMEAGPSENNYMLGWLPYDTNSI

SEQ ID NO: 207 - protein, 114 aa, Glycine max
REGLSTMNGKDLKNLETKLEKGISRIRSKKNERLFAEIEHMKKREIHLNNDNQLLRAKIAAGERSHHNVNGLSGSISYESMQSQFDSRGFFQVTGLQPNNNQYAGQDNMSLQFV

SEQ ID NO: 208 - protein, 190 aa, Conocephalum supradecompositum
DEHGEVVAEIRRSDLEPYLGLHYPATDIPQASRFLFMKNRVRMICDCCAQPVQVVQDKELRQPLSLAGSTLRAPHGCHAQYMGNMGSIASLVMAVIINDNDEEYSSRGYQHKGRKLWGLVVCHHTTPRSVPFPLRSACELLMQVFGLQLNMEVELAAQLREKRILRTQTLLCDMLLRDAPIGIVSQSPNI

SEQ ID NO: 209 - protein, 918 aa, Shigella flexneri 2a str. 301
MTNYSLRARMMILILAPTVLIGLLLSIFFVVHRYNDLQRQLEDAGASIIEPLAVSTEYGMSLQNRESIGQLISVLHRRHSDIVRAISVYDENNRLFVTSNFHLDPSSMQLGSNVPFPRQLTVTRDGDIMILRTPIISESYSPDESPSSDAKNSQNMLGYIALELDLKSVRLQQYKEIFISCVMMLFCIGIALIFGWRLMRDVTGPIRNMVNTVDRIRRGQLDSRVEGFMLGELDMLKNGINSMAMSLAAYHEEMQHNIDQATSDLRETLEQMEIQNVELDLAKKRAQEAARIKSEFLANMSHELRTPLNGVIGFTRLTLKTELTPTQRDHLNTIERSANNLLAIINDVLDFSKLEAGKLILESIPFPLRSTLDEVVTLLAHSSHDKGLELTLNIKSDVPDNVIGDPLRLQQIITNLVGNAIKFTENGNIDILVEKRALSNTKVQIEVQIRDTGIGIPERDQSRLFQAFRQADASISRRHGGTGLGLVITQKLVNEMGGDISFHSQPNRGSTFWFHINLDLNPNIIIEGPSIQCLAGKRLAYVEPNSAAAQCTLDILSETPLEVVYSPTFSALPPAHYDMMLLGIAVTFREPLTMQHERLAKAVSMTDFLMLALPCHAQVNAEKLKQDGIGACLLKPLTPTRLLPALTEFCHHKQNTLLPVTDESKLAMTVMAVDDNPANLKLIGALLEDMVQHVELCDSGHQAVERAKQMPFDLILMDIQMPDMDGIRACELIHQLPHQRQTPVIAVTAHAMAGQKEKLLGAGMSDYLAKPIEEERLHNLLLRYKPGSGISSRVVTPEVNEIVVNPNATLDWQLALRQAAGKTDLARDMLQMLLDFLPEVRNKVEEQLAGENPEGLVDLIHKLHGSCGYSGVPRMKNLCQLIEQQLRSGTKEEDLEPELLELLDEMDNVAREASKILG

SEQ ID NO: 210 - protein, 696 aa, Leptospira interrogans serovar Copenhageni str. Fiocruz L1-130
MNESSHKTFTDKINEFYKRSFELFSKGSYLEEMDKFYSLCKTTLYADFIILLESKDPLSIKIVESQPKFNFSIDQTNINLLSISYSENRPVLPYTLTRQEINFSNFDALEEIDFAQMIAVPIPNENIEDRRKNILLFLYSKNTEHISEFLKLITELSPRIYEIFSIKNKEILLNSVHSRLDSILKTIPQAIIFMDSGTGKTWINESAAKLLSLSEGGEVSSWKVSTSMTELIQSAVNQKEIFLEMNRNLSNMNLEKFSTQWMFTDPEKKVFEVTSLLLPGKTAPGRLWFFEDITSFHSQQETLALLNQALKEKSEIAQQENQAKTVFISNISHEIRTPMTGILGITELLLNTPLNPDQKDSLELIQRSGDKLLKIVNHLLDFSKADTGKIELESIPFNMQELLNDLVSLLRTEILKNKNELNILFPPNFPKLLKGDPVRIGQILTNLVSNATKFTKEGTVEVGFHILEKTNSELSFRTWVFDTGIGIPPTKFNSVFEPFVQSDKSITRHFGGTGLGLSITKKLIELMGGKIHVESQPGIGTRFWFELKLEIPESIDEESFTENSEAEVITDKSDLSRLKVLIVEDNLINQKLLGRILKKKKIEPFLVEDGMKAIEKARKFHYDLIFMDINMPGIDGLSATEIIRKFPKGDSIRIVGLTANAAPEIQKVATQRGMDDLLTKPYNVSQIEKILNLFEK

SEQ ID NO: 211 - protein, 542 aa, Picrophilus torridus DSM 9790
MDLFEPGNIGNLEIKNRMVMAPMISNICNPDGSINENYIYYMERRALGGFGLLITEYAYINDENSKGSPNELGIISKSYLPKMKRLTDVIHGHGSRIFTQLVHAGGKANPDYNKRMIFAPSSLNEYPFLRPDEMTVNDIESVEEDFLRAARLAYRANFDGIEIHGAHGYLIQEFISKDLNKRNDRYGGSLENNVRIANEIIDMIRAELDFPVGIRLSLYEDEGYGPDYGIKAARLIKNADYVHFSAGRSAPPGSSAPFYYERNHIYKRIRERIDKKTMVVGSVIDINDARTVLEGSDLVVFGRAALADPFLPEKFRRNLPLRPCIRCNQACRDLSRGEARCTVNVETGLESRIKYKKYHGEIAIGGAGIKGLEAALYASKLGLNVYIYDNYSFGGQINEIYDEYKKREFMNLLKYYESALKINNVKIEHEGSYDVLCKPDKVYPDIDGDVSIDSNVYKYHDLALKIALKNHVIMSYRSLNSLDRSRADFYTKMATRLGIEFKSDYDFEFVLIDRDQYDIRKAMESGRNAIERYIMERENEFL

SEQ ID NO: 212 - protein, 250 aa, Salix discolor
MGRGRVQLKRIENKINRQVTFSKRRTGLLKKAHEISVLCDAEVALIVFSHKGKLFEYSTDDCMEKILERYERYSYEERQLATTDFDSQGNWTLEYNRLKAKVELLQRNHRNYLGEDLDSMSLKELQNLEQQIDTALKHIRARKNHLMSQSISELQRKEKAIQVQNNMLVKQIKEKEKKDKAVAQPAPIWDDQQNQGPHASSFLLSQPAGLPLPCLNIGGCYQEEAPEVRRNELDHALEPTYSFHLGGYGA

SEQ ID NO: 213 - protein, 328 aa, Prochlorococcus marinus subsp. pastoris str. CCMP1986
MIILHIGLFENSFSNIMKSVIFQETANLKKPVPAEKVIELSDKLLEPSSHSKRYPPRLHKTWGTIFFMIAIHLLSLLALQPQFWSMPAVTALFFFYWLTACLGVTLGYHRLLSHRSFVVPKWLERFFATCGAISCQHGPIDWVGLHRHHHSFSDTEVDHHNSKRGFWWSHMGWMFKDVEALKAVPKLSADLIKDPYYRFLNKYFLFLQIPIGLCLYAIGQKLGVGGWALVLWGIPLRLVVVYHITWLVNSATHCWGKAPFESGDGSKNNAWVAALTFGEGWHNNHHAFPNSARQGLFRGQIDLTWEHIKILAKLGFAKKVKLPSRSYY

SEQ ID NO: 214 - protein, 150 aa, Brassica napus
  misc_feature (42)..(42): Xaa can be any naturally occurring amino acid
MAIRLMDLDSPFFNTLHRIMDLTEDAEKNLNAPTRTYVRDAXAMAATPADVKEYPNSYVFVIDMPGLKSGDIKVQVEDDNVLLISGERKREEEKEKEGGKYLRMERRLGKLMRKFTLPENANTDAISAVCLDGVLTVTVNKLPPPQPKKP

SEQ ID NO: 215 - protein, 211 aa, Tulipa gesneriana
MGRGKIEIKRIENSTNRQVTFSKRRNGIIKKAREISVLCDAWVSVVIFSSSGKMSEYCSPTITLPKMLDKYQQNCGNKLWDAKHQNLSEEIDRIKKENDNMQIELRHLKGEDLNSLQPKELIPIEEALENGFRSVREKQDDVLMTRKKNMRLMEEDNKRLNYVLHHQQQQAMDENIRDMELAYHQKHREFNSQMPMTFRVQPIQPNLHENK

SEQ ID NO: 216 - protein, 166 aa, Oryza sativa
MLLCFNKVASIALSPNVPGQIFMGLMVNPPKPGDISYLKFSAESKSILESLRRRARLMTDGFNSCRNVVCNFTEGAMYSFPQIRLPPKAIDAAKRAGKAADVFYCLKLLEATGISTVPGSGFGQKEGVFHLRTTILPAEEDMPAIMTSFKKFNDTFMDQYDGYSRM

SEQ ID NO: 217 - protein, 547 aa, Bradyrhizobium sp. BTAi1
MAAKDVKFAGDARDRMLRGVDILANAVKVTLGPKGRNVVIEKSFGAPRITKDGVTVAKEIELEDKFENMGAQMLREVASKTNDLAGDGTTTATVLAQAIVREGAKAVAAGMNPMDLKRGIDTAVAAVIKDIEKRAKPVASSAEVAQVGTISANGDAAIGKMIAQAMQKVGNEGVITVEENKSLETEVDIVEGMKFDRGYLSPYFVTNAEKMTAELDDVYVLLHEKKLSGLQAMLPVLEAVVQSGRPLLIIAEDVEGEALATLVVNRLRGGLKVAAVKAPGFGDRRKAMLEDIAILTGGQLISDDLGMKLENVTIKMLGRAKKVVIDKENTTIVNGAGKKADIEARVGQIKAQIEETTSDYDREKLQERLAKLAGGVAVIRVGGATEIEVKEKKDRVEDALNATRAAVQEGIVPGGGVALLRAKKAVGRITNPNSDVQAGINIVLKALEAPVRQIAENAGVEGSLVVGKILEEKSETFGFDAQSEDYVDMVAKGIIDPAKVVRTALQDASSVAGLLVTTEAMVAELPKEAAPAMPAGGGMGGMGGMGF

SEQ ID NO: 218 - protein, 448 aa, Arabidopsis thaliana
MASQGCVDWQFSGSDAAEKAAQASLGTYSSEIFSLCDPQGKPILPPLSEEAETSHTAEKAVVKAVLCGTGNAYAPSIGLPVAKRAVAEYLNRDLDNKLTGDDVYMTVGCKQAIELAVSILAKPKANILLPRPGFPWDMVHSIYKHLEVRRYEFIPERDFEIDFNSVREMVDENTFAIFIINPHNPNGNYYTEAHLKQLATLARELGIMVVSDEVYRWSVFGSNPFVPMGKFSSIVPVITLGSISKGWIVPGWRTGWLALHDLNGVFRSTKVPAYLVLYGQVLKAAKEFLEITSKPPTVIQAAIPTILEKTPQDFFEKRGIFLKDKVDFGYSKLKNIPTLTCYMKPESCTFLWFETNFSLWIIRIAQTKLDPLHFVDIEDDHDFCRKLAKEENLVVLPGIAFGQNNWLRHSIDMETPRLEDAFERLKSFCERHSVIVEASSLKDVNGVN

SEQ ID NO: 219 - protein, 563 aa, Xylella fastidiosa Temecula1
MCSIFGIFNLQPSDNLQILRHQALECSQRQRHRGPDWSGVYVDVGAILVHERLAIVDPAGGAQPLFSEDGTLALAVNGEIYNHAVLKGTLQQPYAFQTHSDCEVINALYREETPTSFLNRLNGIFAFALWDKTTGRGLIARDPMGVVPLYWGHDQDGRLRVASEMKALVEHCPDVAQFPPGHWYDTTTGTLVKYYERPWKNYSAVEGVQVSLQELREAFERAVHRQLMTDVPYGVLLSGGLDSSLVAAVAARYARHRIETNDQSEAWWPRLHSFAIGLKDSPDLSAANVAAEALNTVHHGFEYTFQEGLDVLPEVIRHIETYDVTTIRASTPMFLLARRIKAMGVKMVLSGEGSDEIFGGYLYFHKAPNAREFHEELVRKLNALYYYDCLRANKAMMAWGVEPRVPFLDREFLDVAMRMDAQHKMVDKTSNGPQRMEKGILRAAFDGYLPPSILWRQKEQFSDGVGYGWIDGLKAHAETQVSDHALATAETRFQVNPPQTKEAYYYRSIFERFFPSPAAAETVPGGKSIACSSPAAIAWDASFATMADPSGRAVSGVHQQALL

SEQ ID NO: 220 - protein, 451 aa, Pichia angusta
MGTKSMTDVTAEELSKDSVAMMLAKDRELKNKYLKQKHISEQPWTWENWHRHINWLNFILVLAVPFAGLISTKWVPLKLHTFVTAVILYCFGGISITAGYHRHWAHRAYDCKLPVKIFFALFGASAVEGSIKMWGHQHRVHHRYTDTPRDPYDAKRGFWYSHMGWMLLVPNPRYKARADISDLLDDWVVRVQHRHYLLLMVVMAFLFPAVLTHYLFNDFWGGFIYAGLLRAVVIQQATFCVNSLAHWIGEQPFDDRRTPRDHVLTALVTFGEGYHNFHHEFPSDYRNALKWYQYDPTKVVIYLLSKVGLAYNLKKFSQNAIDQGILQQQQKKLDRMRAKLNWGPQLSELPVWDKSTFFEKAKEQKGLVIISGIVHDCANFLTEHPGGQALLKTSFGKDATMAFNGGVYAHSNAAHNLLATMRVAVIRDGGANGDTFDAQLRYLASKENKKE

SEQ ID NO: 221 - protein, 175 aa, Kluyveromyces thermotolerans
HRLWSHRAYSARWPLRLFFAIFGAASVEGSIKWWGHSHRIHHRYTDTVRDPYDARRGLWYSHMGWMLLQPNPKYRARADIADLTDDWIVRFQHRHYIPIMAFSAFILPALLCKYLFNDFIGGLVYGGVLRVFAIQQTTFCIDSLAHYLGDQPFDDRRTPRDNWITALVTFGEGYH

SEQ ID NO: 222 - protein, 636 aa, Oryza sativa
MDGCDCIEPLWPTDELLIKYQYISDFFIALAYFSIPLELIYFVKKSSFFPYRWVLIQFGAFIVLCGATHLINLWTFTTHTKTVAMVMTVAKVSTAVVSCATALMLVHIIPDLLSVKTRELFLKNKAEQLDREMGLIRTQEETGRHVRMLTHEIRSTLDRHTILKTTLVELGGTLGLEECALWMPSRSGSSLQLSHTLRHQITVGSTVSINLPVVNQVFSSNRAIIIPHTSPLARIRPLAGRYVPPEVAAVRVPLLHLSNFQINDWPELSAKSYAIMVLMLPSDSARKWHVHELELVEVVADQVAVALSHAAILEESMRARDLLMEQNVALDLARREAEMAIRARNDFLAVMNHEMRTPMNAIIALSSLLLETELTPEQRLMVETVLKSSNLLATLINDVLDLSKLEDGSLELEIKAFNLHAVFKEVMSFIKPIAAIKRLSVSVMLAPDLPLCAIGDEKRLMQTILNISGNAVKFTKEGHITLVASVVKADSLREFRTPDFHPTASDDNFYLKVQIKDTGCGISPQDLPQVFTKFPQSQPGGNRGYSGSGLGLAICKRFVTLMGGHIWLDSEGTGRGCTVTFVIQLGICDNTNAYQQKLIPLVWPSSGDADFVGPVPNAPNEEKGQASLKSRYQRSI

SEQ ID NO: 223 - protein, 586 aa, Vicia faba
MCGILAVLGCSDDSQAKRVRILELSRRLKHRGPDWSGLHQHGDNYLAHQRLAIVDPASGDQPLFNEDKSIIVTVNGEIYNHEELRKQLPNHTFRTQCDCDVIAHLYEEYGENFVDLLDGIFSFVLLDTRDNSFIVARDAIGVTSLYIGWGLDGSVWIASELKGLNDECEHFEVFPPGHLYSSKEREFRRWYNPPWFNEAIIPSTPYDPLVLRTAFEKAVIKRLMTDVPFGVLLSGGLDSSLVASVTARYLADTKAAKQWGAKLHSFCVGLKGAPDLKAGKEVADFLGTVHHEFQFTIQDGIDAIEDVIYHTETYDVTTIRAATPMFLMSRKIKSSGVKMLISGEGSDEIFGGYLYFHKAPNKEEFHQETCRKIKALHRYDCLRANKSTYAWGLEARVPFLDKDFIKAAMDIDPEFKMIKHDEGRIEKWILRKAFDDEENPYLPKHILYRQKEQFSDGVGYGWIDGIKDHAAKHVTDKMMFNASHIFPFNTPNTKEAYYYRMIFERFFPQNSARLTVPGGPSVACSTEKAIEWDASWSGNLDPSGRAALGVHVSAYENQINPITKGVEPEKIIPKIGVSPLGVAIQT

SEQ ID NO: 224 - protein, 495 aa, Zea mays
TASAVLCAPQTRLVGSSIQLPPEPGGRSATYLTERGSSRTGHSIFRSEGGVRRRGMSTTKVKRRVGKYELGRTIGEGTFAKVRFARDTVTGEAVAIKILDKEKVLKHKMVEQIKREISTMKLIKHPNVVRIYEVMGSKTKIYIVLEFATGGELFDTIVNHGRMREDEARRYFQQLINAVDYCHSRGVYHRDLKPENLLLDSYGNLKVSDFGLSALSQQIKDDGLLHTTCGTPNYVAPEVLEDQGYDGAMADLWSCGVILFVLLAGYLPFEDSNLMTLYKKISNAEFTFPPWTSFPAKRLLTRILDPNPMTRITIPEILEDEWFKKGYKRPEFDEQYDTTLDDVDAVFNDSEEHHVTEKKEEEPVALNAFELISMSAGLNLGNLFDSEQEFKRETRFTSKCPPKEIVRKIEEAAKPLGFDVQKKNYKLRLEKVKAGRKGNLNVATEILQVAPSLHMVEVRKAKGDTLEFHKFYKNLSKTLKDVVWKSDDLQTQHAS

SEQ ID NO: 225 - protein, 580 aa, Frankia sp. EAN1pec
MLCPREHSRCRRLIPTQGDDPVARGVGAEGGGILWIGKDAIRRVEAVGEGWAVRPVCVADAVNGARCHPGGLTWRPEGRQWAAHRDGRDEAMTATDTVKATETRHQGAAVVGGDQSVADAGGVTSPAPTESHTTTPSMFRARGEQLVLVATILFPFAALVAAVPLLWDHWITWRDVILAAVMYAITGHGVTVGFHRYFTHRGFKTSKPVRAALAIAGNMAIEGPVIRWVADHRRHHAFSDADGDPHSPWRYGTGPAALARGLWHAHVGWLFDVEQTDQRRYAPDLLDDPMIVRVSRSFALCAFVSLALPAVIGGLWGGSFEAALQAFFWASLVRVALLHHVTWSVNSICHVMGSRALPLPRPLGQRVAAGPAFHGRVLAQPAPRRADLGPARRPPLADRHQLLRDQDSGDPRAGPGRPLARPRPPGRQARLTGVVHSQRRWSRLSTSASVSPPRHPPRAPGRVPERPCGGLFDLGGQGKPLVLGLVLLAGEGAELGVEGEDALVVGGGLGQRLVQLGLATSQFLEGPFQPGQLLAGRTQFARAQGRTRVRSRRLPGARGRARPSRTPRAAARATGAGRAA

SEQ ID NO: 226 - protein, 749 aa, Thermobifida fusca YX
MTARPAVRQPAGLPCPQPCNRYGYPMTNALLAEIDALVAGTHHNPHALLGAHPGPEGVWVRALRPLARSVHVLLANGSRVELPHLHKGVFAGVVPGAEVPDYRLVVRYDDGTELTVDDPYRHLPTLGELDIHLIQEGRHEELWRVLGAHTKRFPSVLGDTEGTAFTVWAPNARGVRVIGDFNHWDGTGHPMRSLGSCGVWELFIPGVGDGTRYKYQVLGADGVWREKADPVAFATQAPPETASVVFTSRYTWQDDEWLTQRAAADLHRKPMSIYEVHLGSWRPGLSYRELADQLVDYVRELGFTHVEFLPVAEHPFGGSWGYQVTSYYAPTARFGSPDDFRYLVDRLHQAGIGVFLDWVPAHFPKDDWALSRFDGTALYEHPDPRRGIHPDWDTLIFNYGRTEVRNFLVANALFWLEEFHIDGLRVDAVASMLYLDYSRESGQWEPNAYGGRENLDAIDFLRELNATAYRRNPGIAMIAEESTAWPGVTRSTDTGGLGFGFKWNMGWMHDTLSYLQHDPVHRQYHHNEVTFSMVYAYSENYVLPLSHDEVVHGKRSLLYKMPGNEWQRCANLRALLAYMWAHPGKQLLFMGNEIAQGDEWSHDAGVQWWLLRYPHHAGMRRLVADLNRLYRNTRALWSQDTVPEGFTWLDGGDASGNTLSFLRWGDDGSVLACLVNFSGRPHPERRVGLPYAGRWREILNTDAVLYGGSGVSQPGIIEASEETPWQGQPASALVTYPPLGVSWLVFDGT

SEQ ID NO: 227 - protein, 464 aa, Vibrio fischeri ES114
MPLHSKNAVRDDLLDDIYSSADLSLSMPKYKMPEQEHDPRHAYQVIHDELMMDGNSRQNLATFCQTWVEDEVHKLMDECIDKNMIDKDEYPQTAELESRCVHMLADLWNSPDAENTLGCSTTGSSEAAMLGGMALKWAWREKMKKLGKPTDKPNMICGPVQVCWHKFARYWDIELREIPMEGDRLIMTPEEVIKRCDENTIGVVPTLGVTFTCQYEPVKAVHEALDKLQEETGLDIPMHIDAASGGFLAPFCDPDLEWDFRLPRVKSINASGHKFGLSPLGVGWVIWRDASALHEDLIFNVNYLGGNMPTFALNFSRPGGQIVAQYYNFLRLGKEGYRKIHQACYDTAVYLSSEIEKLGMFEIIYDGKGGIPAMSWSLKEGVDPGFNLFDLSDRIRSRGWQIAAYAMPPKREDLVIMRILVRHGFSRDQADLLVADLKHCVEFFAKHPISHGSDELESSGFNHG

SEQ ID NO: 228 - protein, 375 aa, Glycine max
EISWSLTNRRYTEKCVSYAESHDQAIVGDKTVAFLLMDEEMYSGMSSLVDASPIVERGIALQKMIHFITMALGGEGYLNFMGNEFGHPEWIDFPREGNGWSYEKCRRQWNLVDTDHLRYKFMNAFDRAMNLLDDKFSFLASTKQIVSSADDDDKVIVFERGDLIFVFNFHPENTYEGYKVGCDLPGKYRVALDSDAWEFGGRGRVGHDVDHFTSPEGIPGVPETNFNNRPNSFKVLSPARTCVAYYRVEESQEDDDNNSLVGVEETSAAADVAKIPDESASTESEDIKLDGVKETLAAADVAKIPDESAPLESEDSNLDVVKEPLAAANAEVTKISGELVSVETEGINLDKLEETIVAASVESEVVRDKPEDAAN

SEQ ID NO: 229 - protein, 526 aa, Bradyrhizobium japonicum USDA 110
MSRPGRRNSASDLPQSSLLKPPATGHCAAAPASSRGQHHMSDKVSRRQFAALAGLSAAAIANPLDGADAKPAAAASRDSGFPEGFLWGTATSSYQVEGAVNEGGRGASIWDRFVRIPGKIEDGSTGDRANEHYHRYKEDIALIKELGCKAYRFSIAWPRVFPDGDGKPNPGGLDFYNRLVDELLKNGIEPWMTLYHWDLPQSLQDRFGGWRSTETCKIFGDYAAYVAERLTDRVKNVFTLNESGRFVQFGYGLGIDAPGVTLPQGEVNQVRHNSALAHGLAVQAVRAHGRRGTRVGPAENIDVCVPAIDTPEHVRAAEIALREMNAGYLNVIMTGSYTEAFLKYAGANAPKYTDAELKIISSPVDFLGLNIYAPQNYVVPSDQGAGFMPLPIPKSFPHMNSDWLRVAPETIYWVPKLAAKIWKTDAIYISENGTSGDDVVTPDGKIYDTDRIMYLRNYLAQLQRATAEGVPVRGYFLWSLMDNFEWVFGLSKRFGLYHVNFDTQVRTPKLSASYYRNVIARNAAGV

SEQ ID NO: 230 - protein, 586 aa, Securigera parviflora
MCGILAVLGCSDDSQAKRVRVLELSRRLKHRGPDWSGLHQHGDCFLAHQRLAIVDPASGDQPLFNEDQSIIVTVNGEIYNHEELRKQMPNHKFRTGSDCDVIAHLYEEHGENFVDMLDGIFSFVLLDTRDNSFIVARDAIGVTSLYIGWGLDGSVWIASELKGLNDDCEHFETFPPGHLYSSKEREFRRWYNPPWFSESIPSAPYDPLALRQAFEKAVVKRLMTDVPFGVLLSGGLDSSLVASITARHLADTKAAKQWGAKLHSFCVGLEGSPDLKAGKEVADYLGTVHHEFQYTVQDGIDALEDVIYHIETYDVTTIRASTPMFLMSRKIKSLGVKWVISGEGSDEIFGGYLYFHKAPNKEELHKETCRKIKALHKYDCLRANKSTFAWGLEARVPFLDKEFINVAMNIDPENKMIKLDEGRIEKWILRKAFDDEENPYLPKHILYRQKEQFSDGVGYGWIDGLKDHAAKHVTDRMMLNASNIYPFNTPTTKEAYYYRMIFERFYPQNSARLSVPGGASVACSTEKALEWDAEWSKNLDPSGRAALGVHVSAYENQLSSSVSKGVEPEKIIPKMEISPLGVAIQS

SEQ ID NO: 231 - protein, 338 aa, Dechloromonas aromatica RCB
MTQQRTLARYLTEEQRNKGVITGDLKLLIEVVSRACQAISIAIGKGGLGGVLGEAGSDNVQGEAQKKLDVLSNDILLDANEWGGHLAAMASEEMDLPHLVPHRFPKGEYLLTFDPLDGSSNIDVNVSIGTIFSVLKCPEGADLSTPEAAEQAFLQPGTAQVAAGYAVYGPTTLLVLTVGDGVAVFTLDREQGQFILTLENVQIPADTKEFAINMSNQRFWEAPVQRYVAEMQVGKEGPLGKDYNMRWVASMVADVHRIMTRGGIFMYPMDSKIKGQGGKLRLMYEANPMAMLIEQAGGAATTGRQRILDIQPEKLHQRVPVILGSKNEVERVTGYHSA

SEQ ID NO: 232 - protein, 868 aa, Ipomoea batatas
MVYTLSGLRLPAVAPVYKHLGSTSHADRRNTNPSLSLKRNSFSSWKIFARNTSYESEPSSFRVAASEKVLVPGGEGEGSSFPTDQLEVAEALSEDTQVSADVDNVKMEENSNSESNVDFVKVASDSKESVQEQDHTSSLQFEEDGNVEVSQKPETLDDISAESEMVKKRAIPPPGLGQRIYEIDPLLKNFRDHLDYRFSHYRKIREAINQYEGGLEVFSRGYEKLGFTRSVTGITYREWAPGATWATLIGDFNNWNPNADVMTRNEFGVWEIFLPNNADGSPAIPHGSRVKIRMDTPSGIKDSIPAWINFSVQAPGAIPYDGIYYDPPEEERYKFQHPRPKRPKSLRIYECHIGMSSPEPKINTYAEFRDDVLPRIKKLGYNALQIMAIQEHSYYASFGYHVTNFFAPSSRFGTPDDLKSLIDRAHELGLVVLMDIVHSHASNNTLDGLNMFDGTDSCYFHSGTRGYHWMWDSRLFNYGNWEVLRYLLSNARWWLDEYKFDGFRFDGVTSMMYTHHGLSVGFTGNYSEYFGYATDVDAVVYLMLVNDLIHGLFPEAITIGEDVSGMPTFCIPVRDGGVGFDYRLHMAIPDKWIEILKRRDEDWQMGEIVHTLTNRRWLEKCVSYAESHDQALVGDKTIAFWLMDKDMYDFMALDRPATPVIDRGIALHKMIRLITMGLGGEGYLNFMGNEFGHPEWIDFPRGEQRLPDGSVLPGNNFSYDKCRRRFDLGDADYLRYRGMQEFDQAMHHLEEKYGFMTAKHQYISRQDEGDRVIIFERGDLVFVFNFHWTNSYSDYRVGCLKPGKYKVALDSDSPLFGGFGRVQPDAEFFTFEGYHDDRPRSFMVYAPSRTAVVYALAKEEDEAKPVEE

SEQ ID NO: 233 - protein, 657 aa, Orpinomyces sp. PC-2
MKTLTVFSALLAVTAAKKCIVKSDAAVASEAEEVTAELTAPEDSGVESGEDDELLDLSTIDYGDDVDMSTVKKLPADFKWGAATAAYQVEGAWDEEGRGESVWDHFTHLYPKNVESGDRSKDFSTNGNIACDSYHKFDEDVKMLKLMNAKYYRFSISWPRLFPDGQARKVDGKWNVNEKGAEYYDMVINTLLKNDIVPFVTLYHWDLPYALHEKYGGWLDYHSQDDFAKYAEFCFERFGDRVKNWITINEPWVNCVSGYRLGPGKAPYRCTGEAPRKLQNSTDLDLEGGCSYEIGPTQYSKNSEPLPANRVPQKLEDVWCSHNILLGHAKAVKVYREKFQKKQKGLIGITVDGEAQIPWVEPGMTKKEYENNLKYANLAAEFRIGWYSDPPMVGDYPKSVKERMGKDLPEFTEEEKKILKGSSSDFLGWNTYTAHWAAQAKNEDGSYIQPPTAEEANFDNSKKDMWDDNCKGRGDGWTCIPPTLGSQAGSSWNTKFAPTIRVGLNWFSKRYEGLIKNGIVITENGCAQPNYKVARANDEVTKKYFESIGQPKYADTYKEEDIEREDNLEGTLMHDTYRIDWYDQYLKNLRLAYAVDNIDVRGYMAWSLLDNFEWENGYETRFGMTYIDFYNDKEMKRVPKDSLEHLGQWYLENVEQN

SEQ ID NO: 234 - protein, 119 aa, Aspergillus niger
MSEQPSDPYIPSGANGAGAGASAAQNGDPRTREIDKKIQETVDTMRSNIFKVSERGERLDSLQDKTDNLATSAQGFRRGANRVRKQMWWKDMKMRVCLIVCIIILLIVIIVPAVVATKH

SEQ ID NO: 235 - protein, 436 aa, Pseudomonas fluorescens Pf-5
MLHLSRLTSLALTIALVIGAPQAFAAETAQAATAATTKAPLPLEELRTFAEVMDRIKAAYVEPVDDKTLLENAIKGMLSNLDPHSAYLGPEDFAELQESTSGEFGGLGIEVGAEDGFIKVVSPIDDTPASKAGIQAGDLIVKINGQPTRGQTMTEAVDKMRGKIGQKITLTLVRDGGTPFDVTLARATIQVKSVKSQLLESGYGYIRITQFQVKTGEEVSKALAKLRKDNGKKLNGIILDLRNNPGGVLQAAVEVVDHFITKGLIVYTKGRIANSELRFSATGKDESEAVPMVVLINGGSASASEIVAGALQDQKRAVLMGTTSFGKGSVQTVLPLNNDRALKITTALYFTPNGRSIQAQGIVPDIEVRRAKITSESQDGEYFKEADLQGHLGNGNGGADKPSGAASKAKPMPQDDDYQLAQALSLLKGLSITRGK

SEQ ID NO: 236 - protein, 687 aa, Burkholderia sp. 383
MRYPHLFKPMQLNQLTLRNRIVSTAHAEVYAEPGGLPGDRYIRYYEEKAKGGVGLAICGGSSPVSIDSPQGWWKSVNLSTDKIIDPLTRLADTMHKHGAKIMIQATHMGRRSSFHGEHWPHLMSPSGVREPVHRGNAKIIEIEEIRRIIGDFAAAAKRVKAAGMDGIEISAAHQHLIDQFWSKRSNHRTDEWGGSLENRLRFGIEVLTAVREAVGKDFCVGLRMCGDEFHEDGLDHEALKEIAQAMSETGLIDYLSVVGSGGDTHNTIANCMPPMALPPEPFVHLAAGIKSVVKIPVMHAQSIRDAGQAERLLATGMIDLVGMTRAQIADPHMVIKIRDGREDEIKQCVGANYCIDRQYNGLDVLCIQNAATSRESTMPHIIEKSRGPKRKVVVVGAGPAGLEAARVAKLRGHDVVLFEKNAEVGGQVMIAAKAPQREQMSGIIRWFDMETKRLGVDRRLGVAADEKMIMAEKPDIVVLATGGSSFTWQVPGWGVAEGLAVSSWDILTGKVEPKQNVLLFDGVSTHAGAGVADFMASRGSKVEVVTPDVKVADDCGGTTFPIFYRRLYAFGVIPTPNTMLDRVYEEDGKLIAVLRNEYTEELEERAVDQVVIENGSSPNDELYWKLKPESVNRGQIDPHTLFAAEPQPCLSEELGNGRFLLFRVGDCISMHNVHGAIYDSLRLVKDF

SEQ ID NO: 237 - protein, 215 aa, Yersinia pestis KIM
MKYQIIPVTAFSQNCTLIWCEATGQAALVDPGGEATKIIAEVERQGVTISQVLLTHGHLDHVGAAAEVAAHFQVPIYGPEKEDTFWLEGLPAQSRMFGLSECEAFTPTRWLEEGDKITVGEIELSVLHCPGHTPGHIVFIDPQGRLALVGDVIFKGGVGRSDFPRGDHQQLINSIRTKLLPLGDDITFIPGHGPMSTLGHERQTNPFIREEPAIW

SEQ ID NO: 238 - protein, 493 aa, Oryza sativa
MDDRRTILMDRYEIGRQLGQGNFAKVYYARNLTSGQAVAIKMIDKEKVTRVGLMVQIKREISIMRLVKHPNILQLFEVMASKSKIYFVLEYAKGGELFKKISKGKFSEDVARRYFHQLISGIDYCHSRGVYHRDLKPENLLLDENESLKVSDFGLSALSESKRHDGLLHTTCGTPAYVAPEVLSRRGYDGAKADIWSCGVILFVLVSGYLPFHDTNLIEMYRKIAKAEYKCPRSFSAELKDLLYKILDPDPSTRISIPKIKRSAWYRKSSDVNALKSKHETGDKVYKGEATTSDTTECSIFEGNRASSRDKVYTNGEATTSDSPECSNSDGKQASLSLPNLNAFDIISLSTGFDLSNLFEERYGRREERFTTRQPAAAIFAKLNELARRFKLKIKKKENGVLRLVAPKEGIKGLLELDAEVFELAPSFHLVEFKKSNGDTIEYQKLMKEDIRPALKDIVWAWQGGQHQQPEQSMQGMQGEQQPSRLPSQQPQG

SEQ ID NO: 239 - protein, 279 aa, Triticum aestivum
  misc_feature (212)..(212): Xaa can be any naturally occurring amino acid
  misc_feature (223)..(223): Xaa can be any naturally occurring amino acid
  misc_feature (255)..(255): Xaa can be any naturally occurring amino acid
AYLGDSIEQVCTKKQAGTGPEFPGYRRPTRPLAGGQAVAIKMIDKEKVSRIGLIVQIKREISIMGLVRHPNVLKLFEVMASKSKIYFVLEYAKGGELFNKITKGKLSEDAARKYFHQLISAVDYCHSRGVYHRDLKPENLLLDENENLKVSDFGLSALAESTRQDGLLHTTCGTPAYVAPEVLSRRGYDGAKADIWSCGVILFVLVAGFFPXHDTNLIEMYRXKISRAEYRCPRPFSVELRDLLYKILDPDPSTXAPVSRIKRSAWYRKPLSCKWTGDL

SEQ ID NO: 240 - protein, 259 aa, Gluconobacter oxydans 621H
MRARDVSMQLPHHQDTPRGTVMPLDIKPIPVLSDNYAWLLTATEGQRAVVDPGEAGPIMDEIGDGRLDMILLTHHHADHTAGTDALRERYGAKVYGPRQKREWLPRLDHDVEDGDSLSLGSAQIRVLSTPGHAVGHVSYVVPEVPALFCGDVLFSLGCGRLLEGTAQELFDSLHRYDSLPDQTLVCAGHEYTRSNLAFALHVDPDNAALKARAGEIEQLLEAGRPTLPVSLGVERRTNPFLLAPDVATFARLRREKDTF

SEQ ID NO: 241 - protein, 367 aa, Vibrio cholerae O1 biovar eltor str. N16961
MSRLFEPTDLKQLTLQNRVVMAPMTRARSSQPGNIPNPMMATYYQQRASAGLIISEATQISDDAQGYSFTPGVYTDEQTSGWKTVTQAVKQQGAAMFCQLWHVGRVSHPVFQKGQLPIAPSALKPVETQVWIADEQGNGQMVDCVEPRAMTQADIDRVVNDFAQAAKCAIEAGFDGVEIHGGNGYLIDQFLRTNSNHRTDSYGGSRENRMRFLLEVVDAVSQAIGASRVGVRLAPFITFKDMDCPDIVPTILEASKQLQARDIAYLHLSEADWDDAPTIPESFRIELRKHFTNAIIVAGRYTLERAEEVLQKGYADLVAFGRPFVANPDLVSRLKHQQPLAQLDGKTLFGGGEQGYTDYPKIPEQPI

SEQ ID NO: 242 - protein, 248 aa, Triticum aestivum
  misc_feature (184)..(184): Xaa can be any naturally occurring amino acid
  misc_feature (194)..(194): Xaa can be any naturally occurring amino acid
  misc_feature (207)..(207): Xaa can be any naturally occurring amino acid
  misc_feature (219)..(219): Xaa can be any naturally occurring amino acid
  misc_feature (230)..(230): Xaa can be any naturally occurring amino acid
  misc_feature (241)..(241): Xaa can be any naturally occurring amino acid
SIVPIEKFVQKSRLVPVRNSRDIVDPRVRIRRYEKQRVANDSTYWVLFELIWRDYFRFLSAKYGNSIFHLGGPRKVVSKWSQDQALFESWKDGRTGYPLIDANMKELLATGFMSNRGRQIVCSFLVRDMGIDWRMGAEWFETCLLDYDPASNYGNWTYGAGVGNDPREDRYFSIPKQAKTYDPXDGEYVAYWLXPELRSLAKERRNXFPGPSYIKQVVXPLKFDGGHSKXDQQFNRQTRPXNIYRRQK

SEQ ID NO: 243 - protein, 640 aa, Corynebacterium efficiens YS-314
MCGLLGILSANGNAADYVPALQRALPCLHHRGPDEAGTWQDGDLAFGFNRLAIIDIAHSHQPLRWGPEGEPERYAMTFNGEIYNYIELREELTALGYAFETEGDGEPIMVGFHHWGADVVNHLRGMFAIAIWDTVDRSLFLARDQFGIKPLFYATTGVGTVFSSEKKAILEMAEELNLDLSLDRRAIEHYVDLQYVPEPETLHTGIRRLESGCTATIIPGGELVEKRYFTPRFPVKSVPKGREQDLFDRIARVLEDSVEKHMRADVTVGSFLSGGIDSTAIATLAKRHNPNLLTFTTGFEREGYSEVDVAAESAAAIGVEHIVKIVSPEEYANAIPKIMWYLDDPVADPSLVPLYFVAAEARKHVKVVLSGEGADELFGGYTIYREPLSLAPFEKIPTPLRRGLGRLSRVLPEGMKGKSLLERGSMTMEERYYGNARSFNFEQMQRVIPWARREWDHREVTAPIYAQSRDMDPVARMQHLDLFTWMRGDILVKADKINMANSLELRVPFLDKEVFKVAETIPYDLKIANGTTKYALRKAMEQIVPPHVLHRKKLGFPVPMRHWLAGDELFGWAQDTINESQTDEIFNKKAVLEMLNEHRAGVSDHSRRLWTVLAFMVWHGIFVENRIDPQIEQRDYPVEL

SEQ ID NO: 244 - protein, 373 aa, Bradyrhizobium japonicum USDA 110
MEGPSPFSVVFEKEPAMNSLFSPVRIGGLELSNRLVMAPMTRSRADAGGVPGGLAAEYYAQRAGVGLIVTEGTQPSDDGQGYMTTPGIYTPAHVAGWRKVTDAVHGKGGHIFIQLMHAGRMSHPDNTPHHRQGVAPSAIAPDTPIFTPKGMQDIPQPRSLATDDVRRTVADFRDAARHAIAAGADGVEIHGANGYLVQQFIAPSANTRTDAYGGSIENRARFAIEVATAIAGEIGADRTAIRLSPGITMWGIDEGAEGPDLYRHLVGELDKLSLAYLHIMHQGDERLLADLRRLWRGKLIVNRPGRPRDRIGSDVAAGLADLEAYGQMILANPDFIARLKSGALLNEADRTTFFGGTARGYTDYPALDAIAAV

SEQ ID NO: 245 - protein, 304 aa, Zea mays
LTSSFSSLSGSLPEERHYCHTTTPPMLNMMTDLSCGPSSKAAKGGQPAATTGSGGDRQGRGKIEIKRIENTTNRQVTFCKRRNGLLKKAYELSVLCDAEVALVVFSSRGRLYEYANNSVKSTIERYKKANSDTSNSGTVAEVNAQHYQQESSKLRQAIDSLQNANRTIVGDSIHTMGLRELKQMEGKLEKAINKIRARKNELLYAEVEYMQKREMDLQTDNMYLRSKIAENNETGQPPMNMIGLPSTSEYDHMAPFVDSRNFLQVNMQQQPQHYSHLSAATNDPPTRMMKLRIFGQQSMHASTQ

SEQ ID NO: 246 - protein, 161 aa, Oryza sativa
  misc_feature (64)..(64): Xaa can be any naturally occurring amino acid
MSLIRRSNVFDPFSLDLWDPFDGFPFGSGSRSSGTIFPSFPRGTSSETAAFAGARIDWKETPEXHVFKADVPGLKKEEVKVEVEDGNVLQISGERSKEQEEKTDKWHRVERSSGKFLRRFRLPENTKPEQIKASMENGVLTVTVPKEEPKKPDVKSIQVTG

SEQ ID NO: 247 - protein, 348 aa, Thermosynechococcus elongatus BP-1
MTDYAAHQQALDRDCLTLSRHVLQQLQSFDAAAQDLSALMNRIALAGKLIARRLSRAGLMEGVLGFTGAVNIQGEDVKKMDVYANEVFIAAFKQSGLVCRLASEEMAQPYYIPENCPIGRYTLLYDPLDGSSNVDINLNVGSIFAIRQQEGTDLDSTAADLLQDGHQQIAAGYILYGPSTMLVYSLGKGTHVFVLDPSLGEFILAIENLQIPASGAIYSVNEGNFWAWEEPIRNYVRHVHRQPGYSARYSGALVADIHRILMEGGVFLYPGTQKNPAGKLRLLYEAAPIAFLVEQAGGKASTGTQPLLDVVPDHLHMRTPLIVGSPENVALVESFIQQTPAQPTVTQV

SEQ ID NO: 248 - protein, 150 aa, Pennisetum glaucum
MSLVRRGNVFDPFSMDLWDPFDNMFRSIVPSSSSSDTAAFANARIDWKETPEVHVFKADLPGVKKEEVKVEVEDGNVLVISGQRSKEKEDKNDRWHRVERSSGQFVRRFRLPEDAKTDQVNAGLENGVLTVTVPKAEGKKPEVKAIEISG

SEQ ID NO: 249 - protein, 152 aa, Pennisetum glaucum
MSLVSRSSVFDPFSMDLWDPFDSMFRSIVQSAGSPDSDTAAFAAARIDWKETPEAHVFKADLPGVKKEEVKVEVEDGNVLVISGQRSKEKEDKNDRWHRVERSSGQFMRRFRLPGNAKVDQVKAGLENGVLTVTVPKAEEKKPEVKAIEISG

SEQ ID NO: 250 - protein, 421 aa, Glycine max
GSRGYHWMWDSRLFNYGSWEVLRYLLSNSRWWLDEYKFDGFRFDGVTSMMYTHHGLEVAFTGNYNEYFGFATDVDAVIYLMLTNDVIHGLFPEAVTIGEDVSGMPTFCLPTQDGGVGFDYRLHMAIADKWIEILKKNDEDWKMGDIVHTLTNRRWLEKCVAYAESHDQALVGDKTIAFWLMDKDMYDFMALDRPSTPIIDRGIALHKMIRLITMGLGGEGYLNFMGNEFGHPEWIDFPRGDQHLPTGVIVPGNNNSFDKCRRRFDLGDADYLRYRGMQEFDQAMQHLEEKFGFMTAEHQYISRKNEGDKIIVFERGNLIFVFNFHWNNSYSDYRVGCSTPGKYKIVLDSDDALFGGFSRLNHTAEYFTSEGWYDDRPRSFLIYAPSRTAVVYALADDVEPTLADEAEPALADEAEPEPVDP

SEQ ID NO: 251 - protein, 1315 aa, Botryotinia fuckeliana
MEDSTIAHTTAILQTLALSSIDLPLTNVYGNKGIRLPGADTAEKLALERELAALVSRVQRLEARAITVNNQTLPDTPNELGAPSAFADVLTGAPSRASKSTTSRQQLVNSLLAAREAPTGGERPPKFTKLSDEELEALREHVDHQSKQLDSQKSELAGVHAQLFEQKQRQEQALNVLEVERVAALERELKKHQQANEAFQKALREIGEIVTAVARGDLSKKVQIHSVEMDPEITTFKRVINTMMDQLQIFSSEVSRVAREVGTEGILGGQAKISGVDGTWKELTDNVNVMAQNLTDQVREIASVTTAVAHGDLTQKIERPAQGEILQLQQTINTMVDQLRTFAAEVTRVARDVGTEGILGGQAEIEGVQGMWNTLIVNVNAMANNLTTQVRDIAIVTTAVAKGDLTQKVQAECKGEIKQLKETINSMVDQLQQFAREVTKIAREVGTEGRLGGQATVHDVEGTWRDLTENVNGMAMNLTTQVREIAKVTTAVARGDLTKKIEVEVQGEIASLKDTINTMVDRLSTFAFEVSKVAREVGTDGTLGGQAQVDNVEGKWKDLTENVNTMARNLTTQVRGISTVTQAIANGDMSQKIEVAAAGEILILKETINNMVDRLSIFSNEVQRVAKDVGVDGKMGGQADVAGIGGRWKEITTDVNTMANNLTTQVRAFGDITNAATDGDFTKLITVEASGEMDELKRKINQMVYNLRDSIQRNTLAREAAEFANRTKSEFLANMSHEIRTPMNGIIGMTQLTLDTDLTQYQREMLNIVHNLANSLLTIIDDILDLSKIEANRMIMEEIPYTLRGTVFNALKTLAVKANEKFLDLTYRVDSSVPDHVVGDSFRLRQVILNLVGNAIKFTEHGEVSLTIQKAEQDHCAPNEYAVEFCVSDTGIGIQADKLNLIFDTFQQADGSMTRKFGGTGLGLSISKRLVNLMRGDVWVKSQYGKGSSFYFTCTVRLATSDISFIQKQLKPYQGHNVLFIDKGQTGHGKEIITMLTQLGLVPVVVDSEQHTILLGNGRTKEKIASTYDVIVVDSIESARKLRSIDEFKYIPIVLLAPVIHVSLKSALDLGITSYMTTPCLTIDLGNGMIPALENRAAPSLADNTKSFDILLAEDNIVNQRLAVKILEKYHHVVTVVGNGQEALDAIKEKRYDVILMDVQMPIMGGFEATAKIREYERSLGTQRTPIIALTAHAMLGDREKCIQAQMDEYLSKPLKQNHLIQTILKCATLGGALLEKGREVRQSANEESPNSQNGPRGTQHPASSPTPAHMRPAIEPRAYTTTGPINHGSAESPSLVTADAEDPLARLLMRAHSS

SEQ ID NO: 252 - protein, 159 aa, Pennisetum glaucum
MSLIRRSNVFDPFSLDLWDPFEGFPFGSGSNSGSLFPSFPRTSSETAAFAGARIDWKETPEAHVFKADVPALKKEEVKVEVEDGNVLQISGERNKEQEEKTDTWHRVERSSGKFMRRFRLPENAKTDQIRASMENGVLTVTVPKEEVKKPEVKSIQISG

SEQ ID NO: 253 - protein, 750 aa, Salmonella enterica subsp. enterica serovar Paratyphi A str.
MSHNEKSPHQSPVHDTRESQPGLDSLAPSDGSHRPTPEPTPPGAQPTAPGSLKAPETANDKLTALDAFRKGSENYALTTNQGVRIADDQNSLRAGSRGPTLLEDFILREKITHFDHKRIPERIVHARGSAAHGYFQPYKDLSDITKAAFLCDPQKITPVFVRFSTVQGGAGSADTVRDIRGFATKFYTEEGIFDLVGNNTPIFFIQDAHKFPDFVHAVKPEPHWAIPQGQSAHDTFWDYVSLQPETLHNVMWAMSDRGIPRSYRTMEGFGIHTFRLINAQGKATFVRFHWKPLAGKASLVWDESQKLTGRDPDFHRRDLWEAIEAGDFPEYELGLQLIAEEDEFKFDFDLLDPTKLIPEELVPVQRVGKMVLNRNPDNFFAENEQAAFHPGHIVPGIDFTNDPLLQGRLFSYTDTQISRLGGPNFHEIPINRPTCPYHNFQRDGMHRMDIDTNPANYEPNSINDNWPRETPPAPKRGGFESYQERVDGNKIRERSPSFGEYYSHPRLFWLSQTPIEQQHIIDAFSFELGKVARAYIRERVVDQLAHIDVTLAQGVAHNLGFALTHEQTQIAPPPDVNGLKKDPALSLYAVPDGDVKGRVVAILLNDKVNAAELLTILQALKAKGVHAKLLYSRMGEVTADDGSTLTIAATFAGAPSLTVDAVIVPCGNIADIESCGDARYYLLEAYKHLKPIALAGDTRRFKALLNIDSQGEEGLVEADNVDHHFMDTLLTLMAAHRVWSRAGKINAIPA

SEQ ID NO: 254 - protein, 333 aa, Debaryomyces hansenii CBS767
MAETITKTQPQSLKLRSGFELPQVGFGLWKIPKDKTAQVVHDAIKCGYRNFDGAYDYQNEEEAGEGIRKAISDGLVTRDEIFVTTKLWNNYHSKENVFKSAKWQNEAWGLGYIDLYLMHFPIALKYVDPKENQYPAWWADKEMTIVQPDRVPIRETWEAMESLVDLGIARSIGVSNFQAQAIYDILTYNSLPISALQVEHHPYLVQPELFQLCQEQNIAFIAYSSYGPQSFLELPGSFSELANDITPLFQNKTILSIASTHKKSPAQVLLRWATQRGVVVIPKASSQTHLEQNLQLDFDLSEDQINSISKLDIGLRFNDPGFYLKSHPLHIFA

SEQ ID NO: 255 - protein, 371 aa, Burkholderia sp. 383
MTQALFSPLRLGPFALAHRVVMAPLTRMRAAEPGNTPHALNVEYYRQRATYGGLIITEGSQISPTGQGMPATPGIHSPEQVEGWKAVTQAVHAKGGLVFMQLWHVGRISHSSLLNGEQPVAPSAIAAPGNAFTSTFERVPFEIPRALGTKEIASLVDDYAQAARNALEAGFDGVEIHGANGYLLEQFLQSRSNHRTDEYGGSIENRCRIVLEVAEAVSAVYGPDRVGIRLSPFGVANGSGEDAPLPLYSHLIERLARLDLAYLHLIEPRASGAGQADVDHQNVPFASELFRPHWPNVLIAAGNYTPATAGAVIGAGRADAVAFGRLFIANPDLPERVRLGASLNAYNRPTFYGGGAAGYTDYPALGETAGA

SEQ ID NO: 256 - protein, 277 aa, Triticum aestivum
  misc_feature (144)..(144): Xaa can be any naturally occurring amino acid
  misc_feature (159)..(159): Xaa can be any naturally occurring amino acid
  misc_feature (166)..(166): Xaa can be any naturally occurring amino acid
  misc_feature (184)..(184): Xaa can be any naturally occurring amino acid
  misc_feature (196)..(196): Xaa can be any naturally occurring amino acid
  misc_feature (205)..(205): Xaa can be any naturally occurring amino acid
  misc_feature (207)..(207): Xaa can be any naturally occurring amino acid
  misc_feature (229)..(229): Xaa can be any naturally occurring amino acid
MGREKSRRLSGSRDFRQRLVLATLTSTPIIIKDIRAGEGGLRPHEMSLLHLLDKVSDQHVIDVNDTGTKVGYKPGVVLGGKDLEHDCGVHRGIGYFIEPLILLGLFARSPLSIRLKGITNDTKDPSVDTFRMVTLHMLQHFGCXLLEGLELKIENRGAXPPRGGGXEVPSFEFPILNSTFKGQXLALMKGMVKRIXGVTFSTNVXPXIVTRIFYAARGLFNKFIPDVHXFPDHKAGGLYVSSLKNLNITSDCCYVTPQDRSFLIPSVKKKKRKKKKK

SEQ ID NO: 257 - protein, 492 aa, Avicennia marina
MDPYKYCPSSSFNTPHTTTNGGHPVYNDNSSLTVGTRGPVLLEDYQLIDKLAHFTRERIPERVVHARGATAKGFFEVTHDVSHLTCADFLRAPGVQTPLIVRFSTVIHERGSPETLRDPRGFAVKFYTREGNFDIVGNNFPVFFIRDAIKFPDVIHAFKPNPKSHIQESWRILDFCSHFPESLLTFAWFYDDVGIPQDYRHMEGFGVHSYTLINKAGKVNYVKFHWKPTCGVKCLMEDEAVRIGGTNHSHATQDLYDSIAAGNYPEWKLYFQIMDPDQEDRFDFDPLDTTKIWPEDIIPLIPVGRMVLNKNIDNFFAENEMLAFSPHMIVPGINFSNDKMLQTRIFAYGDTQRHRLGPNYLLLPVNAPKCAYHNNHYDGFMNFMHRDEEVDYFPSKYDPTRHAERHPIPNAVITGRRDRRVIEKEDNFKQAGDRYRSWAPDRQERFLRRWVDALSDPRLTLEIRSIWVSYWSQADKSFGQKLASRLNVRPTM

SEQ ID NO: 258 - protein, 333 aa, Triticum aestivum
  misc_feature (295)..(295): Xaa can be any naturally occurring amino acid
  misc_feature (303)..(303): Xaa can be any naturally occurring amino acid
LAWSRPIVDDYKQFAEVCFKNFGDRVKNWFTFNEPHTYCCFSYGEGIHAPGRCSPGMDCAVPKGDSLREPYTAGHHILLAHAEAVELFKACYNKHGDSKIGMAFDVMGYEPFQDSFLDDQARERSIDYNLGWFLEPVVRGDYPFSMRSLIGDRLPKFTKEEQEKLASSCDIMGLNYYTSRFSKHIDISSDFTPKLNTDDAYASSETKGSDGNDIGPITGTYWIYMYPKGLTDLLLIMKEKYGNPPIFITENGIADVDSDPTMTDPLDDWKRLDYLQRHISAVKDAIDQGADVRGXTWGLIDNXEWSLGYSSRSALTSTRRRNSASSESASVAS

SEQ ID NO: 259 - protein, 347 aa, Vibrio cholerae O1 biovar eltor str. N16961
MTDILFQPYALNDVITLNNRIAMAPLTRCMADDDLVPTDAMVAYYARRADAGLIISEATIIRPDAQGYPNTPGLFTQAQIAGWKKVTDAVHANGGKIFAQLWHTGRVAHPAFFAGEYVLAPSALGVEGSVPRRRELQYTVPKAASQAEIKQLVADYAQAAENARLAGFDGVEIHGANGYLIDQFLHFDSNQRSDEYGETPANMARFALEVVDAVIARIGAERTALRVSPGAYFNIKADPRDREVFDYLLPELEKRNLAYLHEGMFDDSVTFDFLGGRVSTYLRQHYSKTLMGVGGFSAETGATAIENNEFDLLAIGRPFIANPDYIARVQKGEELKAYQDSMLTELY

SEQ ID NO: 260 - protein, 220 aa, Oryza sativa (indica cultivar-group)
MASSAPTPPPLLPVTNPAAAGSSPAATAVGSDAPIATPAFRLFLSKLSDSARRSLSDRRPWTELVDRSAFSRPDSLSDATSRLRRNLAYFRVNYAAVVAFALGASLLAHPFSLLVLLGLLAAWCFLYLFRGSDQPIVLFGRTFSDRETLLGLVVASFVAFFFTSVASLIISGLLVGGAIVAVHGACRMPEDLFLDDADAASGNSAAQGLLSFLGAPGSRV

SEQ ID NO: 261 - protein, 383 aa, Bordetella bronchiseptica RB50
MNQEAENTKLFAPLSLRGVVLPNRVLISPMSQYSAVDGVVQDWHRYHVAAMARGYPGSVMLEVAAVTRDGRGTPGDLGIWSDEQIAGLAELARIIEAHGVVPAIQIGHAGRKASMQRPWEGGRPLALDSSDEAWQTVGASALPIQDGWPAPRQLAQHELAGLVDSFRAAAARAVQAGYRFVEVHAAHGYLLHGFLSPISNQREDQYGGSLENRMRFPLEVVAAVRAALPDEVPLSVRISAVDGMEHGWQLADSIVFARELKALGVDLVDCSSGGIQGSATAGKGPQAVKRGPGFQVPFAHAVRQEAGIATIAVGLIVEPAQAEAILRQEQADLIAIGREALQNPNWPLHARQALGADRDYSAWPAQYGWWLQRRPKVAWEEGR

SEQ ID NO: 262 - protein, 403 aa, Malus x domestica
NTNGIIQMGLAENQLCFDLLESWLAKNPEAAAFKKNGESIFAELALFQDYHGLPAFKKAMVDFMAEIRGNKVTFDPNHLVLTAGATSANETFIFCLADPGEAVLIPTPYYPRFDRDLKWRTGVEIVPIHCTSSNGFQITETALEEAYQEAEKRNLRVKGVLVTNPSNPLGTTMTRNELYLLLSFVEDKGIHLISDEIYSGTAFSSPSFISVMEVLKDRNCDENSEVWQRVHVVYSLSKDLGLPGFRVGAIYSNDDMVVAAATKMSSFGLVSSQTQHLLSAMLSDKKLTKNYIAENHKRLKQRQKKLVSGLQKSGISCLNGNAGLFCWVDMRHLLRSNTFEAEMELWKKIVYEVHLNISPGSSCHCTEPGWFRVCFANLPERTLDLAMQRLKAFVGEYYNVPEV

SEQ ID NO: 263 - protein, 152 aa, Brassica napus
MGSIRESAPTANSSTTVVMSSIPPFLSKTYDMVDDPSTDEVVSWSSGSNSFVVWNVPEFSKQFLPKYFKHNNFSSFVRQLNTYGFRKVDPDRWEFANEGFLKGQKQLLKSIIRRKPTQVQPPQQPQVQHSSVGACVEVGKFGLEEEVERLQR

SEQ ID NO: 264 - protein, 249 aa, Dendrocalamus latiflorus
MGRGKVELKRIENKINRQVTFSKRRNGLLKKAYELSVLCDAEVALIIFSSRGKLYEFGSAGISKTLERYQHCCYNAQDNNALSETQIWYQEMSKLRAKFEALQRTQRHLLGEDLGPLSVKELQQLEKQLECALSQARQRKTQLMMEQVEELRKKERQLGEINRQLKHKLEAEGSSNYRAMHRASWAPGTVVDEGAAYHEQQPPHSAALDCEPPTLQIGYPHQFMPPEAANIPRSAPAGGENNFMLGWVL

SEQ ID NO: 265 - protein, 330 aa, Shewanella sp. MR-7
MQTLAQHLTSKAVNESLSQLILTLADTSKAISHAVRHGALAGVLGATEQENVQGETQKKLDIITNDMLKDALKADGTVRGLASEEEDHVVEVSANGQYLVCFDPLDGSSNIDINSLVGTIFSVLPAPAGELTETSFLQSGRNQLAAGYVLYGPSTMLALTTGQGVQLFTLHPETNEFLLTNAAMSISPDTQEFAINMSNQRFWEAPMQTYIADLLLGKIGPREKSFNMRWIAAMVGDVHRVLSRGGIFTYPTDNKDPKKPYKLRLMYEANPMALLVEQAGGKASTGYETILDIQPTQIHQRVAVILGSANEVDACLSYHGIDYSEEPTLD

SEQ ID NO: 266 - protein, 279 aa, Bacillus cereus G9241
MKNLQSTTTLHNGVEMPWFGLGVFKVEDGPELVEAVKSAIKAGYRSIDTAAIYGNEKAVGEGIRAGIKEAGISREDLFITSKVWNSDQGYETTLAAYEESLKKLELDYLDLYLVHWPVEGKYKDTWRALETLYKEKRVRAIGVSNFQIHHLQDVLADAEMKPMINQVEYHPRLTQKELQAFCKEQGIQMEAWSPLMQGQLLDNETLQEIAHKYGKTTAQIILRWDLQNEVVTIPKSTKEHRIIANADVFNFELTKEDMEKIDALNQNHRVGPDPDNFDF

SEQ ID NO: 267 - protein, 425 aa, Xylella fastidiosa 9a5c
MMSNSPQTPLATRQRLSEVRYEIRGELARRARELEAEGRKLIKLNIGNPGAFGFRAPEHLQRAIADDMGRTDPYTHQQGLPIAREAIAAAYVRRHYPDADADRVFVGNGVSELIDLSLRALLNPGDEVLVPSPDYPLWSAATILNDGRPVYYRCAPENGFQPDAVEIETLVSSRTRAIVLINPNNPSGANYSQELLERIVAIAVKHHLLLLVDEIYDQILYDGAVFVPVAPLAGTHPCITFSGLSKVHRACGWRVGWALLSGSSIQIDNLRNAMDLLGALRLCANVPGQYAIDAAVNGPDTITPLCSPGGPLYETRRAVIEACVVSEHLSLVVPAGALYAFPSVVGPAARHFDDYAFALELMNDEGVLVVPGSSFNVPYRDHFRVTLLPDAALIREVFSRIDRALSRRAEVAEKVVPLKSRSAAA

SEQ ID NO: 268 - protein, 175 aa, Triticum aestivum
IKILNRRKIKNMEMEEKVRREIKILRLFMHPHIIRLYEVIETPSDIYVVMEYVKSGELFDYIVEKGRLQEDEARNFFQQIISGVEYCHRNMVVHRDLKPENLLLDSHHNVKIADFGLSNIMRDGHFLKTSCGSPNYAAPEVISGKLYAGPEVDVWSCGVILYALLCGTLPFDDEN

SEQ ID NO: 269 - protein, 344 aa, Nitrobacter vulgaris
MSQELTLQQRMDGEAGSDPLRQAVKEAVAALARAAVDISDLTCRGALAGITGQAQGRNTDGDIQKDLDVRADQIIRDALGKLPIAALASEEMADLDILNPAAPICVAFDPLDGSSNINTNMSVGTIFSIMPTPSDVNAAFRQAGSAQLAAGFVVYGPQTSLVLTLGRGVDIFTLDRADRVFKLTGSSVQIPTDANEFAINASNRRHWDLPVRAYIDECLAGADGPCGKNFNMRWIGSLVAEAFRILIRGGIFLYPGDARDGYEEGRLVVYEAHPMAFIVEQAGGGASTGRKRVLDIVPDSLHQRVPLIMGSIKNVQRLEHMHTVPDVALEANAPLFGNRGLFRV

SEQ ID NO: 270 - protein, 215 aa, Triticum aestivum
MAVDAVRDAAAMVSEEEEEGQLRCDEGWGKRRRPRRQRQRAPSEEEHLALSLLMLARGHRDRHLLPSSSPAQEHRCSVCGKGFPSYQALGGHKASHRPKPAPAGADEPAATAAASPAASSSTTSSGAGGGGRVHECSVCKKTFPTGQALGGHKRCHYEGPIGASAVASRGFDLNLPALPDIVTERERCMPAPADDYEEEVLIPLVFKKPRLMIPA

SEQ ID NO: 271 - protein, 276 aa, Thermosynechococcus elongatus BP-1
MMTDSAKDLLAAAAVERRLGNRDAYVPYLRQVFADVVGEDDTVSETYGGLGAAQERLANIQPLRYGKRRNFLTGEVTGLSAYLRHGVISLAAVRDRVRQLVDDPSEAEALLQQLAWRDYWQRLYAHWGDRLWQDIEPYKTGWSAVDYATDLPAALVAAETGLACMDAFSSDLQRTGYLHNHARLWLAAYVVHWCRVRWQAGAAWFLQHLLDGDPASNNLSWQWVASTFSHKPYFFNRQNLERYSDGKYCRQCPMSDRCPFDATYEELAARLFPHKT

SEQ ID NO: 272 - protein, 136 aa, Arabidopsis thaliana
  misc_feature (31)..(31): Xaa can be any naturally occurring amino acid
  misc_feature (37)..(37): Xaa can be any naturally occurring amino acid
  misc_feature (57)..(57): Xaa can be any naturally occurring amino acid
  misc_feature (95)..(95): Xaa can be any naturally occurring amino acid
  misc_feature (110)..(110): Xaa can be any naturally occurring amino acid
MGLYLKPITLVKKEFGFPPFFFLVQNGGDGXLNYRLXHLAKLNRGMELLRRGDNNCXRDNFINTLTNKRWPEKGFFYAKRDNQAFVGDKPFAFGXWDKDMYNFMAAYRPXTRVIDKGITWHKLIRLITMGLGGDGH

SEQ ID NO: 273 - protein, 640 aa, Chrysanthemum x morifolium
MMDSCDCFETQWPADELLVKYQYISDFFIAFAYFSIPLELIYFVQKSAFFPYRWVLMQFGAFIVLCGATHFINLWTFSSHSKTVAIVMTVAKLSTAFVSCVTALMLVHIIPDLLSVKTRELFLKQRAEDLDREMGLIIKQEGTGRHVRMLTHEIRSTLDRHTILKTTLIELGRTLDLEECVLWMPSTKGMILEVSHSLHNLIPFRSTVPINLPIITEVFNRAEAIRIPHNCPLARIRTPVGSYIPPEVVAVRVPLLHLSNFEIDNWPDNSAKSYAVMVLILPMNGVRKWRDHEMELVTVVADQVAVALSHAAILEESMRARDQLMEQNFALNLARQEAEMAIHARNDFLAVMNHEMRTPMHAIIALSSLLLETELTPDQRAMIETILKSSNLLAALVNDVLDLSRLEDGSLELESDVFNLHGLFKEVVALINPIASVKNTSMALNCDLDLPAFGIGDEKRLMQIILNVVGNAVKFTKGGHVSIQASILSPEYLQEWRTPEFCPTLTEGLFYLLVQVKDSGSGIKQQDIPHIFTKFSEPRSASNRSGGAGLGLAICKRFVNLMGGHIWIESGGLGKGTTVAFLVKLGLCNYPNDPTMQQLVPRTVPKARPHQGSGELIQHRQLDREGYQGAASFPLYNRSM

SEQ ID NO: 274 - protein, 304 aa, Kineococcus radiotolerans SRS30216
MPTAGPYAPRLGMRAVTRRTSVSAMTVPTILLNDGREIPQLGFGVFQIEPGDTAQAVKTALDLGYRHIDTAQMYGNEAEVAQGIADSGVPRDEIWVTSKLNNGFHEPDAARKAVDDSVEKLRGPIDLYLIHWPLPTLYGGDFVSTWKVLEEARAAGKLRSIGVSNFQVNHLQRLAQEATVVPAVNQIEVHPYFGNEEVRRHCGEHQIGVEAWSPIAQGKVLDDPTVTAVANRLGKSPAQVVLRWHVERGDIVFPKSVTPSRMEENFALFDFELTEEDLALISALDKGEAGRTGPNPDTFDYVPS

SEQ ID NO: 275 - protein, 544 aa, Candidatus Blochmannia sansabeanus
  misc_feature (245)..(245): Xaa can be any naturally occurring amino acid
MAAKDVKFGNDARVKMLRGVNVLADAVKVTLGPKGRNVVLDKSFGAPVITKDGVSVAREIELEDKFENMGAQMVKEVASKANDSAGDGTTTATVLAQSIVNEGLKAVAAGMNPMDLKRGIDKAVVAAVEELKKLSVPCSDPKAIAQVGTISANSDETVGKLIAQAMDKVGKEGVITVEEGSGLQDELDVVEGMQFDRGYLSPYFVNKPESGTVELEHPFILLADKKISNIREMLPILESVVKAGXPLLIIAEDVEGEALATLVVNNMRGIVKVTAVKAPGFGDRRKAMLQDIAILTAGTVISEEIGLDLEKSTLEDMGQAKRVVITKDVTTIIDGVGNKSSINSRVAQINQQRDEATSDYDREKLQERVAKLAGGVAVIKVGAATEVEMKEKKARVEDALHATRAAVEEGVVAGGGVALIRVANAIRNLCGDNEDQNVGIKVARRAMEAPLRQIMANAREEPSVIANNVRSGEGNTGYNAATEKYGNMIELGILDPTKVTRSALQYAASIAGLMITTECMVTELPKEDKPDLGNAGAGGMGGMM

SEQ ID NO: 276 - protein, 846 aa, Arabidopsis thaliana
MASSSLSNLMLAIHEKKTSSVDLYRPLRNYVTFTYSEREAQLIDDDLETLKQLRSDIERVSDPSPAARRELLISYYKVLCLVETRFPISPDKDHVNAVSFVWYDAFKQKHKATQQNIHLEKAAVLFNLGASYSQIGLGHDRTTVDGRRQASHAFMAAAGAFAHLRDNESIKATIGPSTTVDVSVECVGMLERLMVAQAQECVFENTIAKGSTPGVSAKIARQVGIFYEEALSALIISPLKDHFDKGWISHVQLKAALFYGEACFRYGKELHEKEEIAEEIARLRSGASRLAEAKKSSRGAPAQLIEAMNTLESSIDGNLDRAVKENDRVYLMRVPSPSSLSPLPAFSMVKPMNMTDILDASKEKMFSILVPDSSAKALSRYTEMVDDVIRTQAERLQQASELTRVRLKEMDLPDSILAVDGNSALPVDLKEDVEAVQISGGPAGLEAELQQLRDLKRVNQELLVHTEELLQKEATEDSQFRSQFGTRWTRPQSSTLTKNLQDRLNRFAANLKQAGESDVKIERSVRDNSALMSILDRRPIESAVPTLARPIMSLDATEDAIVGTLKQSLRQLENLGAQRAGLEDMLKEMKRKDDILPKLMTITGSYEDMFRKEISKYDHICEDISQNIEVQEQLLMQIQAQNEEFSTIFNLEDYKASKEKCYKQIQAAIMKYREIKENINEGLKFYVTLQDAITNVQQQCSDFVMTRSIQCRDMIEDVQRQMSGLSFQDHRSSGPYPSVHQPTASSPPPPPETQNPSHPHPHAPYYRPPEQMSRPGYSIPPYGPPPPYHTPHGQAPQPYPPQAQQQPHPSWQQGSYYDPQGQQPRPPYPGQSPYQPPHQGGGYYRQ

SEQ ID NO: 277 - protein, 377 aa, Pereskia aculeata
  misc_feature (7)..(7): Xaa can be any naturally occurring amino acid
  misc_feature (118)..(118): Xaa can be any naturally occurring amino acid
  misc_feature (120)..(124): Xaa can be any naturally occurring amino acid
  misc_feature (151)..(151): Xaa can be any naturally occurring amino acid
  misc_feature (174)..(174): Xaa can be any naturally occurring amino acid
  misc_feature (204)..(204): Xaa can be any naturally occurring amino acid
TDVPAAXAGAFKSYKLAAKAISRLQSLPSHNLPLLCDVFVKEVSELTGYDRVMVYKFHEDEHGEVISEYRRPDLEPYLGLHYPATDIPQASRFLFLKNRVRMICDCSATPVEVIQDKXLXXXXXSWGSILRAPHGSHAHYMANMGSIAFSXMAVTINEDEDEVKSDPSTGKRLXGLVVCHHTSSRLIPFPLRYACELLVQVFGXQINKEVELAAQIRESHILRIQTVLCDMLLRDSPVAIVTQSPNVMDLVKCDGAALYYKGQVWLLGISPTEDQIKNITQWLLEYHGSTKGLSTDSLMEAGYPGASELGDAVCGMAAVRIRSKDVLFWFRSHTAKEIKWGGAKHDPVDNDDGRKMHPRSSFKAFLEVVKWRSQPWE

SEQ ID NO: 278 - protein, 504 aa, Triticum aestivum
  misc_feature (444)..(444): Xaa can be any naturally occurring amino acid
LTSRSACVRVHGVQFRPSSSFDTKTTTTNAGQPVWNDNEALTVGPRGPILLEDYHLLEKIAHFARERIPERVVHARGASAKGFFECTHDVTGLTCADFLRAPGARTPVIVRFSTVIHERGSPETIRDPRGFAVKFYTREGNWDLLGNNFPVFFIRDGIKFPDVIHAFKPNPKSHVQEYWRVFDFLSHHPESLHTFFFLFDDVGIPTDYRHMDGFGVNTYTFVSRAGKSHYVKFHWRPTCGVSCLMDDEATLVGGKNHSHATQDLYDSIDAGNFPEWKLFVQVIDPDDEDRFDFDPLDDTKTWPEDLVPLQPVGRLVLDRNVDNFFNENEQLAFGPGLVVPGIYYSDDKMLQCRVFAYADTQRYRLGPNYLMLPVNAPKCGFKNNHYDGAMNFMHRDEEVDYYPSRHAPLRHAEPASFPVPTRPVVGKREKTRIKKENDFVQPGXERYRSWAPDRQDRFVRRFADALAHPKVSHELRVIWIDFLSKCDKSCGMKVANRLNVKPSM

SEQ ID NO: 279 - protein, 518 aa, Candidatus Blochmannia vafer
MAAKDVKFGNDARVKMLRGVNVLADAVKVTLGPKGRNVVLDKSFGAPVITKDGVSVAREIELEDKFENMGAQMVKEVASKANDSAGDGTTTATVLAQSIVNEGLKAVAAGMNPMDLKRGIDKAVVAAVEELKKLSVPCSDPKAIAQVGTISANSDETVGKLIAQAMDKVGKEGVITVEEGSGLQDELDVVEGMQFDRGYLSPYFVNKPESGTVELEHPFILLADKKISNIREMLPMLESVAKAGKPLLIIAEDVEGEALATLVVNNMRGIVKVTAVKAPGFGDRRKAMLQDIAILTAGTVISEEIGLELEKATLGDMGQAKRVVITKDATTIIDGIGNKSAIDSRVAQINQQRDEATSDYDREKLQERVAKLAGGVAVIKVGAATEVEMKEKKARVEDALHATRAAVEEGVVAGGGVALIRVANAIRNLCGDNEDQNVGIKVARRAMEAPLRQIMANAGEEPSVIANNVRSGEGNTGYNAATEKYGNMIELGILDPTKVTRSALQYAASIGGLMITTE

SEQ ID NO: 280 - protein, 518 aa, Candidatus Blochmannia laevigatus
  misc_feature (510)..(510): Xaa can be any naturally occurring amino acid
  misc_feature (516)..(518): Xaa can be any naturally occurring amino acid
MAAKDVKFGNDARVKMLRGVNVLADAVKVTLGPKGRNVVLDKSFGAPVITKDGVSVAREIELEDKFENMGAQMVKEVASKANDSAGDGTTTATVLAQSIVNEGLKAVAAGMNPMDLKRGIDKAVVAAVEELKKLSVPCSDPKAIAQVGTISANSDETVGKLIAQAMDKVGKEGVITVEEGSGLQDELDVVEGMQFDRGYLSPYFVNKPESGTVELEHPFILLADKKISNIREMLPILESVAKAGKPLLIIAEDVEGEALATLVVNNMRGIVKVTAVKAPGFGDRRKAMLQDIAVLTAGTVISEEIGLELEKATLEDMGQAKRVVITKDATTIIDGVGNKSAINSRVAQINQQRDEATSDYDREKLQERVAKLAGGVAVIKVGAATEVEMKEKKARVEDALHATRAAVEEGVVAGGGVALIRVANAIRNLCGDNEDQNVGIKVARRAMEAPLRQIMANAGEEPSVIANNVRSGEGNTGYNAATEKYGNMIELGILDPTKVTRSALQYAASXAGLMIXXX

SEQ ID NO: 281 - protein, 377 aa, Calymmanthium substerile
TDVPAAAAGAFKSYKLAAKAISRLQSLPSHNMALLCDVLVKEVSELTGYDRVMVYKFHEDEHGEVISEYRRPDMEPYLGLHYPATDIPQASRFLLLKNRVRMVCDCLATPVKVIQGKKWAQPLSLGGSILRAPHGCHALYMANMGSIASLVMAVTINEDEDEVKSDPSTGKRLWGLVVCHHTSSRFIPFPLRYACELLVQVFGIQINKEVELAAQIRESHILRIQTVLCDMLLRDSPVAIVTQSPNVMDLVKCDGAALYYKGQVWLLGITPTEEQIKNITQWLLKYHGSTKGLSTDSLMEAGYPGASELGDAVCGMAAVRISSKDVLFWFRSHTAKEMKWGGAKHDPVDSDDGRKMRPRSSFKAFLEVVKWRSQPWE

SEQ ID NO: 282 - protein, 377 aa, Talinum paniculatum
TDVPAAAAGAFKSYKLAAKAISRLQSLPSRNMLILCDVLVKEVSELTGYDRVMVYKFHEDEHGEVISEYRKPDLEPYLGLHYPATDIPQASRFLFLKNRVRMICDCLASTVKVIQDQKLTQPLSLGGSILRAPHGCHAQYMANMGSIASLVMAVMINEDEDEVKSDPSSGKRLWGLVVCHHTGSRFIPFPLRYACELLVQVFGIQINKEVELAAQIRESHILRIQTVLCDMLMRDSPIAIVTQSPNVMDLVKCDGAALYYKGQVWLLGITPTEEQIKDITQWLLEYHGSTKGLSTDSLMEAGYPGASELGDAVCGMAAVRISSKDFLFWFRSHTAKEIKWGGAKHDPIDNDDRRKMHPRSSFKAFLEVVKWRSQPWE

SEQ ID NO: 283 - protein, 336 aa, Pseudomonas fluorescens Pf-5
MSRVTLSRYLIEQTRSNNTPADLRFLIEVVARACKEISHAVSKGALGGVLGSMGTENVQGEVQKKLDVISNEILLEANEWGGHLAGMASEEMDNAYQIPGKYPKGAYLLVFDPLDGSSNIDINAPVGTIFSVLRCPNEYLSQNEALNEKAFLQPGTQQVAAGYAIYGPQTMLVLTLGDGVKGFTLDREMGSFVLTHEDIKIPESTQEFAINMSNERHWEAPVKRYVEELLAGDTGPLKKNYNMRWVAAMVADVHRILTRGGLFMYPRDSREPEKPGKLRLMYEANPMSFLVEQAGGASTDGHKRILDIQPEGLHQRVAVFLGSKEEVARVTGYHKE

SEQ ID NO: 284 - protein, 249 aa, Dendrocalamus latiflorus
MGRGNVELKRIENKINRQVTFSKRRNGLLKKAYELSVLCDAEVALIIFSSRGKLYEFGSAGISKTLERYQHCCYNAQDNNALSETQIWYQEMPKLRAKFEALQRTQRHLLGEDLGPLSVKELQQLEKQLECALSQARQRKTQLMMEQVEELRKKERQLGEINRQLKHKLEAEGSSNYRAMHQASWAPGTVVDEGAAYHVQQPPHSAALDCEPPTLQIGYPHQFMPPEAANIPGSAPAGGENNFMLGWVL

SEQ ID NO: 285 - protein, 602 aa, Oryza sativa
MCGILAVLGAADWSQAKRAHVLSCSRRLKHRGPDWSGLYQCEGNFLAQQRLAIVSPLSGDQPLYNADRTIVVVANGEIYNHKKIRKQFASKHTFSTGSDCEVIIPLYEEYGEDFVDMLDGVFAFVLYDTRTKTYMAARDAIGVNPLYIGRGSDGAVWISSEMKALNEDCVEFEIFPPGHLYSSAAGGLRRWYKPQWFAENVPATPYQPLLLREAFEKAVIKRLMTDVPFGVLLSGGLDSSLVAAVTKRHLIKTEAAEKFGAELHSFVVGLEGSPDLIAAREVADHLGTIHHEFHFTVQDGIDAIEEVIYHDETYDVTTIRASTPMFLMARKIKALGVKMVLSGEGSDELLGGYLYFHFAPNKEEFHKETCRKVKALHQYDCLRANKATSAWGLEVRVPFLDKEFINVAMSMDPEWKMYNADLGRIEKWVMRKAFDDEEHPYLPKHILYRQKEQFSDGVGYNWIDGLKAFTEQQVSDEMMKNAAKVYPHNTPVNKEAYYYRMIFERLFPQESARETVPWGPSIACSTPAAIEWVEQWKASHDPSGRLIASHNSASANHTNHANANANGNSNGKANGNCAMAANGTNGVGLVVANGTANGKMEA

SEQ ID NO: 286 - protein, 512 aa, Corynebacterium diphtheriae NCTC 13129
MTSPVDPILNKGERTEAAPHTTRAGGQPVASENISITAGPQGANVLNDLHLIEKLAHFNRERVPERNPHAKGHGAFGELHITEDVSQYTKAKLFQKGTVTPMAVRFSTVAGEKGSPDTWRDVHGFALRFYTQDGNYDIVGNNTPTFFLRDAMKFPDFIHSQKRLGSSGLRDADMQWDFWTRTPESAHQVTYLMGDRGTPKTSRHQDGFGSHTYQWINEDGQPVWVKYHFKTRQGWETFTDAEAQEMAGKNADYQREDLYNAIERGDFPIWDVKVQIMPFDEAETYRWNPFDLTKTWSQKDYPLIDVGYFVLNRNPQNFFAQIEQLALDPANLVPGVGLSPDRMLMARAFAYADAQRYRIGPNYQQLPINQPVVPVNTYQHEGPMAYHFNPADAPVHTPNRFGKGAGYLDDGQTSSSGATYGQAQDLYVNPDPHGTDLTRAAYVKHADDDDFMQAGILYREVYDDAAKERFVDNVTNAMAGVSPETEERVYWYWTQVDENLGAKIREAFAAKK

SEQ ID NO: 287 - protein, 945 aa, Pseudomonas fluorescens Pf-5
MRLKSYLHQINPLFSSPEAARRLLRVVALIFLVGLFGAVYNFLRSSLHNELSQRQSYMSSAIAEAQAFFTSRSALLESLSLAAVYDPGEHISPPGASGASQEETYLQLGGPQGNQWGIWLTLRMRNYLQNKQLNLLYIPGTRDLQVQRLFSTRPQTSDLPGGLLDKLIALKPEQIPVGEELWLMDNSAAGAHLYIFTRLDERFAHSGWLGLEMDGKSVSAALSDQSAGDFMMFNSQGGLIFSSAPSARLSADVRHVQGGSFFGFLGGRWWPDHLVIRKQLGATDWQLVYSFDLQNLLKSLWPQLLAALLISLTGMALIGLLTHWVEVRLIAPALHRIQALVESEAFSRDVIQIAPVALCVLRRSDGRVVLENTLSQQWLGNGSERDQLCSGWIEQAFDPARPNSSDYFETADGRHLYLSSAPTRYNGEDVLFCAFSDISARKQIEAALEEAKRLADTANEAKTLFLATMSHEIRTPLYGVLGTLELLSRTQLDNQQKDYLQAIEGSSGTLLQLICDVLDVSKIEAGQLALELSEFSSLDLVHEIIQGYAAAAQAKGLQFYACVDPQLPEILLGDVTRIRQILSNLLNNAVKFTDTGRIVLRVRTESRDGERSNILWQVSDTGRGIAQDDQTLIFEPFYQTEGNTNVIAGTGLGLPICQRLTQLMNGNIRMVSELGLGSSFTLTLPLEASAVQGDTPLISPLLPEMVYVVSPVRELAESVAGWLRRWGARAQFSLPSPSDRARGNVLIELHPGSVEQRLEPDWQGPLVLASGDGHNEPRIDGGSWQINTNNLRAIHQAVSQAQGVWVAQSEDHSDHRELKKLSLHVLVAEDNVINQLILKDQLEELGCSVELASNGEEALCIWKAGRFNVVLTDVNMPKLNGYELAQELRRQGCSIPIIGATANAMRGEEELCLAAGMNHCLVKPFALRALFNYLAPYERAPHEVL

SEQ ID NO: 288 - protein, 246 aa, Dendrocalamus latiflorus
MGRGKVELKRIENKINRQVTFAKRRNGLLKKAYELSVLCDAEVALIIFSNRGKLYEFCSGQSMTKTLERYQKCSYSGPDTAIQNKENELVQSSRNEYLKLKARVDNLQRTQRNLLGEDLGSRGIKELDQLEKQLDSSLRHIRSTRTQHMVDQLTDLQRREQMLCEANKCLRRKLEESQVHGQVWEHGANLLAGYDQRQSPQQAPPHAGNGFFHPLDAAAEPTLQIGFTPEQINNSCVTGFMPTWLP

SEQ ID NO: 289 - protein, 246 aa, Dendrocalamus latiflorus
MGRGKVELKRIENKINRQVTFAKRRNGLLKKAYELSVLCDAEVTLIIFSNRGKLYEFCSGQSMTKTLERYQKCSYSGPDTAIQNKENELVQSSRNEYLKLKARVDNLQRTQRNLLGEDLGSLGIKELDQLEKQLDSSLRHIRSTRTQHMVDQLTDLQRREQMLCEANKCLRRKLEESQVHGQVWEHGANLLAGYDQRQSPQQAPPHAGNGFFHPLDAAAEPTLQIGFTPEQINNSCVTGFMPTWLP

SEQ ID NO: 290 - protein, 246 aa, Dendrocalamus latiflorus
MGRGKVELKRIENKINRQVTFAKRRNGLLKKAYELSVLCDAEVALIIFSNRGKLYEFCSGQSMTKTLERYQKCSYSGPDTAIQNKENELVQSSRNEYLKLKARVDNLQRTQRNLLGEDLGSLGIKELDQLEKQLDSSLRHIRSTRTQHMVDQLTDLQRREQMLCEANKCLRRKLEESQVHGQVWEHGANLLAGYDQRQSPQQAPPHAGNGFFHPLDAAAEPTLQIGFTPEQINNSCVTGFMPTWLP

SEQ ID NO: 291 - protein, 246 aa, Dendrocalamus latiflorus
MGRGKVELKRIENKINRQVTFAKRRNGLLKKAYELSVLCDAEVALIIFSNRGKLYEFCSGQSMTKTLERYQKCSYSGPDTAIQNKENELVQSSRNEYLKLKARVDNLQRTQRNLLGEDLGSLGIKELDQLEKALDSSLRHIRSTRTQHMVDQLTDLQRREQMLCEANKCLRRKLEESQVHGQVWEHGANLLAGYDQRQSPQQAPPHAGNGFFHPLDAAAEPTLQIGFTPEQINNSCVTGFMPTWLP

SEQ ID NO: 292 - protein, 155 aa, Cryptococcus neoformans var. neoformans JEC21
MSEHTNLKSLAPLGNQPEPSANSAGVGPSKPFTEAQVEEFREQDRWLPIANVARIMKSSLPTSAKVSKEAKECVQECVSEFISFITSEAAEKCLNEKRKTLNGEDILTSMRALGFDNYEGVLRVYLAKYRDVTRTGEATSWRHHFDQRPCRGDKV

SEQ ID NO: 293 - protein, 369 aa, Chorispora bungeana
MNAGGQFTDFPAVQTHGGQFISYDIFGSLFEITSKYRPPIIPIGRGAYGIVCSVLDSETNELVAMKKIANAFDNHMDAKRTLREIKLLRHLDHENIIAIRDVVPPPLRRQFSDVYIATELMDTDLHQIIRSNQSLSEEHCQYFLYQLLRGLKYIHSANVIHRDLKPSNLLLNANCDLKICDFGLARPTSENEFMTEYVVTRWYRAPELLLNSSEYTAAIDVWSVGCIFMELMNRKPLFPGKDHVHQMRLLTELLGTPTESDLGFTHNEDAKRYIRQLPSFPRQPLAKLFSHVNPLAIDLVDRMLTFDPNRRITVEEALNHQYLAKLHDPNDEPICQKPFSFEFEQQPMDVEQIKEMIYKEAIALNPTYG

SEQ ID NO: 294 - protein, 584 aa, Arabidopsis thaliana
MCGILAVLGCSDDSQAKRVRVLELSRRLRHRGPDWSGLYQNGDNYLAHQRLAVIDPASGDQPLFNEDKTIVVTVNGEIYNHEELRKRLKNHKFRTGSDCEVIAHLYEEYGVDFVDMLDGIFSFVLLDTRDNSFMVARDAIGVTSLYIGWGLDGSVWISSEMKGLNDDCEHFETFPPGHFYSSKLGGFKQWYNPPWFNESVPSTPYEPLAIRRAFENAVIKRLMTDVPFGVLLSGGLDSSLVASITARHLAGTKAAKQWGPQLHSFCVGLEGSPDLKAGKEVAEYLGTVHHEFHFSVQDGIDAIEDVIYHVETYDVTTIRASTPMFLMSRKIKSLGVKMVLSGEGADEIFGGYLYFHKAPNKKEFHQETCRKIKALHKYDCLRANKSTSAFGLEARVPFLDKDFINTAMSLDPESKMIKPEEGRIEKWVLRRAFDDEERPYLPKHILYRQKEQFSDGVGYSWIDGLKDHAAQNVNDKMMSNAGHIFPHNTPNTKEAYYYRMIFERFFPQNSARLTVPGGATVACSTAKAVEWDASWSNNMDPSGRAAIGVHLSAYDGKNVALTIPPLKAIDNMPMMMGQGVVIQS

SEQ ID NO: 295 - protein, 624 aa, Oryza sativa
  misc_feature (398)..(398): Xaa can be any naturally occurring amino acid
  misc_feature (430)..(430): Xaa can be any naturally occurring amino acid
MDSCALFLSTPRPPPPLVPAHRRRPLASRSGLRRREGCPCSCASSSSSSGRAGSQDRPPRPWQQKQRTQRPGRGEAIDPVGFLAKHGISDRAFAQFLRDRYKALKDRRWELHSRLIDLKEASSGFELMGMHRHRQHRVDFMEWAPGHHVGVALITMPIRAGARYCSVVGDFNQWSTTENCAREGHLGHDDFGYWTIILEDKLREGQEPDEYYFQEYNYADDYDKGDNGVDVEELIHRMNEEYWEPGEIKSQKSRLEVVAKLYEQMFGPNGPQTEEELGDIPDAETRYNEWKALQKDDSASSLPCYDIIDNGQEFDIFNVATDRVSFEKFQGKSPPLAYWVEMRKGRKAWLEKYVPAISHKDKYRVYFNTPDGGLERIPAWATYVLPGLLMIIIIGNYXDAEGKQSYAVHWDPPPEEIYKWRFERPKVKGXPHIKDAGYNAIQLIGIVEHKDYSSVGYKIHLYLGGILLNHPFPCCHVIVYPFLVPFSLQCEVTNYFSVSSRFGSPDDFKKLVDEAHGLGLVVLLDIVHSYASADELVGLSLFDGSNDCYFHSVFFLSPVVFPLLSSLPYSRQTTLGVARAKEATAMAKGAVTTSSRIWGGRGLGRWRSQRPGPPERGVVSSSGC

SEQ ID NO: 296 - protein, 793 aa, Solanum tuberosum
MELLHCPSISTYKPKLSFHNHLFSRRSSNGVDFESIWRKSRSSVVNAAVDSGRGGVVKTAATAVVVEKPTTERCRFEVLSGKPLPFGATATDGGVNFAVFSRNATAATLCLITLSDLPEKRVTEQIFLDPLANKTGDVWHVFLKGDFENMLYGYKFDGKFCPEEGHYFDSSQIVLDPYAKAIVSRGEYGVLGPEDDCWPPMAGMVPSASDQFDWEGDLPLKFPQRDLVIYEMHVRGFTNHESSETKYPGTYLGVVEKLDHLKELGVNCIELMPCHEFNELEYYSYNSVLGDYKFNFWGYSTVNFFSPMGRYSSAGLSNCGLGAINEFKYLVKEAHKRGIEVIMDVVFNHTAEGNENGPILSFRGIDNSVFYTLAPKGEFYNYSGCGNTFNCNNPIVRQFIVDCLRYWVTEMHVDGFRFDLASILTRSSSSWNAVNVYGNSIDGDVITTGTPLTSPPLIDMISNDPILRGVKLIAEAWDCGGLYQVGMFPHWGIWSEWNGKYRDMVRQFIKGTDGFSGAFAECLCGSPNLYQKGGRKPWNSINFVCAHDGFTLADLVTYNNKHNLANGEDNKDGENHNNSWNCGEEGEFASIFVKKLRKRQMRNFFLCLMVSQGVPMIYMGDEYGHTKGGNNNTYCHDNYINYFRWDKKDESSSDFLRFCGLMTKFRHECESLGLDGFPTAERLQWHGHTPRTPDWSETSRFVAFTLVDKVKGELYIAFNASHLPVTITLPDRPGYRWQPFVDTGKPAPFDFLTDDVPERETAAKQYSHFLDANQYPMLSYSSIILLLSSADDA

SEQ ID NO: 297 - protein, 152 aa, Zea mays
MSLVRRSNVFDPFSMDLWDPFDTMFRSIVPSAVSTNSETAAFASARIDWKETPEAHVFKADLPGVKKEEVKVEVEDGNVLVISGQRSREKEDKDDKWHRVERSSGQFVRRFRLPENAKVDQVKAGLENGVLTVTVPKAEEKKPEVKAIEISG

SEQ ID NO: 298 - protein, 377 aa, Portulaca oleracea
TDVPAVAAGAFKSYKLAAKAISRLQSLPSRNMSLLCDVLVKEVTELTAYDRVMVYKFHEDEHGEVISEYRKPGLDPYLGLHYPATDIPQASRFLFLKNRVRMICNCLATPVKVIQDKKLAQPLSLGGSILRVPHGCHAQYMANMGSIASLVMAVTINEDDDEVKSDPSTGKRLWGLVVCHHTSPKFISFPLRYACELLVQVFGIQINKEVELVAQIRESHILRIQTVLCDMLMRDSPVAIVTQSPNVMDLVKCDGAALYYNGQVWLLGITPTEEQIKNLTLWLLKYHGSTKGLSTDSLMEAGYPCASDLGDAVCGMAAVRISSKDFLFWFRSHTAKEVKWGGAKHDPTDNDNGRKMHPRSSFKAFLDVVKWRSQPWE

SEQ ID NO: 299 - protein, 377 aa, Quiabentia verticillata
TDVPAAAAGAFKSYKFAAKAISGLQSLPSRNMSLLCDVLVKEVSELTGYDRVMVYKFHEDEHGEVISEYRTPDLEPYLGLHYPATDIPQASRFLFLKNRVRMICDCLAAPVKVIQDKKLAQPLSLGGSILRAPHGCHAQYMANMGTIASLVMAVTINEDEDEVKSDPSTGTRLWGLVVCHHTSSRFIPFPLRYACELLVQVFGIQINKEVELAAQIRESHILRIQTVLCDMLLRDSPVAIVTQSPNVMDLVKCDGAALYYKGQVWLLGITPTDEQIKNITQWLLEYHGSTKGLSTDSLMEAGYPGASELGDAVCGMAAVRISSKDVLFWFRSHSAREIKWGGAKHDPVDSDDRSKMHPRSSFKAFLEVVKWRSQPWE

SEQ ID NO: 300 - protein, 146 aa, Triticum aestivum
  misc_feature (4)..(4): Xaa can be any naturally occurring amino acid
  misc_feature (15)..(15): Xaa can be any naturally occurring amino acid
  misc_feature (24)..(24): Xaa can be any naturally occurring amino acid
  misc_feature (67)..(67): Xaa can be any naturally occurring amino acid
  misc_feature (78)..(78): Xaa can be any naturally occurring amino acid
  misc_feature (91)..(91): Xaa can be any naturally occurring amino acid
  misc_feature (96)..(96): Xaa can be any naturally occurring amino acid
  misc_feature (106)..(106): Xaa can be any naturally occurring amino acid
  misc_feature (108)..(108): Xaa can be any naturally occurring amino acid
  misc_feature (110)..(110): Xaa can be any naturally occurring amino acid
  misc_feature (119)..(119): Xaa can be any naturally occurring amino acid
  misc_feature (122)..(123): Xaa can be any naturally occurring amino acid
  misc_feature (125)..(125): Xaa can be any naturally occurring amino acid
  misc_feature (127)..(128): Xaa can be any naturally occurring amino acid
  misc_feature (130)..(130): Xaa can be any naturally occurring amino acid
  misc_feature (132)..(132): Xaa can be any naturally occurring amino acid
GPQXLPSGKFIPGNXNSYDKCRRXFDLGDADYLRYHGMQEFDQAMQHLEQKYEFMTSDHQYISRKHXEDKVIVFEKGXLVFVFNFHCNNSXFDYRXGCRKPGVYKXVXDXDAGLLGGLXRFXXAXEXXTXDXSHDNRQNQSPFIPM

SEQ ID NO: 301 - protein, 250 aa, Photorhabdus luminescens
MELISIPVLSDNYIWLLCDENRHVVIVDPTESQPVLDTLKSHGWIPDAILLTHHHHDHVGGVPGIIDRFPELPVYGPKETESKGATMIVCGGDSIHFGHFSFQIIDVPGHTLGHIAFYQAPYLFCGDTLFSGGCGRLFEGTAEQMYASLSKIAELPDDTLICCAHEYTVSNMKFAHAVLPNQTISEYQQKVTQMRESNQPTVPTTLQTEKKINIFLKCDDVDLQRNIGIVPNSQPLSAVFCQLRRRKDQF

SEQ ID NO: 302 - protein, 84 aa, Zea mays
IRLPPRAIEAAKRAGKAADVFYCLKLLEATGISTVPGSGFGQKEGVFHLRTTILPAEEDFPAIMSSFKKFNDSFMEQYEGYSRM

SEQ ID NO: 303 - protein, 244 aa, Glycine max
  misc_feature (85)..(85): Xaa can be any naturally occurring amino acid
MVSAAIARNVVGVIGNIISFGLFFSPAPTFYGIVKKKTVEEFKPDPYIATVLNCAFWVFYGMPFVHPNSILVVTINSVGLAFESXYLVFFFLFVESLKKLLIFLLIEVVFFAAVALITMLALHGTRQRSLVVGVLSDIFNVMMYVSPLTIMAKVIKTKSVKYMPFWLSLANFLNGACWTTYALIHPFDLYVLISNGIGAISGLIQLILYACYCSCKSKNDEDGDQDLKPSGFQLSNLNGRAAVV

SEQ ID NO: 304 - protein, 246 aa, Dendrocalamus latiflorus
MGRGEVELKRIENKINRQVTFAKRRNGLLKKAYELSVLCDAEVALIIFSNRGKLYEFCSGQSMTKTLERYQKCSYSGPDTAIQNKENELVQSSRNEYLKLKARVDNLQRTQRNLLGEDLGSLGIKELDQLEKQLDSSLRHIRSTRTQHMVDQLTDLQRREQMLCEANKCLRRKLEESQVHGQVWEHGANLLAGYDQRQSPQQAPPHAGNGFFHPLDAAAEPTLQIGFTPEQINNSCVTGFMPTWLP

SEQ ID NO: 305 - protein, 280 aa, Campylobacter jejuni RM1221
MQEVISYIQKAVLEISNALKFPDTSYSQNQNFTGDTQLKFDVLSDEIITKTLSQCSSIKAIISEEKDEILTLNERANFIVAYDPLDGSSLMDVNFAIGSIFAIYEEKANAKNLRAALYSMYGARLELVICKDQPKLYRLNANNEFIFIKDLKMNEKGKINATGGTQKFWEEKHAKFIKNLFDEGYRLRYSGAMVSDINQILLKGGGIFSYPATQDAPNGKLRAFFEVFPLAFIIEKAGGKTTNGKNRSLLELEFDKIHATTPCFFGSEYEISKLLKAYNE

SEQ ID NO: 306 - protein, 547 aa, Escherichia coli
AAKDVKFGNDARVKMLRGVNVLADAVKVTLGPKGRNVVLDKSFGAPTITKDGVSVAREIELEDKFENMGAQMVKEVASKANDAAGDGTTTATVLAQAIITEGLKAVAAGMNPMDLKRGIDKAVTAAVEELKALSVPCSDSKAIAQVGTISANSDETVGKLIAEAMDKVGKEGVITVEDGTGLQDELDVVEGMQFDRGYLSPYFINKPETGAVELESPFILLADKKISNIREMLPVLEAVAKAGKPLLIIAEDVEGEALATLVVNTMRGIVKVAAVKAPGFGDRRKAMLQDIATLTGGTVISEEIGMELEKATLEDLGQAKRVVINKDTTTIIDGVGEEAAIQGRVAQIRQQIEEATSDYDREKLQERVAKLAGGVAVIKVGAATEVEMKEKKARVEDALHATRAAVEEGVVAGGGVALIRVASKLADLRGQNEDQNVGIKVALRAMEAPLRQIVLNCGEEPSVVANTVKGGDGNYGYNAATEEYGNMIDMGILDPTKVTRSALQYAASVAGLMITTECMVTDLPKNDAADLGAAGGMGGMGGMGGMM

SEQ ID NO: 307 - protein, 371 aa, Pisum sativum
MGAPIANAIPLITPYKMGNFNLSHRVVMAPLTRMRSYNNVPQPHAILYYAQRASQGGLLIAEATGVSDTAQGYPNTPGIWTKEQVEAWKPIVEAVHAKDSVFFLQIWHVGRVSNSIYQPNGQAPISSTDKAITSNDQQQFTAPRRLRTNEIPNIVNDFKLAARNAIEAGFDGVEIHGAHGYLLDQFMKDKVNDRTDEYGGSLENRCRFTFEVVEAVANEIGADKVGIRLSPFAEYAESGDSNPNALGLYMANALNKYNILYCHMVEPRLIQTFDPVETPHSLEPMRKAFNGTFMVAGGYNRQDGIKAIAENRADLVVYGRWFISNPDLPKRFALDAPLNKYNRETFYSSDPVIGYTDYPFLNDETPVESKA

SEQ ID NO: 308 - protein, 815 aa, Haemophilus somnus 2336
MNKFVSQSTIDTFFDGEHADPFSVLGMHETSNGIEVRVLLPDAEKVFVLSKETKNVLCELLRVDERGFFAGVVPNTHSFFAYQLEVYWGNEAQVIEDPYAFHPMINELDNWLLAEGSHKRPYEILGAHFTECDNVAGVNFRLWAPNAKRVSVVGDFNYWDGRRHPMRFHQSSGIWELFLPKVSLGQLYKFELLDCHNQLRLKADPYAFSSQLRPDTASQIGALPEIVSMTEKRRKANQADQPISIYEVHLGSWRRNLENNFWLDYDQIAEELIPYVKDMGFTHIELLPLSEFPFDGSWGYQPIGLYSPTSRFGTAEGFKRLVNKAHKAGINVILDWVPGHFPSDTHGLVAFDGTALYEHADPKEGYHQDWNTLIYNYGRHEVKNYLASNALYWMERFGLDGIRVDAVASMIYRDYSREDGQWIPNQYGGRENLEAIEFLKQTNHLLGTEIPGVVSIAEESTSFAGVTHPPYEGGLGFHFKWNMGWMNDTLSYMKKDPIYRQHHHSQMTFGMVYQYSENFILPLSHDEVVHGKCSLLGKMPGDAWQKFANLRAYYGYMWGYPGKKLLFMGNEFAQGREWNYQESLDWYLLDEFHGGGWHKAIQDYVRDLNHIYQKNAPLFELDTDPQGFEWLVVDDYQNSVFVFERRSKKDERIIVVSNFTPVLRQNYRFGVNIAGEYLEILNSDAQQYMGSNSTNTSKIVTEDIESHNKAQSISIDIPPLATVYLKLHKVKKVRKMRKTSKVEDTAVKTEKKIAKGKTTRTKKTVADTVSEATEVKPKKTVTKRAVVKKVKNEESAVFPNAEVIAESTSVENNVS

SEQ ID NO: 309 - protein, 479 aa, Pseudomonas putida KT2440
MSKILTTASGAPVADNQNSRSAGPRGPLLLDDFHLIEKLAHFNRENIPERRVHAKGSGAYGTFTVTHDITGYTSAKLFEEVGKQTETFLRFSTVGGERGSADTERDPRGFAVKFYTEEGNWDIVGNNTPVFFIRDPLKFPDFIHTQKRHPQSNLKNAQMMWDFWSHSPEALHQVTILFSDRGIPDGYRHMHGFGSHTYSLINAKGERTWVKWHFKTQQGIKNLTPADAARLAGTDPDYAQRDLFEAIERGDYPRWTVCIQVMSEAEAASRDENPFDVTKTWSQKDYPLIEVGVLELNRNPLNYFAEVEQAAFGPSNMVPGVGLSPDRMLQGRVFAYADAHRYRVGTNHQQLPVNAPRCPVNSYQRDGSMATGSYGSAPNYEPNSYSDAPKQSPRHAEPALAMNGSADRYDHREDTDYFSHAGALFRLMNDEQKALLISNIAGTMAGVSEDVIQRQLQYFFKADPAYGEGIAKALGINLA

SEQ ID NO: 310 - protein, 512 aa, Glycine max
MGNSFGCSASGERLVSAARDGDLVEAQMLLNCNPCLAKYSTFGGLNSPLHFAAAKGHNEIVALLLENGADVNSRNYCGQTALMQACRYGHWEVVQTLLLFRCNVMRADYLSGRTALHFAAVHGHVRCIRLVVADFVPSALYQAIHAGTDVDRGGGSNAKGKHEQSALSKFINKTADGGITALHMAALNGYFDCVQLLLDLNANVNAVTYHYGTSMDLIGAGSTPLHYGACGGNLKCCQILVARGASRLALNCNGWLPLDIARMWGRHWLEQLLAPSSDASIPTFSHSNYLSLPLMSVLNIAREYGLQSSPTSSDEIDFCAVCLERPCSVAAEGCGHELCVRCALYLCSTNNVSSEMLGPPGSIPCPLCRHGVVSFVKLPGSQAKENKLHVSLGLCTPCILHPRDLDQPSLSHTPEIGRNRVASVPSEIRCPVTCSPFPSMAIPLCTCNDGPCPSFEPGEVETQDGSPHHSQASTVDQDKIEGPRLDKTTCSSMFWGRRSCSREHQCNSEINA

SEQ ID NO: 311 - protein, 875 aa, Chlamydomonas reinhardtii
MLLQAPGLAPGSARRQAACSVAREATNVRIVTAPALTPGRAGVSGRRILPPSRVVSVELEAPTLSSSPATVSTKKLFCEPSGQPASTAYGPALTGRPAPLGASIDADTGAINFSVFSSSAESVSLVLFTEADLNAGRATFEIPLDPYVNRTGDVWHIMLPDLRDDLLYGYRVEGVHQEEDKDYPGMRHDKRRVVLDPYAVAVLNRRRWGQMGPNLPYGEEGVLGVMPTWPQAAAALPAARGSAFDWEGDTPLNLPMESLVIYEAHVRGFTAHASSGVAAPGTYAGMVERLDYLKSLGVNAIELLPVFEFNELEYYSQIPGSDQYRFNFWGYSTVNYFSPMGRFSAAVGQGAPARASCDEFKQLVKECHRRGIEVILDVVFNHTAEGNERGPTISFRGLDNRVYYMLAPGGEYYNYSGCGNTLNCNQPVVRQFILDCLKHWVTEYHVDGFRFDLASILTRAHSAWHPQQYDQETGQRVAMSSGGAIVTAEGIMTDGAGVPTGYPLADPPLVESISEDPVLRNTKMIAEAWDCDGLNQVGAFPHYGGRWSEWNGKFRDVVRNFIKGTDGPWAGDFASAICGSPNIYANNTPHETDWWANNGGRQWKGGRGPHASINFVAAHDGFTLADMVAYNNKHNEANGENNRDGEQHNNSWNCGEEGPTTKWEVNRLRQRQMRNLTGALLLSCGVPMINMGDEYGHSKNGNNNTYCHDSELNYLRWDQLAEDPHGFNRFVRLLIHFRRATPALQRTTFVNDKDIQWHGELPNTPDWTDTSRLVAFTLHDGKGGGLYVAFNTSHLPKLLQLPKWGGRVWQPLVDTSKVAPYDFLAVDGVLSAEDVAAARRQMAMWTADHTYPVLPWSCIVLQSAPEDPAATSMIK

SEQ ID NO: 312 - protein, 474 aa, Oryza sativa
MVLTHVEAVEEGSEAAAAVFASRYVQDPVPRYELGERSISKDAAYQIVHDELLLDSSPRLNLASFVTTWMEPECDRLILEAINKNYADMDEYPVTTELQASNQTNQTIYPRLLHILSLHCVVVDNRCVNIIARLFNAPVGDGEKAVGVGTVGSSEAIMLAGLAFKRRWQNRRKAAGKPHDKPNIVTGANVQVCWEKFARYFEVELKEVKLTEGCYVMDPVKAVDMVDENTICVAAILGSTLTGEFEDVRRLNDLLAAKNKRTGWDTPIHVDAASGGFIAPFIYPELEWDFRLPLVKSINVSGHKYGLVYAGVGWGYKSVMKNCMESARTLREGLEKTGRFTIISKEEGVPLVAFTFKDGAGAQAFRLSSGLRRYGWIVPAYTMPAALEHMTVLRVVVREDFGRPLAERFLSHVRMALDEMDLAARAPVPRVQLTIELGPARTAGEEASIRVVKSEAVPVRKSVPLVAGKTKGVC

SEQ ID NO: 313 - protein, 87 aa, Ipomoea batatas
VKAQVSEVKGVMMENIEKVLDRGEKIEILVDKTENLRSQAQDFRTQGTKMRRKMWLKNMKVKLIVLAIIIALILIIVLSICGSSKCH

SEQ ID NO: 314 - protein, 357 aa, Dechloromonas aromatica RCB
MQFGRTTLSKFVIENTRASHGELGALLIDVAAAVKTISAMVAKGALAGHHGALDSTNVQGEVQKKLDVLTNDAILRHCEWGGQLAGMASEEMDDPYPIPAEYPRGRYLLVFDPLDGSSNSDVNVSVGTIFSIFSRRAAGDAELGDYLRPGSEQVAAGYAIYGPSTMMVLTLGNGTHGFTLDRESGNFILTHANIRVPEDTREFAINTSNERFWEPPVQRYVSECKAGKSGVRGEDFNTRWIASMVAEVHRILIRGGIFMYPKDSKDPSKPGRLRLLYEANPMAMLIEQAGGAASTGRQRILDVVPDSLHQRAPVILGSKNEVERLARYHHEYDTGADRPFVSPLFSERSLFRDESRA

SEQ ID NO: 315 - protein, 766 aa, Thermosynechococcus elongatus BP-1
MTVSPEQIDRIVSNQHHDPFEILGCHQIQQNGQSVWAVRAYLPNAERVSVLCPEQRQEYPMTPVHHPHFFECHIPVAELNNYQLKIYENGHERVIYDPYAFRSPKLTDFDIHLFAEGNHHRIYEKLGAHLLTVDGVEGVYFAVWAPNARNVSVIGDFNHWDGRKHQMARRGNGIWELFIPGLSVGERYKYEIKNQEGHIYEKSDPYGFYQEPRPKTASIVTDLNSYEWGDSDWLEKRRHTDPLNQPISVYEVHLGSWLHASMEDPPIGADGQPQEPVQAAELKPWARFLTYRELAAKLIPYVKELGYTHIELLPVAEHPFDGSWGYQVTGYYAPTSRYGSPHDFMYFVDQCHQNGIGVIVDWVPGHFPKDGHGLAFFDGTHLYEHADPRKGEHKEWGTLVFNYGRHEVRNFLVANALFWFDKYHIDGIRVDAVASMLYLDYGRKEGEWIPNEYGGRENLEAANFLRQVNHVIFSYFPGILSIAEESTAWPMVSWPTYMGGLGFNLKWNMGWMHDMLDYFSMDPWFRQFHHNNVTFSMWYHHSENFMLALSHDEVVHGKSHIIGKMPGDRWQKFANLRCLFAYMFTHPGKKTMFMGMEFAQWSEWNVWSDLEWHLLQYEPHQQIKRFFGDLNHLYRSQPALYSQDFKQEGFEWIDCSDNRHSVVSFIRWDKDYQDFVVVVCNFTPQPHSHYRIGVPEHGFYRELFNSDAREYGGSNMGNLGGKWADEWPYHQRRYSLDLCLPPLAVLILKLDREKTVAERARYNLQS

SEQ ID NO: 316 - protein, 220 aa, Zea mays
MSPSSALAQASVRSLCARGSRARQSGGNVGSRVLYTPFTSSTPLHHPLLRPSSPARPAHFSSHRPHTRTIMSKAPGKVLNIGNINPHVKAAQYAVRGELAVKSEEYRAKLAKGEGSDLPFDTVIAANIGNPQQLDQKPITFFRQVASILENPGLLEHEDVLLNSLGYKSDVVDRARKLLKEVKSVGAYSQSQGAPGIRQSVAEYIERRDGYPAQFEDIYL

SEQ ID NO: 317 - protein, 106 aa, Triticum aestivum
  misc_feature (50)..(50): Xaa can be any naturally occurring amino acid
  misc_feature (80)..(80): Xaa can be any naturally occurring amino acid
MVSFEMNDLKKIGLGLTGFGVFFSFLGIVFFFDKGLIAMGNILFLSGLGXTIGLKSTMQFFTKPKNYKGAGFFLVLIGWXFFGMLLEAYGFIVLYQGGFFLCFSLD

SEQ ID NO: 318 - protein, 554 aa, Salmonella typhimurium LT2
MCSIFGVFDIKTDAAELRKKALELSRLMRHRGPDWSGIYACDNAILAHERLSIVDVNAGAQPLYNARKTHVLAVNGEIYNHQTLRAEYGDRYAFQTGSDCEVILALYQEKGPDFLDDLQGMFAFALYDSEKDAYLIGRDHIGIIPLYMGYDEFGNFYVASEMKALTPVCRTIKEFPAGSYLWSKDGEIRQYYQRDWFEFDAVKDNVTDKNALRQALEESVKSHLMSDVPYGVLLSGGLDSSVISAITKKFAARRVEDQERSEAWWPQLHSFAVGLEGSPDLKAAQEVANHLGTVHHEIHFTVQEGLDAIRDVIYHIETYDVTTIRASTPMYLMSRKIKAMGIKMVLSGEGSDEVFGGYLYFHKAPNAKELHEETVRKLQALHMYDCARANKAMSAWGVEARVPFLDKKFLDVAMRINPQDKMCGNGKMEKHVLRECFESYLPASVAWRQKEQFSDGVGYSWIDTLKEVAAKQISDQQLETARFRFPYNTPSSKEAYLYREIFEELFPVPSAAECVPGGPSVACSSAKAIEWDEAFKTMDDPSGRAVGVHQSAYQ

SEQ ID NO: 319 - protein, 371 aa, Arabidopsis thaliana
MASLLTKPKPVFLCSPSLSPRTLNTATPSLNFTRISFTHHQKLAPFKPPSLVVAFSEKGLKRDVTTAAAATEGDYRRIMLSDVLVKKKEKVVWWEREWKAMDFGAVAVVLSMHLLSLLAPFQFNWRAVSVAFGLYIVTGLLGITLSFHRNLSHKAFKLPKWLEYLFAYCGAQALQGNPIDWVSTHRYHHQFCDSDRDPHSPLDGFWFGHMNWMFDTNTITQRCGEPNNVGDLEKQPFYRFLRTTYILHPLALAVALYAMGGFPFIVWGMGVRIVWVYHITWLVNSACHVWGKQAWNTGDLSKNNWWVAALAFGEGWHNNHHAFEFSARHGLEWWQLDMTWYVVKFLQAIGLATDVKLPSEAQKQRMAFTSD

SEQ ID NO: 320 - protein, 716 aa, Pseudomonas syringae pv. phaseolicola 1448A
MASKNAPPVTATPKSELAGTDTLDRGNTNDKLESLEQFRSDATQQALRTNHGVKISDNQNTLKVGSRGPSLLEDFIMREKITHFDHERIPERIVHARGTAAHGYFQTYEDHGALSKAGFLRDPGKKTPVFVRFSTVQGPRGSGDTVRDVRGFAVKLYTEEGNFDLVGNNMPIFFIQDAIKFPDFVHAVKPEPHNEIPTGGSAHDTFWDFVSLVPESAHMVLWTMSDRAIPKSLRTMQGFGIHTFRFINTEGKSSFVKFHWKPKFGVCSLVWDEAQKLAGKDTDFHRRDLWESIEMGDYPEWELGVQIVAEEDEHKFDFDLLDPTKIIPEELVPVTPLGKMVLNRNPDNYFAETEQVAFCPGHIVPGIDFSNDPLLQGRLFSYTDTQISRLGGPNFHEIPINRPIAPNHNGQRDAQHRTTIDKGRASYEPNSIDGGWPKETPAGPVDGGFETYPERVEAHKVRERSESFGDHFSQATLFFQSMSHHEKEHIIAAYSFELGKVEREYIRARQVNEILANIDLELASRVAANLGLPAPTAGTVPVRQTSVKESPALSQVNLLSGDIVSRKVAILVADGVDGKAVEAMKAALTAEGAHAKVLGPTSAPVKTADGQSLPVDASAEGLPSVAFDAVFVPGGKASIEALKGDGVALHFILEAYKHLKAISFAGEAKELLSLLRLEEDAGLLEVSDSKSFKAFFNAIAQHRVWDREVKAKAVPA

SEQ ID NO: 321 - protein, 481 aa, Zymomonas mobilis subsp. mobilis ZM4
MTRPNLQTESGRIVGDNQNSITAGKRGPTLLQDVYLIEKLAHFNRERTPERVVHAKGSGAFGELTVTADITRYTKAKIFSEIGKKTPMFARFSTVGGERGSADTVRDPRGFALKFYTEEGNWDLVGNNTPVFFIRDAIKFPDFIHTQKRNPQTNLKDPKMVWDFFSQSPESLHQVLILFSDRGIPLSHRFMHGFSSHTYSMINAAGDIHYVKWHFLSQQGIKNLKAEEAEKLAGSNPDHYQEDLFSSIEKGDFPKWKVAIQIMTPEQARNQRLNPFDVTKVWYHKEFPLMEVGFFELNKNPENYFQDVEQAAFSPANTIPGLYFSPDKMLQGRLFAYADTQRYRLGINATQIPVNRPRCSVHGYYRDGTMRVDGNGGDAVNYEPNSDPSSPFENASYKEPPIAIDGEGGHYDRYEDSGNDNYEQPGKLYRLMKEDEKARLVSNLVASLGAPSVPNAIKEKQIELFRRCDADLGKRLADSLL

SEQ ID NO: 322 - protein, 342 aa, Candida albicans SC5314
MFKRFFSYTPRTFKMATFNNSFLMNHTCLRIKDPKVSIPFYTEKFGMKLIATFPFADFTLYMLNYETEANKHLNWSAREGVLELCHNHGVENDSNYKLNNGNGEKDRGFGHICMSVDNIEAFQDQLLKSEVKFQKKLSDGRQKNIAFALDPDGYWIELIENGINKVANKTEVSSYKLNHTMIRVKDPKKSLEFYRDVLGFKLLSTSEHEGAKFTLYFLGYDHDPNFKQDTLVRNEQAKREGVIELTHNWGTESDPEFKGYHNGNSTENGALQGFGHTCVSCEDPAKFCQELEEKFGDKLDWSLKWDQGKIKKIAFIRDPDGYSIEILGHDLFADSFKEQANL

SEQ ID NO: 323 - protein, 532 aa, Xylella fastidiosa 9a5c
MRIKTGIKKALILMLSVVLVSLVAIAAIAAHRFYIRLPQSRLFYAWKKMDEVYYDRTFAGFDWPAVLATYKKQLPRFDSDGQKTSPIINDMLSLLEVSHLQHFPAFMVSEEKKKTAVLANYFPELRDISGMVMVMDMLPRISRVLSLETWSPLYTHGVRVGDRILLETLDTDISDKNKPVRLYCYHINTAGVKKEFEFDLPAPPLGTQQTAVPAGDHVLHITRFDQGEIQALKHVSEDRNSSITQLHYISLGAVTTALHLPKNKVIDVVKDSEADKAGVEIGSIIGNGTNIKAGPENIGGKKVIKTNSRYEVVLPDGRKVTFSINKIIPKLNDFEGIRSAQLIGQTLVIAFNEMSDENTQWALQQIKNTPATAIVLDLRSNTGGSGIAGEKLLAGFLPSGTRIATEIRGKKTNVINVPSGYTPTDKPMAVLISLLSSSGAELAARTLQFHHRARIYGAQSSGQLLASRFYKLTDGTYMQIADTNLLDPAGKPLEWYGVMPDVKKWKALSDVRAGRDPVLECALTDLSGGQCH

SEQ ID NO: 324 - protein, 555 aa, Moritella marina
MCSIFGILDIKSDIKPLREQALELSKLLRHRGPDWSGIYTSDNAILVHERLAIVDVNNGAQPLYNEEKTHVLAVNGEIYNHKDLKKTLNVDFEFQTESDCEVILALYKEKGTQFLDDLNGIFAFALYDETEDAYLIGRDHIGIIPLYTGYDEHGNFYVASEMKALVPICTQIEEFPAGHYLWSKDGVVTPYYQRDWKDFDNVAQNGGDKSVVKQGLEDAVKRQLMCDVPYGVLLSGGLDSSVISAITQQYAKRRIEDGGKTEAWWPQLHSFSVGLNGSPDLAAAQKVADHLGTIHHSIEFTVQEGIDALRDVIYHIETYDVTTIRASTPMYLMARKIKAMGIKMVLSGEGADELFGGYLYFHKAPNAKEFHEETVRKVNKLHMFDCLRANKSMAAWGIEARVPFLDKEFVDASMRLNPELKMITGDRIEKNIIREAFEDLLPEEIVWRQKEQFSDGVGYSWIDQLKVHVEEAVTDQMLASAAFKFPINTPDTKEGYYYRAIFEDHFPGDSAAKCVPFGKSVACSTVEALAWDESFQNNADPSGRAAGVHNEAYED

SEQ ID NO: 325 - protein, 484 aa, Bacillus clausii KSM-K16
MKTKHLVWTVAVLAAVLVGGFFFIGGMNTGSPNPIQPNNGNESVVELSDDELMDKFERALATIESEYVTETDRQQLIEGAINGMVETLNDPFSDYMDVSSATDFQQSLSSHFEGIGAEVGMIDGNVSIISPMRESPAEKAGLLPNDAIIAIDGESIEGWSVNEAVANIRGEGGTTVTLTIARNGVKDPFDVKIERDTIEVESVRADTFEQDGKKIGRLEITSFSEDVGTQFEEQLQTLEEDGIDGLVIDVRGNPGGYLEGATKIGDAIIPEGKPVVQIEHGNGEIDSYLSKMKGKKPYPVVGLINESSASASEILAAALKESGDYDLVGETTFGKGTVQKSIPMDDGSALKITTDRWLTAGGNTIDQEGVEPTVKQRQPDYFYAVALTVEETFVKDQVSDQIGNAQKMLTGLGFDVGRDDGYFDEKTEEAIIAFQQSHDLQANGELNEETAGKLQEDILSHIRDTANDEQLKRAVELAAEQASQ

SEQ ID NO: 326 - protein, 209 aa, Bacillus cereus ATCC 10987
MKWIQMPLGPLQTNAYILTNEQNECIIFDPGHEGEKLVTYLQEEQLKPLAVLLTHAHFDHIGAVDAVRDAFHIPVYVHKEEADWLGDATVNGSQIFMMNRSITAKPADHIIDAEGALAIGSFNFEIFETPGHSPGSISYYCKEANAVFSGDVLFQMSIGRTDLPGGSFAELIGSIEEKLFVLPDETAVLCGHGPETSIGFEKENNPFLQ

SEQ ID NO: 327 - protein, 483 aa, Bacillus subtilis
MSSNKLTTSWGAPVGDNQNSMTAGSRGPTLIQDVHLLEKLAHFNRERVPERVVHAKGAGAHGYFEVTNDVTKYTKAAFLSEVGKRTPLFIRFSTVAGELGSADTVRDPRGFAVKFYTEEGNYDIVGNNTPVFFIRDAIKFPDFIHTQKRDPKTHLKNPTAVWDFWSLSPESLHQVTILMSDRGIPATLRHMHGFGSHTFKWTNAEPEGVWIKYHFKTEQGVKNLDVNTAAKIAGENPDYHTEDLFNAIENGDYPAWKLYVQIMPLEDANTYRFDPFDVTKVWSQKDYPLIEVGRMVLDRNPENYFAEVEQATFSPGTLVPGIDVSPDKMLQGRLFAYHDAHRYRVGANHQALPINRARNKVNNYQRDGQMRFDDNGGGSVYYEPNSFGGPKESPEDKQAAYPVQGIADSVSYDHYDHYTQAGDLYRLMSEDERTRLVENIVNAMKPVEKEEIKLRQIEHFYKADPEYGKRVAEGLGLPIKKDS

SEQ ID NO: 328 - protein, 157 aa, Triticum aestivum
MLLIRRSNVFDPFSLDFFDPFDGFPFGSGSNSSGSLIPRTSSDTAAFAGARIDWKETPEAHVFKADVPGLKKEEVKVEVEDGNILQISGERNKEQEEKTDTWHRVERSSGKFLRRFRLPENAKAEQVKASMENGVLTVTVPKEEAQKPEVKSIQISG

SEQ ID NO: 329 - protein, 560 aa, Medicago truncatula
MGLCFSSTKVVSGSNSNTTNNDNRKRNQSTTTDTTVTVTTATTAAQKQTAQRRKGGSNETAQKKNHHQHHRLKEKTGSKHVPCGKRTDFGYEKDFDKRFSLGKLLGHGQFGYTYVGVDKSNGDRVAVKRLEKAKMVLPIAVEDVKREVKILKELTGHENVVQFYNAFDDDSYVYIVMELCEGGELLDRILNKKDSRYTEKDAAVVVRQMLKVAAQCHLHGLVHRDMKPENFLFKSNKEDSALKATDFGLSDFIKPGKRFQDIVGSAYYVAPEVLKRKSGPESDVWSIGVITYILLCGRRPFWDKTEDGIFKEVLRNKPDFRRKPWPTISNAAKDFVKKLLVKDPRARLTAAQALSHPWVREGGEASEIPIDISVLNNMRQFVKYSRLKQFALRALASTLNEGELSDLKDQFDAIDVDKNGAISLEEMRQALAKDLPWKLKESRVLEILQAIDSNTDGLVDFTEFVAATLHVHQLEEHDSDKWQQRSQAAFEKFDIDKDGYITPEELRMHTGMRGSIDPLLEEADIDKDGKISLPEFRRLLRTASIGSRNVTSPTLRHRRI

SEQ ID NO: 330 - protein, 535 aa, Ashbya gossypii ATCC 10895
MGNSPSKDSPYAFQSTTQQAGAGSQQQSSLADENPNEPNDPDDSRLTPTHTKNISISKPRNSHVITSGVSAVAPTSVRRSPYYDLKIDVNMARALQPVSTSSDSFSSSSSSSSAASSSSTASSSTSLCAKPGETAAVPGHCGYGREHGFLSLKSSLSSSSDTALSSINVSGGGSLPTIAEERENSHIIARNSKATSAPSYSHMAKKSRIANPRSETPIVLKRNPHDPYNNDKLNIDDAIEKLLYIGDSRSYHSRDFPFHSWEVQLICATVREIFLEQPSLLRLQAPIKIVGDVHGQFTDLLRILKLSGVPDETNYLFLGDYVDRGKQSLETILLLLCYKIKYPDRFFMLRGNHESASVTKMYGFYDECKRRMSTKTWKQFVDVFNTLPFAAIVQDKIFCVHGGISPQLSNMRQIEKIARPTDIPEEGLLTDLLWSDPDPAVSDWSLNDRGVSYTFGKRNVYDFCANFKFDLIIRGHMVVEDGYEFFAKKKFVTIFSAPNYCGQFQNWGAVMSVTTGMMCSFELLKPHGLKDTRRK

SEQ ID NO: 331 - protein, 333 aa, Haemophilus influenzae Rd KW20
MKTLSEFIVERQAEYPNAKGELSGILSSIRLLAKIIHRDINKAGLTNILGQSGIENVQGESQMKLDLFAHNTMKAALMAREEVAGFASEEEESFIAFDTERGRNAKYIILTDPLDGSSNIDVNVSVGTIFSIYRRVSPIGSPVTLEDFMQPGNKQVAAGYIVYGSSTMLVYTTGNGVNGFTYDPSIGTFCLSHENMQMPKEGKIYSINEGQYLKFPQGVKKYIKYCQEEDKATHRPYVSRYIGSLVADFHRNLLKGGIYIYPSATNYPNGKLRLLYEGNPIAFLAEQAGGVATDGYRRILDIEPTALHERVPLFVGSEDMVKKAQEMMEEFKE

SEQ ID NO: 332 - protein, 554 aa, Shigella flexneri 2a str. 2457T
MCSIFGVFDIKTDAVELRKKALELSRLMRHRGPDWSGIYASDNAILAHERLSIVDVNAGAQPLYNQQKNHVLAVNGEIYNHQALRAEYGDRYQFQTGSDCEVILALYQEKGPEFLDDLQGMFAFALYDSEKDAYLIGRDHLGIIPLYMGYDEHGQLYVASEMKSLVPVCRTIKEFPAGSYLWSQDGEIRSYYHRDWFDFDAVKDNVTDKNELRQALEDSVKSHLMSDVPYGVLLSGGLDSSIISAITKKYAARRVEDQERSEAWWPQLHSFAVGLPGSPDLKAAQEVANHLGTVHHEIHFTVQEGLDAIRDVIYHIETYDVTTIRASTPMYLMSRKIKAMGIKMVLSGEGSDEVFGGYLYFHKAPNVKELHEETVRKLLALHMYDCARANKAMSAWGVEARVPFLDKKFLDVAMRINPQDKMCGNGKMEKHILRECFESYLPASVAWRQKEQFSDGVGYSWIDTLKEVAAQQVSDQQLETARFRFPYNTPTSKEAYLYREIFEELFPLPSAAECVPGGPSVACSSAKAIEWDEAFKKMDDPSGRAVGVHQSAYK

SEQ ID NO: 333 - protein, 516 aa, Arabidopsis thaliana
MMNKDMLLHQHQQPQQDENMSNLTSASGDQASVSSGNITEASGSNYFPHHQQQQEQQQQQRQQLFVPDSQPQKKRRNQPGNPDPESEVIALSPKTLMATNRFVCEICNKGFQRDQNLQLHRRGHNLPWKLKQRSNKEVIRKKVYVCPEASCVHHDPSRALGDLTGIKKHFCRKHGEKKWKCDKCSKKYAVQSDCKAHSKTCGTKEYRCDCGTLFSRRDSFITHRAFCEALAEETAREVVIPQNQNNNQPNPLLIHQSASHPHHHHQTQPTINVSSSSSSSHNHNIINSLHFDTNNGNTNNSNNSNNHLHTFPMKKEQQSNDHIMNYHHSIIPPWLAPQPHALTSSNPNPSNGGGGGGSLFSLASPAMSATALLQKAAQMGSTKTPPLPPTTAYERSTHNNNLTTTMAAMMTSPSGFISSNNNNHVLFQDYNASGFDNHGGEEAFDDTFGGFLRTNEVTAAAGSEKSTKSGGGEGLTRDFLGLRPLMSHNEILSFAGLGSCINSSASDQLHPKPWQG

SEQ ID NO: 334 - protein, 662 aa, Chromobacterium violaceum ATCC 12472
MCGIAGALLDRHAHDGDVAEARRMILRQTHRGPDGLAARRVGPALLASSRLAIVDVANGSQPFSDESRAIHAVFNGEIYNHLELRENLSRRGHSLSGGSDGEVIVHLYEEYGTDCFQWLDGQFAIAIFDSRDDSLHLARDRMGICPLHWARLDGALYFSSEIKGLLAVAGMPRRAEPRAMLQLAYFGAVCAPLTPFGGIHQLPAAHRLSFRAGRLEIGRYWSLDFPLAGEHARLSEAQAAEGLAARLERAVASHAQGEFEPTCFLSGGIDSAVIAALLQRRSQASIAAFCAASEHGRMDEGGAAARTAEWLGVDLKRVRIDEAGIADAFPRLIWHGETPVISTEASALMRLAGEAGKRSKIVLTGEGADEAFAGYLAFRQYRQLGALTGRGLSPLRTMVRPWLRGHYGSECLLPGEDRLGVLAEHFGCVPAQAYEWEFYREALTPLFSPELRAMAAAGGCWDGFEFDRGAVRGRHWLDRSLYVSYQVMLPNYLLGAHGDRIYAAHSVEGRYPFLDRALVEYAAALDPALKLRRGREKHILRVAAARWLPDEVAWRPKTRFVMPFGTPFVGPRAAPLYAELLSPGKLAEYGYFDPERVRSLFRALASPPSAGGKARRYLERLALGLGATFVVSAQLWHHLHLADGGSAVSGEAARRSAPATIA

SEQ ID NO: 335 - protein, 506 aa, Pseudomonas fluorescens
MSQDPKKCPVTHLTTEAGAPVVDNQNSMTAGARGPLLAQDLWLNEKLANFVREVIPERRMHAKGSGAFGTFTVTNDITQYTRAKIFSEVGKKTEMFARFSTVAGERGAADAERDIRGFALKFYTEEGNWDLVGNNTPVFFLRDARKFPDLNKAVKRDPFSNKRSATNNWDFWTLLPEAFDQVTIVMSDRGIPAGYRHIDGFGSHTFSFINTQNERFWVKFHMRTQQGIQNLTDAEAADLIAKDRESSQTDLFDAIERGEYPKWKMYVQIMPELEAETVPYHPFDLTKVWPKGDYPLIEVGEFELNRNPENYFQDVEQAAFAPSNLVPGISYSPDRMLQARLVNYADAARYRVGVNHSQVPVNAARCPVNSNRRDGQGRMDGNYGSLPHYEPNSFNQWQEQPQFKEPALKITGDADFWDFREDDNDYFSQPRALFNLMNDEQKQALFNNTAAAMGDALDFIKYRHIRNCYACDPAYGQGVAKALGMTVADAQAARETDPAKGLPSFL

SEQ ID NO: 336 - protein, 491 aa, Brassica oleracea
MVALTAEKQDQNLLSRMAAGDGHGEKSAYFDGWKAYEENPFHPIDRPDGVIQMGLAENQLCGDLMRKWVLEHPEASICTAEGVNQFSDIAIFQDYHGLPEFRQAVAKFMEKTRNNKVKFDPDRIVMSGGATGAHETVAFCLANPGDGFLVPTPYYPGFDRDLRWRTGVNLVPVTCHSSNGFKITAEALDAAYENARVSNIPVKGLLITNPSNPLGTTLDRDCLKSLVKFTNDKGIHLIADEIYAATTFGESEFISVAEVIDEIPDCNTDLIHIVYSLSKDMGLPGLRVGIVYSYNDRVVQIARKMSSFGLVSSQTQHLIAKMLSDEDFVDEFIRKSKLRLAERHAELTTGLDGLSIGWLKAGAGLFIWMDLRNLLKTATFDSEMELWRVIVHKVKLNVSPGGSCHCHEPGWFRVCFANMDYQTMETALERIRVFTSQTEEESLILTKPMAKKKKCWQSSLRLSFKDTRRFEEGFFSPHSPVPPSPLVRAQI

SEQ ID NO: 337 - protein, 365 aa, Pinus sylvestris
QMGLAENQLSIDMLELWLKEHPEASMSLNQDAGTSVFRELALYQDYHGLPTFRKAIANFMESLRGNKVKFDAESIVLTAGATAANELLMFCLADPGDAFLVPTPYYPGFVRDLRWRTGVEIVPVHCDSSNRFQITKSALERAYLEAQNQKLKVRGLIVTNPSNPLGTTLSVKALRNLLAFVQEKKIHLVCDGIYSGSVFSPPRFHSISEILPNDNHICDNVHIVYSLSKDLGLPGFRIGAIYSYNNTAVKTARRMSSFCMVSSQTQHMLSALLSDFKFMNHFISENQKRLRERHRFLVSGLQKAGITCLKSNAGLFCWVDMRHLLPSPDVNGELMLWQSILDEAGLNISPGSSFHCKEPGWFASR

SEQ ID NO: 338 - protein, 365 aa, Pinus sylvestris
QMGFAENQVSFDLLEAWLDEHPEASICQEGKTTFRDTAPHQDYHGLPAFRESLARFMELVRGGKVRFDPDRIVLTAGATAANELLMFCLANPGEAFLVPTPYYPGFDRDLRWRTGVEIIPVHCNSSNDFQVTSSALEEAYHEAKQKNIRVKGILVTNPSNPLGTTMERKTLKNLLSFASEKNIHLICDEIYSGSVFLPPRFRKYAEVLQASGRPNDSDRVHIVYSLSKDLGLPGFRVGAIYSYNDTVVTTARRMSSFSLVSSQTQHFLACMLSDEDFTKKYIKENKKRLRKRHRIMVSGLQKVGISCLKSNAGLFCWVNLTQLPPSENIDGEIKLWETILYEMGLNVSPGSSCHCIEPGWFSVCF

SEQ ID NO: 339 - protein, 512 aa, Zea mays
SARVGSQNGVQMLSPSEIPQRDWFPSDFTFGAATSAYQIEGAWNEDGKGESNWDHFCHNHPERILDGSNSDIGANSYHMYKTDVRLLKEMGMDAYRFSISWPRILPKGTKEGGINPDGIKYYRNLINLLLENGIEPYVTIFHWDVPQALEEKYGGFLDKSHKSIVEDYTYFAKVCFDNFGDKVKNWLTFNDPQTFTSVSYGTGVFAPGRCSPGLDCAYPTGNSLVEPYTAGHNILLAHAEAVDLYNKHYKRDDTRIGLAFDVMGRVPYGTSFLDKQAEERSWDINLGWFLEPVVRGDYPFSMRSLARERLPFFKDEQKEKLAGSYNMLGLNYYTSRFSKNIDISPNYSPVLNTDDAYASQEVNGPDGKPIGPPMGNPWIYMYPEGLKDLLMIMKNKYGNPPIYITENGIGDVDTKETPLPMEAALNDYKRLDYIQRHIATLKESIDLGSNVQGYFAWSLLDNFEWFAGFTERYGIVYVDRNNNCTRYMKESAKWLKEFNTAKKPSKKILTPA

SEQ ID NO: 340 - protein, 362 aa, Candida albicans
SPRQVSFNVSDHYQILEIVGEGAYGIVCSAIHKPSQQKVAIKKIEPFERSMLCLRTLRELKLLKHFNHENIISILAIQRPINYESFNEIYLIQELMETDLHRVIRTQNLSDDHIQYFIYQTLRALKAMHSANVLHRDLKPLNLLLNSNCDLKICDFGLARSIASQEDNYGFMTEYVATRWYRAPEIMLTFQEYTTAIDVWSVGCILAEMLSGRPLFPGRDYHNQLWLIMEVLGTPNMEDYYNIKSKRAREYIRSLPFCKKIPFSELFANTNNNTSTSNTGGRTNINPLALDLLEKLLIFNPAKRITVEDALKHPYLQLYHDPNDEPISDKIPEDFFDFDKMKDQLTIEDLKKLLYEEIMKPL

SEQ ID NO: 341 - protein, 215 aa, Chlorobium tepidum TLS
MSVQVEQIRTGGDRNFGYLCADKATGEAFAVDPSNSPKVLVDAAARKGWQLVRAFCTHGHADHTNGNEEFERLTGIRVLLFGDRDARLGIEVMHGASFPLGEGVVEIIHTPGHTLDSICLLAGDALFTGDTLFVGKVGGTWSEADARLEYRSLHERLMVLPAGTNVFPGHDYGTAPVSTIGHEKTTNPFLLQPDAESFIDLKNNWSAYKKAHGIS

SEQ ID NO: 342 - protein, 706 aa, Mycobacterium avium subsp. paratuberculosis K-10
MATDHTSGAPDPKQRDLESARFRRDTGYLTTQQGVRVDHTDDALTVGERGPTLLEDFHAREKITHFDHERIPERVVHARGAGAYGYFEPYDDRLAQYTAAKFLTSPGTRTPVFVRFSTVAGSRGSADTVRDVRGFATKFYTEQGNYDLVGNNFPVFFIQDGIKFPDFVHAVKPEPHNEIPQAQSAHDTLWDFVSLQPETLHAIMWLMSDRALPRSYRMMQGFGVHTFRLVNARGEGTFVKFHWKPRLGVHSLIWDECQKIAGKDPDYNRRDLWEAIESRQYPEWELGVQLVAEDDEFSFDFDLLDATKIIPEEQVPVLPVGKMVLNRNPDNFFAETEQVAFHTANVVPGIDFTNDPLLQFRNFSYLDTQLIRLGGPNFAQLPVNRPVAQVRTNQHDGYGQHTIPQGRSSYFKNSIGGGCPALADEDVFRHYTQRVDGQTMRKRAEAFQNHYGQARMFFKSMSPVEAEHIVAAFAFELGKVEMPEIRSAVVAQLARVDDQLAAQVAAKLGLPEPPEEQVDESAPVSPALSQVTDGGDTIASRRIAVLAADGVDVVGTQRFTELMEQRGAVVEVLAPVAGGTLAGGSGGELRVDRSFTTMASVLYDAVVVACGPRSVSTLSDDGYAVHFVTEAYKHLKPIGAYGAGVDLLRKAGIDNRLAEDTDVLNDQAVVTTKAAADELPERFAEEFAAALAQHRCWQRRTDAVPA

SEQ ID NO: 343 - protein, 306 aa, Oryza sativa (indica cultivar-group)
MPSHADLDRQISQLRECKFLGEAEVRALCEQAKAILMEEWNVQPVRSPVTVCGDIHGQFYDLIELFRIGGDSPDTNYLFMGDYVDRGYYSVETVTLLVALKVRYRERITILRGNHESRQITQVYGFYDECLRKYGNANVWKYFADLFDYLPLTALVENQVFCLHGGLSPSLDTLDNIRALDRIQEVPHEGPMCDLLWSDPDDRCGWGISPRGAGYTNGQDIAQQFNHTNGLTLISRAHQLVMEGFNWCQDKNVVTVFSAPNYCYRCGNMAAILEIGENMDQNFLQFDPAPRQIDPDTTRKTPDYFL

SEQ ID NO: 344 - protein, 354 aa, Ustilago maydis 521
MSHAHGQQPNHSTTFKVGETYKVVDVVGEGAYGVVCSAIHVPSSSRVAIKKITPFDHSMFCLRTLREIKLLRHFNHENIISILDIVKPDDYDSFSEVYLIQELMETDMHRVIRTQELSDDHCQYFIYQTLRGLKALHSAQVLHRDLKPSNLLLNANCDLKICDFGLARSANQPEAEGTGFMTEYVATRWYRAPEIMLTFKEYTKAIDVWSVGCILAEMLAGKPLFPGRDYHHQLSLTLEILGTPSLDDFYAITSTRSRDYIRALPFRKRRNLSLMFPNANPLAVDLMEKCLTFSPRKRITVEEALAHPYLEPYHDPEDEPTAEPLDPSFFDFDYCKEQLSRSELKRLIYNEIMR

SEQ ID NO: 345 - protein, 432 aa, Candida glabrata CBS138
MGLSKILGSNDNIVNKNGSSNTGGSKKSSFFSLNSKRNTDAAGIVPDFTSIKAPRTIYKNANFSISGKYEIIQVLGKGSYGVVCSAKHKLDNEDQEQFTVAIKKITNIFYRKILLKRAIREIKFMNYFKGHKHIVNLIDIEIVQDKPYDGLYCYQELIDYDLARVIHSSVQLSEFHIQHFIYQILCGVKYIHSADVIHRDLKPGNILCTVNGCLKICDFGLARGVAKQFVNKNSKPNEITNYVATRWYRAPELILSNNEYTKSVDMWSVGCILAEFYGRRPIFMGKDSIHQVYEIKKILGTPSRSLLVKYGTLKAWNLFGHNSNHNLDNLKSGMPWSTVYPMASATALDLIDKLLQWEPESRLNVLQSLEHQFVQSVRKPNDEPICSKGPFNFSYEYNLNSMDDLRQCLNEEVAQFYIERQLGEEYSKYIEE

SEQ ID NO: 346 - protein, 542 aa, Rhizobium sp. NGR234
MAAKEVRFHTEAREKMLRGVDILANAVKVTLGPKGRNVVLDKSFGAPRITKDGVTVAKEIELEDKFENMGAQMVREVASKTSDIAGDGTTTATVLAQAIVKEGAKAVASGMNPMDLKRGVDKAVDAVVEELRRNARKVTKNDEIAQVGTISANGDTEIGRFLAEAMEKVGNEGVITVEEAKTAVTELEVVEGMQFDRGYLSPYFVTNPDKMRVELEEPYVLIHEKKLSNLQALLPVLESVVQSGKPLLIIAEDVEGEALATLVVNKLRGGLKVAAVKAPGFGDRRKAMLEDIAILTGGTAISEDLGIKLENVTLDMLGRAKKVVVEKENTTIVDGAGSKTEIEGRVAQIKAQIEETTSDYDREKLQERLAKLAGGVAVIRVGGSTEVEVKERKDRVDDAMHATRAAVEEGVLPGGGVALLRAVKALDRVQTENPDQRHGIEIVRRAIEAPVRQIAENAGAEGSIIVGKLREKTEFGYGWNAQTNEFGDLFEQGVIDPVKVVRTALQDAASVAGLLITTEAMVAEKPKKEAPVPPMPPGGMDF

SEQ ID NO: 347 - protein, 534 aa, Mesembryanthemum crystallinum
MGICASKNKATQPEDNGYTPANGVGSNNQSKPPAQQNYHQQPPQQPVAPPQPASHPPVRMPSPKPAPKVEPNTILGKPFEDVKVYYTLGRELGRGQFGVTYLCTDKKTGQQYACKSISKKKLVTKADKDDMRREIQIMQHMSGQPNIVEFKGAYEDKTSVNLVMELCAGGELFDRIIAKGHYSEKAAATMLRQIVNVVHVCHFMGVMHRDLKPENFLLSSKDENSLLKATDFGLSVFIEEGKVYRDIVGSAYYVAPEVLRRRYGKEIDVWSAGVMLYILLSGVPPFWAETEKGIFDAILQGHIDFESKPWPSISNGAKDLVRKMLTQDPKKRITAAQVLEHPWLRDGEASDKPIDSAVLLRMKQFRVMNKLKKLALKVIAENLPDEEIQGLKQMFANMDTDGSGSITYEELREGLARLGSKLTETEVKALMEAADQDGSGSIDYYEFITATMHRYRLERDEHLYKAFQYFDKDNSGFITTDELETAMKEYGIADENCIAEILLEVDTDNDGRINYDEFSAMMRSGTQNPVTKLI

SEQ ID NO: 348 - protein, 672 aa, Escherichia coli O157:H7 EDL933
MSYPSLFAPLDLGFTTLKNRVLMGSMHTGLEEYPDGAERLAAFYAERARHGVALIVSGGIAPDLTGVGMEGGAMLNDASQIPHHRTITEAVHQEGGKIALQILHTGRYSYQPHLVAPSALQAPINRFVPHELTHEEILQLIDDFARCAQLAREAGYDGVEVMGSEGYLINEFLTLRTNQRSDQWGGDYHNRMRFAVEVVSAVRERVGNDFIIIYRLSMLDLVEGGGTFAETVELAQAIEAAGATIINTGIGWHEARIPTIATPVPRGAFSWVTRKLKGHVSLPLVTTNRINDPQVADDILSRGDADMVSMARPFLADAELLSKAQSGRADEINTCIGCNQACLDQIFVGKVTSCLVNPRACHETKMPILPAMQKKNLAVVGAGPAGLAFAINAAARGHQVTLFDAHSEIGGQFNIAKQIPGKEEFYETLRYYRRMIEVTGVTLKLNHTVTADQLQAFDETILASGIVPRTPPIDGIDHPKVLSYLDVLRDKAPVGNKVAIIGCGGIGFDTAMYLSQPGESTSQNIAGFCNEWGIDSSLQQAGGLSPQGMQIPRSPRQIVMLQRKASKPGQGLGKTTGWIHRTTLLSRGVKMIPGVSYQKIDDDGLHVVINGETQVLAVDNVVICAGQEPNRALAQPLIDSGKTVHLIGGCDVAMELDARRAIAQGTRLALEI

SEQ ID NO: 349 - protein, 119 aa, Arabidopsis thaliana
  misc_feature (14)..(14): Xaa can be any naturally occurring amino acid
  misc_feature (28)..(28): Xaa can be any naturally occurring amino acid
  misc_feature (50)..(50): Xaa can be any naturally occurring amino acid
  misc_feature (72)..(72): Xaa can be any naturally occurring amino acid
  misc_feature (82)..(82): Xaa can be any naturally occurring amino acid
HHEGFMNFMHRDEXINHYPSKYDPDRCXEEVPTPTNSYTGIRTKCVIKEXTNFKQAGDRYRSWAPDRQDRFXVKRWVEILSXEPRLTHEIRGIWISYWSQADRSLGQKLASRLNVRPSI

SEQ ID NO: 350 - protein, 286 aa, Lactobacillus plantarum WCFS1
MTALTKLTDTYTLNNGTKIPIVGFGTWQTPDGQVAYDSVLAALKAGYRHIDTAAAYGNEESVGKAIADSGVAREDLFVTTKLWNADHGYDAAKKALDTSLAKLGLDYVDLYLIHWPNPAAMRDNWEQLNADTWRAMEEAYTARKARAIGVSNFRPKHLDALLKTAKVVPAVNQIFLNPSDMEDEVVAYNRKHDILSEAYSPLGTGKIFSIPELKTLADKYDKSVAQVVLRWSLQHGFLPLPKSVHADRIEQNTELFDFELSDDDMKVIDGFHGVAGLANDPDQVNF

SEQ ID NO: 351 - protein, 441 aa, Zea mays
MSQPKIKRRVGKYEVGRTIGEGTFAKVKFARNSETGEPVALKILDKEKVLKHKMAEQIRREVATMKLIKHPNVVRLYEVMGSKTKIYIVLEFVTGGELFDKIVNHGRMSENEARRYFQQLINAVDYCHSRGVYHRDLKPENLLLDTYGNLKVSDFGLSALSQQVRDDGLLHTTCGTPNYVAPEVLNDRGYDGATADLWSCGVILFVLVAGYLPFDDPNLMNLYKKISAAEFTCPPWLSFTARKLITRILDPDPTTRITIPEILDDEWFKKEYKPPIFEENGEINLDDVEAVFKDSEEHHVTEKKEEQPTAMNAFELISMSKGLNLENLFDTEQGFKRETRFTSKSPADEIINKIEEAAKPLGFDVQKKNYKMRLANVKAGRKGNLNVATEIFQVAPSLHMVEVRKAKGDTLEFHKFYKKLSTSLDDVVWKTEDDMQMRETK

SEQ ID NO: 352 - protein, 399 aa, Candida tropicalis
MMNIDQHHQQLQQQSQAQAQAQAQAQAQAQAQAQAQAQAQAAAAAVAASSQRQVSFNVSDHYQILEIVGEGAYGIVCSAIHKPSNQKVAIKKIEPFERSMLCLRTLRELKLLKHFNHENIISILAIQRPLNFESFNEIYLIQELMETDLHRVIRTQNLTDDHIQYFIYQTLRALKAMHSANVLHRDLKPSNLLLNSNCDLKVCDFGLARSIASQEDNYGFMTEYVATRWYRAPEIMLTFQEYTTAIDVWSVGCILAEMLSGRPLFPGRDYHNQLWLIMEVLGTPNMEDYYNIKSKRAREYIRSLPFCKKIPFQELFSNKPGINPLALDLLEKLLIFNPAKRITVEDALKHPYLQLYHDPNDEPISDKIPEDFFDFDKKKDSLTIEDLKKMLYEEIMKPL

SEQ ID NO: 353 - protein, 564 aa, Xanthomonas campestris pv. vesicatoria str. 85-10
MCSIFGIFGLQPGDDLQALRRQALECSQRQRHRGPDWSGVYVDTGAILVHERLAIVDPAGGSQPLLSDDGQLALAVNGEIYNHRELKAELLQPYAFQTGSDCEVINALYREDTPASYLNRLNGIFAFALWDKTEGRVIIARDPIGVVPLYWGHDREGRLRVASELKSLVDDCADAAQFPPGHWYDSATGALSRYYERAWRHYDAVEGVQVQLQELREAFERAVHRQLMTDVPYGVLLSGGLDSSLVAAVAARYARHRIEENDTTEAWWPRLHSFAIGLKGSPDLAAAEVAAAALGTVHHGFEYTFDEGLDALPDVIRHIETYDVTTIRASTPMFLLARRIKAMGVKMVLSGEGSDEIFGGYLYFHKAPNAREFHEELVRKLDALNNYDCLRANKSMMAWGVEPRVPFLDREFLDVAMRMDARFKMIDKTSGGAARMEKGVLREAFAGYLPESILWRQKEQFSDGVGYGWIDGLKAHAQAQVSDRELAAADRRYPVNPPQTKEAYFYRSLFEQFFPGQAAAETVPGGKSIACSSPTAIAWDASFAAMADPSGRAIAGVHAQALAS

SEQ ID NO: 354 - protein, 368 aa, Shewanella oneidensis MR-1
MKKPPIIWLNVILFSLTFLSAVILVPWYGIVYGYGASEWIAFVVLAFASGLSITAGYHRLWSHKAYKTHPAIRFLYALGGALALQNSALHWASDHRVHHKHVDDNDKDPYSAKMGFWYSHIGWMLREYQAQRYHDYQNVRDLQNDRIVMWQHKHYLTLVLLMNIGLPALLGWFTGNIAGMLLMAGLLRLVVVHHCTFFINSLAHVWGCQPYTDKNTARDNGFLAVLTYGEGYHNFHHIFENDYRNGIKWWHYDPTKWLIKSLSWVGLAKDLRTSPQERIESARLQMQLLHAKNKVLNLPNADEIIEKIQQEYELMKQHLLEYYQAQKTLLEAKRKQLVDQQLLQQVEELKTRFLNQQKSWKSLTATYS

SEQ ID NO: 355 - protein, 229 aa, Arabidopsis thaliana
MAQQSLIYSFVARGTVILVEFTDFKGNFTSIAAQCLQKLPSSNNKFTYNCDGHTFNYLVENGFSESKYCSISYCVVAVDSAGRQIPMAFLERVKEDFNKRYGGGKAATAQANSLNKEFGSKLKEHMQYCMDHPDEISKLAKVKAQVSEVKGVMMENIEKVLDRGEKIELLVDKTENLRSQAQDFRTQGTQMRRKMWFQNMKIKLIVLAIIIALILIIILSICGGFNCGK

SEQ ID NO: 356 - protein, 193 aa, Oryza sativa (japonica cultivar-group)
MSKYGTIPTSSSSDGPPPGSSSSSPLDFISRAKARGATALAERRPWRELADPRAASVPRGLGGAYRRARANLGHFSMNYAIVVLAVVFLSLLWHPVSLIVFLACMVAWLFLYFLRDEPLALCGRAVGEGAVLAVLSVLTLVLLLLTGATVNILTSLLVGVVIVLLHAVFHRPADSIDEEAGRYYTPVPPQPSY

SEQ ID NO: 357 - protein, 78 aa, Gossypium barbadense
RIMKKALPANAKIAKDAKETVQECVSEFISFITSEASDKCQKEKRKTINGDDLLWAMATLGFEDYIDPLKIYLTKYRE

SEQ ID NO: 358 - protein, 162 aa, Zea mays
MAAVSSTSTASSYFSPQPQLPISTADPAASKSRLMRQPRRSSSFVMVEASSASGSDGGVARTKSLTEDDLEELKGCLDLGFGFAYSEIPELCGTLPALELCYSMTRRFLDEQKAPGQEEELEPASPPLPNWRISGPGDDPEEVKARLKYWAQAVACTVKLCS

SEQ ID NO: 359 - protein, 309 aa, Yarrowia lipolytica CLIB122
MTSIDFTMNNGKTIPAIGLGTWKSTTEEVAGAVECALTEGGYRHIDTAFNYRNEDAVGLGIKRAMEKGVKREDIFVTTKIWVTYHDRVEENLNMSLERLGLDYVDMLLIHWPVPLNPNGNDPVYPLRPDGSRDIDESGSQPKTWKQMEAVLKTGKTKSIGVSNFSIPYLQELLKEATVVPAVNQVELHPLLPQLELMEFCKKNNIIMTAFSPFGSVGGPLLKNELVLKLADKYETSPGGILTSYHIGNGTVVIPKSVTNSRIIENGKSAVNLSKEDLQALNDLHKTEGIHRTSKPKWGVDLGFPDFDFC

SEQ ID NO: 360 - protein, 385 aa, Thiobacillus denitrificans ATCC 25259
MDLPWWGLVLVTLGLTHVTIAAVTIYLHRSQAHRSVDLHPVVSHFFRFWLWLTSGMVTREWVSIHRKHHAKCETPEDPHSPQTRGLKKVFWEGSELYRAEAKVAETLEKYSHGTPDDWVERNVYSRHSAKGIFLMMAIDLALFGPIGLTIWAVQMAWIPITAAGIINGVGHYWGYRNFACEDASTNILPWGILIGGEELHNNHHAYGTSARLSNKWYEFDIGWLYIKLMSYAGLATVRKVAPTVKWQAPKPLCDLDTLQAIITHRYDVMSRFVKSVRAESAAEIAKLRAGANLPQNWNFDSFRRWLHKEPAELAADDRAALDTLLGRSERLQTVYRMRQELAAIWGRSTASREQLLEQLQAWCKRAEESGIQSLRDFSVRLRCYA

SEQ ID NO: 361 - protein, 503 aa, Zea mays
  misc_feature (242)..(242): Xaa can be any naturally occurring amino acid
MEGAGRDANPLSGYRIGKTLGIGSFGKVKIAEHILTGHKVAIKILNRKKIRSMDMEEKVKREIKILRLFMHPHIIRLYEVIDTPADICVVMEYVKSGELFDYIVEKGRLHEEEARHFFQQIISGVEYCHRNMVAHRDLKPENLLLDSKCNVKIADFGLSNIMRDGHFLKTSCGSPNYAAPEVISGKLYAGPEVDVWSCGVILYALLCGTLPFDDENIPNLFKKIKGGIYTLPSHLSPSARDXFPRMLVVDPMKRITIREIREHVWFKIRLPRYLAVPPPDTAQQVKKVDEETLNDVIKMGWDKNQLIESLQNRKENEATVAYYLLLDNRLRTTSGYLGSEFQESMDSSFSQVIAETPTSATELRQHGFSESPGSGLRQHFAAERKWALGLQSRAHPREIISEVLKALQELNVYWKKIGHYNMKCRWSPGCLESMMHNSDSFSAESAIIETDVFMEKSTPTVKFEIQLYKTRDEKYLLDLQRVSGSHLLFLDLCSAFLTQLRVL

SEQ ID NO: 362 - protein, 338 aa, Yarrowia lipolytica CLIB122
MEANPEVQTDIITLTRFILQEQNKVGASSAIPTGDFTLLLNSLQFAFKFIAHNIRRSTLVNLIGLSGTANSTGDDQKKLDVIGDEIFINAMKASGKVKLVVSEEQEDLIVFEGDGRYAVVCDPIDGSSNLDAGVSVGTIFGVYKLPEGSSGSIKDVLRPGKEMVAAGYTMYGASANLVLSTGNGCNGFTLDDPLGEFILTHPDLKLPDLRSIYSVNEGNSSLWSDNVKDYFKALKFPEDGSKPYSARYIGSMVADVHRTILYGGMFAYPADSKSKKGKLRLLYEGFPMAYIIEQAGGLAINDNGERILDLVPTEIHERSGVWLGSKGEIEKAKKYLLK

SEQ ID NO: 363 - protein, 421 aa, Dianthus caryophyllus
AKLSASICTAEGIDEFQDTAIFQDYHGLPQFRKAVAKFVEKVRGEKVKYDESRIVMSGGATGAHELMTFCLADPGDAFLVPTPYYPGFDRDLRWRTGVQLVPVLCHSSDNFRITTSALQDAYERAQEAKIKVKGLLITNPSNPLGTVLDKETLINILEFTNEKNIHLICDEIYGATVFGEQKFISISEVIIDQPHNPDLVHIVYSLSKDLGFPGFRVGIVYSYNDNVVNCARKMSSFGLVSTQTQRLIACMLSDEEFVERFLEESRKRLENRHRVFTWGLSQVGIKCLRSNAGLFVWMDLRHPLQDPTIEGELALWRVIINEVKINVSPGSSFHCSEPGWFRVCIANMNDETMEVALRRIRSFVLQKKDAATCVTSSKRKCWQTNLQLRLSNRRLEDFIGISQIGSPSSPLPQSPLVLART

SEQ ID NO: 364 - protein, 212 aa, Haemophilus influenzae Rd KW20
MNIEIIPVTAFQQNCSLIWDDEKNAAIIDPGGEAERLIQRIEELDLNLKVLLLTHGHLDHVGAAMQLKQHFGVEIWGSNEKDKFLFESLPEQAQRFGLPNIDAFLPDRWFNQEGEILKLDGFNFEILHLPGHTPGHIGFIEHEKKVAFTGDVLFQGGIGRTDFPRGDYETLISSIRTKLLPLNDDIIIIAGHGSYTTIGQEKRSNPFLNSKS

SEQ ID NO: 365 - protein, 305 aa, Helianthus annuus
MPSQSDLDRQIEHLMDCKPLPEEVRTLCDQARTILVEEWNVQPVKCPVTVCGDIHGQFHDLLELFRIGGSAPDTNYLFMGDYVDRGYYSVETVTLLVALKVRYRDRITILRGNHESRQITQVYGFFDECLRKYGNANVWKHFTDLFDYLPLTALIESQIFCLHGGLSPSLDTLDNIRALDRIQEVPHEGPMCDLLWSDPDDRCGWGISPRGAGYTFGQDIAAQFNHTNGLSLISRAHQLVMEGYNWSQENNVVTIFSAPNYCYRCGNMAAILEVGENMDQNFLQFDPAPRQVEPDVARRTPDYFL

SEQ ID NO: 366 - protein, 503 aa, Micrococcus luteus
MEHQKTTPHATGSTRQNGAPAVSDRQSLTVGSEGPIVLHDTHLLETHQHFNRMNIPERRPHAKGSGAFGEFEVTEDVSKYTKALVFQPGTKTETLLRFSTVAGELGSPDTWRDVRGFALRFYTEEGNYDLVGNNTPIFFLRDPMKFTHFIRSQKRLPDSGLRDATMQWDFWTNNPESAHQVTYLMGPRGLPRTWREMNGYGSHTYLWVNAQGEKHWVKYHFISQQGVHNLSNDEATKIAGENADFHRQDLFESIAKGDHPKWDLYIQAIPYEEGKTYRFNPFDLTKTISQKDYPRIKVGTLTLNRNPENHFAQIESAAFSPSNTVPGIGLSPDRMLLGRAFAYHDAQLYRVGAHVNQLPVNRPKNAVHNYAFEGQMWYDHTGDRSTYVPNSNGDSWSDETGPVDDGWEADGTLTREAQALRADDDDFGQAGTLVREVFSDQERDDFVETVAGALKGVRQDVQARAFEYWKNVDATIGQRIEDEVKRHEGDGIPGVEAGGEARM

SEQ ID NO: 367 - protein, 532 aa, Arabidopsis thaliana
AKGLVDHSRRQHHHKSPSFLSPQPRPLASSPPALSRFFSSTSEMSASDSTSSLPVTLDSINPKVLKCEYAVRGEIVNIAQKLQEDLKTNKDAYPFDEIIYCNIGNPQSLGQLPIKFFREVLALCDHASLLDESETHGLFSTDSIDRAWRILDHIPGRATGAYSHSQGIKGLRDVIAAGIEARDGFPADPNDIFLTDGASPAVHMMMQLLLSSEKDGILSPIPQYPLYSASIALHGGSLVPYYLDEATGWGLEISDLEKQLEEARSKGISVRALVVINPGNPTGQVLAEENQRDIVNFCKQEGLVLLADEVYQENVYVPDKKFHSFKKVARSLGYGEKDISLVSFQSVSKGYYGECGKRGGYMEVTGFTSDVREQIYKMASVNLCSNISGQILASLVMSPPKPGDDSYDSYMAERDGILSSMAKRAKTLEDALNSLEGVTCNRAEGAMYLFPRINLPQKAIEAAEAEKTAPDAFYCKRLLNATGVVVVPGSGFGQVPGTWHFRCTILPQEDKIPAIVNRLTEFHKSFMDEFRN

SEQ ID NO: 368 - protein, 695 aa, Haemophilus influenzae Rd KW20
MVMKFKMSKNVICYTWLSVCLSSAIPAFAVQPTLKPSDISIPAISEESQLATKRATTRLTQSHYRKIKLDDDFSEKIFDRYIKNLDFNHNTFLQSDIDELRQKYGTKLDEQLNQGDLSAAFDIYDVMMKRRYERYTYALSLLDKEPDLNGQDQIEIDREKAAAPQTEADANKLWDARVKNDIINLKLKDKKWSEIKAKLTKRYNLAIRRLTQTKADDIVQIYLNAFAREIDPHTSYLSPRTAKSFNESINLSLEGIGTTLQSEDDEISIKSLVPGAPAERSKKLHPGDKIIGVGQATGDIEDVVGWRLEDLVEKIKGKKGTKVRLEIEPAKGGKSRIITLVRDKVRIEDQAAKLTFEKVSGKNIAVIKIPSFYIGLTEDVKKLLVKLENQKAEALIVDLRENGGGALTEAVALSGLFITDGPVVQVRDAYQRIRVHEDDDATQQYKGLLFVMINRYSASASEIFAAAMQDYRRGIIIGQNTFGKGTVQQSRSLNFIYDLDQSPLGVLQYTIQKFYRVNGGSTQLKGVAADINFPEIIDAKEYGEDKEDNALAWDKIPSASYMEVGNINYIDNAVNILNEKHLARIAKDPEFVALNEELKVRNERRDRKFLSLNYKMRKAENDKDDARRLKDLNERFKREGKKALKDIDDLPKDYEAPDFFLKEAEKIAADFVIFNSDQKINQANGLSEAKTESKK

SEQ ID NO: 369 - protein, 548 aa, Buchnera aphidicola (Rhopalosiphum maidis)
MAAKDEKFGNEARIKMLRGVNVLADAVKVTLGPKGRNVVLDKSFGAPSITKDGVSVAREIELEDKFENMGAQMVKEVASKANDAAGDGTTTATLLAQSIVNEGLKAVAAGMNPMDLKRGIDKAVISAVEELKNLSVPCSDSKAITQVGTISANADEKVGALIAEAMEKVGNDGVITVEEGTGLQNELEVVKGMQFDRGYLSPYFINKPETGVVELENPYILMADKKISNVREMLPILESVAKSGKPLLIISEDLEGEALATLVVNSMRGIVKVAAVKAPGFGDRRKAMLQDISVLTGGSVISEELAMDLEKSTLEDLGQAKRVVINKDTTTIIGGVGEKQAIQSRISQIRQEIQEATSDYDKEKLNERLAKLSGGVAVLKVGAATEVEMKEKKARVEDALHATRAAVEEGVVAGGGVALVRVAGKISNLRGHNEDQNVGIRVALRAMEAPLRQIVSNSGEEPSVVTNNVKDGKGNYGYNAATDEYGDMIDFGILDPTKVTRSALQYAASVAGLMITTECMVTDLPKEDKTSDASSSPAGGMGGMGGMM

SEQ ID NO: 370 - protein, 144 aa, Brassica napus
  misc_feature (44)..(44): Xaa can be any naturally occurring amino acid
SNRSVPTPTMISCCAKFNAPVKPRSKRRRRQDLRILWTGTDEQXGGGGGSQKRRITSVAAAAMGSKCQHCGADKTPQWRAGPSGPKTLCNACGVRYKSGRLVPEYRPANSPTFSPEFHSNSHRKIVEMRKHVVSSDGGGRQDCG

SEQ ID NO: 371 - protein, 671 aa, Hypocrea jecorina
MARADQPQDKTKTEQRIGAYTVVRTLGEGSFGKVRLAIHNGTGQKVALKIITRKKLISRDMAGRVEREIEYLQLLRHPHIIKLYTVIKTPSEIIMVLEYAGGELFDYIVQNGRMKEAEARRFFQQMICAVEYCHRHKIVHRDLKPENLLLDENLNVKIADFGLSNIMTDGNFLKTSCGSPNYAAPEVIGGKLYAGSEVDVWSCGVILYVLLVGRLPFDDEHIPSLFAKIARGTYSMPQWMPPGAAALIKGMLVVNPVQRMTIDEIRADPWFNTDLPAYLQPPVEEFFNTGVDPNKAIKKSDIAPNAPEKVQEKLHNEVTEKISKTMGYGKDDVEEALQSDEPSAIKDAYMIVRENKLMLANNPDAGLTGDEGSPMMSISSTRSAISPGGASPRPYVTKIGILPSSLPAYHKDYMEREKNGTGHDPVTPAITINDELPVTRTEVEKEEAARRLNPHSRSALRLDESSKRPQGMTPITAPVKKPKPVRWQFGIRSRNAPWEALLCIHKALNKLGASHLRDEGYDEAQRRGVEDATSRDSSFANGAPLERDPNGHDKDPTKRYKLPADPWHIQVRWPSTSMQAGADRRDELGSKAGSPDSFVYTRGDAASRKDFVALHMDIQIYEMEQGVYLVDFKCSGYETQDGRLLEEKEVTSPFPFLDRAAKLIMQLAEAD

SEQ ID NO: 372 - protein, 383 aa, Cryptococcus neoformans var. neoformans JEC21
MPVVRFPTLAEPVSLGALQLNTRVIMASLTRNRSIPTTVPNEDNVKYYAQRAGPGRSGLILSEGTLIAHQGTEWENAPGIWDEEHANGWKKVTDAVHDKGGLIVAQLWHTGRVCHPDMIEQKRSGDPVWAPSDVGARGGKFRTLPGKPGYISDPTPIPDPTYILDQYSKAAEMAKLAGFDGVELHSANGYLIEQFLSDVSNTRTDKWGGSVENRIRFGLEAAKRLIDVWGADRVGVKISPCGGYNDTYNTTGDSRLETFKTYISRLDSLGLAYIQLMVAVLGDDHHGGKPQGFPHDIIGTYGPLIKKSKLVVNGNYTPESGEEVVKSGKAAAVVYGRNYVANPDFVKRIQQGLPLAEINMKGLYTPAVEGQNGSGYNDYPDAE

SEQ ID NO: 373 - protein, 367 aa, Pseudomonas syringae pv. phaseolicola 1448A
MSVEALFTPFRLGSLELSSRVVMAPMTRSFSPGHVPNSKVIEYYRRRAAAGVGLIVTEGTTVNHKASNGYPNVPQFFGDAPLAGWRKVVEAVHAEGGKIVPQLWHVGAVRRPGTEPDGSVPAYGPMEKVKDGQVLVHGMSKQDIDDVVAAFAQAAVDAKAIGMDGVEIHGAHGYLIDQFFWEGSNQRSDEYGGSLAKRSRFAIELIKAVRVAVGADYPIIFRFSQWKQQDYTARLVQTPEALGEFLQPLADAGVDIFHCSTRRFWEPEFEGSDLNLAGWTRKLTGKPTITVGSVGLDGEFLQFMVNTDKVAQPASLENLLKRLGNDEFDLVAVGRALLVDPDWALKVREGREQDILPFSREALTTLV

SEQ ID NO: 374 - protein, 369 aa, Pyrococcus horikoshii OT3
MEEVEKEGKKKRNRAFKGNGHDSHRGYYMITIDGSYGEGGGQILRTSVALSTITGEPVRIVNIRANRPNPGLRPQHLHAILALKHLANAEVKGAHVGSRELVFIPKKLEAKEISIDIGTAGSITLVLQALLPAMVFAREKVKFRITGGTDVSWSPPVDYLSNVTLFALEKIGIHGEIRVIRRGHYPKGGGIVEGYVEPWNEKRELVAKEYSRIIKIEGISHATNLPSHVAERQARAAKDELLQLKVPIEIRTEISRSIGPGSGIVVWAETDCLRLGGDALGKKGKPAEIVGKEAAQELLDQLKPGHCVDKFLGDQLIPFLAFSGGVIWVSEITNHLKTNIWVVESFLGRIFDVDGNVGEPGKIRVIRRV

SEQ ID NO: 375 - protein, 247 aa, Ipomoea nil
MGRGRVQLKRIENKINRQVTFSKRRTGLLKKAHEISVLCDAEVALIVFSTKGKLFEYATESCMEKILERYERYSYAERQLNSTDQNSQGSWTLEHAKLKARMEVLQRNQRHYEGEDLDSLSLKELQNLERNLIQHSNIRSKRNQLMYESILCSEKDKHCRTKYQLSKKIKEREKEMATQQQQQQEVQWEQPNDDINSSYVVPPPLVHLSSEGEYQGEGEYGETEGTQRQQQNNTSAMPQWMLSHLQG

SEQ ID NO: 376 - protein, 469 aa, Lactobacillus plantarum WCFS1
MAMLYGKHNHEAEEYLEPVFGAPSEQHDLPKYRLPKHSLSPREADRLVRDELLDEGNSRLNLATFCQTYMEPEAVELMKDTLAKNAIDKSEYPRTAEIENRCVNIIANLWHAPDDEHFTGTSTIGSSEACMLGGLAMKFAWRKRAQAAGLDLNAHRPNLVISAGYQVCWEKFCVYWDVDMHVVPMDEQHMALDVNHVLDYVDEYTIGIVGIMGITYTGQYDDLAALDKVVTHYNHQHPKLPVYIHVDAASGGFYTPFIEPQLIWDFRLANVVSINASGHKYGLVYPGVGWVVWRDRQFLPPELVFKVSYLGGELPTMAINFSHSAAQLIGQYYNFIRFGMDGYREIQTKTHDVARYLAAALDKVGEFKMINNGHQLPLICYQLASREDREWTLYDLSDRLLMNGWQVPTYPLPANLEQQVIQRIVVRADFGMNMAHDFMDDLTKAVHDLNHAHIVYHHDAAPKKYGFTH

SEQ ID NO: 377 - protein, 153 aa, Zea mays
MSLVRRSSVFDPFSVDLFDPFDSMFRSIVPSSSSAAASETAAFASARIDWKETPEAHVFKADLPGVKKEEVKVEVEDGNVLLISGQRSREEEDKGDKWHRVERSSGQFVRRFRLPENAKTEEVRAALENGVLTVTVPKAEVKKPEVKSIQISG

SEQ ID NO: 378 - protein, 57 aa, Perilla frutescens
MGRGRVQLKRIENKINRQVTFSKRRAGLLKKAHEISVLCDAEVALIVFSHKGKLFEY

SEQ ID NO: 379 - protein, 458 aa, Sinorhizobium meliloti
MMIEAKKLAARFPGDFVFGVATASFQIEGASKADGRKASIWDAFSNMPGRVYGRHNGDVACDHYNRLEQDLDLIKSLGVEAYRFSIAWPRIVPEGTGPINEKGLDFYDRLVDGLKARGIKAFATLYHWDLPLALMGDGGWTARTTAYAYQRYAKTVIARLGDRLDAVATFNEPWCSVWLGHLYGVHAPGERNMDAALAALHFTNLAHGLGVAAIRSERPELPVGIVINAHSVYPGSNSAEDKAAAERAFDFHNGVFFDPIFKGEYPEDFLSALGERMPAIEDGDMATIAQPLDWWGLNYYTPMRVSADPAKGAEYPATVNAKPVSNVKTDIGWEVYAPALGSLVETLNARYRLPDCYITENGACYNMGVENGTVDDQPRLDYISDHLAVTADLIAKGYPMRGYFAWSLMDNFEWAEGYRMRFGIVHVDYETQVRTIKKSGRWYKDLAERFPSGNHKPG

SEQ ID NO: 380 - protein, 541 aa, Arabidopsis thaliana
RFVIGQAKNLIDQSRRRQLHHHKNLSFVSLIPPFSAPSDSSSRHLSSSSSSDMSASDSSSSLPVTLDTINPKVIKCEYAVRGEIVNIAQKLQEDLKTNKDAYPFDEIIYCNIGNPQSLGQQPITFFREVLALCSYTALLDESATHGLFSSDSIERAWKILDQIPGRATGAYSHSQGIKGLRDAIADGIEARDGFPADPNDIFMTDGASPGVHMMMQLLITSEKDGILCPIPQYPLYSASIALHGGTLVPYYLDEASGWGLEISELKKQLEDARSKGITVRALAVINPGNPTGQVLSEENQRDVVKFCKQEGLVLLADEVYQENVYVPDKKFHSFKKVARSMGYGEKDLALVSFQSVSKGYYGECGKRGGYMEVTGFTSDVREQIYKMASVNLCSNISGQILASLIMSPPKPGDDSYESYIAEKDGILSSLARRAKTLEEALNKLEGVTCNRAEGAMYLFPCLHLPQKAIAAAEAEKTAPDNFYCKRLLKATGIVVVPGSGFRQVPGTWHFRCTILPQEDKIPAIVDRLTAFHQSFMDEFRD

SEQ ID NO: 381 - protein, 245 aa, Capsicum annuum
MGRGRVELKRIENKINRQVTFAKRRNGLLKKAYELSVLCDAEVALIIFSNRGKLYEFCSTSSMVKTIEKYQRCSYATLEANQSATDTQNNYHEYLRLKARVELLQRSQRNFLGEDLGTLSTKDLEQLENQLESSLKQIRSRKTQFMLDQLADLQQREQMLAESNRLLRRKLEESTAGFPVRLSWEDGADQAMHQHNRLPHTEGFLQPLGLHSSPPHFGYNPVNTDEVNAAATAHNMNGFIHGWML

SEQ ID NO: 382 - protein, 397 aa, Kluyveromyces lactis NRRL Y-1140
MLFIRQLSVIPKAPAFAKFFHTAGLVRQKLSDPNHLAILLQKNLAQRNSSLYNPELETIRCTIFDRHGNMQKPSIDLRRDELIHTHGLLPRDLRKVEKSRRNDLVPSVLVRENSILVSILNIRALVKSDMLILFDSMGIKLDSVSQQNFIADLQLRLQNRSGFEVPDVVNKDPLPYEFRAVESIFISAISNLNAELKVHLNVSTGILQDLEYSITRDKLRYLLIQNKKLSVFHKKSFLMREMIEELLEQDDVLCEMYLTEKQLGKPREEHDHAEIEMLLETYYNHVDEIVQTVGNTMSNIKTTEEIINIILDSNRNQLMLLGLRFSIGLLSLAGSIFIASIYGMNLENFIEEGNVGFPVVSTLGVILMAYLFAFSVKHLHKLEKVQLMSHGKSSTLK

SEQ ID NO: 383 - protein, 252 aa, Arabidopsis thaliana
TAYQSELGGDSSPLRKSGRGKIEIKRIENTTNRQVTFCKRRNGLLKKAYELSVLCDAEVALIVFSSRGRLYEYSNNSVKGTIERYKKAISDNSNTGSVAEINAQYYQQESAKLRQQIISIQNSNRQLMGETIGSMSPKELRNLEGRLERSITRIRSKKNELLFSEIDYMQKREVDLHNDNQILRAKIAENERNNPSISLMPGGSNYEQLMPPPQTQSQPFDSRNYFQVAALQPNNHHYSSAGRQDQTALQLV

SEQ ID NO: 384 - protein, 512 aa, Mortierella alpina
MGSLTSPTMRTTRSSSGKSSSMKTSLSAISSSSSSNSDCSDSEAVERLSISSAASVTSLEDSSSPVIAKHIKAIPKITTKNDFSVLYEPWTIGNFYKKLDWVHMLGLVFMPIYGFYMAFTSVPLQQKTAIFAVAYYFFTGLGITAGYHRLWSHRAYAAGPALQFILMIASTGAMQGSIRWWCRNHRAHHRYTDTEKDPYGAQKGLIWSHILWMLVRQDPTTVGWADVADLKANKLVRFQHDHFLWLAPLISLGLPTMVAGFGWGDYWGGFIYGGIIRQVVVHHATFCVNSLAHWLGDMPFDDRHTPRDHILTALVTLGEGYHNFHHEFPQDYRNAIRFYQYDPTKWLIAFCAFLGLASDLKRFPTNEIKKGEVRMQQQKLDRVKAGLIWGTPIDQLPVFTYEEFEALATEKGQAVTLIEGIIYDIEAFVDEHPGGRSLIKGAIGKDATTSFNGGVYDHSNAARHLLERMRVGVVAGGGFVEHRKSSTAPKQLSTIPLGSYPPASIPVVSRTA

SEQ ID NO: 385 - protein, 401 aa, Triticum aestivum
  misc_feature (226)..(226): Xaa can be any naturally occurring amino acid
  misc_feature (336)..(336): Xaa can be any naturally occurring amino acid
  misc_feature (385)..(385): Xaa can be any naturally occurring amino acid
VTLPEQVLYKKAGCYRSGIPGISSTHASAERGSNALLARAWSPGWQNADKAFTAFINGPLIDYSVNRKKADSANTSLLSPYLHFGELSVRKVFHQVRMKQLTWSNESNGDGEEGCSLFLRSIGLREYSRYLAFNHPCSHEKPLLAHLRFFPWVVNEVYFKVWRQGRTGYPLVDAGMRELWATGWLHDRIRVVVSSFFVKVLQLPWRWGMKYFWDTLLDADLESDAXLGWQYISGSLPDGRELDRIDNPQFEGYKFDPYGEYVRRWLPELARLPTEWIHHPWDAPESVLQAAGIELGSNYPLPIVELDEAKSRLQDALSEMWELEAASRAEIENGMXEEGLGDSSDEPPIAFPQELQHMEVDRATIHTPAMAGRRRADQMVPSITXSFFRAETETELSAAFE

SEQ ID NO: 386 - protein, 718 aa, Oryza sativa (japonica cultivar-group)
MSASPSSMSGAGAGEAGVRTVVWFRRDLRVEDNPALAAAARAAGEVVPVYVWAPEEDGPYYPGRVSRWWLSQSLKHLDASLRRLGASRLVTRRSADAVVALIELVRSIGATHLFFNHLYDPLSLVRDHRVKALLTAEGIAVQSFNADLLYEPWEVVDDDGCPFTMFAPFWDRCLCMPDPAAPLLPPKRIAPGELPARRCPSDELVFEDESERGSNALLARAWSPGWQNADKALAAFLNGPLMDYSVNRKKADSASTSLLSPYLHFGELSVRKVFHQVRMKQLMWSNEGNHAGDESCVLFLRSIGLREYSRYLTFNHPCSLEKPLLAHLRFFPWVVDEVYFKVWRQGRTGYPLVDAGMRELWATGWLHDRIRVVVSSFFVKVLQLPWRWGMKYFWDTLLDADLESDALGWQYISGSLPDGRELDRIDNPQLEGYKFDPHGEYVRRWLPELARLPTEWIHHPWDAPESVLQAAGIELGSNYPLPIVELDAAKTRLQDALSEMWELEAASRAAMENGMEEGLGDSSDVPPIAFPPELQMEVDRAPAQPTVHGPTTAGRRREDQMVPSMTSSLVRAETELSADFDNSMDSRPEVPSQVLFQPRMEREETVDGGGGGGMVGRSNGGGHQGQHQQQQHNFQTTIHRARGVAPSTSEASSNWTGREGGVVPVWSPPAASGPSDHYAADEADITSRSYLDRHPQSHTLMNWSQLSQSLTTGWEVEN

SEQ ID NO: 387 - protein, 150 aa, Oryza sativa
MSLVRRSNVFDPFSLDLWDPFDSVFRSVVPATSDNDTAAFANARIDWKETPESHVFKADLPGVKKEEVKVEVEEGNVLVISGQRSKEKEDKNDKWHRVERSSGQFMRRFRLPENAKVDQVKAGMENGVLTVTVPKAEVKKPEVKAIEISG

SEQ ID NO: 388 - protein, 548 aa, Buchnera aphidicola (Rhopalosiphum padi)
MAAKDVKFGNEARIKMLRGVNVLADAVKVTLGPKGRNVVLDKSFGAPSITKDGVSVAREIELEDKFENMGAQMVKEVASKANDAAGDGTTTATLLAQSIVNEGLKAVAAGMNPMDLKRGIDKAVISAVEELKNLSVPCSDSKAITQVGTISANADEKVGALIAEAMEKVGNDGVITVEEGTGLQNELEVVKGMQFDRGYLSPYFINKPETGVVELENPYILMADKKISNVREMLPILESVAKSGKPLLIISEDLEGEALATLVVNSTRGIVKVAAVKAPGFGDRRKAMLQDISVLTGGSVISEELAMDLEKSTLEDLGQAKRVVINKDTTTIIGGVGEKQAIQSRISQIPQEIQEATSDYDKEKLNERLAKLSGGVAGLKVSAATEVEMKEKKARVEDALHATRAAVEEGVVAGGGVALVRVAGKISNLRGHNEDQNVGIRVALRAMEAPLRQIVSNSGEEPSVVTNNVKDGKGNYGYNAATDEYGDMIDFGILDPTKVTRSALQYAASVAGLMITTECMVTDLPKEDKTSDASSSPAGGMGGMGGMM

SEQ ID NO: 389 - protein, 646 aa, Xanthomonas axonopodis pv. citri str. 306
MCGLAGMLLASPRLHGEQLDALVRPMGAALRHRGPDDAGTWCDAQAGVALAHQRLSILDLSPLGHQPMRSADGRYVLAYNGEVYNFAQLRAALSALGHRFRGHSDTEVLLAAVVEWGLDETLTRCNGMFAIALWDERDNCLFLARDRVGKKPLYYGWAGDTLVFGSELKALWQHPDFDNGVDRDALTLLLRLGYIPAPACIHEHTFKLMPGRVLRIDAQAVAAGAAAHRPDQAQQPFWNAREAMQRALATPFTGTDAQAEEQLDRVLRDAVALRMVADVPVGVFLSGGTDSSIVTAMMQAQSAQPVHTFSIGFEGSHHDEAPLAREVATHLCTDHTELYVSGADALAVVPNLPDMFDEPFADASQVPTALVARLARGGVTVALSGDGGDELFFGYGRYQRALRNWRMHGLVPGPLRRLMAVAARRNGESSRTGGLAALVAEAGARGIGDIYRNRISRWRDPAAVVLGATEPDSFYSLADPLHGSGTPADAMMLADFAAYLPDDLLCKVDRTTMAVGLEARAPLLDWRVAEFAWSLPLSLKYRDGVSKYLLKRVLCRYLPDAMVYRGKRGFGAPVSAWLRGDLHGWADDLLAHGALQREGVFAADSVARLWRDFNGGERKWHTHLWTVLMFQAWQAHWREQRAAVVR

SEQ ID NO: 390 - protein, 437 aa, Arabidopsis thaliana
MANDYVSTVLLLLSLLIFLSQRTDSASIVKSLPGFDGPLPFELETGYIGVGEEEEVQLFYYFIKSERNPQEDPLLLWLSGGPGCSSISGLLYENGPVNVKIEVYNGTLPSLVSTTYSWTKVSSIIYLDQPVGTGFSYSRTKLVNKPSDSGEAKRIHEFLHKWLGKHQEFSSNPFYVGGDSYCGMVIPALVQEISKGNYVCCKPPINLQGYILGNPSTENEVDINYRIPYAHGMALISDELYESMKRICKGKYENVDPRNTKCLKLVGEYQKCTKRINKALIITPECVDTSPDCYMYRYLLTTYWANDENVQRALHVNKGSIGEWVRCYFEIPYNHDIKSSVPYHMNNSIDGYASLIFSGDHDMEVPYLGTQAWIRSLNYSLIDDWRPWMIGDQIAGYTRTYANKMAFATIKGGGHTPEYKPEESYIMFQRWISGQPL

SEQ ID NO: 391 - protein, 714 aa, Cryptococcus neoformans var. neoformans B-3501A
MAQMLNQAVTAVTGDAKYRQMAENTIEQTSKTPLTTYFGVKVPETDVALRAGARGPTLLEDFHNREKIQHFDHERIPERVVHARGSAAHGEFKLHTPLTGITTAKVLTDTSKVVPAYVRFSTVVGSRGSADTVRDVRGFATRFYTDEGNWDLVGNNIPVFFIQDAIKFPDVIHALKPEPHNEMPQAQTAHDNAWDFISLHQQATHMQQWVTSDRAIPRSYRMMQGFGVHTFRLINEEGKSTFVKYHWIPHLGIHSLVWDEALKIAGQDPDFHRRDLWDAIEAKAYPKWELGVQLIKEEDEHKFDFDILDSTKIIPEELVPVQKIGTLTLTRNPVDFFAEVEQVAFCTQHIVPGMDFTDDPLLAGRNFSYADTQISRLGANWHDLPINRPICPVMTNFRDGQMSMFSKTNRTPYHPNRHDSLPLTSSNNGGFQSYREKISGVKERLNGPKFQEFYSQATLFWNSMSETEREHIIAAYNFELSHCAEDIVIQNVINSLNEIDHGLATSVHATFPHLTLPEAKPTHNKKSEYLSQINGKHQVFTASGRRIGIYLVPGYTYSQVVPLLAAFEADGCMVKFIGPTLGPIKASNGQSFTAEFTFEGCRTTFFDAIVFVGGPDDSFIAKLKIGRLIHAAREAYMHLKPIGVLGNATQWMVNTCLPGDFSEKTKTESSVVVENGVVFAPGDPTLHSIKFAKQFLEGVAHHRVWDRQVAHIAA

SEQ ID NO: 392 - protein, 268 aa, Brassica napus
  misc_feature (213)..(213): Xaa can be any naturally occurring amino acid
IPGVDPRRPNKDVIRKKVYVCPEPNCVHHHPSRALGDLTGIKKHFFRKHGEKKWKCDKCSKKYAVQSDWKAHAKTCGTKEYKCDCGTLFSRRDSFITHRAFCDALAEESARAIPNPILIQSSSPHQTQHNINFSSSSQNITSHNNNPHGHDELPMKQEEPHHHFHNIPPWLISSNPNPNGNNANYFPLASSSANFHHPSPAMSATALLQKAAXMGPSKSTTTPEEDEKSSYNKLITTTMAASMMTSPSEPGFGFQDYYMMNHHAHHHD

SEQ ID NO: 393 - protein, 481 aa, Glycine max
MPPKPLDYGSINENVKKSQYAVRGELYLRASELQKEGKKIIFTNVGNPHALGQKPLSFPRQVVALCQAPFLLDDPNVGLLFPADAIARAKHYLSLTSGGLGAYSDSRGLPGVRKEVAEFILRRDGYPTDPELIYLTDGASKGVMQILNTIIRGQDDGILVPVPQYPLYSATIALLGGTLVPYYLEETANWGLDVNELRQSVEQARFKGITVKAMVIINPGNPTGQCLSEANLREVLQFCYQENLALLGDEVYQTNIYQDERPFISSRKVLMDLGPPISKEVQLISFHSVSKGYYGECGQRGGYFEMTNIPPETVDEIYKVASISLSPNVPAQIFMGVMLHPPQPGDISYDKFVRESTGILESLRRRARLMTDGFNSCRNVVCNFTEGAMYSFPQIRLPPRALEAAKQAAKVPDVFYCLKLLEATGISTVPGSGFGQREGVFHLRTTILPDEEDMPAIMDSFKKFNDEFMEQYEDNRGYSRL

SEQ ID NO: 394 - protein, 57 aa, Perilla frutescens
MGRGRVQLKRIENKINRQVTFSKRRSGLLKKAHEISILCDADVGLIVFSTKGKLFEY

SEQ ID NO: 395 - protein, 536 aa, Deinococcus radiodurans R1
MSDENNKGVGTAVQGVGGPRDGRTAPGEQGTTLTTRQGHPVHDNQNSRTVGSRGPMTLENYQFIEKLSHFDRERIPERVVHARGVGAHGVFRATGKVGDEPVSKYTRAKLFQEDGKETPVFVRFSTVGHGTHSPETLRDPRGFAVKFYTEDGNWDLVGNNLKIFFIRDALKFPDLIHSQKPSPTTNIQSQERIFDFFAGSPEATHMITLLYSPWGIPASYRFMQGSGVNTYKWVNDQGEGVLVKYHWEPVQGVRNLTQMQADEVQATNFNHATQDLHDAIERGDFPQWDLFVQIMEDGEHPELDFDPLDDTKIWPREQFPWRHVGQMTLNRNPENVFAETEQAAFGTGVLVDGLDFSDDKMLQGRTFSYSDTQRYRVGPNYLQLPINAPKKHVATNQRDGQMAYRVDTFEGQDQRVNYEPSLLSGPKEAPRRAPEHTPRVEGNLVRAAIERPNPFGQAGMQYRNFADWERDELVSNLSGALAGVDKRIQDKMLEYFTAADADYGQRVREGIQAKEAEMKGQKQEAPVYGTEASSLY

SEQ ID NO: 396 - protein, 126 aa, Zea mays
  misc_feature (92)..(92): Xaa can be any naturally occurring amino acid
MSLATAKDVVGRKIFVVFYMTSDGSDIEHINAQNDGHTDSAHDRHGAPVEGKITHHRVKLQHDVNRHDKALCTHYINVADSIHAYMYEDLLXIVSLQYQTIHIRQILDTCNLVEVHNIGACWREDD

SEQ ID NO: 397 - protein, 1400 aa, Frankia sp. EAN1pec
MSADASPDRQQFPASAGDSGGPPAGATATLPVNGTGTGAATGPGGGTDALLSSLLTGLDRLVDGEFGVRLPIGDGVGGDVARRFNELAGMQERHAREVSRVSKVIRRDGRLTLRMDDLGGSGGWDELTLSVNSLIDDLARPTHEVARVIAAVAEGDLSQQMALEIAGQPVRGEFLRIGTTVNTMVDQLSSFADEVTRVAKEVGTEGNLGGQAKVMGVSGVWRDLTESVNSMAGNLTSQVRNIAQVTTAVAQGDLSQKITVDARGEIHELKSTVNTMVDQLSAFADEVTRMAKEVGTEGKLGGQAQVKGVSGVWRDLTDSVNVMAGNLTTQVRSIAEVAAAVARGDLTRQITVDARGEVAGLAHTLNTMVDQLSSFADEVTRVAWEVGTEGNLGGQAHVRGVSGVWRDLTESVNSMAGNLTSQVRNIALVATAVARGDLSQKITVTAQGEILELKETLNTMVDQLSSFADEVTRVAKEVGTEGNLGGQAHVRGVSGVWRDLTESVNSMAGNLTSQVRNISAVTRAVARGDLSQKITVTAQGEIAELKDTVNTMVDQLSSFAAEITRVGREVGVEGKLGGQATVAGVAGTWKDLTDNVNQLASTLTIQLRAIGDVSTAVTRGDLTRSITVEAEGEVAELKDNINQMIARLRETTEVNAQQDWLKSNLALIGSKMQGQRDLYTVCQMIISEMTPAVNAQQGTVYLLDFIEGDKLRYVAGYGSVPRRRSDGTFLFGEGLIGQAALEKKRIRVEDVPAGYLNIRSGLGEAPPCDLVVVPVIFENQVLGVIELASFTPFSDLHLTLVDQLVDTIGVVLNTIMANARTEELLAQSQRLTQELRSQSVELQRTNNELEEKAALLEEKNQEIELARIGLEEKAEQLALSSQYKSEFLANMSHELRTPLNSLLILAKLLADNPDHNLSQKQIDFAETIHSAGSELLGLINDILDLSKVEAGKMNVDAGPVRTAALCDAVAGVFGPTAEEKGLTFEISVTEDVPDEFVTDEQRIQQVLKNLLSNAVKFTDAGTVRLDVAVASPDTPFVAPSLRSAPMVLSFAVTDTGIGVAAEKLRMIFEAFQQADGTTSRRYGGTGLGLSISKEIARLLGGSIAVSSQIGQGSTFTLFVPSVMPPEAPAGPHPGEPDGVLMIVDGAVQPRSRTDGGDDGRGPVLAGVERAALVPAERRPAAPESPGDAAHRESAGPAPAGTSNGAGTGRQRDGERVYGAPGRPVEPKAARRLARTSWSGRGGTDAAGDRTPAEGTPFLTDPQAPARPPTTNLDGGDPLVGASILVVDDDVRNVFALTSALEMHGMRVLYADNGHDAIRMLQQDNAPVHLVLMDVMLPGMDGNETTSEIRAMPAFAALPILVLTAKAMPGDREKSISAGASDYITKPVDLDHLLGVMRSYL

SEQ ID NO: 398 - protein, 379 aa, Solanum tuberosum
MANQTGGASSTGSRDIRGVLIHGGQYVRYNVYGSLFEVSSKYVPPIRPIGRGAYGLVCAAVNSETREEVAIKKIGNAFDNRIDAKRTLREIKLLRHLDHENIVAIKDLIRPPKKEAFNDVYIVSELMDTDLHQIIRSEQPLTNDHCQYFMYQLLRGLKYVHSANVLHRDLKPSNLFLNANCDLKIGDFGLARTTSETDFMTEYVVTRWYRAPELLLNCSEYTGAIDVWSVGCILGEIMTREPLFPGKDYVQQLRLITELLGSPDDASLQFLRSDNARRYVRQLPQYPKQQFSARFPSMSPLAVDLLEKMLVFDPTRRITVDEALCHPFLSSLHDLNDEPICPSPFSLDFDEPSITEEKIKELIWRESVKFYPDFVDQNI

SEQ ID NO: 399 - protein, 374 aa, Oryza sativa (japonica cultivar-group)
MVNQAAMPLLTPYKQAGGKIDLSHRVLLSPMTRCRSYGNVPQPHAALYYTQRATSGGLLITEATGVSDTAQGYPETPGVWTREHVEAWKPIVDAVHRKGALFICQLWHVGRVSTNDYQPNGQAPISSSDIQITPDGSGIVYSKPRRLRVDEIPQIVDDFRLAARNAIEAGFDGVEIHGANGYLLEQFMKDSSNDRTDEYGGSLENRCRFAVEVIDAVVGEIGAHRVGIRLSPFLDFMDCVDSDPEALGSYMVEQLNKHEGFLYCHMVEPRMAIVDGRRQIQHGLLPFRKAFKGTFIAAGGYDREEGNKVIENGYTDLVSFGRLFLANPDLPKRFELDAPLNKYDRNTFYTQDPIVGYTDYPFLDEDQNNSVADA

SEQ ID NO: 400 - protein, 484 aa, Xanthomonas axonopodis pv. citri str. 306
MLRSLIVCCRVRMSYAIVWFRRDLRLEDNPALRAALDAGHHPIPLYIDAPHEEGEWTPGAASRTWRHRSLAALDGALRALGSGLVIRVGNSAQVLDEVIAQTGAVAVYWNRKYEPATQPRDAQIKRDLRERGIEVQSCNCALLFEPWQLSTQQGGPYKVFTPFWRNALTQLQLPAAIGAPRSLPPLPASLKTDALDTLQLVPGLQWDQGFWEHWQPGEAGAHEMLEIFIDGALSGYRENRDRPDRVGTSQLSPHLHFGEIAPWRIANTLETHRTARNGAEIDAYIRQLGWRDFAYHLLHHFPDTTNQNLNPRFAGFDWATVDPVALQAWQRGRTGIPIVDAGMRQLWHTGWMHNRVRMIVASFLCKHLRIHWIEGARWFWDTLVDADLANNTLGWQWVAGTGADAAPYFRVFNPVTQAEKFDPQAAYITRWVPELGKLAVKERFAPWLHPLSLARLAPEYPRTPIIGLAEGRDAALAAYAKTRG

SEQ ID NO: 401 - protein, 480 aa, Arabidopsis thaliana
MVRRQEEEKKAEKGMRLGKYELGRTLGEGNFGKVKFAKDTVSGHSFAVKIIDKSRIADLNFSLQIKREIRTLKMLKHPHIVRLHEVLASKTKINMVMELVTGGELFDRIVSNGKLTETDGRKMFQQLIDGISYCHSKGVFHRDLKLENVLLDAKGHIKITDFGLSALPQHFRDDGLLHTTCGSPNYVAPEVLANRGYDGAASDIWSCGVILYVILTGCLPFDDRNLAVLYQKICKGDPPIPRWLSPGARTMIKRMLDPNPVTRITVVGIKASEWFKLEYIPSIPDDDDEEEVDTDDDAFSIQELGSEEGKGSDSPTIINAFQLIGMSSFLDLSGFFEQENVSERRIRFTSNSSAKDLLEKIETAVTEMGFSVQKKHAKLRVKQEERNQKGQVGLSVTAEVFEIKPSLNVVELRKSYGDSCLYRQVCHYCHFLIRLKKHISKIKMFMFDIGVGAVVRETIKRRGHILAGARDSNLGVGVFG

SEQ ID NO: 402 - protein, 130 aa, Sorghum bicolor
ARVVPLVAALLVLLALAVSSTRNRNAQEGEESMALDGGIKDVPANENDLHLQELARFAVDEHNKKANALLGYEKLVKAKTQVVAGTMYYLTVEVKDGEVKKLYEAKVWEKPWENFKELQEFKPVEEGASA

SEQ ID NO: 403 - protein, 282 aa, Lactobacillus plantarum WCFS1
MTVLTTMYQLANGVNIPKVAFGTWQIPGGEATYQAVRAALAAGYRHIDTALAYQNEASVGQAIRDSGIPREQIFVTTKLPAETKSYQGALNDFDRSLKNLGLDYVDLYLVHAPWPWGQVGRVYDEANLDVWQAMEAIYQSGRAKAIGVSNFAVRDLKNILNQATIPPMVNQIQYYLGFTEPKITKFSEEHAMLVEAYSPLATGGVLDNPQVQAYADKYGVSVAQLALRFVLQNGVLPLPKAVNPAHIEANTQLDFAISVADMQALNDLPDAAGSYMHNPTQG

SEQ ID NO: 404 - protein, 436 aa, Arabidopsis thaliana
MSEEQPHANLAVPAFKTEKEPITQTRNGQSSVWRFGGSDKAAKASTVTLRGVIYMLFDNCGKDVNKTILPLGHGDPSVYPCFRTCIEAEDAVVDVLRSGKGNSYGPGAGILPARRAVADYMNRDLPHKLTPEDIFLTAGCNQGIEIVFESLARPNANILLPRPGFPHYDARAAYSGLEVRKFDLLPEKEWEIDLEGIEAIADENTVAMVVINPNNPCGNVYSHDHLKKVAETARKLGIMVISDEVYDRTIFGDNPFVSMGKFASIVPVLTLAGISKGWVVPGWKIGWIALNDPEGVFETTKVLQSIKQNLDVTPDPATIIQAALPAILEKADKNFFAKKNKILKHNVDLVCDRLKDIPCVVCPKKPESCTYLLTKLELSLMDNIKDDIDFCVKLAREENLVFLPGKIMKLSSMSLDLSFDTKMGFVGNVLQGMLWV

SEQ ID NO: 405 - protein, 594 aa, Kineococcus radiotolerans SRS30216
MCGLCGEVRFDGRAADVAAVQRMSETMAARGPDGEGVWAQGRVAFGHRRLSVIDLSACGAQPMQDPELGLTAVFNGCIYNYPELRAELAGHGYRFTSTSDTEVIVKGYHRWGVDVVDHLVGMFAVVLHERDSGRVVLMRDRLGIKPLYLAETPGRLRFASTLPALLAGGDVDTTIDPVALHHYLSWHAVVPAPRTVLQGVRKLPPATVRVLEADGTSREHRYWAPDHVRREEFAGFSERDWEDAVLESLRTAVRRRTVSDVPVGVLLSGGLDSSLITALLAEQGQTDLATYSIGFESVGGRGGDEFEYSDVIAERFATDHHRIRVSGDELVGALGHAVGAMSEPMVSHDVAAFDLLSQQVSQSIKVVQSGQGADEVFGGYHWYPPLAGLTPQQGVDVYARAFFDRDHAGMAQVLDPRWLTATDVSREFLAEHFARPGADTAVDAALRLDTEVMLVDDPVKRVDNTTMAWGLEARVPFLDHELVELAAAVPPELQLSGGGKGILKRVGYRVIPREVIDRPKGYFPVPAITHLEGKVLGTVKDALTSRAAQDRGLFRPEYVQGLLRDPNGELTPLRGNKLWQLGLLEMWLQQHGIG

SEQ ID NO: 406 - protein, 686 aa, Pseudomonas aeruginosa PAO1
MAFEAMFQPIQIGKLTIRNRVLSTAHAEVYATDGGMTTERYVKYYEEKAKGGIGLAICGGSSVVAIDSPQQWWSSVNLSTDRIIPHFQNLADAMHKHGAKIMIQITHMGRRSRWDGYHWPTLMSPSGIREPVHRATCKTIEVEEIWRVIGNYAQAARRAKEGGLDGVELSAVHQHMIDQFWSPRVNKRTDEWGGSFEGRMKFGLEVLKAVRAEVGEDFCVGMRICGDEFHPDGLSHEDMKQIAKYYSDTGMLDFIGVVGSGCDTHNTLANVIPNMTFPPEPFLHLAAGIKEVVDVPVLHAQNIKDPNQATRILEGGYVDMVGMTRAHIADPHLIAKIKMGQVDQIKQCVGANYCIDRQYQGLDVLCIQNAATSREYMGVPHIIEKSAGPKRKVVVVGGGPAGMEAARVAAERGHDVTLFEKKEQLGGQITTAAKAPQRDQIAGITRWYQLELARLGIDLRLGTAADPETILDLRPDVVVLANGGHPFLEQNEHWGAAEGLVVSSWDVLDGTVEPGKNVLVYDTICEFSGMSVADFLADKGAQVEIVTDDIKPGVAIGGTTFPTYYRSMYPKEVIMTGDLMLEKVYREGDKLVAVLENEYTGAREERVVDQVVVENGVRPDESLYYALKQGSRNKGQIDVEALFAIQPQPCLSQPGEGYLLFRIGDCVAQRNTHAAIYDALRLCKDF

SEQ ID NO: 407 - protein, 159 aa, Yarrowia lipolytica CLIB122
MRHIIDYIDHPFRGVGDLTMSSPFLDNSLTRSPTSSQAPQLPSSFKFVPQMDLYNKPDRIRVSMSLPGVKMDDIVVEFEDEARVLSVSGETCSETDKDSLGLVINERQCGEFERRIRIPQGENIDPDHITAKLTNGVLEVVIPKIEGKPEPKKVNVDKE

SEQ ID NO: 408 - protein, 626 aa, Pediococcus pentosaceus ATCC 25745
MCGFAGYINQANVNKDTIKSMADRIKHRGPDDEAFFQDENASMGFRRLSIIDLAHGRQPMMNSAETKVLTFNGEIYNYKQVREELKELGYEFRTDVDSEVLIHGYDAWGPELLKKLRGMFAFVIYDKEKQEVFGARDHFGIKPLYYYDDDKTFLWGSEIKSFLEHPNFVKEFNEELLPIHLSFEFIPSKETMFKNVYKLLPGTYFIHKNGKTETHTYFKFNYDHIDESQTIEEDSKKIRKIVSDSVDAHMIADVEVGSFLSSGIDSSYVLAEAAKLKPIQSFSLGFRNSKYSELSYSTEFAKEINQKNTPLYMDGDDYFDILPTIMYYMDEPLSNPSAMQLFYLSKGTRKNVKVALSGEGADEFFGGYNTYLEAFTFERYQKMVPSFIRKGLAKAVSGLPRFHGRRFLMRGAQPLSERYYRVNYVFNQQERDQILRNPALNVDSGAYTQHIFDEVKGKDEMTQMQYFDINTWLPFDILHKADRMSMANSLEVRTPLVDREVAKFAATMPIKTRIHKEETKVSLRRAAEAELPERVAKKEKLGFPSPIANWIKEDKYRKRIEAAFNSDIAKKFFKPEALMHILDEHVNGKSSMQKIFTIYTFILWYGVFFPEDTNTNTIDLVKRTQV

SEQ ID NO: 409 - protein, 402 aa, Streptomyces avermitilis MA-4680
MEFRQSSKLSEVCYEIRGPVIEHANALEEAGHSVLRLNTGNPALFGFEAPEEILQDMIRMLPRAHGYTDSRGVLSARRAVAQRYQDRGLEVDVDDVFLGNGVSELVSMAVQALIEDGDEVLIPAPDFPLWTAVTTLAGGKAVHYLCDEQADWYPDLADMAAKITDRTRAVVIINPNNPTGAVYPKEIVEGILDLARRHGLMVFADEIYDQILYDDAVHHSAAALAPDLVVLTFCGLSKTYRVAGFRSGWLVVTGPKQHARSYLEGLTMLASMRLCANAPAQYAIQAALGGRQSIQELTAPGGRLYEQRDRAWQKLNEIPGVSCVKPKGALYAFPRIDPTVHKIHDDEKFVLDLLLREKIQVVQGTGFNWPRPDHFRILTLPHADDLDAAISRIGRFLSGYRQ

SEQ ID NO: 410 - protein, 350 aa, Neurospora crassa
MSTFTTNGAGAENDGEKVNTHIVTLTRFLTEEQVKHKEATGDFTLLCHALQFSFKSIAYYIRRATLVNLTGLAGSSNTTGDEQKKLDVISNDLFIEAMRSSGKCALLVSEEEEHVIYFKDAKNARYAVACDPIDGSSNLDAGVSVGTIFAIHKLAEDSTGTKEDILKPGTELVAAGFTMYGASAQLVITMKGGSVNGFTLDQGVGEFILTHPNMTIPRKRSIYSVNEGNSLYWEDDVKAYFNSLKETQEDSGKPYSARYIGSMVADAYRTLLYGGMFAYPADKKSPKGKLRILYECAPMAMIFENAGGQAVDSKMNRMLEVVPEHIHDKAGIFMGSYDEVEKVKKYHGKA

SEQ ID NO: 411 - protein, 412 aa, Arabidopsis thaliana
MGLFGTKKIGKYEIGRTIGEGNFAKVKLGYDTTNGTYVAVKIIDKALVIQKGLESQVKREIRTMKLLNHPNIVQIHEVIGTKTKICIVMEYVSGGQLSDRLGRQKMKESDARKLFQQLIDAVDYCHNRGVYHRDLKPQNLLLDSKGNLKVSDFGLSAVPKSGDMLSTACGSPCYIAPELIMNKGYSGAAVDVWSCGVILFELLAGYPPFDDHTLPVLYKKILRADYTFPPGFTGEQKRLIFNILDPNPLSRITLAEIIIKDSWFKIGYTPVYHQLSDSIKDNVAEINAATASSNFINAFQIIAMSSDLDLSGLFEENDDKRYKTRIGSKNTAQETIKKIEAAATYVSLSVERIKHFKPKEIRSRSSYDLLSAEVIEVTPTNCVIEISKSAGELRLYMEFCQSLSSLLTAEVS

SEQ ID NO: 412 - protein, 706 aa, Trichodesmium erythraeum IMS101
MLQERIDIHPTHSHGDFKLRSGKPFPFGATMVSGGVNFSIFSSYATSCTLVLFQKGALKPMAEIPFPEEFRIGNVYCMIVFDLDVENIEYGYRMDGPNNFHEGQWFDKSKILMDPYAKIIGGRDVWGKTPNWDDIYQHRGRIPYDDFDWENDRPLEIPPQDQIIYEMHVRSFTAHPSSGVKHPGTFAAIREKIPYLKELGVNAVELMPIYEFDEFENSRPSPITGEMLYNYWGYSTVGFFAPKAGYAATGKLGMQMDELKTLVKDLHKNGIEVILDVVFNHTAEGNENGPTISFRGIDNKTYYMLTPEGYYFNFSGCGNTINCNNPIVRNVVLDCLRYWASEYHIDGFRFDLASILGRDPWGAPLANPPLLETLAFDPILANCKLIAEAWDAGGLYQVGSFPAFGRWAEWNGKYRDAIRKFIKGDCTVGEMAQRIQGSPDLYAWQGRGPATSINFITAHDGFTLADLVSYNDKHNEANGENNNDGANDNESWNCGAEGWSDDPGINALRSRQMRNAIAIMMVSQGVPMLLMGDEIGRSKNGNNNTYCHDSELNWLNWELLETNAELFRFVKNCVAFRKAHPILKNQNHFRNQDYVGSGKSDITWHGTQAWNADWSDNSRTLAFMLCGKHATEVTKQDNDIYVAMNMHWDSLWFNIPGLSDGKHWHIFVNTACASPEDVWELGSEPVLENQHGLLLGDRSIVILVSK

SEQ ID NO: 413 - protein, 543 aa, Clostridium botulinum
MAKSILFGEESRRAMQAGVDKLANAVKVTLGPKGRNVVLDKKFGSPLITNDGVTIAKEIELEDPYENMGAQLVKEVATKTNDVAGDGTTTATLLAQAIIREGLKNVTAGANPMLIRKGIKLAVDTAVEQIKKSSKQVDGKEDIARVAAISAADPEIGKLIADAMERVGNEGVITVEESNTMATELEVVEGMQFDRGYLSPYMVTDAEKMEAVLENPYILLTDKKISNIQEILPILEQIVQQGKKLLIIAEDIEGEALATLVVNKLRGTFTCVAVKAPGFGDRRKEMLRDIAILTGGEVISEELGREIKDVTLDMLGTAESIKVTKENTTIVNGKGSKAEIEDRIGQIKRQIEETTSEFDKEKLQERLAKIAGGVAVVKVGAATETELKERKLRIEDALAATKAAVEEGIVAGGGTAYLRAIKEVEKLTDNNSEIRLGIAIIRRALEEPVRQIASNAGLEGSVIIDKIMNGQEGMGFDALEGEYVNMVQKGIVDPAKVTRSALQNAASVASTFLTTECVVAEIPEKNPAPQAPGMGGMGMEGMY

SEQ ID NO: 414 - protein, 375 aa, Lactobacillus plantarum WCFS1
MKGCFIVTSFNEPLKFKSGVTLRNRLMMSPMTTTQSFYNGSITHDEIDYYTQRATGLGAVITGAANVEDLGKGWHGELSIAHDTMLPGLSALAHGIQSQGAKAIVQIFHAGRMTHRAVLNGEQIVSASAVAALRDDAETPRAMSIDEIHATISAFGEATRRAIQAGFDGIELHGANTYLIQQFFSPHSNRRTDEYGGRTPQERFRFIDELLKAVFAAVDQYADRPFIVGYRFSPEEFEEPGIRLEDTLWLLSQLRESRLDYVHVSLNNYDRVSRDPQYQDKSIMTYVHEALQGKLPLVGVGGVRTRDDVKTVLQTAELVAVGQQLLYDPTWAVKLAKNADNTMVTAPFEEAVEVTPLSRPLYEFAASRYHSVINS

SEQ ID NO: 415 - protein, 475 aa, Magnaporthe grisea 70-15
MASSSSSVPELAAAFPDGTTDFKPMRNTKGYDVSKPHISETPMTLKNWHKHVNWLNTTFILFVPLAGLISTYWVPLQWKTAVWAVVYYFNTGLGITAGYHRLWAHSSYKASLPLKIYLAAVGAGAVEGSIRWWSNGHRAHHRYTDTEKDPYSVRKGLLYSHMGWMLLKQNPKKQGRTDITDLNEDPVVVWQHRNFLKCVIFMALVFPTLVAGLGWGDYWGGFIYGGILRVFFVQQATFCVNSLAHWLGDQPFDDRNSPRDHVITALVTLGEGYHNFHHEFPSDYRNAIEWYQYDPTKWSIWIWKQLGLAHNLKQFRQNEIEKGRVQQLQKKLDQKRAKLDWGIPLEQLPVVSWDDFVEQSKNGKAWIAVAGVIHDVGDFIKDHPGGRALINSAIGKDATAIFNGGVYNHSNAAHNLLSTMRVGVLRGGCEVEIWKRAQSENKDVSTVVDSSGNRIVRAGGQATKVVQPVPGAQAA

SEQ ID NO: 416 - protein, 418 aa, Glycine max
MEDGSEKWNFQGNKKLNASSISVRGVYNMLMERVNNSRDKKPLVPLCRVDPTENPLFRTTPEATDSVSTAVNSYNFNCYPPTVGLPDAKRAIANYLSSDLPYQLSPENVFLTIGGTQAIDIILPALARSDANILLPRPGYPQYDSRASCCLLEVRHFDLLPERGWEVDLDSLESQADENTVAMVLINPSNPCGNVFTYQHLKRVAEIARKLGIFVISDEVYAHVTYGSNPFVPMGVFSSIVPVITIGSLSKRWLVPGWRTGWIATCDPHGIFQKTGVVKSIISYLEITTDPPTFLQAAIPEILGKTKDDFLSKNLNILRETANIFYDLCKEIPCLTCPHKPEGAMCVMVEINFSQIKDIVDDMDFCAKLAEEESVLLLPGVTVGLKNWLRISFAVDTSNLVEGLSRIKAFCLRYAKMP

SEQ ID NO: 417 - protein, 432 aa, Sinorhizobium meliloti 1021
MPITAISDKLSVSPQLSVEDIPSLRDKGFKTLINNRPHKEDTFQPNTQAERQEVKHCGLTYAFIPVTADTITEADVRAFQRAVDESDGPVLAHCQTGGRSLNLYLIGEVLDGRMSADEADAFGRSRGFDTSVAAAWLKQHAARRPQVKGFFDKRTWSVQYVVSDPETGKCAIIDPVLDFDERAGATATINADAILDYVRDNGLTVEWILDTHPHADHFSAAQYLKEKTGAQTAIGERVVDVQKLWQKIYNWPELATDGSQWDRLFADGEDFKIGSIDAKVLFSPGHTLASITYVIGDAAFVHDTLFLPDSGTARADFPGGDARVLWNSIQEILALPDETRIFTGHDYQPDGRAPRWESTVAEQKKSNPHLAGVSEKEFVALRTKRDKTLPMPKLILHALQVNICGGRLPEPEANGKRYLKFPLDALQGAAWE

SEQ ID NO: 418 - protein, 363 aa, Novosphingobium aromaticivorans DSM 12444
MTLPSLFRPAALPGLDLPNRLVMAPMTRRMSPGGIPGADVAAYYRRRAEGGVGLIITEGTGIADPAALAERDVPEFHGDALRGWSTVVDEVHAGGAKIFPQLWHVGSARRPDMTNTPEVPAVSPAGLFAPGQPNGEALDEARIGRIITAYGEAAAQALRMGFDGIELHFAHGYLVDQFLWEPTNGRADGWGRTPWLLAREVVAECRRQTNPDFPICMRFSQWKQQDYGARLFADPACLEAFLGPMVDAGVDMFHCSTRRFWEPEFAGSRMNLAGWTRRLSGKPVITVGSVGLDEDFLVTRVGDDPTADGARLELLEDMLATGEVDLVAVGRALIGDPQWSAKVREGRFDQIRTFTRDDLARLD

SEQ ID NO: 419 - protein, 687 aa, Oceanobacillus iheyensis HTE831
MSDQDNQQEKRKQDDNKKIDQLKKFYRDNTDKIMTTDEGVKISNDENTLSAGDRGPQLLEDFMYREKLAHFDRERIPERNVHARGYGAHGVFECYESQSDLTKAHFLQKAGQQTPVFVRFSQVAGSKGANETLRDVRGFATKFYTNEGNFDLVGNNIPIFFIQDGIKFPDLIHALKPEPNNEIPQGQTAHDTFWDFIGSNEESAAMMMWIMSDRTIPRSFRTIQGFGVHTFRLVNAEGKSVFCKFHWRPVLGIHSLIWNEAQKIGGADPDFHRRDLWENIEQGFYPEYELGVQVIEEGQEFDFDFDILDATKLWPEEEVPLQMIGKMTLNKNVENVFAETEQVALHPGNIVPGIDFTNDPLLQGRLFSYTDTQIYRVGTNFKQLPINRPVCPFHNNHRDGSQRYIIDKGQVAYHQNYLAGNTPYTVPGSQGGFVTYPSLVEGLKVRKTAPSFLDHFSQARLFWNSMTDVEQSHILQAFSFELGKVNVPEVRQRVVNLIGHISRPLATAVAEQVGVEPPDKSIKQSDVTKSSPTLSLMNTKFLPNTLKVAIIVGNGYGGNALESLLESLKEVELKPYIISERLGEITADNGDTLNVDATFLTTSPVLYDGLLVVGGDHINDQFAYEAGNFITEQFNHYKPIGGMEEGATLIQQLGIANRPGVFISQSGSRQFTRQFIDGMAKQRFWDR

SEQ ID NO: 420 - protein, 503 aa, Zea mays
  misc_feature (362)..(362): Xaa can be any naturally occurring amino acid
MSYNKAPSITAETINPRVKIIRYAPCGEIVKHAARLEQEIEENPASIPFQEIIYCNLGNPQVLGQPPLTFFREVLSLCDNPALMDRDEARALFSPCSIRRARRILNSIPSKDTGGYTDCRGIKCLRQVVADGITARDGFPSTADDIFLTDGATSAINLMMQILIRSHEDGILSPLPEYPLYSASIILHGGTMVPYNLTEDNGWGLEIFEVKRCLEEARSAGLTVRAMVVINPGNPTGQVLSVTNQEEIVEFCRKEGLVILADEVYQENIYAENKKFHSFKKVARSLAYDENDLTLVSLHSVSMSYGESGRRGGYMEVSGVAANVKDQIYKVASLTLCPNIAGQILVSLAMDPPKNFPCDLYXLGDESFESFDKEKEQIRSSFCKRAKTLEKAFSGLEGVTCNKLEGALYLFPRLHLPSAAIRAADFEGVSPDIFYAHRLLDATGIAVVPGSGFHQASGTIHIRCTILPDERKIEAMVARLRAFHKAFMNEFRGSQQVMNDLRR

SEQ ID NO: 421 - protein, 849 aa, Rhodobacter sphaeroides 2.4.1
MDIEQKLAKERRARLAAERLLEYKQRELFAANEKLAIHARALSDQIIEQRAVVKTALSEAEKLKGQNSRFLSELERAHTAAVMAERRLWDSIDAIEDGFAVFDAGQRLVAANEAYRCHFEGLEVRPGMALADLLQLATTHGLIDLRGEPADHWRQRMIRRWDEDPVEPEIVRRCTGQWLRLVNRRARDGDMVSLLIDITEQMRLRAAIDAIPDGFVLFDRAERLVLCNDRYRAIYPRSAEALRPGAPFEEILRHGLAHGQFPEAAGREEEWLADRLAAFRHLGGAAEQQLDDGRWLRVIEHETPDGGRVGLGVDITELKRQQAALESARAAAEAASRAKSAFLANMSHEIRTPMNGIVGMADLLCETVLTEDQRLFSETIRSSGEALLVIINDILDYSKIEANRLTLHPEPFDLERTIHEVAMLLQPKARAKGIDLLIDFDLFLPTRFVGDPGRLRQVLTNLIGNAVKFTAAGHVLIRVVGLEVAPGRHDLRVTVEDTGIGIAPEHLDHVFGEFNQIEAEATRRFEGTGLGLAITRRLIELMQGAVWVESEPGRGSCFGFRLTLPAADDEAAPPVPIEVRRALVVDGQFINRTILERQLAPCGISVTLCRSGIEALAELSADAGYDLLLTDHEMPDLDGLALAQRVRAGGFSMPILLLTSNPSAVRDHPAEALLAGVLQKPLLRSDLYRRLQSLTAPPAAPDRPPPVPVPALRRMRVLAAEDNRTNQLVFGKMVRDLDIDLTFADNGREAVELYDRIRPDLVFMDISMPEMDGRAAARAIRARERGGTHVPIVALTAHALESDARASAAAGIDRTLTKPLRRAMILETLAAFCPAGTRPIQPALVEGPD

SEQ ID NO: 422 - protein, 492 aa, Ricinus communis
MDPYRNRPSSGFNTPFWTTNSGAPVWNNNSSLTVGSRGPILLEDYHLIEKLANFDRERIPERVVHARGASAKGFFEVTHDVSHLTCADFLRAPGVQTPVIVRFSTVIHERGSPETLRDPRGFAVKFYTREGNFDLVGNNFPVFFIRDGMKFPDVVHAFKPNPKSHLQENWRIFDFLSHVPESLHMLTFLLDDLGIPQDYRHMEGSGVNTYTLINKAGKVHYVKFHWKPTCGVKCLLENEAIKVGGSNHSHATQDLYDSISAGNYPEWKLYIQIMDPAHEDKFDFDPLDVTKTWPEDILPLQPVGRLVLNKNIDNFFAENEQLAFCPGIVVPGVSYSEDKLLQTRIFSYSDTQRHRLGPNYLQLPVNAPKCAHHNNHHEGFMNFMHRDEEVNYFPSRCDPARNAESFPVPSAICSGKREKCVIEKENNFKQPGERYRSWAPDRQERFLNRLVGGLSDPRITHELRTIWISYWIQCDKSLGQKLATRLNVKPSI

SEQ ID NO: 423 - protein, 275 aa, Oceanobacillus iheyensis HTE831
MIKGLQDTFTLNNGVEMPGFGLGVYKVEDGSVAEESVRIALENGYRSIDTASFYDNEKGVGEGIKNSGVPREDIFLTSKVWNDEQGYTSTKQAFQRSLDKLGTDYLDLYLIHWPVKDTFVETWRAMEELYRDGKVKAIGVSNFHVQHLEKLFVNAEVIPAVNQVEFHPHLTQEGLRAFCRQHNIQLEAWSPLKRGQLLEEDIIQTIAKKYGKSAAQVILRWDVQHEVITIPKSITKERIIANADIFDFSLTEEEMNQIDAMNQNDRSGSNPDSFD

SEQ ID NO: 424 - protein, 646 aa, Xanthomonas campestris pv. vesicatoria str. 85-10
MCGLAGMLLASPRLHGEQLDALVRPMGAALRHRGPDDAGTWCDAQAGVALAHQRLSILDLSPLGHQPMRSADGRYVLAYNGEVYNFAQLRAALSALGHRFRGHSDTEVLLAAVVEWGLDETLTRCNGMFAIALWDERDNCLFLARDRVGKKPLYYGWAGDTLVFGSELKALWQHPDFDNGVDRDALTLLLRLGYIPAPACIHEHTFKLMPGRVLRMDAQAVAAGAAAHRPDQAQQPFWNAREAMQRALATPFTGTDAQAEEQLDSVLRDAVALRMVADVPVGVFLSGGTDSSIVTAMMQAQSAQPVHTFSIGFEGSHHDEAPLAREVATHLRTDHTELYVSGADALAVVPGLPDMFDEPFADASQVPTALVARLARGGVTVALSGDGGDELFFGYGRYQRALRNWRMHGLVPGPLRRLMAVAARRNGESSRTGGLAALVAEAGARGIGDIYRNRISRWRDPAAVVLGATEPDSFYSLADPLHGSGTPADAMMLADFAAYLPDDLLCKVDRTTMAVGLEARAPLLDWRVAEFAWSLPLSLKYRDGVSKYLLKRVLCRYLPDAMVYRGKRGFGAPVSAWLRGDLHGWADDLLAHGALQREGVFAADSVARLWRDFNGGERKWHTHLWTVLMFQAWQAHWREQRAAVVR

SEQ ID NO: 425 - protein, 492 aa, Ricinus communis
MDPYKFRPSSSNDTPFWTTNAGDPVSNNNSSMTVGPRGPILLEDYHMIEKLANFTRERIPERVVHARGMSAKGFFEVTHDVTDLTCADFLRAPGVQTPVIVRFSTVIHERGSPETLRDPRGFATKFYTREGNFDIVGNNFPVFFIRDGIKFPDVVHAFKPNPKSHIQEYWRIFDFCSHHPESLSTFAWFFDDVGIPQDYRHMEGFGVHTYCLINKAGKVTYVKFHWKPTCGVKCLMDDEAIKVGGANHSHATQDLYDSIAAGNFPEWKLMIQTMDPADEDKFSFDPLDMTKIWPEDMFPLHPVGRLVLNRNIDNWFAENEMLAFNPAHVVPGVYYSNDKLFQLRLFAYSDTQRHRLGTNYLQLPVNAPKCPYHNNHYDGFMNFMHRDEEVDYFQSRYDPVRHAEKVPIPNAICSGRREKCVIEKEDNFRQPGDRYRSWAPDRQERFLCRLVNALSEPRITHEIRSIWVSWWTQCDKSLGQKLASRLNVRPNI

SEQ ID NO: 426 - protein, 666 aa, Oryza sativa
  misc_feature (88)..(88): Xaa can be any naturally occurring amino acid
MAGSERTVVWFRRDLRIDDNPALASAARDGAVLPVFIWCPADEGQFYPGRCSRWWLKQSLPHLSQSLESLGCPLVLIRAESTLEALLXRCIDSVGATRLVYNHLYDPVSLVRDDKIKKELSALGISIQSFNGDLLYEPWEIYDDSGLAFTTFNMYWEKCMELPIDASPSLAPWKLVPVPGLESVRSCSVDDLGLESSKDEESSNALLMRAWSPGWRNAEKMLEEFVSHGLLEYSKHGMKVEGATTSLLSPYLHFGEVSVRKVYQLVRMQQIKWENEGTSEAEESIHFFMRSIGLREYSRYLCFNFPFTHEKSLLGNLKHYPWKVDEERFKSWRQGMTGYPLVDAGMRELWATGWTHNRIRVIISSFAVKFLLIPWTWGMKYFWDVLLDADLESDILGWQYISGSLPDGHELSRLDNPEVSLIKACLVFTTFSMALVQKCRLTQYLCLVFIVLVDYGKCDCYVLCLVHMVQGQKYDPDGVYVRTWIPELARMPTEWIHHPWDAPSCILEVAGVELGFNYPKPIVDLHIARECLDDSISTMWQLDTAEKLAELDGEVVEDNLSNIKTFDIPKVVLRETSPCALPIDQRVPHASSKDHNLKSKVLKDGSNELCSKLTAEVHSHIQDHGGSLVGPSRYLLQEAGRNYVDEVEDSSTADSGSSISRQRKAA

SEQ ID NO: 427 - protein, 473 aa, Chromobacterium violaceum ATCC 12472
MKKIAWLVAGAMAGGVLTLSMQALADKEASPLPLNELRTFAEVFSLIKQSYVEPVTDKKLIDEAIKGMLTGLDPHSDYMDPEEFKELREGTQGEFGGLGIEIGAEDGLVKVVSPIEDTPAQKAGIKSGDLIIKIDDTPVRGLSLNDAVKKMRGKPGSKVTLTIARKNEAKPLVFTLARAVIKTKSVKYRMLESGYGYVRIAQFQEHTAEDLAAGLQKLYQENKQPLKGLVLDLRDDPGGLLNGAVGVAAAFLPKDKLVVYTEGRTPDAKMRLTATLQNYARQNGSDPLAKLPVAVRSVPLAVLVNGGSASASEIVAGALQDHKRAVLVGTQTFGKGSVQSILPLGSQGGIKLTTARYFTPSGRSIQAKGITPDVVAEDATLTAADQALRVREADLENHLANPNGDDKPAKTAKPAAKPAQPPAPAPVPEGKDKEPAAPDAQGGQRMPNPKSDYQLSQALNVLKVQQILQKNEN

SEQ ID NO: 428 - protein, 546 aa, Chromobacterium violaceum ATCC 12472
MAAKDVKFGDSARSKMVAGVNILADAVKVTLGPKGRNVVLDRSFGAPTITKDGVSVAKEIELKDKFENMGAQMVKEVASKTSDVAGDGTTTATVLAQAIVQEGMKFVAAGMNPMDLKRGIDKAVVSLVGEIAKIAKPCATSKEIAQVGSISANSDSDIGEIIANAMEKVGKEGVITVEDGKSLNNELDVVEGMQFDRGYLSPYFINNQDKQIAALDNPFILLFDKKISNIRDLLPVLEQVAKSGRPLLIIAEDVEGEALATLVVNTIRGILKVVAVKAPGFGDRRKAMLTDIAVLTGGEVIAEEVGLTLEKATLDQLGQAKRVEVGKENTTIIDGAGEAATIQARVGEIRKQIEEATSDYDREKLQERVAKLAGGVAVIKVGAATEVEMKEKKARVEDALHATRAAVEEGVVPGGGVALLRARATLENLKTDNAEQEAGVKIVLRAIEAPLRQIVKNAGDEPSVVVNKVLEGKGNFGYNAASGEYGDMLEMGVLDPAKVTRSALQHAASVAGLMLTTDCMIAELPEDKPAAGMPDMGGMGGMGGMM

SEQ ID NO: 429 - protein, 565 aa, Candida glabrata CBS138
MNINDIKELVDQVSVEDVVNCVVNKTTRYLDDTPWYNILKDYVFLIVLYKFVKKIYYYLAGYGLLKSMQLLYKSVANWIFQRLLESPLLRGSVNKEVSKAVAGMEKELIKNDDQLADFEVLPKEGLSSESINSELDKLNSILPHTSWEQGRVSGAVYHGGKELIKLQSEAFEKYCVANQLHPDVFPAVRKMEAEVVSMTLKMFNAPETGCGTTTSGGTESLLLACLSAKVYGLKHRGITEPEMIVPVTAHAGFDKAAYYFGIKIHHVDLDPVTYKVDLKKVKRLINGNTVLLAGSAPNFPHGIVDDIEGLGKLAQKYKIPLHVDCCLGSFIIAFMEKAGFNDIGSFDFRVPGVTSISCDTHKYGFAPKGSSVIMYRNSELRKHQYYVDSKWTGGLYGSPTLAGSRPGALVVGCWSTMIHMGESGYKDSCTRIVSTARKLKDHIRNKLPQLEVLGDPKLSVVSFSSNKLNIYELADRLAKSGWHLNALQKPAALHLAITTLSVPTIDTFIETLTEAVEQMSADPTSTPSTEGTSALYGVAGSVKTTGVADKLITAFLDTLYKVKSD

SEQ ID NO: 430 - protein, 368 aa, Pseudomonas syringae pv. phaseolicola 1448A
MSLLLEPYTLRQLTLRNRIAVSPMCQYSSVDGLANDWHLVHLGSRAVGGAGLVITEAMAVTPDGRITPEDLGLWNDEQIEPLQRITRFINAQGAVAGIQLAHAGRKASTWRPWLGKHGSISLNEGGWTPVGPSAIAFDPQHTAPVQLSETQIQELIKAFVDSARRALTAGFKVVEIHAAHGYLLHQFLSPLSNQRTDQYGGSFENRIRLTLQVTEAVRAVWPEELPLFVRVSATDWVEDGWNADETVELARRLKALGTDLIDVSSGGTSANAEIPVGPGYQTRFAERVRKESEIATGTVGMITDPAQAEHILRTGQADIILLARELLRDPYWPLRADEDLGGRLATWPAQYQRATHRDQPIHESDLRD

SEQ ID NO: 431 - protein, 435 aa, Triticum aestivum
  misc_feature (376)..(376): Xaa can be any naturally occurring amino acid
  misc_feature (383)..(383): Xaa can be any naturally occurring amino acid
  misc_feature (401)..(401): Xaa can be any naturally occurring amino acid
  misc_feature (409)..(409): Xaa can be any naturally occurring amino acid
  misc_feature (423)..(423): Xaa can be any naturally occurring amino acid
  misc_feature (429)..(429): Xaa can be any naturally occurring amino acid
PRVRKYLVDKAHSLGLRVLMDVVHGHASKNVTDGLNGYDVGQSAQESYFYTGDRGYHKLWDSRLFNYTNWEVLRFLLSNLRYWMDEFMFDGFRFDGVTSMLYNHHGINTSFTGNYKEYFGLDTNVDAIIYMMLANHLIHKVLPEATIIAEDVSGMPVLCRPVDEGGVGFDYRQAMAIPERWADYLKNKDDLEWSMSGIAHTLNNRRYTEKCIAYAESHDQSIVGDKTMAFLLMDKEMYTGMSDLQPASITVDRGIALQKMIHFITMALGGDGYLNFMGNEFGHPEWIDFPREGNNWSYDKCRRQWSLADIDHLRYKYMNAFDQAMNALDDKFSFLSSSKQIVSDMNEEKKIIVFERGDLVFVFNFHPSKTYDGYKXGCDLPGXKYKVALDSDASDVLVDMXRVAHDNDXHFTSPERSTQEYPXTNFNNXPNSFKI

SEQ ID NO: 432 - protein, 314 aa, Helianthus annuus
MALGFSDRNTEMSPYSQQSNTSAVPMDSSKKRKTRSRKEAPEKVAATLAKWIEYNKANEDGKAKTRKAPAKGSKKGCMKGKGGPENSRTNFRGVRQRTWGKWVAEIREPNRGRRLWLGTFGSAVEAALAYDEAARAMYGTSARLNLPNCRSKNDILPLLVTNPASSCDSTTTCSYSEVDATHDSKPGPAVFPSVKHEESVQVKHEPEIVAKEEHCVDNNDLGFDIGDEMFDLEELLGAVEDSNPEAGSGDGYDGRFVNGADANENMQMYMQPDPCVSGQDYSFDFLQPGRPEDCSFTLEELGLGLDAELDLYSN

SEQ ID NO: 433 - protein, 639 aa, Clostridium sp. TO-931
MSYDALFSPFKIRGLELKNRIVLPGMNTKMAKNKHDLSDDMIAYHVARAKAGCALNIFECVALCPAPHAYMYMGLYNDNHVAQLKKLTDAVHEVGGKMAVQLWHGGFSPQMFFDKTNTLETPDTITVERIHEIVKEFGEGARRAVEAGFDAVEFHAAHSYLPHEFLSPGMNKRTDEYGGNFENRCRFCFEVVEAIRANIPEDMPFFMRVDCIDELMDEVMTEEEIVEFINRCADLGVDVADLSRGNAQSFATVYEVPPFNLQHGFNIENIYNIKKQIKIPVMGVGRINTGEMANQVIADGKFDLVGIGRAQLADQDWVAKVREGKEDLIRHCIGCDQGCYDAVINPQMTHITCTRNPHLCLEYKGMPKTDEPKKVMIIGGGMAGILAAEVLKKRGHEPVIFEASDHLAGQFVLAGKAPMKEDWAAAAKWEAEEVARLGIEVRYNTKVTPELIEEFAPDHVVIAIGSDYVAPAIPGIDSDKVYTQYQVLKGEVEPKGHVAVVGCGLVGTEVAQYLAARGAQVTAIERKGVGTGLSMLRRMFMNPEFKYYKINKMSGTNIVGIEPGKLHYIMTNKKTQEVTEGVLECDAAVICTGITARPSEDLQEKCKELGVPFNVIGDAAGARDARIATQEGYEVGMSI

SEQ ID NO: 434 - protein, 102 aa, Brassica napus
SFSSLAACTLLITIGLKSTIQSFTQRHNYNSTLSVGGGFLLVLFRWTISGRRLETYAFFVLFRGFWTTLTVFARKITIFGWIIHHPNIRSLFDKYRGKRVPV

SEQ ID NO: 435 - protein, 250 aa, Crocus sativus
MGRGRVQLKRIENTINRQVTFSKRRAGLLKKANEISVLCDAEVALIIFSTKGKLSEYSTDARMESILERYDRYSSAERAIVAPDPDSQESWRDEYGRLKAKLEALQTSQRHLMGAQLDMLSVKELQQLEQQLENALKNIRTRKNQLMFDSISELQKKEKTLVSQNKDLEKKLIEKEKGKAMAQQGHWDQQGQQYTESSSPPSLLIQDPFPSLTIGINPASGSSEEDYEARPLPPANSNRLPPWMIRSANE

SEQ ID NO: 436 - protein, 388 aa, Francisella tularensis subsp. tularensis SCHU S4
MNNNEIIHQTIEKQGSIVWKSVFGLLLLPLVALIAIPWYAKTYGFSTSDYVCLVVFYMLTGVGITMGYHRLWSHKTYKANKIVSYALLLFGTAALQNSVIQWSSDHRKHHKDVDDPIKDPYAATRGFWFSHFGWLLRHSSPDVQEIRGVNDLLKDKALVFQHNNYTVLAILSCFGLPALLGFIFGFLSGHTLTGAWHSALGFLLLGGLLRVILVHHATFCINSLAHTIGKRPYSTKNTARDSWITAIVTGGEGYHNYHHAFAGDYRNGIRWFDLDPSKWFIAGLAKIGWCYDLKTTPKHLIEIAKAKVKLEEALTKKNKTFHLGIEEKYAKLVANVKNMYNAKQEYLKAKKDNVLSKADIKEIKSKYKDLKIEFIQAKKKYNKASTIA

SEQ ID NO: 437 - protein, 485 aa, Streptomyces avermitilis MA-4680
MSKRVLTTESGAPVADNQNSATAGVGGPLLLQDQHLLEKLARFNRERIPERVVHARGSGAYGHFEVTDDVTGFTYADFLNTVGKRTEVFLRFSTVADSLGGADAVRDPRGFAVKFYTEEGNYDLVGNNTPVFFIKDPLKFPDFIHSQKRDPFTGKQEPDNVWDFWAHSPEATHQVTWLMGDRGIPASYRHMNGYGSHTYQWTNAEGEAFFVKYHFKTNQGIRSLSAEQAQEIAGTDPNSHQTDLLQAIERGVRPSWTLYVQIMPAAEAAEYRFNPFDLTKVWPHTDYPLQRVGRLVLDRNPDNVFAEVEQAAFSPNNFVPGIGPSPDKMLQGRLFAYADAHRYRLGVNHTQLAVNAPRATVVSNYGRDGLMASPAQGRAAKNYEPNSYDGPAETGRPLSAPLAVTGHTGTHEAPPHTKDDHFFQAGELYRLMSAEERSRLVANIAGGLSQVSRDDVIEKNLTHFHAADPEYGTRVEEAVRALRED

SEQ ID NO: 438 - protein, 548 aa, Legionella pneumophila
MAKELRFGDDARLQMLAGVNALADAVQVTMGPRGRNVVLEKSYGAPTVTKDGVSVAKEIEFEHRFMNMGAQMVKEVASKTSDTAGDGTTTATVLARSILVEGHKAVAAGMNPMDLKRGIDKAVLAVTKKLQAMSKPCKDSKAIAQVGTISANSDEAIGAIIAEAMEKVGKEGVITVEDGNGLENELYVVEGMQFDRGYISPYFINNQQNMSCELEHPFILLVDKKVSSIREMLSVLEGVAKSGRPLLIIAEDVEGEALATLVVNNMRGIVKVCAVKAPGFGDRRKAMLQDIAILTKGQVISEEIGKSLEGATLEDLGSAKRIVVTKENTTIIDGEGKATEINARIAQIRAQMEETTSDYDREKLQERVAKLAGGVAVIKVGAATEVEMKEKKARVEDALHATRAAVEEGIVAGGGVALIRAQKALDSLKGDNDDQNMGINILRRAIESPMRQIVTNAGYEASVVVNKVAEHKDNYGFNAATGEYGDMVEMGILDPTKVTRMALQNAASVASLMLTTECMVADLPKKEEGVGAGDMGGMGGMGGMGGMM

SEQ ID NO: 439 - protein, 658 aa, Rhodospirillum rubrum
MCGLTGYWTRGGDGRGRGEMTALVLRMAGALAHRGPDGDGAWVDEDAGLALGHRRLSIVDLSPAGQQPMVSADGRLALAYNGEIYNAAELRPELEAAGIVFRGHSDTEVLLEGFARWGVVPTLRRAIGMFAFALWDRKERRLTLGRDRLGIKPLYVADHGGTLLFASQPKGMMPHPSWRGEVDREGLAAMLRLSCLPAPRSIFKGVSQLAPGTVVRFEADGRRSEEVFWSLEEVAARGVAQARSQPARPESASLAVEHLESLLLDAVRRRLIADVPVGAFLSGGVDSSTVVALMRKVASGPVKTFSIGFAEEGWDESVHAAAVARHLGTDHRELVVSPDEVPAIVGDLPRWYDEPFADASQIPTLLVSKLARSEVTVSLSGDGGDELFAGYNRHVQGQRLWDLAQRIPTVGRDLGAALIEAPSPGFWQRAVGLLPAGRRPPQAADKPAKIARLLRARSPEALYRTLVGAMPSAEVPLAGVSLAAEERWYAASAEGVDSFVDRMRLLDAKGYLPDDILTKVDRASMAYGLEARVPLLDHRVVEFAWSLPPEMLIREGQGKWLLRRVLHRHVPRALIERPKMGFGVPLAAWLRGPLRGWAEDLLDPQTMAVQGLIDPAPVRRWWLDHLAGRRDTHDRLWPVLSALSWHHHWKSAGAFTAA

SEQ ID NO: 440 - protein, 399 aa, Hevea brasiliensis
MAETGTEGTGITTLFSPYKMGKFSLSHRVVLAPMTRCRALNGIPNAALVDYYTQRSTPGGFLITEGTLVSPTAPGFPHVPGIYTEEQAEAWKRVVDAVHAKGSIIFCQLWHVGRASHQVYQPNGAAPISSTGKAISNRWRILMPDGSYGKYPTPRPLETPEILEVVKNYRQSALNAIRAGFDGIEVHGAHGYLIDQFLKDGINDRTDEYGGSINNRCRFLMQVIQAVVAAIGADRVGFRMSPAIDHLDAIDSDPLNLGLAVIERLNKLQLNLGSKLTYLHVTQPRYTAYGQTESGRHGTEEEEARLMRTWRRAYKGTFICSGGFTRELGMEAIAQDDADLVSYGRLFISNPDLVLRFKLNAPLNKYVRKTFYTQDPVVGYTDYPFFRKVDGSQEPRSRL

SEQ ID NO: 441 - protein, 606 aa, Methylococcus capsulatus str. Bath
MCGIAGLFNCNLPADELRLDQAVAKLTHRGPDDRGIFLDGRFGMGHTRLSIIDLAGGHQPLFSEDRRLALIANGEIYNFIELRSELTAAGFRFQTQSDSEVILHAYLAFGEGFLERIQGMFAFALYDALEGRLILARDRLGIKPLFLARRPDGIAFASEIKALLPLLDQPREIDPQGLAQYFQNQFSTGATTVLRGVERVLPGEAVVVEAGKTTRRFRYWSPLAVRTEELDFDEAAARFDALMERVMVEHMRSDVPFGLFLSGGVDSSLLLALLTRYSGEPIRTFSVGFPGTSLTDELPLAEGLARRFRSRHREIRPGPQDILHSLPLTVWAADDLMRDNASLPTSLLARAAGEELKVVFSGEGGDEVFAGYGRYRTSPLERLFKSLLAPGSGGFRTRGSFRGRWPKTLFGPALLAAAQSARRPVQESWRETPREWSDLQRMQYVDLCHALPDNLLVKADRMLMAWGVEGRVPFLDHRVVEFGLSLPDRLKIEGRQGKLFLKRWGERLVPAEQLYARKRGFHVPLGEWLDEPFLERLNRILPEHPALTPWFKPAGIRALIARCRDERQGSAMLWAIIQFAIWHRLFISGNGERPEALTDPLEILQR

SEQ ID NO: 442 - protein, 246 aa, Crocus sativus
MGRGRVQLKRIENTINRQVTFSKRRGGLLKKANEISVLCDVDVALIIFSTKGKLSEYSTDARMETILERYERYSFAESAIAVPEAESQGSWLNEYGRLKARIESLQTSQRHLTGVQLDMLNVKEMQELEQKLESAMKNIRSRKSQLLFNSISDLQTKEKALVDRNNDLKKKIAEKERKRTSAQQGHQDQQGQQYVDPTSPLSFPVQDPPSLTMGINPARSTSDEDRPLPQVNSSKLLPWMIRSVNG

SEQ ID NO: 443 - protein, 319 aa, Candida glabrata CBS138
MSYPHKIAAAHDDPTLMFNHTCLRIKDPAKSIPFYQKHFGMELLNKLDFPEMKFSLFFLSFPKDNVAKNSEGKNDVFSTSGILELTHNWGSENDADFKICNGNEEPHRGFGHICFSYADINAACSKLEAEGVSFKKRLTDGRMKDIAFALDPDGYWIELIRYDRENSPKKDVGSRFNHTMVRVKDPKASLEFYQNVLGMKLLRTSEHEAAKFTLYFLGYKVSSEDNEFSHEGVLELTHNWGTENEADFKYHNGNDKPQGYGHICVSCKDPAKLCNEIEQTYGDKIQWAPKFNQGKLKNIAFLKDPDGYSIEVVPHGLIV

SEQ ID NO: 444 - protein, 339 aa, Ralstonia eutropha JMP134
MTRISLTRYLVEEQRKHNTIQPELRLLIEVVARACKAISNSVNKGALAGVLGSAGTGNVQGETQQKLDVIANEVLLDANEWGGHLAAMASEEMESFYEIPNRYPKGEYLLMFDPLDGSSNIDVNVSIGTIFSVLHMPKPGQTVTEADFLQPGTHQVAAGYAVYGPQTTLVLTVGNGVHVFTLDREAGSFVLTQSDVQIPEDTKEFAINMSNMRHWAPPVRKYIDECLAGDEGPRGKNFNMRWIASMVADVHRILTRGGIFMYPWDKREPEKAGKLRLMYEANPMAMLIEQAGGAATNGHIRILDVQPEKLHQRVSVILGSKNEVERVTRYHHEAAGQQG

SEQ ID NO: 445 - protein, 167 aa, Triticum aestivum
MAAISSTSYFSSQPQLPASDGANPATARSSSSNGREPRRRRTGRCIMLEADAASASGSGGAAAGRTRSLTEEDLEELKGCLDLGFGFSYHQIPGLCGTLPGLELCYSMTRRFLDEQRTLVGQLEPATAAAAPIPDWKISGPGDDPDEVKARLKYWAQTVACTVKLCT

SEQ ID NO: 446 - protein, 80 aa, Antirrhinum majus subsp. cirrhigerum
GSISEANTQYYQQEASKLRAQISNLQNQNRNMLGESLGALSLRELKNLESRVERGISRIRSKKNELLFAEIEYMQKRQEI

SEQ ID NO: 447 - protein, 589 aa, Brevibacterium helvolum
MTLVNVGPERFDVWAPDVSSVVLVADGRQYPMQKKETAPGSEGWWTASDAPPNGDVDYGYLLDGNTTPVPEPRSRRLPAGVHNHSRTYNPPPYRWQDSRWRGKELQGTLIYQLHVGTSTPDGTLDAAGEKLSYLVDLGIDFIELLPVNGFNGTHNWGYDGVQWYTVHEGYGGPAAYQRFVDAAHAAGLGVIQDVVYNHLGLRGNYFPKLGPNLKQGDANTLGDSVNLDGAGSDVFREYILDNAALWVGDYHVDGVGFDAVHAVRDERAVHILEDLGALGDAISGETGLPKTLIAESDFNNPRLIYPRDVNGYGLAGQWSDDFHTAVHVSVSGETTGYYSDFESLAVLAKVLKDGFLHDGSYSSFRGRHHGRPINPSLANPAALVVCNQNHDQIGNRATGDRLSQSLSYGQLAVAAVLTLTSPFTPMLFMGEEYGASTPWQFFTSHPEPELGKATAEGRIKEFERMGWDPAVVPDPQDPETFNRSKLDWSEASTGDHARLLELYKSLTALRREHPDLADLGFGQTEVSFDDDAGWLRFRPVSVEVLVNLSDAKVRLDDAAGDLLLATDEGNPLDGGSLALVPWSAAVLKS

SEQ ID NO: 448 - protein, 500 aa, Xanthomonas campestris pv. vesicatoria str. 85-10
MVIHRPASRHRCARWLMLRSLTVCCRARMSYAIVWFRRDLRLEDNPALRAALDAGHHPIPLYIDAPHEEGEWTPGAASRTWRHRSLAALDGALRALGSGLVIRSGDSAQVLDEVIAQTGAVAVYWNRKYEPATQPRDAQIKRDLRERGIEVQSCNAALLFEPWQLSTQQGGPYKVFTPFWRNALTQLQLPAAMDAPRRLPPLPASLKTDALDTLQLVPGLQWDQGFWEHWQPGEAGAHEMLEIFIDGALSGYRENRDRPDRVGTSQLSPHLHFGEIAPWRIASTLEAHRTARNGAEIDGYIRQLGWRDFAYHLLHHFPDTTNQNLNPRFAGFDWATVDPVALQAWQRGRTGIPIVDAGMRQLWHTGWMHNRVRMIVASFLCKHLRIHWIEGARWFWDTLVDADLANNTLGWQWVAGTGADAAPYFRVFNPVTQAEKFDPHATYITRWVPELGKLAVKERFAPWLHPLALARFAPEYPRNPIIGLAEGRDAALAAYAKSRA

SEQ ID NO: 449 - protein, 116 aa, Glycine max
MTYQNLVLSFHITSEAIMLAGLAFKRKWQNRRKQEGKPFDKPNIVTGANVQVCWEKFARYFEVELKEVKLRDDYYVMDPEKAVELVDENTICVAAILGSTLNGEFEDVKRLNDLLI

SEQ ID NO: 450 - protein, 258 aa, Arabidopsis thaliana
MEGGASNEVAESSKKIGRGKIEIKRIENTTNRQVTFCKRRNGLLKKAYELSVLCDAEVALVIFSTRGRLYEYANNSVRGTIERYKKACSDAVNPPTITEANTQYYQQEASKLRRQIRDIQNLNRHILGESLGSLNFKELKNLESRLEKGISRVRSKKHEMLVAEIEYMQKREIELQNDNMYLRSKITERTGLQQQESSVIHQGTVYESGVTSSHQSGQYNRNYIAVNLLEPNQNSSNQDQPPLQLRDLIIYIYLDYVS

SEQ ID NO: 451 - protein, 701 aa, Cryptococcus neoformans var. neoformans B-3501A
MSARNLASGTPYRKNLSPANSPHFDAPSVSSTSDSVKSAYSVGYTPVPTADRSYSGLLHGTLSKVFRKGGQEIIVSEEPVSFSSSKEDSESTRFNGCPYMNGSIPQTPTPKSTPKSASVAVPVPLPPPSAARLKVQKQNDSIPRENGNALADDVGKLTVRSYEKDRDLKSQEVIYTTSNGVPVPHPYAVQRAGVNGPLLLQDFHLIDLLSHFDRERIPERVVHAKGSGAHGTWECTDGLEDLCLANMFQKGATCPLTIRFSTVGGESGSPDLARDPRGFAVKFRTAEGNWDFVANNTPVFFLRDPAKFPHFIHTQKRDPATHLSGGDDSTMFWDYLSQNPESIHQVMILMSDRGIPAGWRHMHGYYGHTLKIVNDNGDWVYAQFHLISDQGNKFFTSEEASTKSPDWGQKDLYEAIGRGEYPSWTMKVQVMTQEQAEEAWEKKRINVFDLTHVWPHGDYPLRTIGKITLNENPSNYFAEVEQATFNPAHMIPGVEPSADPVLQARLFSYPDAHRHRVGANYQQLPVNQSATPYATGNFQRDGAMAFYNQGGRPAYLSSIEPIKFREKRVNLNKVHGQFIGEAVSFLSEIRPEDFNAPRALWQKVFSDESKERFIQTVAGHMSTCKRKEIIARQIAIFRQVSPDLGARLEKATNVRGYGSIEGMSFNGTHNGFGVKRGANGLRQDADVVFNNGAPQKTQRAR

SEQ ID NO: 452 - protein, 478 aa, Staphylococcus aureus subsp. aureus COL
MTKLPQNFMWGGALAANQFEGGYDKGGKGLSVIDVMTSGAHGKARQITESIDPNHYYPNHEGIDFYHRYKEDIALFKEMGLKCLRTSIAWTRIFPNGDEDVPNEEGLAFYDRIFDELIAQGIEPVVTLSHFEMPLHLAKHYGGFRNREVVDYFVHFARVVFERYKDKVTYWMTFNEINNQMDTSNPIFLWTNSGVALTENDNPEEVLYQVAHHELLASALAVRLGKEINPKFKIGTMISHVPIYPYSCHPKDMMEAQIANRLRFFFPDVQVRGYYPSYAKKMLARKGYDVGWQEGDDSILQQGTVDYIGFSYYMSTAVKHDVDTTVENNIVNGGLNHSVENPHIATSDWGWAIDPDGLRYTLNVLYDRYQLPLFIVENGFGAVDEVVDGHIHDDYRIEYLKAHITAAIEAVDQDGVDLIGYTPWGIIDIVSFTTGEMKKRYGLIYVDRDNDGHGTMERLKKDSFYWYQQVIASNGDKL

SEQ ID NO: 453 - protein, 477 aa, Citrus sinensis
MGILSKIATNNGHGEDSAYFDGWKAFDRNPFHPTQNPGGVIQLGLAENQLCFDLIKDWITKNPYASICTAEGVEVFKDIAIFQDYHGLPEFRQAVAKFMGKGRGGRVTFDPDRIVMGGGATGANELIMFCLANPGDAFLVPSPYYAAFDRDLSWRTGVQIVPVHCDISNNFKITREALEAAYERAQEASINIKGLIITNPSNPLGTTLDRDTLKSLVSFINDKNIHLVCDEIYAATALSSPKFTSVAEVIQEMDCNRDLIHIIYSLSKDMGLPGFRVGIVYSFNDTAVNCGRKMSSFGLVSSQTQYLLASMLSDDEFVDNFLVETSKRLAKRHHNFTKGLEQVGINCLKSNAGLFFWMDLRHLLKEKTLEGEIALWRTIVNDVKLNVSPGSSFQCTEPGWFRVCFANMDDDTLQVALNRIAAFVQQDKESEKPTKKRWQQNLRVSFSSRIYEQGVMSPHMMSPHSPIPQSPLVRART

SEQ ID NO: 454 - protein, 546 aa, Zymomonas mobilis
MAAKDVKFSRDARERILRGVDILADAVKVTLGPKGRNVVLDKAFGAPRITKDGVSVAKEIELKDKFENMGAQMLREVASKTNDLAGDGTTTATVLAQAIVREGMKSVAAGMNPMDLKRGIDLAATKVVESLRSRSKPVSDFNEVAQVGIISANGDEEVGRRIAEAMEKVGKEGVITVEEAKGFDFELDVVEGMQFDRGYLSPYFITNPEKMVAELADPYILIYEKKLSNLQSILPILESVVQSGRPLLIIAEDIEGEALATLVVNKLRGGLKVAAVKAPGFGDRRKAMLEDIAILTKGELISEDLGIKLENVTLNMLGSAKRVSITKENTTIVDGAGDQSTIKDRVEAIRSQIEATTSDYDREKLQERVAKLAGGVAVIKVGGATEVEVKERKDRVDDALHATRAAVQEGIVPGGGTALLYATKTLEGLNGVNEDQQRGIDIVRRALQAPVRQIAQNAGFDGAVVAGKLIDGNDDKIGFNAQTEKYEDLAATGVIDPTKVVRTALQDAASVAGLLITTEAAVGDLPEDKPAPAMPGGMGGMGGMDF

SEQ ID NO: 455 - protein, 176 aa, Ashbya gossypii ATCC 10895
MDANSDQRDKHNQYIAELREQDRWLPINNVARLMKNTLPVTTKVSKDAKECMQECVSEFISFVTSEASDRCASDKRKTINGEDVLISLHALGFENYAEVLKIYLAKYRQQQALKNQMIFQRREDGADGLDGAADDGSDDAGEEEGEHGAGAAAGAPGAGALPEQDQFINQDGSLYI

SEQ ID NO: 456 - protein, 504 aa, Cucumis sativus
MDMNVPNYKLGKTLGIGSFGKVKIAEHALTGHKVAIKILNRRKIKNLDMEEKVRREIKILRLFMHPHIIRLYEVIETPSDIYVVMEYVKSGELFDYIVEKGRLQEDEARNFFQQIISGVEYCHRNMVVHRDLKPENLLLDSKCNVKIADFGLSNIMRDGHFLKTSCGSPNYAAPEVISGKLYAGPEVDVWSCGVILYALLCGTLPFDDENIPNLFKKIKGGIYTLPSHLSSGARELIPSMLVVDPMKRITIPEIRQHPWFQAHLPRYLAVPPPDTMQQAKKIDEDILQEVVKMGFDRNQLVESLRNRIQNEATVAYYLLLDNRFRVSSGYLGAEFQETMETGFNRMHPSDPTNPAVGHRLPGYMDYQGMGLRAQFPVERKWALGLQSRAHPREIMTEVLKALRELNVAWKKIGHYNMKCRWLPGIPGHHEGMINNPVHSNHYFGDKSTIIENDGVVKSPNVIKFEVQLYKTREEKYLLDLQRVQGPQFLFLDLCAAFLAQLRVL

SEQ ID NO: 457 - protein, 359 aa, Ashbya gossypii ATCC 10895
MGKKIVFNISSEFQLKALLGEGAYGIVCSAVHKPSGEVVAIKKIEPFERTLFSLRTLREIKILKHFQHENIISIYDIQKPASFDTFNEVYIIQELMQTDLHRVIATQPLSDDHIQYFIYQTLRGLKALHGSGIIHRDLKPSNLLLNANCDLKICDFGLARIEHGGAADLEHPQAGMTEYVATRWYRAPEVMLTAAQYTKAIDIWSSGCILAELFMKRPLFAGKDYKHQLMLIFELLGTPQGDDLAAVKSRRAREYIATLPRYRRASLRAVIPHANPLGLDLLQRMLVFDPRRRITAADALRHPYLATYHDPRDEPDGTPIPASFFDFDHHKDKLTTRDLKRMLWDEVFRDTHAPVRPDA

SEQ ID NO: 458 - protein, 490 aa, Magnaporthe grisea 70-15
MAALASKQQSQKIFEKLKTKQANKICFDCGQKNPTWTSVPFGIYLCLDCSSNHRNLGVHISFVRSTNLDQWQWDQLRVMKVGGNESATKFFQQNGGSAALNSKDPKTKYHSAVATKYKEELKKRAARDAKEYPEEVVITDGTDAGDGTNTPAGEPDDDFFSSWDKPAIKKPTPPVSRTATPPVVGRTPSPFLTAGGANGKDIARTPSPLAKSADSAVKPAASRITHSSALKKTTGAGPKKANVLGAKKTTKLGVKKVNAEVIDFDEAEKKAKEEAERIEKLGYDPDDIDTTAAKKVGGVKAESSGAGILAPTPVSPARGGYGASGHSREKSASEMERLGMGMGRLGFGQVGGNKPAAAAQPKKGGGFGSVGPIKATPEADEEKYARSKFGAQKAISSDEFFGKGSYDPNAQAEAKTRLQGFEGASAISSNAYFGRPEEEEVEEYGDLETAAKDFIRKFGLTRGDDLENLTAVLGDGATKLQGAIRSYLGS

SEQ ID NO: 459 - protein, 539 aa, Spinacia oleracea
MEVISRLTFASVSYPFISSNLNPTPMLNSFNFRVLSWNSAPTNVAEAHLHRLLLRKLNPANDRVVGISNFGCSCRLDLWPSWRRHKRLFFQNGVSTIRWEVKKCSPKFYKIVSNYEKCKRHIYVPFVRLVVGVVLLMSVSVALNQGPSWSLSEENRIFLEAWRTIDRAYVDKTFNGQSWFRYRENALRNEPMNSREETYTAIRKMVATLNDPFTRFLEPEKLKSLRSGTQSSLTGVGISIGPTAVDQSSTGLVVISATPGAPASRAGILPGDVILAIDDASTDKMGIYEAANILQGPDGSSVDLTICSRDEIKHVVLKRERITLSPVKSRLCEMPGSAKDAPPKVGYIKLTSFTENASDAVKEAIETLRSNNVNAFVLDLRDNSGGLFPEGIEIAKIWLNKGVIVYICDSRGVRDIYDVEGSSAVAGSEPLVVLVNKGTASASEILAGALKDNKRAVVFGEPTYGKGKIQSVFELSDGSGLAVTVARYETPAHTDIDKVGIKPDHPLPASFPKDENDFCTCVQDPSSTCYLNGVQLFSR

SEQ ID NO: 460 - protein, 548 aa, Vibrio harveyi
MAAKDVKFGNDARVKMLEGVNVLADAVKVTLGPKGRNVVLDKSFGAPTITKDGVSVAREIELEDKFQNMGAQMVKEVASKANDAAGDGTTTATVLAQAIVNEGLKAVAAGMNPMDLKRGIDKAVIAAVEQPKRASVECTDTKAIAQVGTISANSDSSVGNIIAEAMEKVGRDGVITVEEGQALQDELDVVEGMQFDRGYLSPYFINNQEAGSVDLENPFILLIDKKVSNIRELLPALEAVAKASRPLLIIAEDVEGEALATLVVNNMRGIVKVAAVKAPGFGDRRKAMLQDIAILTGGIVISEEVGLELEKVALEDLGQAKRVAITKENTTIIDGVGEEAMIQGRVAQIRQQIEDATSDYDKEKLQERVAKLAGGVAVIKVGAATEVEMKEKKDRVEDALHATRAAVEEGVVAGGGVALIRAASKIVDLEGDNEEQNVGIRVALRAMEAPIRQITKNAGDEESVVANNVKAGEGSYGYNAATGEYGDMLEMGILDPTKVTRSALQFAASVAGLMITTEAMVTDLPQKEGAGMPDMGGMGGMGGMGGMM

SEQ ID NO: 461 - protein, 337 aa, Glycine max
  misc_feature (150)..(150): Xaa can be any naturally occurring amino acid
FGSRLKEVKLRDGYYVMDPEKAVEMVDENTICVAAILGSTLNGEFEDVKLLNDLLVEKNKETGWDTPIHVDAASGGFIAPFLYPELEWDFRLPLVKSINVSGHKYGLVYAGIGWVIWRSKEDLPEELIFHINYLGADQPTFTLNFSKDNXTHSIGSSQVIAQYYQLIRLGYEGYKMVMENCNDNMAVLKEGLEKTGRFEIISKDIGVPLVAFTLKDHTHFNEFQISDMLRRYGWIVPAYTMPPDAQHVTVLRVVIREDFSRTLAERLVIDVTKVVHELDLLPARVISTNTIMVTGEAGEENDEKVLFAKKSEIETQREITKAWKKFVMDRKKMNGVC

SEQ ID NO: 462 - protein, 337 aa, Burkholderia vietnamiensis G4
MSIARRTTLSKFLIEQQRETNNLPADLRLLIEVVARACKAISYNVSKGALGDALGTAGSENVQGEVQKKLDILSNEILLDANEWGGNLAAMASEEMETFFPIPANYPRGEYLLVFDPLDGSSNIDVNVSIGTIFSVLRCPHGKQATEESFLQPGTEQVAAGYAVYGPQSVFVLTTGNGVNCFTLDREVGSWVLTQSNMQIPADTREYAINASNARHWYEPVQRYVSELNAGKEGPRGDNFNMRWIASMVADVHRILNRGGIFMYPADKRTPDRPGKLRLMYEANPMSFIVEQAGGAATTGTQRIMEVQPTGLHQRVPVFLGSKNEVERVTAYHNEGK

SEQ ID NO: 463 - protein, 496 aa, Nicotiana tabacum
MVLSKTASESDVSVHSTFASRYVRTSLPRFKMPENSIPKEAAYQIINDELMLDGNPRLNLASFVTTWMEPECNTLMMDSINKNYVDMDEYPVTTELQNRCVNMIAHLFNAPLGDGETAVGVGTVGSSEAIMLAGLAFKRKWQNKMKAQGKPFDKPNIVTGANVQVCWEKFARYFEVELKEVKLSDGYYVMDPEKAVEMVDENTICVAAILGSTLNGEFEDVKRLNDLLIEKNKETGWDTPIHVDAASGGFIAPFLYPELEWDFRLPLEKSINVSGHKYGLVYAGIGWAIWRNKEDLPDELIFHINYLGADQPTFTLNFSKGSSQVIAQYYQLIRLGFEGYKNVMENCQENARVLREGIEKSGRFNIISKEIGVPLVAFSLKDNSQHNEFEISETLRRFGWIVLAYTMPPNAQHVTVLRVVIREDFSRTLAERLVIDIEKVFHGVDTLPARVNAKLAVAEANGSGVHKKTDREVQLEITTAWLKFVADKKKKTNGVC

SEQ ID NO: 464 - protein, 403 aa, Aspergillus nidulans FGSC A4
MATTSQPPIKLTGHKNFVYRLVFSTLTGRTIHISQIRPSSPTNPGLASHEISFLRLLEAVTNGSQMEISYTGTIIVYKPGLITGTASGVGASSGSVIRHEIPAGCTRGVSYFLIPLCLLAPFSKAPIKVLFTGPGVITSSTPTGDMSVDSVRTAILPLFNQFGIFNNIELRVLRRSNLGPNGRGGGGEVQLVFGHQVRLPKTLHLMNAGRIKRVRGVAYSVGVSASNNARMIDTCRGVLNPLVPDTYIFSDVSSAPLVPAPERNNPSAKKKIGLGFGLSLVAESSTGCLFSADVACPPSGGQPPEDIGKQCAYQLLETISKGGCVAPAAFPIMIGLMTMGSEDVGRIQVGRDIIGDESSIQLARDLMKFGAPGWGLRDAGDESNDVIISVVGRGIGNVGRKVA

SEQ ID NO: 465 - protein, 434 aa, Methanococcus maripaludis S2
MRTDIVSSGVGELSYEIREIVKVAKKAESSGLEVVWENIGDPIAKGEKLPLWIKEIVSETTMDDSSYGYCPTRGLLETREFLTDLNNSRNGAQITPDEIVFFNGLGDAITNIYGLMRKECRVIGPTPAYSTHSSAEGLYSNCRPVMYELDKDDGWNPDIDDLRNKVKYNPSIASILLINPGNPTGAVYSKKILSEVVDIANEYDLFILADEIYSNLVYNGKKHNYLSEVLDDVPGISLKGISKDLPWPGSRCGWTEFYNTQSDELFKKYTENICKFKMIEVCSTTLPQKVIPKIMSDKRYNKYLEERKSYYETASKYAYNKMKNIDGLNVNRTDGAFYNTIVLEKEYLNENQSLKIQDSELKNYVESISKGIPEDKRFVYYLLASTGICGVPLTSFCSEHNGMRFTLLERDEEKRNWVFETIAEKVEEYFNSSN

SEQ ID NO: 466 - protein, 496 aa, Nicotiana tabacum
MVLSKTASESDVSIHSTFASRYVRTSLPRFKMPENSIPKEAAYQIINDELMLDGNPRLNLASFVTTWMEPECNKLMMDSINKNYVDMDEYPVTTELQNRCVNMIAHLFNAPLGDGETAVGVGTVGSSEAIMLAGLAFKRKWQNKMKAQGKPCDKPNIVTGANVQVCWEKFARYFEVELKEVKLSDGYYVMDPEKAVEMVDENTICVAAILGSTLNGEFEDVKRLNDLLIEKNKETGWDTPIHVDAASGGFIAPFLYPELEWDFRLPLVKSINVSGHKYGLVYAGIGWAIWRNKEDLPDELIFHINYLGADQPTFTLNFSKGSSQVIAQYYQLIRLGFEGYKNVMENCQENARVLREGLEKSGRFNIISKEIGVPLVAFSLKDNSQHNEFEISETLRRFGWIIPAYTMPPNAQHVTVLRVVIREDFSRTLAERLVIDIEKVLHELDTLPARVNAKLAVAEANGSGVHKKTDREVQLEITTAWKKFVADKKKKTNGVC

SEQ ID NO: 467 - protein, 637 aa, Bacillus cereus E33L
MKRDEFHTEKYYESYNIFGAHIVTEDEMRGVRFTVWAPHAKAMSVVGDFNEWDYEQHKMLQVTEEGIWSLFIPHIEEREIYKYAIETMAGDVIFKADPYAVYAEVRPNTASVVFDIKGYEWNDKNWSRKKKKKSVYKEAMTVYELHFGSWKKKEDGTLYSYKEMAEELIPYVVEHQFTHIEIMPLVEHPYDRSWGYQGTGYYAATSRFGTPHDLMHFVDECHKYGIGVILDWVPGHFCKDAHGLYLFDGTPTYEYKDKDVQENPVWGTVNFDLGKREVRNFLISNALFWMRYFHIDGFRVDAVANMLYWNKEGQEQSNEHAVSFLRELNEAVFAENEDFLMTAEDSTAWPLVTAPTYEGGLGFNYKWNMGWMNDVLKYMECAPEYRKYIHDKMTFSLLYAYSENFILPLSHDEVVHGKKSLLNKMPGDYWDKFAQLRLLYGYFFTHPGKKLLFMGGEFGQFDEWKDLEDLDWNLHDFEMHRYMHDYFKELIALYKRSKPLWQLDHSPEGFQWIDANNNEQSIFSFIRQGDKQEDALVVVCNFTKATYENYKVGVPDFEYYNEILNSDAEQYGGSGQVNKKRLKAIQEPYHNQAAHVEITIPPFGVSILRPVKTRKGSKKQDGSKTKVRSNVTSRGKR

SEQ ID NO: 468 - protein, 365 aa, Enterobacter cloacae
MSAEKLFTPLKVGAVTAPNRVFMAPLTRLRSIEPGDIPTPLMGEYYRQRASSGLIITEATQISAQAKGYAGAPGLHSPEQIAAWKKITAGVHAEEGRIAVQLWHTGRISHSSIQPGGQAPVSASALNANTRTSLRDENGNAIRVDTSTPRALELDEIPGIVNDFRQAVANAREAGFDLVELHSAHGYLLHQFLSPSSNHRTDQYGGNVENRARLVLEVVDAVCQEWSPDRIGIRVSPIGTFQNVDNGPNEEADALYLIEELAKRGIAYLHMSEPDWAGGQPYSEAFRQKVRERFHGVIIGAGAYTPEKAEDLINKGLIDAVAFGRDYIANPDLVARLQQKAALNPQRPESFYGGGAEGYTDYPTL

SEQ ID NO: 469 - protein, 492 aa, Arabidopsis thaliana
MDPYKYRPASSYNSPFFTTNSGAPVWNNNSSMTVGPRGLILLEDYHLVEKLANFDRERIPERVVHARGASAKGFFEVTHDISNLTCADFLRAPGVQTPVIVRFSTVIHERGSPETLRDPRGFAVKFYTREGNFDLVGNNFPVFFIRDGMKFPDIVHALKPNPKSHIQENWRILDFFSHHPESLNMFTFLFDDIGIPQDYRHMDGSGVNTYMLINKAGKAHYVKFHWKPTCGVKSLLEEDAIRLGGTNHSHATQDLYDSIAAGNYPEWKLFIQIIDPADEDKFDFDPLDVTKTWPEDILPLQPVGRMVLNKNIDNFFAENEQLAFCPAIIVPGIHYSDDKLLQTRVFSYADTQRHRLGPNYLQLPVNAPKCAHHNNHHEGFMNFMHRDEEVNYFPSRYDQVRHAEKYPTPPAVCSGKRERCIIEKENNFKEPGERYRTFTPERQERFIQRWIDALSDPRITHEIRSIWISYWSQADKSLGQKLASRLNVRPSI

SEQ ID NO: 470 - protein, 503 aa, Oryza sativa
MSTAAAGAAPVSLHTINPKVLKCEYAVRGEIVTHAQDFLRNLDYDLHFILQNLQQELQKNPDSLPFDEILYCNIGNPQSLGQQPVTFFREVLSLCDHPALLDKSETHALYSSDAIERAWQILDKIPGRATGAYSHSQGIKGLRDEIAAGIAARDGFHASGDNIFLTDGASPAVHMMMQLLIRSENDGILCPIPQYPLYSASIALHGGSLVPYFLDEETGWGLEVDELKKQLEEAQSKGITVRALVVINPGNPTGQVLAEENQKKIVEFCKNEGLVLLADEVYQENIYVEDKKFHSFKRIARSMGYTDDDLPLVSFQSVSKGYYGECGKRGGYMEVTGFSADVREQIYKVASVNLCSNVSGQILASLIMNPPKAGDESYESFMVEKDGILSSLARRAKALEEAFNSLEGITCNKAEGAMYLFPRIYLPQKAIGAAQAAGTAPDAYYARRLLEATGIVVVPGSGFGQVPGTWHFRCTILPQEDKIPAIISKFKEFHEKFMDEFRD

SEQ ID NO: 471 - protein, 442 aa, Magnaporthe grisea
MSAEKKTLSKPAAGVPYYTPAQEPPAGTPLQQQDAIPTLFKPLKIRGVELSNRFGVSPMCTYSADDGHLTDFHLVHLGQFALHGTALTIVEATSVTPNGRISPEDSGLWQDSQIAPLRRIVDYVHSQGQKIAIQLAHAGRKASTKAPWHDSFTPSGEYKPREGLQVVGPEYGGWPDDVWAPSAIPFSEDFPNPKEMTVEEIEGLVTSFVDAAKRAIEAGVDIIEIHGAHGYLITEFLSPLSNKRTDKYGGSFENRTRVLIDIIKAVRAVIPEEMPLFVRISATEWMEYAGEPSWDLEQSTQLAKLLPNLGVDLLDVSSGGNSVAQKIELTPYYQIDLAAKIREAVGDRLLIGAVGNINTADIARDVVDEQGAEKVAEAKQTHDTIEVVSESHGGKTKADLVLIARQFLREPEFVLRTAHNLGVNVQWPHQYHRAVWRKGARI

SEQ ID NO: 472 - protein, 436 aa, Arabidopsis thaliana
MGKGPLSFRRLSSIRHRKKGSAVKDDSAQTSTPSSPPPPLPIHAGGSAVGATGKAKKKTGGARLWMRFDRTGAMEVVECDKSTIIKRASVPARDLRILGPVFSHSSNILAREKAIVVNLEVIKAIVTAEEVLLLDPLRPEVLPFVERLKQQFPQRNGNENALQASANVQSPLDPEAAEGLQSELPFEFQVLEIALEVVCSFVDKSVAALETEAWPVLDELTKNVSTENLEYVRSLKSNLTRLLARVQKVRDELEHLLDDNEDMADLYLTRKWIQNQQTEAILAGTASNSIALPAHNTSNLHRLTSNRSASMVTSNTEEDDVEDLEMLLEAYFMQLDGMRNKILTVREYIDDTEDYVNIQLDNQRNELIQLQLTLTIASFAIAAETLLASLFGMNIPCPLYSIHGVFGYFVWSVTALCIVLFMVTLGYARWKKLLGS

SEQ ID NO: 473 - protein, 445 aa, Phalaenopsis hybrid cultivar
MARGIGLGAPLSKIAVSKAHGEDSPYFAGWKAYDEDPYDPVANPTGVIQMGLAENQVSFDLLEDYLEQHPETASWSSGISGFKENALFQDYHGLQSFRKAMASLMEQIRGKRVKFNPDRMVLTAGATAANELLTFILADPGDAVLVPTPYYPGFDRDLQWRTGVKIFPVHCHSSNGFQLTLPSLQSAYSIAEASNLRVKALLITNPSNPLGTTMPRSLLEDILNFISQKNIHLISDEIYSGSVFSSPEFISVAEVVEASQHKNCDGVHIVYSLSKDLGLPGFRVGTIYSYNDRVVTTARRMSSFSLVSSQTQKMLASMLSDEEFTVKYIKTNRERLRRRHGYIVEGLKDAGIECLEGNAGLFCWMNLTQMLEEKSMEGELRLWKMILSEVKLNVSPGSSCYCAEPGWFRVCFANMTKETLEVALRRTKDFVEKIKGRKSNVIFRS

SEQ ID NO: 474 - protein, 101 aa, Zea mays
  misc_feature (14)..(14): Xaa can be any naturally occurring amino acid
  misc_feature (20)..(20): Xaa can be any naturally occurring amino acid
  misc_feature (26)..(26): Xaa can be any naturally occurring amino acid
DNHLYKLIGSPDLXFGRNFXRCPELXNTLPVLQLCYSMSHRLQLYDKKPPQHLEDTSPDAVTPLTSVTNWKIFIPVYSPYEVKAQLKYWAHAVACTLRLCS

SEQ ID NO: 475 - protein, 482 aa, Bartonella rattimassiliensis
ELEDKFENMGAQMLREVASKTNDIAGDGTTTATVLGHAIVQEGIKAVAAGMNPMDLKRGIDAAVDEVVANLFQKAKKIQTSAEIAQVGTISANGAVEVGKMIADAMEKVGNEGVITVEEAKTAETELEVVEGMQFDRGYLSPYFVTNAEKMVADLDDPYILIHEKKLSNLQSLLPVLEAVVQSGKPLLIIAEDVEGEALATLVVNKLRGGLKIAAVKAPGFGDRRKAMLEDIAILTSGQVISEDVGIKLENVTLDMLGRAKKVNISKENTTIIDGAGQKSEIAARVNQIKAQIEETTSDYDREKLQERLAKLAGGVAVIRVGGATEVEVKEKKDRVDDALNATRAAVEEGIVAGGGTALLRAASALTVKGINPDQEAGINIVRRALQAPARQIATNAGEEAAIIVGKVLENNADTFGYNTATGEFGDLIALGIVDPVKVVRSALQNAASIASLLITTEAMVAEVPKKDTPMPPMPAGGMGGM

SEQ ID NO: 476 - protein, 486 aa, Bartonella rattimassiliensis
ELEDKFENMGAQMLREVASKTNDIAGDGTTTATVLGHAIVQEGIKAVAAGMNPMDLKRGIDAAVDEVVANLFQKAKKIQTSAEIAQVGTISANGAVEVGKMIADAMEKVGNEGVITVEEAKTAETELEVVEGMQFDRGYLSPYFVTNAEKMVADLDDPYILIHEKKLSNLQSLLPVLEAVVQSGKPLLIIAEDVEGEALATLVVNKLRGGLKIAAVKAPGFGDRRKAMLEDIAILTSGQVISEDVGIKLENVTLDMLGRAKKVNISKENTTIIDGAGQKSEIAARVNQIKAQIEETTSDYDREKLQERLAKLAGGVAVIRVGGATEVEVKEKKDRVDDALNATRAAVEEGIVAGGGTALLRAASALTVKGINPDQEAGINIVRRALQAPARQIATNAGEEAAIIVGKVLENNADTFGYNTATGEFGDLIALGIVDPVKVVRSALQNAASIASLLITTEAMVAEVPKKDTPMPPMPAGGMGGMGGMD

SEQ ID NO: 477 - protein, 478 aa, Bartonella phoceensis
MGAQMLREVASKTNDVAGDGTTTATVLGQAIVQEGVKAVAAGMSPMGVKRGIDAAVDEVVANLFKKAKKIQTSAEIAQVGTISANGAAEIGKMIADAMEKVGNEGVITVEEAKTAETELEVVEGMQFDRGYLSPYFVTNAEKMVADLDDPYILIHEKKLSNLQSLLPVLEAVVQSGKPLLIIAEDVEGEALATLVVNKLRGGLKIAAVKAPGFGDRRKAMLEDIAILTSGQVISEDVGIKLENVTLNMLGRAKKVNISKENTTIIDGAGQKNEISARVSQIKAQIEETTSDYDREKLQERLAKLAGGVAVIRVGGATEVEVKEKKDRVDDALNATRAAVEEGIVAGGGTALLRAASALTVKGSDPDEEAGINIVRRALQAPARQIATNAGEEAAIIVGKVLENNADTFGYNTATGQFGDLIALGIVDPVKVVRSALQNAASIASLLITTEAMVAETPKKDTTMPPMPAGGMGEWAEWI

SEQ ID NO: 478 - protein, 254 aa, Zea mays
MTTRQVLTEENQKKIVEFCKNERLVLLADEVYQENIYVEDKQFHSFIIIARSLGYTDDDLPLVSFQSISKGYYGECGKRGGYMEITGFSPQVRDQIYKMASINLCSNITGQILASLVMNPPKAGDESFESFRLERDGILSSLGRRAQALEEAFNSLEGITCNKAEGAMYLFPRLHLPRKAIGAAQAAGTAPDAYYAKRLLEATGIVFVPGSGFGQVPGTWHIRSTILPQEDKIPGIVSRFKEFHDKFMDEFRDY

SEQ ID NO: 479 - protein, 207 aa, Oryza sativa
MFGGGGGGGRKPLDYEELNENVKKVQYAVRGELYLRASELQKEGKKIIFTNVGNPHALGQKPLTFPRQVVALCQAPFLLDDPNVGLIFPADAIARAKHYLAMAPGGLGAYSDSRGIPGIRKEVAEFIERRDGYPSDPELIYLTDGASKGVMQMLNTIIRNERDGILVPVPQYPLYSAAISLFGGSLVPYYLEEEANWGLDFVNLRQT

SEQ ID NO: 480 - protein, 765 aa, Neurospora crassa
MQRLALHYPPLDPAAEPPTEHILQQSNPTMSNIISQAGQKAKEALTSAPSSKKVDDLKNEFKETDKSARLTTDYGVKQTTADDWLRIVSDDKIGPSLLEDPFARERIMRFDHERIPERVVHARGSGAFGKFKVYESASDLTMAPVLTDTSRETPVFVRFSTVLGSRGSADTVRDVRGFAVKFYTEEGNWDLVGNNIPVFFIQDAIKFPDVIHAGKPEPHNEVPQAQSAHNNFWDFQFNHTEATHMFTWAMSDRAIPRSLRMMQGFGVNTYTLINAQGKRHFVKFHWTPELGVHSLVWDEALKLAGQDPDFHRKDLWEAIENGAYPKWKFGIQAIAEEDEHKFDFDILDATKIWPEDLVPVRYIGEMELNRNPDEFFPQTEQIAFCTSHVVNGIGFSDDPLLQGRNFSYFDTQISRLGVNFQELPINRPVCPVMNFNRDGAMRHTISRGTVNYYPNRFDACPPASLKEGGYLEYAQKVAGIKARARSAKFKEHFSQAQLFYNSMSPIEKQHMINAFGFELDHCEDPVVYGRMVQRLADIDLGLAQTIAEMVGGEAPTTTNHPNHGRKTINLSQTEFPPATPTIKSRRVAIIIADGYDNVAYDAAYAAISANQAIPLVIGPRRSKVTAANGSTVQPHHHLEGFRSTMVDAIFIPGGAKAAETLSKNGRALHWIREAFGHLKAIGATGEAVDLVAKAIALPQVTVSSEAEVHESYGVVTLKKVKPESFTDAVKIAKGAAGFLGEFFYAIAQHRNWDRELDGLHSMIAY

SEQ ID NO: 481 - protein, 404 aa, Frankia sp. EAN1pec
MEFAQSDKLADVCYDVRGPILDEATRLEAAGQRILKLNIGNPAPFGFSAPPSVLAAVVENLAAAQGYSDSKGLLPAREAVVRYAAGKGMTSVTPDDVYLGNGVSELIMMSLQALLNNGDEVLLPAPDYPLWTAVVSLTGGRPVHYLCDESAGWNPDLDDIIRKITPRTRAIVIINPNNPTGAVYDRPVLEELIEVARRHHLMLFSDEIYDRILYDGAEHHSPAALAPDLFCVTFNGLSKAYRLAGFRSGWMTLSGPRQHASSYIEGLNILANMRLCANVPGQFALQAALAEGSGAGDLVLPGGRLLEQRDTVVKLLNDIPGVSCVPPRGALYAFPRIDPEVYPIDDDESFVLDLLQAERILLVQGTGFNWPRPDHVRLVTLPCVDDLTDAVGRIDRFLTTYART

SEQ ID NO: 482 - protein, 471 aa, Streptococcus pneumoniae R6
MTIFPDDFLWGGAVAANQVEGAYNEDGKGLSVQDVLPKGGLGEATENPTEDNLKLIGIDFYHKYKEDISLFSEMGFNVFRTSIAWSRIFPKGDEEEPNEAGLKYYDELFDELHAHGIEPLVTLSHYETPLYLARKYHGWIDRRMIHFYEKFARTVLERYKDKVKYWLTFNEVNSVLELPFTSGGIDIPKENLSKQELYQAIHHELVASSLVTKIAREINSEFKVGCMVLAMPAYPMTPNPKDVWATHEYENLNYLFSDVHVRGYYPNYAKRYFKEHDINIEFAAEDAELLKNYTVDFLSFSYYMSVTQSALPTQYNSGEGNIIGGLVNPYLESSEWGWQIDPIGLRIILNRYYDRYQIPLFIVENGLGAKDQLIKDEFNNLTVQDDYRIQYMKEHLLQVAEALQDGVEIMGYTSWGCIDCVSMSTAQLSKRYGLIYVDRNDDGNGTFNRYKKMSFTWYKGVIESNGESLFK

SEQ ID NO: 483 - protein, 476 aa, Lycopersicon esculentum
MDLETSEISNYKSSAVLSKLASNEQHGENSPYFDGWKAYDNDPFHLVNNLNGVIQMGLAENQLSVDLIEEWIKRNPKASICANDGIESFRRIANFQDYHGLPEFTNAIAKFMEKTRGGKVKFDAKRVVMAGGATGANETLILCLADPGDAFLVPTPYYPGFNRDLRWRSGVQLLPISCKSCNNFKITIEAIEEAYEKGQQANVKIKGLILTNPCNPLGTILDRDTLKKISTLTNEHNIHLVCDEIYAATVFNPPKFVSIAEIINEDNCINKDLVHIVSSLSKDLGFPGFRVGIVYSFNDDVVNCARKMSSFGLVSTQTQHLLAFMLSDDEFVEEFLIESAKRLRERYEKFTRGLEEIGIKCLESNAGVYCWMDLRSLLKEATLDAEMSLWKLIINEVKLNVSPGSSFNCSEVGWFRVCFANIDDQTMEIALARIRMFMDAYNNVNKNGVMKNKHNGRGTTYDLTPQMGSTMKMLLA

SEQ ID NO: 484 - protein, 369 aa, Pseudomonas aeruginosa UCBPP-PA14
MSNLLLSPLAVGNLALRNRIVMAPMTRSRAQQPGDVPTALNALYYAQRAGAGLIVSEGTQISRLGQGYAYTPGIYSEAQLAGWRQVTEAVHAAGGLIAAQLWHVGRMSHRSLQAGGEAPIAPSPIQAKAQVFIADGQGGGSMAPADAPREMTLEDIRRVRDEFVRAARNALDAGFDLVELHGANGYLIDQFLASASNRRSDAYGGSLENRARFLLEIVDALVAAVGAERVGLRLSPWGTINDMHDDEPEAMTLYLAEALQRRGIAYLHLAEWEWSGGPAYPQGFRERLRERFRAPLIVCGNYDAERAEAILQAGLADAVAIGRPFIANPDLVERIRLGAPLAEANQARFYGGDAAGYTDYPTLGQSATA

SEQ ID NO: 485 - protein, 476 aa, Lycopersicon esculentum
MDLETSEISNYKSSAVLSKLASNEQHGENSPYFDGWKAYDNDPFHLVNNLNGVIQMGLAENQLSVDLIEEWIKRNPKASICANDGIESFRRIANFQDYHGLPEFTNAIAKFMEKTRGGKVKFDAKRVVMAGGATGANETLILCLADPGDAFLVPTPYYPGFNRDLRWRSGVQLLPISCKSCNNFKITIEAIEEAYEKGQQANVKIKGLILTNPCNPLGTILDRDTLKKISTFTNEHNIHLVCDEIYAATVFNPPKFVSIAEIINEDNCINKDLVHIVSSLSKDLGFPGFRVGIVYSFNDDVVNCARKMSSFGLVSTQTQHLLAFMLSDDEFVEEFLIESAKRLRERYEKFTRGLEEIGIKCLESNAGVYCWMDLRSLLKEATLDAEMSLWKLIINEVKLNVSPGSSFNCSEVGWFRVCFANIDDQTMEIALARIRMFMDAYNNVNKNGVMKNKHNGRGTTYDLTPQMGSTMKMLLA

SEQ ID NO: 486 - protein, 441 aa, Glycine max
MSQPKIKRRVGKYEVGRTIGEGTFAKVKFARNSETGDPVALKILDKEKVLKHKMAEQIRREVATMKLIKHPNVVRLCEVMGSKTKIYIVLEFVTGGELFDKIVNHGRMSENEARRYFQQLINAVDYCHSRGVYHRDLKPENLLLDAYGNLKVSDFGLSALSQQVRDDGLLHTTCGTPNYVAPEVLNDRGYDGVTADLWSCGVILFVLVAGYLPFDDPNLMNLYKKISVAEFTCPPWLSFSARKLITRILDPDPTTRITIPEILDDEWFKKDYKPPVFEENGETNLDDVEAVFKDSEEHHVTEKKEEQPTAMNAFELISMSKGLNLENLFDTEQGFKRETRFTSKSPADEIINKIEEAAKPLGFDVQKKNYKMRLANVKAGRKGNLNVATEIFQVAPSLHMVEVRKAKGDTLEFHKFYKKLSTSLDDVVWKTEDDMQMRETK

SEQ ID NO: 487 - protein, 246 aa, Zea mays
MRMLSKACSIVASSLPRCSSSAAAPTMRGQPSLLPSVRKQWPGKPLLYGIGTLLVMPLRTLYGVGRVFGAGRFLCNMTNVSSSLQIELVPCLRDNYAYILHDVDTGTVGVVDPSEAMPIINALEKRNQNLTYILNTHHHYDHTGGNLADEGTDAWEVIGSEKDKDRIPGIDITLKEGDTWMFAGHQVLVLETPGHTTGHVCYYFAGSGAIFTGDTLFNLSCGKLFEGTPQQVFHLLANIFIYMYVV

SEQ ID NO: 488 - protein, 544 aa, Tannerella forsythensis
MAKEIKFDMNARDLLKKGVDELANAVKVTLGPKGRNVILEKKFGAPQITKDGVTVAKEIELACPYENMGAQLVKEVASKTNDKAGDGTTTATVLAQAIIGVGLKNVTAGANPMDLKRGIDKAVSKVVESIASQSEAVGTNMDRIEHVAKISANGDEGIGKLIAEAMQKVKKEGVITVEEAKGTETTVEVVEGMQFDRGYISAYFVTDTEKMETQFENPYILIYDKKISVLKDLLPILEQMVQSGRALLIIAEDIDSEALATLVVNRLRGGLKVCAVKAPGFGDRRKAMLEDIAILTGGTVITEEKGMKLEDAKMDMLGSADKVTVNKDNTTIVKGNGDKAAIESRIGQIKAQIETTTSDYDKEKLQERLAKLAGGVAVLYVGAPSEVEMKEKKDRVDDALHATRAAIEEGTVPGGGVAYLRAIPALEGLKGENEDETTGIEIVKRAIEEPLRQIVNNAGKEGAVVVQKVKEGTGAFGYNARTDVYEDLSEAGVVDPAKVTRIALENAASIAGMFLTTECVVADKKEEAPAPPMNPGMGGMGGMM

SEQ ID NO: 489 - protein, 251 aa, Buchnera aphidicola str. APS (Acyrthosiphon pisum)
MILKKISILSDNYVWVLLNTSGSCIIIDPGLSEPIIQEIERKKWRLRAILLTHNHIDHTGGTRKIIEYFPKISVFGPKETRQHGVNKIVSHGDRIILLDKIFYVFFTPGHTSGHVSYYSQPYIFCGDTLFSAGCGRVFKNKHLEMYRSIKIISSLPDSTLLCCSHEYTLSNLQFSMFILPNDNFIKLYLKKIEIKLKLGQSSLPSYIFFEKKINLFLRTNDNYVKKSIGLKSTCTDFEVFKRLRLKKDFWS

SEQ ID NO: 490 - protein, 598 aa, Magnetococcus sp. MC-1
MCGICGVMYFQPQTPQPAMLEKMVEKLHQRGPDGGGIEIDGQLGLGHRRLKVIDLSENGHQPMQDDALGLTIVFNGCIYNYQALRQSLLELGYSFFSTSDTEVILKAYHAWGWQCVQRFNGMFAFAIYERQSGRVVLARDRLGIKPLYIHQDKSHLRFASSIPSLLAGGGITTTLDPIALHHFLSFHSVVPAPRTLLQQVQKLPPATVRIVEKNGSETNHTYWNLQMGPQAGDAERTEAEWQQLLDQALRAAVSRRLVADVPVGLLLSGGLDSSLMAGLLVESGQLSRGGLSTFSIGFEQAGGEEGDEFQYSDIVAAHFGTDHHKIFIETNNLPELLRETVRAMSEPMVSHDAVGFYLLSREVAKHVKVVQSGQGADEVFAGYHWYPKVDAGQDAFQDYRKAFFDRSHEECCEMVHRDIAAAWQQDYSSAFVESWFAHPHSGTAAVDKALHLDQNIMLVDDPVKRVDNMTMAWGLEARVPFLDHELVELAARIPGHLKLQQGGKGILKEVARPIIPHAVIDRAKGYFPVPALKHMDGPVLKLAKEVLTSPRATQRGLIQPSYINRLLDHPTQHITPLHGSKLWQLTLLELWLQTHDIH

SEQ ID NO: 491 - protein, 145 aa, Carboxydothermus hydrogenoformans Z-2901
MLIPFDPWREMLNFKNQMERFFERGDFLEPFNPARLFSPRVEIFEEGADVVVRAEIPGLNAKEDLEVIVEPESLTLRGEIRDERERKQERFYRSERYYGKFSRTIALPAEVEPDHARASYQNGILEVRMKKSGKNNPRARRIEIQ

SEQ ID NO: 492 - protein, 327 aa, Magnetospirillum magnetotacticum MS-1
MPSLFDPITLGALTLPNRILMAPLTRGRATRTHVPTPMMAEYYAQRASAGLIISEATGISQEGLGWPYAPGIWSDEQVEAWKPVVKAVHDAGGRIVSQLWHMGYLVHSDFLGGEPPVAPSVATAPDQAHTYEGKKPYSQARALREDEIPRLIADYERAARNALAAGFDGVQIHAANGYLLDEFIRDGSNKRSDRYGGSVENRVRLVTKVAQAVAGVVGPERTGIRFSPNGPIQGVDDSNPHETFGLAAEMMERVGLAFIELREPGPNGTFGKATVAPVAPVIKERFGGPVILNCDYDGERAKAAVASGEADAIAFGRPYIANPDLPE

SEQ ID NO: 493 - protein, 175 aa, Sinorhizobium meliloti 1021
MAEPATKLPIKSEEKGVERRAESWLPFESLRSEIDRLFDDFAPSLWHRPLASALMRRVPRLSELDVAPAVDLAETEKTYEITCELPGMEEKDIEVAISNGTLTIRGEKQEEKKENKKEYVLSERRYGSFQRTFRMPDGVDTEKIAAKFSKSVLSITLPKTPEAQQNERKIQIKVT

SEQ ID NO: 494 - protein, 435 aa, Arabidopsis thaliana
MGSWIPKLLLLQLVLLLTKHADSSSIIKYLPGFEGPLPFELETGYIGVGDEDEDQMFYYFIKSESNPEEDPLLVWLSGGPGCSSFTGLVYENGPLGFKVEAYNGSIPTLVSTTYSWTKVANIIYLDQPVGAGFSYSRNPFADRPSDTGSAKLVNEFVRKWLAKHPDYFSNPFYVTGNSYSGKVIPAIVQEISNGNYICCKPQINLQGYVIGNPVAYYDHDKDSRIPFAHGVALISDELFESLKRSCGGSYSIVDPLNTECLKLIKDYHKCVSGIYQELILKPKCETTSPDCYTYRYLLSIYWANNEIVRRALKVVEGSKGKWERCDLSVRSNQDIKSSIPYHMNNSIKGYRSLVISGDHDMTIPFLGTQAWIRSLNYSITEKWRPWMILDQVAGYTKTYANKMTLATVKGGGHTLEYKPEENSILFKRWISGQPL

SEQ ID NO: 495 - protein, 411 aa, Arabidopsis thaliana
MSLTLEFLLLLIVLILSHHAHSGSIVKFLPGFEGPLPFELETGYIGIGEEEEVQLFYYFIKSEKNPEEDPLLLWLSGGPGCSSLTGLLFENGPVALKFEVYNGSVPSLVSTTYSWTKMANIIFLDQPVGSGFSYSRTPLVDKISDTGEVKRIYEFLQKWLSKHQQFFSNPFYVGGDSYSGMIVPPLVQEIGKGNYQINLQGYILGNPITDTESEQNYQIPYAHGMALISDELYKSMERICKGNYVKVDSLNTKCYKLIKDYQKCIHKLNKYHILLPDCDITSPDCFLYRYTLITFWANNKSVREALQVNKGSIGKWVQCNYKNISYNYDIKSSVAYHMKNSIDGYRSLIYNGDHDMMVPFLATQAWIRSLNYSITDDWKPWMINDQIAGYTRSYSNKMTFATIKASLLVST

SEQ ID NO: 496 - protein, 1342 aa, Oryza sativa (japonica cultivar-group)
MSDCNSGGGERRPNARATDAPPVRAPSGGAFRCRGCGACVILIAKYNPKTDEVTEFNASSCLTLLYSIHFCSIITTEGLGNTKDGFHAIQKRMSGFHASQCGFCTPGMCMSIFSSLVNADKSKKPDPPKGFSKLSVSEAERSFSGNMCRCTGYRPIVDACKSFASDVDLEDLGLNIFWKKGDKHPDPTKLPSYTLGGGICTFPDFLKSEIKSSIDFNDASISSPREGWYCPKNIKQYYKLVNSGLFSESSVKVVVGNTSTGVYKDQDLYDKYIDIAGIPELSAIVRKDKGIEIGAATSISRTIEILNQESESTSSPNGSVVFRKLAEHMSKVASPFVRNTASIGGNIILAHKYPFRSDIATILLGAAATVNLQVSSKTLHVTLEQFLEQPPLGHNTLLLSIFIPHWASDCKKEHTLVFETYRAAPRPLGNAVSYVNSAFLGHVSLDKSSGDNILSNLHLAFGAYGTEHAIRARKVEEYLTGKILSASVVLEAIRLLRETIVPVEGTTHPEYRVSVAVGFLFSFLSPLCKGVIEPGKTLSISEDLVHTDNVHNMPLSSRRETLSGDEYKPVGDPIKKYKVELQASGEAIYVDDIPAPKNCLYGEFIYSTQPLANVKSIKFKPSLASKKILTVVSAKDIPTGGRNIGSTFLFGDEEPLFGDPIAEFAGQALGVVIAETQRYADMAAKQAVVEYTTDGLKAPILTVEQAVQNNSYFQVPPERAPKQVGDFSKGMAEADHKIMSEEVKLASQYYFYMETQTALAIPDEDNTMTVYSSSQFPELAQNVISKCLGIPFNNVRVITRRAGGGFGGKAVRSLHIATAAALCAHTLRRPVRMYLNRNTDMIMVGGRHPMKARYSVGFKSDGKITALHLDLLINAGISADASPVIPGTIISGLKKYNWGALSFDVKLCKTNNTSKSVMRAPGDTQGSFIAEAIIEHVAAILSLDANTVRQKNFHTYDSLVLFYPDSAGESSTYTLHSIFDRLASTSRYLQRVESIKKFNSTNKWRKRGISSVPLIFKVEPRPAPGRVSVLNDGSIVVEVGGVELGQGLWTKVQQMTAFALGQLWPKGCEGLLDRIRVLQSDTLNLIQGGLTAGSTTSESSCAATLQACNMLIERLKPVMERLQLQSDTVSWDTLISQASQENINLSASAYWVPEQDSNFYLNYGAGTSEVEVDLLTGAITIIRSDLIYDCGKSLNPAVDLGQIEGSFIQGIGFFIYEEHQTNSDGLVISNSTWDYKIPSVDTIPKQFNAEVLNTGYHKHRVLSSKASGEPAVVLGASVHCAVREAIRAARIEFAGNNGSGSSLLTFQLDVPAPMTVVKELCGLDIVEKYLEDLSNRGAASGN

SEQ ID NO: 497 - protein, 475 aa, Lactobacillus gasseri
MSTLLKRVKKLPKGFVWGAATAAYQVEGNTNLDGKGKIMWDDYLKNQGNFSPNPACDFYHRYPEDLKIAHNLGLNAIRISIAWTRIFPNGYVTDEPNEAGVKYYHRLFHECLKNNLVPYVTLHHFDSPKTLFDQGDWLNREMIDEFVKYADFCFQEFVEVDNWFTINELISLAMCQYIQGTFPPNKLFDVSDAIQAQHNELVAHAKVVNLFKAKGYKGRIGLIHVIQPVYPATNSEADRHAADLRDAFMNRFLLDGTLLGFYSDRTRHLIKEILVANNAELHILPEDLEILKQASKQNDMLGINYYQNQTVASYDGPSETYHNGNGKKGSSVFAFHGVGKDVRNPAIPTTDWDWNIYPEGLYDVLKRIAHDYPDYPVIYITENGMGAKEAWDSSKEYLDDNYRIDFIDQHLAAILKARNEGVNVQGYFLWSLQDQFSWSNGYNKRYGLIYVDFASQDRHLKRSALWFKALSKTMK

SEQ ID NO: 498 - protein, 369 aa, Yersinia pestis biovar Medievalis str. 91001
MDKLFTPFKVGDTELVNRVVMAPMTRSRATVGDTADELTAKYYQQRASAGLIITEGSQISVQGQGYLFTPGIYNDAQVKGWERVTNAVHNAGGKIYIQLWHVGRISHTGLQNDGQAPVSSVAVKAKNSTCYARDENGQPGLVPVSEPRALSVSEIKDIVQDYVQAADNAIRAGFDGVEIHAANGYLLEQFINGGLNTRQDEYGGADPENRLRFVLEVTDAISQAIGAGKTGIRLAPFGRLFDMHPFEGEEETWLLLAKELSTRSLSYVHLSDQQTLGEQAIPAGFIEKFRAAYDGPLIIAGGFDKQRAEQYLQQGKADLIGFGRPYIANPDLVERMVNDWPLNQVDRATMYGGDEKGYTDYPVWSDTQA

SEQ ID NO: 499 - protein, 542 aa, Rhizobium sp. NGR234
MAAKEVRFHTDAREKMLRGVDILANAVKVTLGPKGRNVVLDKSFGAPRITKDGVTVAKEVELEDKFENMGAQMVREVASKTSDIAGDGTTTATVLAQAIVKEGAKAVASGMNPMDLKRGIDKAVDAIVEELKTNARRVTKNDEIAQVGTISANGDIEIGRFLAEAVEKVGNEGVITVEEAKTAVTELEVVEGMQFDRGYLSPYFVTNPDKMRVELEEPYLLIHEKKLSNLQALLPVLESVVQSGKPLLIIAEDVEGEALATPVVNKLRGGLKIAAVKAPGFGDRRKAMLEDIAILTGGTAISEDLGIKLENVTLNMLGRAKKVVVEKENTTIVDGAGSKSEIQGRVAQIRAQIEETTSDYDREKLQERLAKLAGGVAVIRVGGSTEVEVKERKDRVDDAMHATRAAVEEGVLPGGGVALLRAVKALDSIRTENADQKHGIEIVRRALEAPVRQIAENAGAEGSIIVGKLREKTEFGFGWNAQTNEFGDLYDQGVIDPVKVVRTALQDAASVAGLLITTEAMVAEKPKKDAPLPPMPGGGMDF

SEQ ID NO: 500 - protein, 537 aa, Dehalococcoides ethenogenes 195
MAKQIIFGEKVRVSLKKGVDTLANTVRVTLGPKGHPVALERKWGAPTVIDDGVTIARDIELPDAFENMGAQLVKEAATRTSDAAGDGTTTSIVLAQALINEAFKNIAAGAEPINLKRGIEKAVAALKAQLRKNSTPVKGKQQIVQVATITGKDPEIGNLIADVMDKVGKDGVITIEESRGLRYETSYVEGMQFDRGYISAYFVTDPGRMESIMEDATILMTDRKIETVAELLPALEKILQISKNLVIVAENVEAEALATLVVNKLRGNLNILAVKAPGYGDRQKAMLEDMAILTGGHVISKEAGRKLDSVTEADLGHARRVVSNKDKTTIIDGEGSAEAIKNRIKQIKAQIEETESAFDREKLQERQAALVGGVAVIAVGAATETEMKERKARVEDALAATRAAIEEGILPGGGTGLLNALPCLDALKLEGDEATGVSIVRKALIEPVRWIATNAGKDGNVIVDKVKNSPVGHGYNAEKDVFGDMAEMGIIDPTMVVRSALENASSIANMVLITDSLVADIQDKNPAPPMPEAPGMY

SEQ ID NO: 501 - protein, 384 aa, Pleurotus sajor-caju
MPTQEVFDKQDGAVYTTSNGAPVAEPYAAQRAGLHGPLLLQDFHHIDLLAHFDRERIPERVVHANAAGAHGYFEVTHSCADITSNKLLCSVGKKVRLTARFSTVGGESGSADTARDPRGFALKLRTEEGNWDWVFNNTPIFFIRDPAKFPHFIHTQKRDPQTHLKDADMFWDYLGQNPESIHQMMILFSDRGTPDGVRQMHGYSGHTFKWLKDDGSFTYVQVHCRADSGFKTLDGDTAHRLTADNPDYSTEMLFRTIEAGKFPSWTVYIQTMTPEQAENFRYNILDLTKVWPHKEFPLRPIGRFVLDENPKNYFAEIEQAAFAPSHLVPYIEPSADPVLQSRLFSYPDTHRHRLGANYHQIPVNAPIVPVANFQRDGPMTVNNN

SEQ ID NO: 502 - protein, 700 aa, Oryza sativa
MSVSSSSMGGGGGGDAGGRTVVWFRRDLRVEDNPALAAAARAGGEVVPAYVWAPEEDGPYYPGRVSRWWLSQSLKHLDASLRRLGAGKLVTRRSADAVVALLQLVRDTGATRLFFNHLYDPISLVRDHRLKEMMAAEGIIVQSFNADLLYEPWEVVDDEGQSFTMFAPFWNRCLSMPYDPAAPLLPPKRINSGDLSMCPSDDLIFEDDSERGSNALLARAWSPGWQNADKALTAFLNGPLIHYSVNRKKADSASTSLLSPYLHFGELSVRKVFHLVRMKQLVWSNEGNRAAEESCTLFLRSIGLREYSRYLSFNHPCSHEKPLLAHLRFFPWVINECYFKIWRQGRTGYPLVDAGMRELWATGWLHDRIRVVVSSFFVKVLQLPWRWGMKYFWDTLLDADLESDALGWQYISGSLPDGRELDRIDNPQLEGYKFDPHGEYVRRWLPELARLPTEWIHHPWDAPASVLQAAGVELGSNYPLPIVGLDAANARLQEALSEMWQLEAASRAAMDNGMEEGLGDSSEVPPIEFPRELQMEVDREPARVTANVLTTARRREDQMVPTMTSSLNRAETEISADFMNSVDSRAEVPTRVNFEPRTEREENFRTTAGNVARTNGIHEHNNFQQPQHRMRNVLAPSVSEASSGWTGREGGVVPVWSPPAASDHSETFASDEADISSRSYLDRHPQSHRLMNWSQLSQSL

SEQ ID NO: 503 - protein, 497 aa, Erwinia carotovora subsp. atroseptica SCRI1043
MTTHVVTHHAVTHVVWLRNDLRITDNLALYAACQDPSATVLAVFIATPAQWEKHDMAPRQAAFLLENLTLVQHVLAEKGIPLHYHECADFAASVDWLMQFCAEQQATDLFYNHQYEINERLRDKQVKDRLADSVVCHGYHDSLLLPPGSVLTGNGEMYKVFTPFRQAFIKRLLEADTTCVPAPDARGEPINNTAELVPFSYPQCEVDSEDFPCGERAALQQLRRFCREQVQDYDQQRDFPALPGTSKLSPYLALGIVSPRQCFNRLRAECPDMLERREGGAFTWFNELVWREFYRHLIVSWPQLCKHRPFTAWTQWVKWRESPEDLTAWQQGKTGYPIVDAAMHQLNETGWMHNRLRMICASFLVKDLLIDWREGERYFMSQLLDGDLAANNGGWQWAASTGTDAAPYFRIFNPTTQGERFDPDGRFIRHWLPELAAVPDKDIHQPHRWADKQHVKLNYPLPIVDHKTARLDTLAAFEAAKNIGMANNDREEKSKYA

SEQ ID NO: 504 - protein, 422 aa, Glycine max
MNSERQSTTTTLLHGKYELGRVLGHGSFAKVYHARNLKTGQHVAMKVVGKEKVIKVGMMEQVKREISVMKMVKHPNIVELHEVMASKSKIYISIELVRGGELFNKVSKGRLKEDLARLYFQQLISAVDFCHSRGVYHRDLKPENLLLDEHGNLKVSDFGLTAFSDHLKEDGLLHTTCGTPAYVSPEVIAKKGYDGAKADIWSCGVILYVLLAGFLPFQDDNLVAMYKKIHRGDFKCPPWFSLDARKLVTKLLDPNPNTRISISKVMESSWFKKQVPRKVEEVVEKVDLEEKIENQETMNAFHIISLSEGFNLSPLFEEKRKEEMRFATAGTPSSVISRLEEVAKAGKFDVKSSETKVRLQGQERGRKGKLAIAADIYAVTPSFMVVEVKKDNGDTLEYNQFCSKQLRPALKDIFWNSAPASA

SEQ ID NO: 505 - protein, 359 aa, uncultured marine gamma proteobacterium EBAC20E09
MIFEPYKLKNITLRNRVVMAPMTRNQSPGGIPTQDVVSYYSRRSKAEVGLIITEGIEVSHKASSAYPNVPRLDSENAREGWKKVVNGIKKHDGSVIAQLWHCGGFRKLGMQPDPEVPGYTASGLVKPGKKVAHEMTLDDIKETIEAYASDAKICEELGFDGIEIHGAHGYLIDNFFWSGTNIRDDQYGGTIEKRSQFVVDIIKAIRDQVSNEFIVGLRFSQWKQHDFEAKLALNPEELKKVLIEPVNSGLDYVHSSMRRFWEKEFENSEENLAYWTKKITKIPTIGVGSVGLDSDFIDMTAPASPTSIERAIEDISKNKYDMIAVGRALLSDPEWVLKMKEGRLNDVIPYTKEALLNLY

SEQ ID NO: 506 - protein, 508 aa, Haemophilus influenzae
MSSQCPFSHLAATNLTMGNGAPVADNQNSLTAGPRGPLLAQDLWLNEKLADFVREVIPERRMHAKGSGAFGTFTVTHDITKYTRAKIFSEVGKKTEMFARFTTVAGERGAADAERDIRGFALKFYTEEGNWDLVGNNTPVFFLRDPRKFPDLNKAVKRDPRTNMRSATNNWDFWTLLPEALHQVTVVMSDRGIPASYRHMHGFGSHTYSFWNEAGERFWVKFHFRTQQGIKNLTDAEAAEIIANDRESHQRDLYEAIERGDFPKWTLFVQIMPEADAEKVPYHPFDLTKVWSKKDYPLIEVGEFELNRNPENFFADVEQSAFAPSNLVPGIGASPDRMLQARLFNYADAQRYRLGVCYRQIPVNRPRCPVHSNQRDGQGRVDGTYGSLPHYEPNSFSQWQQQPDFAEPPLRISGDAAHWDYRTDDNDYFSQPRALFNLMNAEQKQSLFNNTAAAMGDAPDFIKYRHIRNCHWCDAAYGEGVAKALGLTVEDALKARDTDPALGQGGLL

SEQ ID NO: 507 - protein, 641 aa, Bordetella parapertussis 12822
MCGIVGIWGPLRDKANVLAESCRRIRHRGPDSNGYWEDAEADLALAHVRLAILDLTEAGHQPMVSACGRYVIVLNGEIYNHMELRERLQQDGLAPAWRGHSDTETVLACFAGWGLEQTLQAAVGMFAIALWDRAERKLALMRDRMGEKPLYYGYSQANLLFGSELKAFMPVPGFGRELDRNALASFMRHNYIPAPQSIYAGIRKLPPGAWVEIDAAQMRRGELPEPQVYWSARRAADQGLGDRRRFESDAQAIDALEQVVSQAVRGQMLSDVSLGAFLSGGIDSSTVVALMQAQSAQPVRTFAIGFHEKGYNEAEHAKAVAAHLGTEHTELYVTAEDGLAVVPSLADMYDEPFADSSQIPTSLVTRMARQHVTVALSGDGGDELFGGYSRYFRVDNWWRKCAAMPGPLRHLAGAALRGSAALPGAGAWRGKVGKLGELLGADTRGEFYRLFVSYWADPGRVVIGGTEPLSPFEQPMEGSTFDAMMKLDTVTYLPDDILVKVDRAAMAVSLETRVPLIDHRVYEFAWQLPFEYKVRGGTGKWLLRQLLYRHVPQAMVDRPKRGFAVPLAAWLRGPLRDWAEALLDPARLRQEGWFEPEPILRKWREHLSGHRNWDSHLWGVLMMQAWLDRYRAGAGDEAGRR

SEQ ID NO: 508 - protein, 505 aa, Oryza sativa
MVLSHASSGRDDAVRCTFATRYACETLPRFRMPEQSIPREAAYQIINDELMLDGNPRLNLASFVTTWMEPECDKLIMDSVNKNYVDMDEYPVTTELQNRCVNMIAHLFNAPIKEDETAIGVGTVGSSEAIMLAGLAFKRKWQNKRKEQGKPCDKPNIVTGANVQVCWEKFARYFEVELKEVKLSEGYYVMDPVKAVEMVDENTICVAAILGSTLTGEFEDVKLLNNLLTEKNKETGWDVPIHVDAASGGFIAPFLYPELEWDFRLPLVKSINVSGHKYGLVYPGVGWVIWRSKEDLPEELIFHINYLGTDQPTFTLNFSKGIQEHHAELHGEHSNTKGRHRGDWSIRNPLQGGRCALGGVLAQGQRQVHRVRHLRAPEEVRLDRAGVHHAGQRRARRRPPRRHQGGLQPEPRRAARLGHRQDPARAGRPFGPGAEDLQRHREAAIGRRWRGHQEERPGDREGDLRVLEGPGEEEADRNLLVWLCEKCLNNVACSICAWDGRIGWD

SEQ ID NO: 509 - protein, 358 aa, Methylobacillus flagellatus KT
MPADLFSPTKLGSIALKNRIVMAPLTRNRAGKGNVPQPINAEYYAQRASAGLIITEATPISPTAHGYPATPGIHEPEQVEGWKLVTKAVHDKGGKIVLQLWHVGRISHPSLQPGNALPVAPSAIKPAGQAFTYEGLQDFVTPRALAIEELPGIVADYAQATRNALEAGFDGVEIHAANGYLLDQFLRDSTNRRTDEYGGSIENRTRLLLEVTQAVVDVAGADRVGVRISPLNPFNDISDSNPQALFNHVADSLSPFGLAYLHVVEGGMGGGDIPPFDFSALRRHFKGGYIANLGYDKAKGNAAIASGHADAVAYGSLYIANPDLVERFQQDAPLNTPDQATFYGGDAKGYTDYPTLQG

SEQ ID NO: 510 - protein, 284 aa, Arabidopsis thaliana
FLQLLQISYFPENHFPKKNKTFPFVLLPPTAITAYQSELGGDSSPLRKSGRGKIEIKRIENTTNRQVTFCKRRNGLLKKAYELSVLCDAEVALIVFSSRGRLYEYSNNSVKGTIERYKKAISDNSNTGSVAEINAQYYQQESAKLRQQIISIQNSNRQLMGETIGSMSPKELRNLEGRLERSITRIRSKKNELLFSEIDYMQKREVDLHNDNQILRAKIAENERNNPSISLMPGGSNYEQLMPPPQTQSQPFDSRNYFQVAALQPNNHHYSSAGRQDQTALQLV

SEQ ID NO: 511 - protein, 480 aa, Photorhabdus luminescens subsp. laumondii TTO1
MKKRGLTTNAGTPVVDNNNVMTAGQRGPMLLQDVWFLEKLAHFDREVIPERRMHAKGSGAHGVFVVTHDITKYTRAKIFSEIGKKTEMFARFSTVAGERGAADAERDIRGFALKFYTEEGNWDLVGNNTPIFYLRDPLKFPDLNHVVKRDPHTNLRNPAYKWDFFSHQPESLHQLTIDFSDRGVPKSFRHMHGFGSHTFSFINADNERFWVKFHFRCQQGIKNLMDEEAEALVGKDRESSQRDLFAAIEQGDYPRWKLKVQIMPEKEANLLPYNPFDLTKVWPHGDYPMIDVGYFELNRNPDNYFSDVEQAAFNPANVVPGISFSPDKMLQGRLFSYGDAQRYRLGVNHHQIPVNTPRCPFHNYHRDGAMRVDGNSGNTVTYEPNNAGLFQEQPEFKHPSLSLEGDADHWNHRQDEDYFSQPRKLFMLINSKEHQRMFDRIASELSQAHEDTQRRQVELFRKVHPEYGAGVENALKKIKG

SEQ ID NO: 512 - protein, 440 aa, Leptospira interrogans serovar Lai str. 56601
MGAPLKTPDGFNIGTLCVFDSQPKHLNPKQRVILKALSNQIIYNFELNKKNIELLLIQKKEEELQKSKSLFFANMSHEIRTPVHGILGVSGLLSETELQQEQKEYVDTIQRSGKLLLNLLNDILDFSKLESFNMKIEIIAFDLIDLLKDVFHLFEADAKRKNIEFKLVGKQPSHSIVSTDPHRFKQILVNLISNAIKFTEKGSVLIEFDFKSDLKHCDIQIRIKDTGVGIPEQKLKELFQAYRQVDTSVSRKYGGTGLGLSISKNLSEMMNLKLTARSIINQGSVFEISGQIPLAEKSEVNFEPKKATQNIEIQNLNILVAEDNETNQMLIKKILEKLGYKPVIVSNGIEALHHIKMYKTDVLFLDIQMPELNGIEAAKILTQQNDSSIRPYIIAMTANASQTDKEDCMASGIDQYLSKPFHKEEIADLLNQFISHKTTN

SEQ ID NO: 513 - protein, 147 aa, Alkalilimnicola ehrlichei MLHE-1
MQYLHTMVRVSDLDASLDFYCNKLGLVEISRKESEKGRFTLVFLAAPDDEARARSADKAPMLELTYNWDPETYTGGRNFGHLAFRVPDIYGLCQRLMDSGVTINRPPRDGHMAFVRSPDGISIELLQAGEALPPKEPWASMANTGTW

SEQ ID NO: 514 - protein, 542 aa, Oryza sativa
MGNQCQNGTLGSDYHNRFPREHAVGYVQGDSYLDLKKFDDTWPEVNNFKPTAASILRRGLDPTSINVLGRKTADLREHYIIGRKLGQGQFGTTYLCTEINTGCEYACKTIPKRKLITKEDVEDVRREIQIMHHLSGHKNVVAIKDVYEDGQAVHIVMEPCAGGELFDRIQEKGHYSERKAAELIRIIVSIVAMCHSLGVMHRDLKPENFLLLDKDDDLSIKAIDFGLSVFFKPGQVFTELVGSPYYVAPEVWHKRYGPESDVWSAGVILYVLLSGVPPFWAETQQGIFDAVLKGHIDFQSDPWPKISDSAKDLIRKMLSHCPSERLKAHEVLRHPWICENGVATDQALDPSVISRLKQFSAMNKLKKLALRVIAERLSEEEIAGLREMFKAVDTKNRGVITFGELREGLRRFGAEFKDTEIGDIMEAAHNDNNVTIHYEEFIAATLPLNKIEREEHLLAAFTYFDKDGSGYITVDKLQRACGEHNMEDSLLEEIISEVDQNNDGQIDYAEFVAMMQGSNVGLGWQTMESSLNVALRDAPQVH

SEQ ID NO: 515 - protein, 313 aa, Medicago sativa
MATAIKFFQLNTGAKIPSVGLGTWQAEPGVVAKAVTTAVQVGYRHIDCAEAYKNQSEIGSALKKLCEDGVVKREELWITSKLWCSDHHPEDVPKALDKTLNDLQLDYLDLYLIHWPVSMKRGTGEFMGENLDHADIPSTWKALGALYDSGKAKAIGVSNFSTKKLQDLLDVARVPPAVNQVELHPGWQQAKLHAFCESKGIHLSGYSPLGSPGVLKSDILKNPVVKEIAEKLGKTPGQVALRWGLQAGHSVLPKSTNEARIKKNLDVYDWSIPEDLFPKFSEIKQDKLIKGTFFVNDTYGAFRTIEELWDGEV

SEQ ID NO: 516 - protein, 338 aa, Frankia sp. CcI3
MAGFQPATHIPETGYSENGYGADGSTPRRKTISNSYLHRLQRRHFLLFDVLPIAGTAAAIAFLAVHPIGATELALLFSMWLLTGLGITVGYHRLFTHRAFKAAPAAAAALAVLGSMAGQGGVVSWVALHRRHHECSDRDGDPHSPNLAGNGLKGRLRGLAHSHFLWMRRHEYPNVVHYAPDLIKNRALVRVARLYYYWVTLGLLLPALVGGLVYQSWTGAVSGFLWGGLVRMFVLEHVIWGINSFLHMFGTRPYESRENSRNGGIFALLSLGESWHNNHHAFPDSPSFGLRWYRLDPGYWLIRLLAVSGLAWDVKLPSEERMAAKRIAARRSAPSTAV

SEQ ID NO: 517 - protein, 830 aa, Solanum tuberosum
EKSSYNSESRPSTVAASGKVLVPGTQSDSSSSSTDQFEFTETSPENSPASTDVDSSTMEHASQIKTENDDVEPSSDLTGSVEELDFASSLQLQEGGKLEESKTLNTSEETIIDESDRIRERGIPPPGLGQKIYEIDPLLTNYRQHLDYRYSQYKKLREAIDKYEGGLEAFSRGYEKMGFTRSATGITYREWAPGAQSAALIGDFNNWDANADIMTRNEFGVWEIFLPNNVDGSPAIPHGSRVKIRMDTPSGVKDSIPAWINYSLQLPDEIPYNGIYYDPPEEERYIFQHPRPKKPKSLRIYESHIGMSSPEPKINSYVNFRDEVLPRIKKLGYNAVQIMAIQEHSYYASFGYHVTNFFAPSSRFGTPDDLKSLIDKAHELGIVVLMDIVHSHASNNTLDGLNMFDGTDSCYFHSGARGYHWMWDSRLFNYGNWEVLRYLLSNARWWLDEFKFDGFRFDGVTSIMYTHHGLSVGFTGNYKEYFGLATDVDAVVYLMLVNDLIHGLFPDAITIGEDVSGMPTFCIPVQDGGVGFDYRLHMAIADKWIELLKKRDEDWRVGDIVHTLTNRRWSEKCVSYAESHDQALVGDKTIAFWLMDKDMYDFMALDRPSTSLIDRGIALHKMIRLVTMGLGGEGYLNFMGNEFGHPEWIDFPRAEQHLSDGSVIPGNQFSYDKCRRRFDLGDAEYLRYRGLQEFDRAMQYLEDKYEFMTSEHQFISRKDEGDRMIVFEKGNLVFVFNFHWTKSYSDYRIGCLKPGKYKVALDSDDPLFGGFGRIDHNAEYFTFEGWYDDRPRSIMVYAPSRTAVVYALVDKEEEEEEEVAVVEEVVVEEE

SEQ ID NO: 518 - protein, 422 aa, Geobacillus stearothermophilus
LIAANPTDLEVYLFHEGSLHKSYELFGAHVIDEGGRAATRFCVWAPHARDVRLVGSFNGWDGAKFRLTKVNDEGVWTIVVPENLEGHLYKYEIVTPDGRVLLKADPYAFCSELRPHTASIVYDLKGYQWNDQSWQRKKRRKRIYEQPMVIYELHFGSWKKKEDRFLTYREMADELIPYVLERGFTHIELLPLVEHPLDRSWGYQGTGYYAVTSRYGAPHDFMYFVDRCHQAGIGVILDWVPGHFCKDAHGLYMFDGAPTYEYANEKDRENYVWGTANFDLGKPEVRSFLISNALFWLEYYHVDGFRVDAVANMLYWPNNDQLYENPYAVEFLRKLNEAVFAYDPNVLMIAEDSTDWPRMTAPTYDGGLGFNYKWNMGWMNDMLKYMETPPHERKHAHNQVTFSLLYVYSENFILPPVVLVEL

SEQ ID NO: 519 - protein, 433 aa, Arabidopsis thaliana
MSLKIKFLLLLVLYHHVDSASIVKFLPGFEGPLPFELETGYIGIGEDENVQFFYYFIKSENNPKEDPLLIWLNGGPGCSCLGGIIFENGPVGLKFEVFNGSAPSLFSTTYSWTKMANIIFLDQPVGSGFSYSKTPIDKTGDISEVKRTHEFLQKWLSRHPQYFSNPLYVVGDSYSGMIVPALVQEISQGNYICCEPPINLQGYMLGNPVTYMDFEQNFRIPYAYGMGLISDEIYEPMKRICNGNYYNVDPSNTQCLKLTEEYHKCTAKINIHHILTPDCDVTNVTSPDCYYYPYHLIECWANDESVREALHIEKGSKGKWARCNRTIPYNHDIVSSIPYHMNNSISGYRSLIYSGDHDIAVPFLATQAWIRSLNYSPIHNWRPWMINNQIAGYTRAYSNKMTFATIKASGHTAEYRPNETFIMFQRWISGQPL

SEQ ID NO: 520 - protein, 437 aa, Arabidopsis thaliana
MSLILKFMLLILLVSSHHVRSGSIVKFLPGFKGPLPFELETGYIGIGEEENVQFFYYFIKSDKNPQEDPLIIWLNGGPGCSCLSGLFFENGPLALKNKVYNGSVPSLVSTTYSWTKTANIIFLDQPVGSGFSYSKTPIERTSDTSEVKKIHEFLQKWLIKHPQFLSNPFYVVGDSYSGMIVPALVHEISKGNYICCNPPINLQGYVLGNPITHIEFEQNFRIPYAHGMSLISDELYESLKRICKGNYFSVDPSNKKCLKLVEEYHKCTDNINSHHTLIANCDDSNTQHISPDCYYYPYHLVECWANNESVREALHVDKGSIGEWIRDHRGIPYKSDIRSSIPYHMNNSINGYRSLIFSGDHDITMPFQATQAWIKSLNYSIIDDWRPWMIKGQIAGYTRTYSNKMTFATVKASGHTAEYLPEESSIMFQRWISGQPL

SEQ ID NO: 521 - protein, 97 aa, Glycine max
  misc_feature (23)..(23): Xaa can be any naturally occurring amino acid
  misc_feature (47)..(47): Xaa can be any naturally occurring amino acid
  misc_feature (56)..(56): Xaa can be any naturally occurring amino acid
  misc_feature (59)..(59): Xaa can be any naturally occurring amino acid
  misc_feature (75)..(75): Xaa can be any naturally occurring amino acid
  misc_feature (86)..(86): Xaa can be any naturally occurring amino acid
  misc_feature (88)..(88): Xaa can be any naturally occurring amino acid
CLQQDVGVGIVNALLGKIAQSGXVDSSHQGLLFLLCALCPQDVSKVXVGKLSQHGXETXNITDFLDLKFIIKPDXNSQSVFLKCIXYXMKNLSRKVS

SEQ ID NO: 522 - protein, 140 aa, Zea mays; identical to SEQ ID NO: 152

SEQ ID NO: 523 - protein, 233 aa, Debaryomyces hansenii CBS767
VHENGSFISSQFWFLGRLGDPQLLKDHGLDYVALSAIYPDQDFKNKAEAAENPLRALTEEEIHELIYETYTNAAKNAIAAGFDYIELHAAHGYLLDQFLNPATNQRTDKYGGSIENRARLVLELVDHLTTIVGASKLAIRISPWAKFQGMDAEKDSTHPTTTLSYVLHELQKRADNGKGLAYVSVVEPRAQGGDDVEKSQQVGDNTFVGQINPTYLRICLKSPIQRNKIDQEC

SEQ ID NO: 524 - protein, 632 aa, Bacillus subtilis subsp. subtilis str. 168
MCGFVGVFNKHPLAQTADQEELIKQMNQMIVHRGPDSDGYFHDEHVGFGFRRLSIIDVENGGQPLSYEDETYWIIFNGEIYNYIELREELEAKGYTFNTDSDTEVLLATYRHYKEEAASKLRGMFAFLIWNKNDHVLYGARDPFGIKPLYYTTINDQVYFASERKSLMVAQNDIEIDKEALQQYMSFQFVPEPSTLDAHVKKVEPGSQFTIRPDGDITFKTYFKANFKPVQTEEDKLVKEVRDAIYDSVNVHMRSDVPVGSFLSGGIDSSFIVSVAKEFHPSLKTFSVGFEQQGFSEVDVAKETAAALGIENISKVISPEEYMNELPKIVWHFDDPLADPAAIPLYFVAKEAKKHVTVALSGEGADELFGGYNIYREPLSLKPFERIPSGLKKMLLHVAAVMPEGMRGKSLLERGCTPLQDRYIGNAKIFEESVKKQLLKHYNPNLSYRDVTKTYFTESSSYSDINKMQYVDIHTWMRGDILLKADKMTMANSLELRVPFLDKVVFDVASKIPDELKTKNGTTKYLLRKAAEGIVPEHVLNRKKLGFPVPIRHWLKNEMNEWVRNIIQESQTDAYIHKDYVLQLLEDHCADKADNSRKIWTVLIFMIWHSINIEKRYMPEELSHQPKEVIFV

SEQ ID NO: 525 - protein, 542 aa, Cytophaga hutchinsonii
MENEKPKNTLFQMRLPIFLALAVICGIFIGAALSKKGTEQNIAGNYLRFAEILNYVQQDYVDTVDVDKLVDYSISQMLEKLDPHTSYIPASERQIADSHLESDFEGIGIEFNIIKDTIYVVSPISGGPSEKAGLMAGDKIIKVDSIQMAGNGVTSADVFKRLRGKKGTKVLLTVKRSNSSKLLTYTIIRDKIPTYSIDAAYMIDKTTGYIKISRFGDKTYNEFLTALTDLKTQGMQRLMIDLKDNGGGYLDRATNIADQLIDGNKMIVYTNGKGTKYDQEIRARVTGAFETGPVVVLINEGSASASEILSGALQDNDRGLIVGRRSFGKGLVQMPINLNDGSELRLTISRYYTPSGRSIQKPYDKEDASAYESDLLSRYEHGEFFHADSIHFNDSLKFKTLKGRTVYGGGGIMPDVFVGRDTSEYTKYLMELFNQNVIREYTLNYYQTNKAALTKMTFEEYFKSFTVTEAMLKDMLDLAAKTGVKYNEVQYKRSKDFIKNNIKAYIARSAWGNKGFYPIYNQKDEIYNKGLNAFKEAEKISQ

SEQ ID NO: 526 - protein, 411 aa, Triticum aestivum
WTPSTRTTSTWTSTQSPPSLQNRCVNMIAHLFNAPIGEDETAIGVSTVGSSEAIMLAGLAFKRKWANKMKEQGKPCDKPNIVTGANVQVCWEKFARYFEVELKEVKLTEGYYVMDPKKAIEMVDENTICVAAILGSTLTGEYEDVKLLNDLLVEKNKKTGWNVPIHVDAASGGFIAPFLQPELEWDFRLPLVKSINVSGHKYGLVYPGVGWVIWRSKDDLPDELIFHINYLGTDQPTFTLNFSKGASQIIAQYYQLIRLGFEGYKHIMENCKLNAAVLKEGIDATGRFDVLSKADGVPLVAIRLKDSTNFSVFDISENLRRFGWIVPAYTMPADAEHVAVLRIVIREDFNRSLAQRLLADINKIVRELDAHAVHAIKLSNAAAAEGASKSTVDAVTEAFKGLAGNKKAGVC

SEQ ID NO: 527 - protein, 299 aa, Neurospora crassa
MAPLSKTHKLNTGDEIPAVGLGTWQSKPGQVEKAVEAALRAGYTHIDTAYAYGNEKEVGQGIKASGVPREKIWLTTKLDNDWHKHVAEAIDTSLKNLDTPYVDLYLMHWPASLVKGNTKEVYNDWDFVDTWREMQKLVDTGKVKNIGVSNFGVKNLEKLLSAESTKIVPAVNQIELHPGNPSPHLVEYLRSKGIHASAYSPLGSSDSPLYKLNSLTKLAESKGKTVQQVLLRWGVQKGWSVLPKSVTEERIKANIDLEGWSLTDEEIAQIDEVHKENSFKVCGDDWLPVKIFFGAGDSD

SEQ ID NO: 528 - protein, 590 aa, Azoarcus sp. EbN1
MCGIAGEIRFDGQSPDVGALERMNARQRVRGPDSGGVFVQGALGFGHRRLKIIDLSESAQQPMFDPALGLGIVFNGAIYNHAALRRELETLGYRFYSRGDTEVLLKAYHAWGQDFVQRLNGMFAFAIWERDSGRVVLGRDRLGIKPLYYSAQPGLLRFASSLPALVAAGGVDTTVDAVALNHYLSFHAVVPAPHTILAGVRKLPPATLMTIHTDGRRSERSYWSLAYAHEPGDAARSFEEWTEILLEGLRSAVGRRLVADVPVGALLSGGVDSSLIVGLMAQAGVQGLRTYNVGFEDVGGEKGNEFEYADIVAERFATIHERIFVPEAQLLARLPEAVAAMSEPMVSHDCIGFFLLSEAVSRHSKVVQSGQGADEVFGGYHWYPKLAGSVDPVGDYLAAFRDRDYDEYCRMVGAANRADDCSGAFVAAHFDLPGAIDPVDKALRLDTTVMLVDDPVKRVDNMTMAFGLEARVPFLDHELVELAARIPARHKLAHGGKGVLKEAARQVIPSAVIDRPKGYFPVPGLKYLQGQVLERVRDALTNRAARERGLFRREYVDTLLADPGAHMTPLRGSKLWQLGLLEWWLQTHVR

SEQ ID NO: 529 - protein, 315 aa, Neurospora crassa
MAATTDVQNYKFNHSMIRVKDPKESVKFYEFLGMSLLKKLSFPEAKFDLYFLGYDAPGAVSAGANLWDREGLIELTHNYGTESDPNYKINNGNVEPHRGFGHTCISVDNLQAACQRLEDAGYKFQKKLSDGRMKHIAFALDPDGYWVEIIGRKPVEETEGVKETDLKTYRMNHTMLRVKDGEKSLKFYQEVMGMKLVRTHEAKEAGFNLYFLGYGDEKQNTADREGLLELTWNYGTEKDENFSYHNGNDQPQGFGHICVSVDNIEAACERLEGLKVNWKKRLTDGRMKNVAFVLDPDNYWIELVQNERFTGQANF

SEQ ID NO: 530 - protein, 664 aa, Listeria monocytogenes str. 1/2a F6854
MTDYPSIFEPLTVKRMTIKNRVIMPPMGTNLAGLNGEFLEEHMNYYEQRAKGGTGLITIENACVDFPYGTNGTTQLRIDNDQYIPGFYKLTERLHKHGTCVSIQINHAGASAYPARLNGLQPVSASDIPSKKGGTVPRPLTVEEIYEIVNKYGDAARRAQQAGFDAVEIHGGHSYLLCQFLSPLYNKRTDEFGGTPENRARIVKLILEKVRAEVGPFFPIVLRFSADEFTEGGNHLEDILELLDYCQEEADILNVSAAINDNLYLQIDQMNLEDGWRSYLAKAVKDKFNKPTITSGNIRSPKAAEKILSEGYADLLAMGRGLIAEPNWVNKVASGQEDMLRKCISCNIGCADHRISKSKPIRCTVNPDIIHEDKYKETKVTRPTNVVVIGGGTAGLEAACTAAEVGCNTTLIEANEQTGGLARAIANLPDKSRIADFPNYLANRAEKLTNLKVITGTKADTALIDTFNPDVIVNATGSKPLLPPIKGLLDVIDKEGSNVHSIFGLISSIDDFTEFSNKKVAVIGGGAVGLDVVEYFSERGSDVTIVEMMPLLGKDLDMITRLSMMDIIEKNNVDVQTETALTEVAADHFKVKHDGVDAEIPFDYGFVCLGMRPERPLMEELAAYGKEKQIEIVNIGDSAATRKILEGVREGRNILTTLEKIGSL

SEQ ID NO: 531 - protein, 224 aa, Lycopersicon esculentum
MGRGRVELKRIEGKINRQVTFAKRRNGLLKKAYELSVLCDAEVALIIFSNRGKLYEFCSSSSMLKTLERYQKCNYGAPEPNISTREALEISSQQEYLKLKGRYEALQRSQRNLLGEDLGPLNSKELESLERQLDMSLKQIRSTRTQLMLDQLTDYQRKEHALNEANRTLKQRLMEGSQLNLQCSQMHKLWAMAGKQLKLRAMASFILWIVNLLCKLGIRMIQLQ

SEQ ID NO: 532 - protein, 367 aa, Mesorhizobium loti MAFF303099
MTASLFQPITLDGLTFPNRIAVAPMCQYSAEDGSASDWHLYHWMNLAMSGAGMVTVEMTDVERRGRISHGCLGLYSDDNEAAARRTLDAARRVAAPGTKFGTQLAHAGRKASNRKPWEGGGPLQPNEDPWQTVSASAMAYDTGWNVPRALDEEEILQLIERFAQAARRAERAGFDFIELHAAHGYLIFQFLSPLSNQRTDRWGGSLENRMRLVVEIARAVKKAVPKLMLGARLSVKDWVDGGFDVEDAIEVAKALKAEGIAYLCCSSGGNSPLQKLPTGPGYQVHLAEAVRKGAGIPTRAVGLIDDPQQAEAVIAEGRADMVALARAFLADPRWGWRAAATFKEKIHPAPQLARSVTTMEHWMKAAG

SEQ ID NO: 533 - protein, 415 aa, Trichodesmium erythraeum IMS101
MLTGVTVIGAGIHLSSQASLSNNAPKELIDEVWQIIDKTYVDGTFNQVDWKATRNEYLDKTYTSEEQAYDAIKEMLKKLDDPYTRFMDPEEFKNMQIDTSGELTGVGIQLTQDPDSKKLVVISPIEDTPAFDAGIQAKDIISKIDGQSTKGMNINEAVSLIRGPIGSQVILTIKRENLEIEFPIVRAKIEIHPVKYSQKESYNSLGKVGYIRLSQFSANAAGEMREAIGNLETQKVSGYILDLRSNPGGLLYASIEIARMWLKRGDIVSTVDRNGVTDRQKANNRSLTDKPLVVMVDGGSASASEILSGALQDNKRATLVGTKTFGKGLVQSVRSVGKGAGIAVTIAKYFTPNGRDINKLGIQPDVKIPLSEKQKETLQKNRDKIGTIEADPQYAKALDILNKEIAEFQNQTAQW

SEQ ID NO: 534 - protein, 347 aa, Zea mays
NSRVDPRVRPRARIRVVVSSFFVKVLQLPWRWGMKYFWDTLLDADLESDALGWQYISGSLPDGRELDRIDNPQFEGYKFDPHGEYVRRWLPELARLPTEWIHHPWDAPESVLQAAGVELGSNYPRPIVELDAANSRLQDALSEMWELEAASRAAMENGMEEGLGDSTDERPIDFPQELRMEVDRQPVQPAIHAQGVTGRRREDQMVPSMTSSFIRAETELTADFGHTSEDSRPEVPSNIHHLQARPEREETVDGGTGNAVRVHGNHHQQNLQNNIHRVLGIAPSISEASSSWTGRDGGVVPVWSPPAASGNSDPYAADEADISSRGYLDRHPQSHTMMNWSQLSQSL

SEQ ID NO: 535 - protein, 571 aa, Pirellula sp.
MAKQIVFDDDARGPLLAGVSKLARAVRSTLGPRGRNAVLDKGWGSPKVTKDGVTVAEDIELDDPFENLGAQLVKEAASKTNDVAGDGTTTATVLSEAIFREGLKMVATGADPMALSRGIQKAVDTAIAQIAKMATPINEKSKSDIKQVATIAGNNDPQIGDVLADAFTKVGKNGVITVEEGRSNETYVDVVEGMQFDRGFLSPHFVTNQDEVTVELDDCYILLFEEKISNNKKMIPLLEAISKAKKPLLIIAEDTEGEALATLVVNKMRGILSACAVKAPGYGDRRKAILGDIAALTGGKAIFKDLGIDLESVKVSDLGRAKQIRITSEATTIVGGAGKKADIEGRVAQIRREIEATDSDYDREKLQERLAKLAGGVAQINVGAATETEMKERKALIDDARAATQAALEEGIVPGGGTALLRCRAAVEKLEKATEGDQKLGVRIIRNVLDQPMRAIANNAGLDGAVVVNRVLQMKGKTEGYDANADKYCDLVAAGIVDPAKVVRTSLTNAASVAALLLTTESLVTEIPVEEEPAGGDHHDHGMGGGMPDMGGMGMGGMGGMGGMGGMGGMM

SEQ ID NO: 536 - protein, 295 aa, Pseudomonas putida
MAGKSPLINLNNGVKMPALGLGVFAASAEETASAIASAISSGYRLIDTARSYNNEAQVGEGIRNSVDRAEMFVTTKLFNCDYGYERALRAFDESLGRLGLDYVDLYLLHWPTKDWNATIQSWKAAEKILGDGRARAIGVCNFLEDQLDELIAASDVVPAVNQIELHPYFAQKPLLAKNRALGIVTEAWSPIGCHQRWQDGDNHGGRKHPLTDPVITTIAEAHGRSAAQVILRWHFQNDVVAIPKSVNPERIAKNIDVFDFALSDAEMAQLDELDTGVRIGPDPRDVDTSSFAEFV

SEQ ID NO: 537 - protein, 554 aa, Escherichia coli O157:H7 EDL933
MCSIFGVFDIKTDAVELRKKALELSRLMRHRGPDWSGIYASDKAILAHERLSIVDVNAGAQPLYNQQKTHVLAVNGEIYNHQALRAEYGDRYQFQTGSDCEVILALYQEKGPEFLDDLQGMFAFALYDSEKDAYLIGRDHLGIIPLYMGYDEHGQLYVASEMKALVPVCRTIKEFPAGSYLWSQDGEIRSYYHRDWFDFDAVKDNVTDKNELRQALEDSVKSHLMSDVPYGVLLSGGLDSSIISAITKKYAARRVEDQERSEAWWPQLHSFAVGLPGSPDLKAAQEVANHLGTVHHEIHFTVQEGLDAIRDVIYHIETYDVTTIRASTPMYLMSRKIKAMGIKMVLSGEGSDEVFGGYLYFHKAPNAKELHEETVRKLLALHMYDCARANKAMSAWGVEARVPFLDKKFLDVAMRINPQDKMCGNGKMEKHILRECFESYLPASVAWRQKEQFSDGVGYSWIDTLKEVAAQQVSDQQLETARFRFPYNTPTSKEAYLYREIFEELFPLPSAAECVPGGPSVACSSAKAIEWDEAFKKMDDPSGRAVGVHQSAYK

SEQ ID NO: 538 - protein, 504 aa, Staphylococcus epidermidis ATCC 12228
MSKQDGKLTGLFGAPVSDRENSMTAGQRGPLLMQDVYYLEQISHFDREVIPERRMHAKGSGAFGTFTVTNDITQYTNAKIFSEVGKQTEMFARFSTVSGERGAADLERDIRGFALKFYTEDGNWDLVGNNTPVFFFRDPKLFISLNRAVKRDPRTNMRSAQNNWDFWTGLPEALHQVTILMSDRGMPKGFRNMHGFGSHTYSMYNDKGERVWVKYHFRTQQGIENYTDEEAAKIVGMDRDSSQRDLYNAIENGDYPKWKMYIQVMTEEQAKNHPDNPFDLTKVWYKKDYPLIEVGEFELNRNPENYFLDVEQAAFTPTNIVPGLDYSPDKMLQGRLFSYGDAQRYRLGVNHWQIPVNQPKGVGVENLCPFSRDGQMRFLDNNQGGGPHYYPNNQGIYESQPEHKKPPFPTDGDGYEYNYRQDDDNYFEQPGKLFRLQSEDAKERIFTNTANAMDGVSKDVKVRHIRHCYKADPEYGKGVAKALGIDINQIDLETNQDETYENFK

SEQ ID NO: 539 - protein, 501 aa, Candida albicans
MDQQEAPIYYGRSVNKVYNQEFIIDSRFKIVKELGHGAYGIVCSAKYDNGSKKVPDSNNGNASSSANASFVAIKKITNIFSKNILCKRALRELKLLQFFRGHKNITCLYDLDIIPNPMTGEFNEIYLYEELMECDMHQIIRSGQPLSDQHYQSFIYQVLCGLNFIHSADVLHRDLKPGNLLVNADCELKICDFGLARGFSENPDENAGFMTEYVATRWYRAPEIMLSFTNYTKAIDIWSVGCILAELLGGKPLFRGKDYVDQLNQILMILGTPPESTLQRIGSHRAQNYVRSLPITRKASYEELFPDANPLALDLLERMLTLDPRERITVRDALNHKYLELWHDPKEEIECQVKFDFKSFETVDGLDEMKQLIMDEVQKFREFVRKPIEEQQRIQMQLHMQKREEQRQEEEEKELLEQQRQFPAQESMDISQTPYNNLETNIGTPQVEDDYPRPQELDEFTFSNLESSSSMNLFQDMAKPSGEEYIKLEEELGFGLDWCYV

SEQ ID NO: 540 - protein, 917 aa, Pseudomonas tolaasii
MLRRMGIKGRVLLLTLLPTSLMALLLGGYFTWMQLSELQTQLLQRGEMIAEQLAPLVAPALSTRNTDLLERIATQSLEQPDVRAVSFLAPDRSPLAHAGPTMLNQPPVGNSSHLLQRSGNDATRYLLPVFGRHRNLAGELIPDEADRLLGWVEVELSHNGMLLRGYRSLFASLLLIAIGLICTAALALRISRTINSPIGQIKQAVAQLKDGNLETRLPPLGSQELDQLASGINRMAETLQNAQEELQHSIDQATEDVRQNLETIEIQNIELDLTRKEALEASRIKSEFLANMSHEIRTPLNGILGFTHLLQKSELSPRQLDYLGTIEKSADNLLGIINEILDFSKIEAGKLVLDSVPFNLRDLLQDTLTILAPAAHAKQLELVSLVYRDTPLALVGDPLRLKQILTNLISNAIKFTREGTIVARAMVEDEEEDSVQLRISVQDTGIGLSNQDVRALFQAFSQADNSLSRQPGGTGLGLVISKRLIEQMGGEIGVDSTPGEGSEFWISLNLPKTRDDVDDLPSAPLLGRRVAVLENHELARQALQHQLEDCGLEVTPFNTLESLTNGITSTHQTEQAIDLAVLGVTANDIPPERLNQHLWDLEHLGCKVLVLCPTTEQMLFNQSVPNPNSQLQAKPACTRKLRRALADLISPRPLRSEPGEPLSSRAPRVLCVDDNPANLLLVQTLLEDMGAKVLAVESGYAAIDAVKQETFDLVLMDVQMPGMDGRQSTEAIRQWESERHGTPLPVVALTAHAMANEKRALLQSGMDDYLTKPISERQLAQVVLKWTGLALRNQGPERGNDNLGHGVQLLVLDHEEGLRLAANKADLAADMLAMLLASLEADRLAITVAREAKDNNALIERVHRLHGATRYCGVPQLRAACQRAETLLKQDDAKAMAALDELDMAIARLASEARVNA

SEQ ID NO: 541 - protein, 155 aa, Zea mays
KLQFPIPSNDYSFQLAIRKWELYGKVFHKHIFNLSKDVMSLDENERIISRGPPNILHCDDTSMVISFTRGPLFFIFNFNPQVSHPSYRVGVDEAGEYQLIFNTDETKYGGCETLKSSQYMRRTSDKRADGCRNSLELALPSRSAQVYKLVRILRI

SEQ ID NO: 542 - protein, 138 aa, Nocardia brasiliensis
DQVPDFIRSQKRLPGNGLRDHNMQWDFWTLRPESAHQVTWLMGDRGIPKTYRHMNGYGSHTYQWINAAGERFWVKYHFKTDQGIDYLTQADADRIAGENADYHRKDLWDAIERGEFPSWTLHVQVMPVAEAENYRFTR

SEQ ID NO: 543 - protein, 405 aa, Chromobacterium violaceum ATCC 12472
MSLVTGRIEYMNLNWLNGLLDLPWWGNIIAALILTHITIASVTIFLHRHQAHRALDLHPIPSHFFRFWLWLTTGMVTKQWAAIHRKHHARCETQEDPHSPQVLGIKKVLWEGAELYRAACKDQSIMDKFGHGTPDDWLERNVYSKHNAKGIVLMLLIDLALFGPIGLSIWAVQMVWIPFWAAGVINGLGHYWGYRNFENEDASTNLVPWGILVGGEELHNNHHTFGTSAKLSYKWYEFDIGWMYIRMLEICGLAKVRKVAPQLAHDPSRPQLDLEHLQAIIANRYAIAARYARELKAECRAELAKLSLPELPQVNLPRKMKVWLKQDAKDLPECERDQLARILEQSHVLATIYNMRQELTRLWERSNLTREQLLHELQDWCARAEASGIAALQRFSLNLRQTALA

SEQ ID NO: 544 - protein, 484 aa, Burkholderia fungorum LB400
MSEHKLTNAAGAPVADNQNSMTAGARGPVVLQDVWLLEKLAHFDREVIPERRVHAKGSGAFGTLKVTHDISRYTKAKVFAQAGKETPLFMRFSTVAGERGAADAERDVRGFSIKFYTEEGNWDVVGNNTPVFFIRDPLKFPDFIHTQKRDPYTNMRSNVAAWDFWSRHPESLHQVTILMSDRGIPQNFRQMHGFGSHTYSFINANNERFWVKFHFKSMQGVENFTDAEAAQVVAQDRESAQRDLLTNIDQGNFPKWRFAIQVMPEAEAATYRFNPFDITKVWSQKDYPLIDVGTIELNRNAANYFADVEQAAFTPANVVPGIGFSPDRLLQGRLFSYGDTQRYRLGVNHHQIPVNASRVASPHSFHRDGAMRTDGNLGGNVNYEPNRFGDFAQDANASEPPLAAGAVDRYDHRLDDDYYTQPGMLFALFDAAQRERLFGNIARHINGVPQEIVARQIEHFRRADPAYAEGVIAAIARLAEGETK

SEQ ID NO: 545 - protein, 184 aa, Glycine max
MASKAPKKANLLDHHSIKHILDESVSEVVTSRGFVEDVRLSNVRLLIGAIIIVIALFAQFYKKKFPENRDFLIACIALYVIFNGLLQLIIYTKEKNAILFTYPPVGSFTSTGLVVSSKLPRFSDMYTLTIASADPKSISANDQVHFTKSVTQWFTKDGVLVEGLFWKDVEALIVQYTKEPKKSK

SEQ ID NO: 546 - protein, 548 aa, Rickettsia akari str. Hartford
MATKLIKHGSKAREQMLEGIDVLADAVKVTLGPKGRNVLIEQSFGSPKITKDGVTVAKSIELKDKIRNAGAQLLKSAATKAAEVAGDGTTTATVLARALAREGNKLVAAGYNPMDLKRGMDLAVNAVVEEIKKSSKKINSQEEIAQVGTISSNGDKEIGEKIAKAMEEVGKEGVITVEEAKNFSFDVEVVKGMMFDRGYLSPYFVTNSEKMVAELENPFILLFEKKLSNLQPMLPILEAVVQSQRPLLIIAEDVEGEALATLVVNRLRGGLKVAAVKAPGFGDRRKAMMEDIAILTKGELITEDLGMKLENVSIKSLGTAKRVTVSKENTVIVDGSGDKKNIEDRVLQIKSQIAETTSDYDKEKLQERLAKLSGGVAVLKVGGATEVEVKERKDRVEDALAATRAAVEEGVVAGGGVTLLHASQTLTKLKVENKDQQAGIEIVIEALKDPLKQIIENAGENGGVVVGKLLEHNDKNYGFNAQDMQYVDMIKAGIIDPAKVVRTALQDAASVASLIITTETLIVDEPSDKEDAMPPMRGGMGGMGGMDF

SEQ ID NO: 547 - protein, 532 aa, Ralstonia eutropha JMP134
MVEGVNILANAVKVTLGPKGRNVVLERSFGGPTVTKDGVSVAKEIELKDKLQNMGAQMVKEVASKTSDNAGDGTTTATVLAQSIVREGMKFVAAGMNPMDLKRGIDKAVAAAVEELKKVSKPTTTSKEIAQVGAISANSDTSIGERIAEAMDKVGKEGVITVEDGKSLADELEVVEGMQFDRGYLSPYFINNPEKQVVQLDSPFVLLFDKKVSNIRDLLPVLEQVAKAGRPLLIIAEDVEGEALATLVVNNIRGILKTAAVKAPGFGDRRKAMLEDIAILTGGTVIAEEIGLTLEKATLNDLGQAKRIEIGKENTIIIDGAGDAAAIEGRVKQIRAQIEEATSDYDREKLQERVAKLAGGVAVIKVGAATEVEMKEKKARVEDALHATRAAVEEGIVPGGGVALLRARAAISALTGENPDQNAGIKIVLRAMEEPLRQIVLNAGEEASVVVAKVIEGKGNYGYNAASGEYGDLVEMGVLDPTKVTRTALQNAASVASLMLTTDCAVAETPKEESAPAMPGGMGGMGGMEGMM

SEQ ID NO: 548 - protein, 181 aa, Triticum aestivum
  misc_feature (90)..(90): Xaa can be any naturally occurring amino acid
LDGVFAFVLYDTRDRTYVAARDAIGVNPLYIGWGSDGSVWMSSEMKALNEDCVRFEIFPPGHLYSSAAGGFRRWYTPHWVPRSRCPGTPXYQAAPSLREASEKAGYQRGHDRLPFRGLLSRRLDPPFVASVNKAPLRPRPTPPESGQTPSFVVRSRGPLTEGRTRVPDTRDTTRFLTKTDH

SEQ ID NO: 549 - protein, 624 aa, Bordetella parapertussis 12822
MCGVAGLIHLDGAAVDPAVLQGMTDAIAHRGPDGEGHWIDGNVGLGHRRLAIIDLSPAGHQPMISADSRYVLSYNGEIYNFRELRAELETAGYRFKSRTDSEVLLYAVIAWGLKALKRFNGMFAFALWDCHERRLILARDRYGIKPLYYAEQGGTLAFGSEQKAILALPGFRRKLDKAALLEYFTFQNIFTSKVLLEDIQILPAGHYAIVEPDRCASISLTQYWDFCFREPDVAATDQEYREELDRLFVQAVKRQLVTDVELGSYLSGGMDSGSIAAVAAAEHPYIKTFTCGFDLNSASGIELGFDERSKAEYMSYCFKTEHYEMVLKAGDMERILPHVACHLEEPRVGQSYPNFFAAKLASRFVKVVLSGAGGDELFAGYPWRYYRAVVNDDFEHYVDKYYNFWQRLLPNSELKRVFAPIAGEVEHVWTRDIFRNVFRHHADQLYRPEDYINHSLYFEAKTFLHGLLVVEDKLSMAHGLETRVPFLDNDLVEFAMRCPIRLKLNNLAEVVKINENETGNKVRKFFEKNRDGKTILREVMNHRLPADISKAEKQGFSAPDASWFKGESLEFVRRKLLDGHSPLYEIMDAATVRELVNEHLGGIRNRRLLIWSLLSVDAWMRQTF

SEQ ID NO: 550 - protein, 445 aa, Triticum aestivum
MAAAGGKGGPRRTTRVGPYELGKTVGEGSFAKVKIAKDTRNAATCAIKVLDRNHVLRHKMVEQIKREIATMKLIRHPNVVQLHEVMASKSKIYMVLEFVEGGELFDKIVNSGKLGEDEARRYFHQLINAVDYCHSRGVYHRDLKPENLLLDSYGALKVSDFGLSAFSPQTKEDGLLHTACGTPNYVAPEVLADKGYDGMAADVWSCGIILFVLMAGYLPFDDPNLMTLYKLITRANVSCPPWFSTGARNLIKRILDPNPHTRITISQILEDEWFKKDYKPPHSEHNEDVSLEDVDAAFDSSEEHLVAERREKPESMNAFALISRSEGFNLGNLFEKEMMGMVKRETSFASQRTPQEIMSKIEEACGPLGFNVRKQNYKMKLKGDKTGRKGHLSVATEVFEVAPTLHMVELRKTGGDTLEFHSFYKNFSSELKDIVWKTESNTIAK

SEQ ID NO: 551 - protein, 297 aa, Bacillus anthracis str. A2012
MVESCSNKVVAYKKCNDERETTVHIPTTTLHNGVKMPMIGLGVYKAKEGDEVKQAVKTALEVGYRSIDTATVYENESGVGEAVRESGIPREDIFITTKVWNDDQGYEETLEAFEKSLKKLQMDYVDLYLIHWPIRGKYVDTYRALEKLYEEGKVRAIGVSNFHKHHLELLLPNCKIKPMVNQVELHPMLTQFELRNFCQGEQIQMEAWSPLMRGGEVFQHPIIQAIATKYEKTPAQVILRWDIQSGIVTIPKSVTPSRIQENFSIFDFSLTEEEMTEINTLNRNLHVGTNPDKYDTL

SEQ ID NO: 552 - protein, 461 aa, Oryza sativa
MEKKASILMNRYELGRMLGQGTFAKVYHARNLASNQSVAIKVIDKEKVLRVGMIDQIKREISIMRLVRHPNIVQLHEVMASKSKIYFAMEYVRGGELFSRVARGRLKEDAARKYFQQLIGAVDFCHSRGVYHRDLKPENLLVDENGNLKVSDFGLSAFKECQKQDGLLHTTCGTPAYVAPEIINKRGYDGAKADIWSCGVILFVLLAGYLPFHDSNLMEMYRKISKGDVKFPQWFTTDVRRLLSRLLDPNPNIRITVEKLVEHPWFKKGYKPAVMLSQPNESNNLKDVHTAFSADHKDNEGKAKEPASSLKPVSLNAFDIIFLSKGFDLSGLFENDKEQKADSRFMTQKPASAIVSKLEQIAETESFKVKKQDGLVKLQGSKEGRKGQLAIDAEIFEVTPSFFVVEVKKSAGDTLEYEKFCNKGLRPSLRDICWDGQSEHPSLAQSSTLTQSSKSISRHAI

SEQ ID NO: 553 - protein, 497 aa, Nostoc punctiforme PCC 73102
MTEPQNLTTADGIPVSDNQNSLTAGARGPVLIQDFHLIEKLAHFNRERIPERVVHAKGAAAHGTLTITNDITRYSKAKLFSEIGKKTELILRFSTVGGEKGSADAERDPRGFSLKFYTEEGNWDLVGNNTPIFFIRDPLKFPDFIHTQKRNPQTNCKDQNAKWDFWSLSPESLHQVTILFSDRGIPKTHRHMDGFGSHTFSLINAEGDRVWCKFHFKTLQGHQTLTEEESAKIKGEDPDHATHDLFEAIAKKDYPKWRMCIQVMTEEQAEKHPDNPFDLTKVWKQGEYPLIEVGILELNRNPENYFAEVEQAAFSPSAVVPGVSFSPDKMLQARIFSYPDAQRYRLGGNYQQLPVNQPKCPVMHYQRDGFMASGNNGGSVPNYEPNSAEGTPKENPAYAEPPSHLGDVTVDRYSHREGNDDYTQAGNLYRLLTPEQQERLAKNIVGSLSQAREDIQMRQLCHFFRADVSYGRRVAEGLGIAIDPSMFSHDAQPVGNW

SEQ ID NO: 554 - protein, 146 aa, Mesorhizobium loti MAFF303099
MRYLHTMVRVADVDASLDFYCNKLGLKEVRRYENEQGRFTLIFLAASEDEQSGINDKAPLIELTYNWDPEDYKGGRNFGHLAYEVDDIYATCQHLMDNGVTINRPPRDGNMAFIRSPDGISIELLQKGPAKAKAEPWASMANTGSW

SEQ ID NO: 555 - protein, 292 aa, Leuconostoc mesenteroides subsp. mesenteroides ATCC 8293
MEYKTLASDIKMPVLGFGVFQVQEKGAAKQAVIDAIKTGYRLIDTAASYGNEREVGEGIAEAIETGLVTREELFVTSKMWVQDVSADKAAAAIQASLDRLKLDYLDLYLLHQPYNDVFGAWRAMEAAYKAGQLKAIGVSNFDIAQLTNLAEFSEIKPMLNQIEANPFQQNKKDAAYFAEYGVQVEAWAPFAEGKNGLFSNELLQGIADKYNKSIAQVVLRWLTQRDIIVVAKSVKPERMAQNLDVLDFKLTDEEMQEIATLDTNISQFFDHADPDMIKWMAGREISYDVTAD

SEQ ID NO: 556 - protein, 481 aa, Gibberella zeae PH-1
MASLPRNFKLGFATASYQIEGAVAEDGRGPSIWDTFCHLEPTRTKGANGDIACDHYHRLDEDLDLLKRYGSDMYRFSISWSRVIPLGGRHDPINEAGIAFYDRVIDGCLARGITPWVTLYHWDLPQALHERYGGWLDVEESQLDFERYARLCYERFGDRVKHWITLNEPWIVSIFGYATGGNAPGRSSINPQSTEGDTSTEPWIVGKALIMSHARAVAAYNKDFRQSQNGSIGISLNGDYYEPWDKNDPQDSEAAERRMQFHIGWFANPIFLGQGYPQCMRDQLKGRLPAFTPDDMQLLRSAETDFYGMNYYTSQFARHRSSPALDTDFIGNLDELQTNKAGEPVGLESGLHWLRSCPDLFRKHLTRVYRLYGKPIIITENGCPCPGEEMMSREESVQDEYRIKYFEDHLDAIGKSVTEDGSVIQGYFAWSLMDNLEWSDGYGPRFGVTFTDYKTLERTPKKSALVLRQIIDRQKGEQLKL

SEQ ID NO: 557 - protein, 509 aa, Vibrio rumoiensis
MSDDTKKCPVTHMTTDFGAPVVTNRDSLTAGPRGPLLAQDVWLNEKLAGFVREVIPERRMHAKGSGAFGTFTVTHDITKYTRAKIFSEVGKKTEMFARFTTVAGERGAADAERDIRGFALKFYTEEGNWDMVGNNTPVFFIRDPRQFPDLNKAVKRDPRTNLRSATNNWDYWTLLPEALHQVTVVMSDRGIPASYRHMHGFSSHTYSLWNQAGERFWVKMHFRTQQGIKNLTDAEAGELVAQDRESHQRDLYEAIERGEYPKWTMFIQVMPEADAEKYALHPFDLTKVWYKGDYPLIEVGEFELNKNSENFFADVEQVAFSPSNLVPGIGVSPDRMLQARLFNYADAQRYRLGVNYHQIPVNQARCPVHSNHRDGQGRVDGNYGALPHYEPNSFGQWQGQPQFSEPPLKLTGNAAHWSYDKDDHNYFEQPGKLFRLMNDGQKEALFGNTGRAMGDAPEFIKFRHIRNCHAADPAYGAGVAKALGINLEKALASKKDDPMYGNPLVALPA

SEQ ID NO: 558 - protein, 404 aa, Photorhabdus luminescens subsp. laumondii TTO1
MLAVKKSSKLDNVCYDIRGPVLKEAKRLEEEGNKVLKLNIGNPAPFGFEAPDEILVDVIRNLPTAQGYSDSKGLYSARKAIMQHYQARNMMDVTVEDIYIGNGVSELIVQAMQALLNTGDEMLVPAPDYPLWTAAVSLSSGKAVHYMCDEGSDWFPDLNDIRNKITPRTRGIVIINPNNPTGAVYSKELLLEVVEIARQHNLIIFADEIYDKILYDDAEHHSIAALAPDLLTVTFNGLSKTYRVAGFRQGWMVLNGPKKHAKSYIEGLEMLASMRLCANVPMQHAIQTALGGYQSISEFILPGGRLYEQRNRAWELINQIPGVSCVKPKGALYMFPKIDAKRFNVHDDQKMVLDLLLQEKVLLVQGTAFNWPEPDHLRIVTLPRLDELEMAIQKFARFIGKYHQ

SEQ ID NO: 559 - protein, 376 aa, Arabidopsis thaliana
SESRSPRVRVDSVFHTLASGDVLLIIRGKGMVDSVFQAPMGTGTHHAVLSSYEYVSQGLRQYNLDNMMDGFYIAPAFMDKLVVHITKNFLTLPNIKVPLILGIWGGKGQGKSFQCELVMAKMGINPIMMSAGELESGNAGEPAKLIRQRYREAADLIKKGKMCCLFINDLDAGAGRMGGTTQYTVNNQMVNATLMNIADNPTNVQLPGMYNKEENARVPIICTGNDFSTLYAPLIRDGRMEKFYWAPTREDRIGVCKGIFRTDKIKDEDIVTLVDQFPGQSIDFFGALRARVYDDEVRKFVESLGVEKIGKRLVNSREGPPVFEQPEMTYEKLMEYGNMLVMEQENVKRVQLAETYLSQAALGDANADAIGRGTFY

SEQ ID NO: 560 - protein, 553 aa, Nocardia farcinica IFM 10152
MTDVASQGAAQGDDRRVLTNRQGHPVFDNQNQRTVGARGPATLENYQFLEKISHFDRERIPERVVHARGAVAYGYFEATGKWGDEPIENYTRAKIFAEAGKRTDLAIRFSTVIGGRDSSEAARDPRGFAIKFYTEDGNWDLVGNNLGVFFIRDAIKFPDVIHALKPDPVTFRQEPARIFDFMSQTPEAMHMLVNLFSPRGIPANYRTQQGFGVNTYKWVNAEGVTHLVKYHWIPKAGVKSLTEADAAAIQAQDLGHASKDLYEHIEAGDYPEWELRVQIMSDDEHPELNFDPLDDTKVWPENEFPPKPVGKMVLNRNVSNHFLENEQISFGTGVLVDGLDFSDDKMLVGRTFSYSDTQRYRVGPNYLQLPVNQAKNAHVATNQQGGPMAYGIDDVGENPHVNYEPSITGGLREAQYPTHDEQGPEIRGRLTRKRIPRTNDYEQAGQRYQLMEQWEKDDLVTNLVANIGQATREVQERMVWHFYMCDDELGERVGQGLGISADDVRGLPPLQSQTLSDEELQRAANLGKNGPRDVEGLQMTHCVPDEREVHAAA

SEQ ID NO: 561 - protein, 335 aa, Treponema denticola ATCC 35405
MSLLFSSFKIKNIELNTKLVMPPMASEKADAGGIVSQALCDYYDEKTKGSYIGLVIIEHSYVSPQGKASAGQLSISDDSTIEGFKKLASVLHKNGAKVIAQISHAGAAARHKITGYDVLSSSSVMIPRKAPDYELPRAMTQEDIDKVINDFVQAARRAKEAGLDGVEIHSAHGYLLNQFFSPIMNKRTDKYNGSSIEGRTRLHIEIIEAIRKMTGLDFLIAVRLGACDYISGGSSLEDSVEACLLFKKAGVDLLDISGGFCGYTNPELEEEGWFSRITQAVKEKVGAPVILTGGIVSPEAAEKILQEEKADLIGVGRALLNDSDWPKKAKQKLEG

SEQ ID NO: 562 - protein, 634 aa, Rhodopirellula baltica SH 1
MCGFTGGLWQRDDQAINADLLSRMTNEIAHRGPDDSQIWMDPEHRDATGRPMGVGLGFRRLSIIDVEGARQPLSNEDGRVRMVFNGEIYNYEVLRKRLQGAGHQFATQGDGESIVHLYEDIGTDCFSSLNGMFAIAIWDARRNRIVLARDRIGQKPLYYSYKNGRLVFASELKALRLVPGVCEEVDPNAIDEFLTYQYIPHPGTIFKGVHKLPPGHFAVLDERGLRVERYWNFDPSIERPLGREEAIEKVRDLLADSVRLRMRSDVPLGSFLSGGIDSSLITALAGDHTDTPLRTFSIGFPVADFDETRYAAQVAEHLQTDHTRFEVQPSGIDILEKLVWHYDEPYGDSSAVPTWYLSKLTRESVKVALSGDGGDELFAGYERYRALWMSQKIARLFPLNKFPGIGLIQRLPDSNRRRSVVRRAKRFLEAIDQPVVRRYMNWLQIFPESMRASMYNDEFVQALPGHDPVDFLESVWARSEGRDVVTRASTSDIQSYLPCDLCTKVDIASMAHGLEVRQPMLDYRFVELAASMPVEHKFRGRRGKLILQDAFGDRIPSSIFTRPKMGFGIPIGQWFREDFKPLVHDTMLASDARINAYFRPEAIADLVRSHETGEQNHGYRLWNLLVLETWLRQL

SEQ ID NO: 563 - protein, 331 aa, Saccharum hybrid cultivar H65-7052
MTITRHVLNEQSRNPESRGDFTILLSHIVLGCKFVASAVNKAGLAQLIGLAGETNVQGEEQKKLDVLSNEVFVKALVSSGRTCVLVSEEDEETTFVDPKLRGKYCVCFDPLDGSSNIDCGVSIGTIFGIYMIKDKDNVTLSDVLQPGKDMLAAGYCMYGSSCTLVLSTGTGVNGFTLDPSLGEFILTHPDIKIPKKGKIYSVNEGNAKNWDVPVAKFVEKCKYPKDGSPPKSLRYIGSMVADVHRTLLYGGVFLYPADQKSPNGKLRVLYEVFPMSFLMEQAGGQSFTGKERALDLVPTKIHERSPIFLGSYDDVEEIKALYAEQAKSSSA

SEQ ID NO: 564 - protein, 160 aa, Pseudomonas aeruginosa UCBPP-PA14
MLGLVFEIFHVPGHTLGHIAYYHPAETPLLFCGDTLFAAGCGRLFEGTPAQMHHSLARLAALPANTRVYCTHEYTLSNLRFALAVEPDNAALRERFEEATRLRERDRITLPSEISLELSTNPFLRVSENSVKKKADQRSGQQNRTPEEVFAVLRAWKDQF

SEQ ID NO: 565 - protein, 942 aa, Saccharophagus degradans 2-40
MKSQSVQTELFRLITVPVFAACFILASTFFYLQKSHIEDQFSNNKHLATELLNSVVFSNKASTNPFAEAANALLATGDYRSIVVSSATGQQIASYGLPLRTHSYQTQLGVESQWTHEDSLIYSFPLKKSNLQSSTPLWVIIAIDKRSWAISEYQGTITILLAGSLCLFLTFYFARRFRDALATPLQKIETGLRDFLKGNFEKSITIEPSSVFKDLASNINRLGALQKSANDELQLNIDQSTHELRETLETVEIQNIELDIARKSALQASRVKSEFLANTSHEIRTPLNGILGFSELLRKTELNNQQVDYLTTIEESAKGLLTIINDILDFSRLEIGTLTLEYKPVKIRQLIEDTLKLQTPAANEKNIRMLTIIDHDVPENLLGDPLRLKQVLSNLVSNAIKFTDVGYILLGVSKDQSSENQFTLKFRVTDSGIGLSQDQQERLFDPFTQLDSSESRLHGGTGLGLAIAKGLVDRMNGTIGVESTLGKGATFWFTSTLGRSPSASAKQTYLAGTLRGVHALVFDHSNMGRMEITHYLTGWGAKVCETGEMEDIEPQISFFSNSEPVDIAIIDSMIDIKTFDRLRICEHVTQLNHRFNIPVIILAPSSIQRILEPHLAGTNSLFINRPLFCNKLHQTICEQLEIVATENIESRTYLHQHEPLEQQQVNILAVDDNPANLKLVTELLKGLNINVTPVESGEQAIAQIKDSHFDLILMDIQMPSMDGIETTGHIRELETSGPRTPIIALTAHAVSEQKSRLLLAGMDDCLSKPVSESELRHVIERWTNVTIATKIAPTNPAPVASALIEHSPNADKTGENQPATDSQAAAIVDRALGLSLTNQNPSLAGDMLSMLIETLPDVLHKSRTQYENKQFDELQETVHKLHGGCCYCGVPRLKAISEQIDKNLQKNKYNNLANEIQLLEAEIKNLLQWAEEHDIDVLFSDD

SEQ ID NO: 566 - protein, 484 aa, Synechococcus elongatus PCC 7942
MAAPILFWHRRDLRLSDNIGLAAARAQSAQLIGLFCLDPQILQSADMAPARVAYLQGCLQELQQRYQQAGSRLLLLQGDPQHLIPQLAQQLQAEAVYWNQDIEPYGRDRDGQVAAALKTAGIRAVQLWDQLLHSPDQILSGSGNPYSVYGPFWKNWQAQPKPTPVATPTELVDLSPEQLTAIAPLLLSELPTLKQLGFDWDGGFPVEPGETAAIARLQEFCDRAIADYDPQRNFPAEAGTSGLSPALKFGAIGIRQAWQAASAAHALSRSDEARNSIRVWQQELAWREFYQHALYHFPSLADGPYRSLWQQFPWENREALFTAWTQAQTGYPIVDAAMRQLTETGWMHNRCRMIVASFLTKDLIIDWRRGEQFFMQHLVDGDLAANNGGWQWSASSGMDPKPLRIFNPASQAKKFDATATYIKRWLPELRHVHPKDLISGEITPIERRGYPAPIVNHNLRQKQFKALYNQLKAAIAEPEAEPDS

SEQ ID NO: 567 - protein, 636 aa, Bordetella parapertussis 12822
MCGIFGALWHQGKSVSAIEQQLQVGIARQQHRGPDGHGTWIDPQGRLGLAHVRLSIIDLVSGAQPMRGNSGNVITYNGEIYNYIELRRELGEDSFETTSDTEVILRAYEKWGERCVDRLEGMFAFAIWDAKRGEMFVARDRFGIKPFYYACVQGGFYFGSEVKALTPFLNRVETDANALHDYFAFQFCLGEKTLFAGVRQLKPAHCGYVGRDLELKQRQYWEVQYDLDWDHTEKYFVEQVREKLQHSVDMHMRSDVEVGAYISGGVDSSLVAAMARHGRRSSRFQGFTGKFALGDAFDESRYAQALADEHDILLHQVDITEDDFVNDIAKVIYHLDQPVAGPGSFPQYAVSRLAKDHVKVVLGGQGSDEMFGGYARYLIAYWEQCIKGALDGTMHDGNYIVTYESIIPNLRTLRNYKPLIQEFMAEGIFDSRDKRYYRLINRSNTFGNVVNWGMFEGIASSFDDFKQIFWGKNVGKESYFDSITHFDFKTLLPALLQVEDRMSMAHGIESRVPFLDHKLIELVATVPANVKFQNGELKRLLRVAFQDMLPQAIRERKDKMGFPVPLQVWMRKGGKAREFILDTFRSQNARSRAYLAPGFDIEKMMEQEGLFSRNIWAFLSLELWQQQFHDVHRQTI

SEQ ID NO: 568 - protein, 215 aa, Escherichia coli K12
MNYRIIPVTAFSQNCSLIWCEQTRLAALVDPGGDAEKIKQEVDDSGLTLMQILLTHGHLDHVGAAAELAQHYGVPVFGPEKEDEFWLQGLPAQSRMFGLEECQPLTPDRWLNEGDTISIGNVTLQVLHCPGHTPGHVVFFDDRAKLLISGDVIFKGGVGRSDFPRGDHNQLISSIKDKLLPLGDDVIFIPGHGPLSTLGYERLHNPFLQDEMPVW

SEQ ID NO: 569 - protein, 208 aa, Triticum aestivum
  misc_feature (40)..(40): Xaa can be any naturally occurring amino acid
GTKFLTKKKHGFGTRVPEFPREIGANPRVPVKDKDRIPGXIDITLSEGDTWMFAGHQVLVMETPGHTSGHVSFYFPGSGAIFTGDTLFSLSCGKLFEGTPEQMYSSLQKIVALPDVTKVYCGHEYTLSNSRFALSIEPGNEELQEYAASTADLRNKNTPTVPTTIAREKQCNPFLRTSSPEIKKRLSIPDHFDDARVLEVIRRAKDNF

SEQ ID NO: 570 - protein, 189 aa, Desulfovibrio desulfuricans G20
MDIDFKKLAPWNWFKKEQEEQQSTASLPMQRNDLPVAGGPVSPILQLHREIDRLFDDAFRGFGFPALAMPRWPSDWPGLLKPALDIQETDKLYKISLEVPGVEEKDIQITLDNDVLLVRGEKRQEQETKDGGFHRVERSYGSFQRALNLPADANQDTIKAAFKNGVLTITMEKREACAPKQGRSIPING

SEQ ID NO: 571 - protein, 569 aa, Ashbya gossypii ATCC 10895
MSDAVERHTFKVFTQDFMVDKRFQLIKEIGYGAYGIVCSARFMESVEDTTVAIKKVTNVFSKALLCKRSLRELKLLRHFRGHKNITCLYDMDIVLLPDGSFNGLDLYEELMEWDMHQIIKSGQPLTDAHYQSFVYQILCGLKYIHSADVLHRDLKPGNLLVNADCQLKICDFGLARGYSENPIENDQFLTEYVATRWYRAPEIMLSYQGYTRAIDVWSCGCVLAELLGGRPIFKGKDYVDQLNRILQVLGTPPEETLKRIGSKNVQDYIHQLGYIPKVPFERLYPNANPDAADLLERMLALDPKTRITVDEALEHPYLSIWHDPSDEPVCCKKFDFSFESVNEMEELKRMVIEEVKDFRRFVRQPNIRDTSLQEQEEQQPQQPQQPQQPQPEQPQHQRQHQQAQAQAQAQAHEQQQQHHRTQYQRSGAVQRQPQTVEHGQHLQHRSGHHSEHLQRAHGQQEQYLPKKDDSRAFQSRPVGTSISDSRSSYEEHDYVQQMMFAHSPTLAHDSFIGIHSENLPEHNTDFPPRPQENMLASPMGFSDGTHSNAEFGDFLDLEKELEFGLDRKI

SEQ ID NO: 572 - protein, 498 aa, Trichodesmium erythraeum IMS101
MSQNVIILWYRNDLRIHDHEPLYKALKVNAQIIPIYCLDPRQFSQTDFGFPKTGVFRAKFLLESIADLRNNLQKLGSNLVIFQDKPEIVIPRLAQQLSAKSVFFHQEVTELEVKVERLVHQALKQIGVRLKSFWGHTLYHPDDLPFEIKQLPELFTTFRKDVEKNSSVNPTFSIPKKLSSLPKIDVGELPTLSDLNLEKPPLNSQGVLEFKGGETAAKERVKNYFWQQDYLKVYKETRNGMLGANYSSKFSPWLALGCLSPRYIYEEVKEYEYQRVKNQSTYWLIFELIWRDYFRFICQKHGNKIFHKSGLQGIAIPWQEDWEKFRKWQAGQTGFPLVDANMRELLATGFMSNRGRQNVASFLTKNLGINWQMGAEWFESLLIDYDVCSNWGNWNYTAGVGNDGRGFRYFNIPKQAKDYDPEGKYVKHWLPELGKVPPAKVHEPWKLLPVEQDRFGVKIGVDYPEPIIDLWQSVKENEKKYNRALQMTLGKINKRGRF

SEQ ID NO: 573 - protein, 513 aa, Pinus contorta
MEVSVLMWVLLFYSLLGFQVTTARLDRNNFPSDFMFGTASSAYQYEGAVREDGKGPSTWDALTHMPGRIKDSSNGDVAVDQYHRYMEDIELMASLGLDAYRFSISWSRILPEGRGEINMAGIEYYNNLIDALLQNGIQPFVTLFHFDLPKALEDSYGGWLSPQIINDFEAYAEICFRAFGDRVKYWATVNEPNLFVPLGYTVGIFPPTRCAAPHANPLCMTGNCSSAEPYLAAHHVLLAHASAVEKYREKYQKIQGGSIGLVISAPWYEPLENSPEERSAVDRILSFNLRWFLDPIVFGDYPQEMRERLGSRLPSISSELSAKLRGSFDYMGINHYTTLYATSTPPLSPDHTQYLYPDSRVYLTGERHGVSIGERTGMDGLFVVPHGIQKIVEYVKEFYDNPTIIIAENGYPESEESSSTLQENLNDVRRIRFHGDCLSYLSAAIKNGSDVRGYFVWSLLDNFEWAFGYTIRFGLYHVDFISDQKRYPKLSAQWFRQFLQHDDQGSIRSSSSI

SEQ ID NO: 574 - protein, 496 aa, Neurospora crassa
MSGLATKQQSLKLFEKLKAKPANKICFDCGQKNPTWTSVPFGIYLCLDCSANHRNLGVHISFVRSTNLDQWQWDQLRIMKVGGNESATKFFQQNGGSAALNSKDPKTKYQSAAATKYKEELKKRAARDAREYPEEVVITDGDDATSSNTPAGEPDDDFFSSWDKPAIKKPTPPISRTSTPPVIGRTASPLLGNGKDIQRTSSPLSKTDSDAPTPAPAASRITTSAALRKTTPGSSTTGGPRKVGGGILGAKKPAAKLGVKKISADLIDFDEAEKKAKEEAERIEKLGYDPEAEEEKAAKKAETKTNNIITPAAAPVSSSSSRSAAQEKSAAEVERLGMGVRKLGFGMVGKPGGAGAAAGAGGAAAAKKNAGGFGSVGPIKASEADEEQYARNKFANQKAISSDEFFNKGNYDPSVKAETKARLQGFEGAQAISSNAYFGRPEDDAPAEDYGDLESAAKDFIRKFGITASDDLENLTQMVGEGAGRLQGAIRAYLGS

SEQ ID NO: 575 - protein, 289 aa, Escherichia coli O157:H7
MEFSVLSNNLKMPMMGFGVFQVTDKNVCKQSVLNAIRTGYRLIDTAAVYGNEDAVGEAVREAISEGLCTREELFITSKLWVQDMLNQDTAAAGIEASLKKSGLEYFDLYLLHQAMRDYFSAWRALEDAYEEGKLKAIGVSNFYPHVLANFCETVRVKPMVNQVELHPYFAQPEALATMKYYNVQPEAWAPLGGGRHKPFENNLLQSIADAHQKSISQVILRWNIQRGVVVIPKSTHQQRIEENFAIWDFSLTEKEMAQISSLDLGYVGESVKHFNPEFVRGCLAVKIHD

SEQ ID NO: 576 - protein, 157 aa, Brassica napus
MANDIGSFELNTGAKIPSVGLGTWQAAPGVVGDAVAAAVKIGYQHIDCAARYGNEAEIGKVLKKLFEDGVVKRENLFITSKIWLTELDPPDVPEALNRTLQDLQLDYVDLYLMHWPVRLKKGSVEFKPENIMPIDIPSTWKAMEALYDSGKARHPLG

SEQ ID NO: 577 - protein, 644 aa, Prunus persica
MDSCDCIDAQWPPDELLVKYQYISDVFIALAYFSIPLELIYFVQKSSFFPYRWVLMQFGAFIVLCGATHFINVWTFYMHSKTVAVVMTVAKVSCAVVSCATALMLVHIIPDLLSVKTRELFLKNRAEELDREMGRMLTQEETGRHVRMLTHEIRSTLDRHTILKTTLVELGRTLGLQECALWMPSRTGMNLQLSHTLNYQIQVGSTVPINLPIINEVFTSSRAIRIPYTCPLARIRPLVGRYVPPEVIALRVPLLNLSNFQINDWPDLSAKSYAIMVLILPTDSTRKWRDHELELVDVVADQVAVALSHAAILEESMRARDQLMEQNVALDLARREAEMAIHARNDFLAVMNHEMRTPMHAIIALSSLLLETELISEQRVMIETVLKSSNLLETLINDVLDLSRLEDGSLELDIRKFNLHGVFREVINLIQPITSVKKLSMSLILSPDLPLCAVGDENRLMQTILNVAGNAVKFTKEGYISIVASVAKPESSRDWRPPEFYPASTDGHFYLRVQVKDSGCGILPQDIPHLFTKFSQPRSGSNRINDGAGLGLAICRRFINTMGGHIWIESEGIDKGSIVAFIVKLGICDNPCDTTAAHQMAPQALPQPQPQPNYGSGDRIAHRPTVSFRDGGYTSSNPRYQRSI

SEQ ID NO: 578 - protein, 183 aa, Coffea canephora
GAYGIVCSVLNSETNEMVAVKKIANAFDNYMDAKRTLREIKLLRHLDHENVIAIRDVIPPPLRREFSDVYIATELMDTDLHQIIRSNQSLSEEHSQYFLYQIPRGLKYIHSAKVIHRDLKPSNLLVNANCDLKIIDFGLARPNTKNEVMTEYVVTRWYRAPELLLNSSDYTAAIDVWSVGWIF

SEQ ID NO: 579 - protein, 417 aa, Candida albicans
MMNIDQHHQLQQQHQQQMLQQQAQAQAQAQAQAQQQQQAAAAAAAANAAATTSSSSPRQVSFNVSDHYQILEIVGEGAYGIVCSAIHKPSQQKVAIKKIEPFERSMLCLRTLRELKLLKHFNHENIISILAIQRPINYESFNEIYLIQELMETDLHRVIRTQNLSDDHIQYFIYQTLRALKAMHSANVLHRDLKPSNLLLNSNCDLKICDFGLARSIASQEDNYGFMTEYVATRWYRAPEIMLTFQEYTTAIDVWSVGCILAEMLSGRPLFPGRDYHNQLWLIMEVLGTPNMEDYYNIKSKRAREYIRSLPFCKKIPFSELFANTNNNTSTSNTGGRTNINPLALDLLEKLLIFNPAKRITVEDALKHPYLQLYHDPNDEPISDKIPEDFFDFDKMKDQLTIEDLKKLLYEEIMKPL

SEQ ID NO: 580 - protein, 507 aa, Brucella melitensis 16M
MKLQEDYSMTDRPIMTTSAGAPIPDNQNSLTAGERGPILMQDYQLIEKLSHQNRERIPERAVHAKGWGAYGTLTITGDISRYTKAKVLQPGAQTPMLARFSTVAGELGAADAERDVRGFALKFYTQEGNWDLVGNNTPVFFVRDPLKFPDFIHTQKRHPRTHLRSATAMWDFWSLSPESLHQVTILMSDRGLPTDVRHINGYGSHTYSFWNDAGERYWVKFHFKTMQGHKHWTNAEAEQVIGRTRESTQEDLFSAIENGEFPKWKVQVQIMPELDADKTPYNPFDLTKVWPHADYPPIDIGVMELNRNPENYFTEVENAAFSPSNIVPGIGFSPDKMLQARIFSYADAHRHRLGTHYESIPVNQPKCPVHHYHRDGQMNVYGGIKTGNPDAYYEPNSFNGPVEQPSAKEPPLCISGNADRYNHRIGNDDYSQPRALFNLFDAAQKQRLFSNIAAAMKGVPGFIVERQLGHFKLIHPEYEAGVRKALKDAHGYDANTIALNEKITAAE

SEQ ID NO: 581 - protein, 310 aa, Candida glabrata CBS138
MSLKNSTATLKLNTGAEIPVVGLGTWRSAANDGYDSVLAALKLGYRHIDAAAIYGNEDQVGRAIKDSGVPRQEIFITTKLWGTEHRNPAKALDSSLKRLGLDYVDLYLMHWPVALKAHGSEEKDLLNIPKKPDGKTDIDIEDWDFIKTWELMQELPKTGKTKAIGVSNFSINNLKALKNSPKFNTVPAANQVEIHPLFPQTELIEYCKSENILIEAYSPFGSADAPVLKEPELHKLAEKYNISTAQLIISWSVQRGYVVLPKSVHAERIEANLKVLTLKDEDMETITNLSKVKGEKRLVQLDWSPFPTFE

SEQ ID NO: 582 - protein, 628 aa, Bordetella parapertussis 12822
MCGVLGAWWRHHDEHEDARFAAGLRKLAHRGPDDRGSEHFAAPHGRLSLGHTRLAVIDLSAAGHQPMHADADRLAVVFNGEIYNYRELRSELRQIDAIFRGDSDTEVLLAAWQHWGVAALRRFKGMFAFALYDRRQQTLTLARDAFGIKPMYYHAAPERLLFGSELPAVQALLPHPPRLNWQRAYDYLAYGQYDQPPDTFIAGIRQLPAGHLLTLDLRTGRAGEPMAWDDPASQECRPIGFQEAAEELRARFLDNVRLHLRSDVPIGAALSGGIDSSAIVCAMRWLEPDLPIQTFSFISDDAHRSEERWVDLVNQHCGATGHKIHIAPHELLDDLDDLIRVQGEPVGSTSIYAQYRVFKLAREHGVVVTLDGQGADELLGGYGGYPTERLASLLETSRLGAAARLLRQQGRGAPARLLQAAALAAGGRHLANLRHATGRQHAPAWLDAQVLRDQGVTMREPAHAWAAATPLRGRRLVNELAHALYHRGLGALLRHGDRNSMRFSVESRVPFLTQDLAEFALSLPERYLVSDSGQTKHIFRKAMRGIVPDLILDRDDKIGFATPEQQWMQATAPQMRQWLVDAADIPFLRNAEVTAQFDAMIAGATPFSWQAWRWVNFQRWMQHATVLP

SEQ ID NO: 583 - protein, 470 aa, Petunia x hybrida
MKLLSEKATCNSHGQDSSYFLGWQEYEKNPYDEIQNPKGIIQMGLAENQLSFDLLESWLSQNPDAAGFKRNGESIFRELALFQDYHGLPAFKNALVKFMAEIRGNKVTFDSNKLVLTAGATSANETLMFCLADRGDAFLLPTPYYPGFDRDLKWRTGAEIVPIQCTSSNGFRITESALEEAYQEAKSRNLRVKGVLVTNPSNPLGTTLTRNELELLLSFVDTKGIHLISDEIYSGTVFNSPNFVSVMEVLIENDYMYTEVWDRVHIVYSLSKDLGLPGFRVGAIYSNDELVVSAATKMSSFGLISSQTQYLLSAMLSDKKFRKKYVSENQKRLKKRHAMLVTGLQNAGISCLESNAGLFCWVDMRHLLKSNTFEAEIELWKEIVYQVGLNISPGSSCHCTEPGWFRVCFANMSEDTLTLAMARIKSFVDSSATSTDTHNNQTNQNTNTNSTKKKLFSKWGFRLSFNDRER

SEQ ID NO: 584 - protein, 1513 aa, Desulfovibrio vulgaris subsp. vulgaris str. Hildenborough
MPRQVDSHRAAKGRAGHHPTTHDAVHLPLVVGIGASAGGLEALEGLFRHMPTTTGAAFVVIQHLSPDFPSFMDELLARQTVMTIVVVQDGMCPAPDHIYLLPPGKEMEITLDGFILRDKSSYDNRPSMPINTFFASLAAWYGENAAGVVLSGTGTDGASGLEAISAAGGLVLVQLPESAAFDGMPKAAAAACRAAVLATPDEMPDILAAFISGSPLPFEHPGLPADPASGGPAPDALQTIFTLLQRHGGLDFRDYKPATIARRIMRRIRLEQHADIEGYARHLRDDPQAVQTLFRDLLIGVTTFFRDETAFDTLAATVIPELFRKQGDRGEIRLWVAGCASGEEAYSLGMLLLEAAPQFDFTGRISIFATDVHRHSLDRASAGVYTKDSLQALSPRRLQRFFIPEGDETYRVAPELRSLVLFTQHNILADPPFTRVDLVSCRNLLIYFGVDAQERAIARLHMALRPGGVLFMGASETTGRLHPIFEPLDPRLRIFTKRPDTLGMTATHLVHPAVIDAHRLATSSPQPSERQLLRDYDALLQRFAPDGMLVDDRFAVLHFFGNGASYLTQHTGRTDRPITDMVEGDLRLALSSALQRASTTGETARFKSIRVPGNGGDRLVDVEVMPIGNKPSDGKHYHVALQSSHPVLIRPLVEPAATGHGTGLLASRVAELEAELAETRSSLRDSIEQVHVTNEELQATNEELLSANEELQATNEELHSINEELYTVNAEFERKNDQLRILGEDYAQLFDTIPIAIASLDESLRVRRFNAGMSAIFHLQPHDVGRPLQQIASCLAEPDNLFKSLALGLSEGGTHDSEARLTDGRWCQQRIHAVRDETGATEHMLLTFMDITHVKHAEAMRQEARSLDEVSRNVPGVVFKLCAPHDGNIRVEYVGGGTVELCGLSQEEIKADPHALVALFGPDVVPHILAGISATDGEGTPVDVEIPLHCTGGTKWVHVQATSTPARGGGTEWYGVAVDATERRYDATRMHNAADRYLRILDHAPMLIWRSDTTGACDWFNTTWLDFTGRTMEQEYGYGWAGGVHPDDYDRCVSIYQKAFALQQAFEMNYRLKRHDGQFRWLVDCGKPLPDLDGTFSGFIGYCYDITDAVNALESMCEASKRAEEANRTKSEFLANVSHELRTPLNGALGMLQLLELSSLSPEQRQYVTTAIRSGQNLVRLLSDILDLSRIEAGKLVIEAIPCDIRELVDEVFSTFSLDATGKGITLETTIAPGTPTYVRTDPLRLRQTLFNLVGNAVKFTEKGGVRVEFSTASMRGDAIVLFCTVRDTGPGIPEDRIESIFQPFTQLDGSYTRRHSGLGLGLGIVCRLMELFGGSIEVESAPDMGTAMHFAIPVGKTRRPQGRKVKETEDEGDRHALYLLVAEDDAINRLTLTRMLEQLGHRAHAVEDGSQALQALAEQHFDAVFLDIQMPVLDGMATLQAIRTGQVAGLPPTIPVVAVTAHAMQGDRERFMAKGADAYVQKPYDFTALEKALATLGRRVRPEGRTREDYSL

SEQ ID NO: 585 - protein, 541 aa, Streptomyces coelicolor A3(2)
MAKIIAFDEEARRGLERGMNQLADAVKVTLGPKGRNVVLEKKWGAPTITNDGVSIAKEIELEDPYEKIGAELVKEVAKKTDDVAGDGTTTATVLAQALVKEGLRNVAAGANPMALKRGIEKAVEAVSAALLEQAKDVETKEQIASTASISAADTQIGELIAEAMDKVGKEGVITVEESQTFGLELELTEGMRFDKGYISAYFATDMERMEASLDDPYILIANSKIGNVKDLLPLLEKVMQSGKPLLIIAEDVEGEALSTLVVNKIRGTFKSVAVKAPGFGDRRKAMLGDIAILTGGEVISEEVGLKLENATLDLLGSARKVVITKDETTIVDGAGSADQVQGRVNQIRAEIENSDSDYDREKLQERLAKLAGGVAVIKAGAATEVELKERKHRIEDAVRNAKAAVEEGIVAGGGVALLQASQVFEKLELTGDEATGANAVKLALEAPLKQIAVNGGLEGGVVVEKVRNLTVGHGLNAATGEYVDMIAEGIIDPAKVTRSALQNAASIAALFLTTEAVIADKPEKAAPAGAPGGMPGGDMDF

SEQ ID NO: 586 - protein, 563 aa, Zea mays
MAPLVAAATNHTAHRSHIVGPNNENFPRHQPCSSQNRNKRLRLRSRAQRISSQLLASRKLMPWQIPKRDWFPPSFIFGAATAAYQIEGAWNEDGKGPSNWDHFCHNYPDWILDGSNGDTGANSYHMYPADVRLLKEIGMDAYRFSISWSRILPKGTLEGGINQAGIKYYKKLINLLIENGIEPFVTIFHWDVPQALEDKYGGFLGDRIVFAIFFRKDYTDFAKVCFENFGDKVKNWLTFNEPQTFTTFSYGTGVFAPGRCSPGEKCAQPIANSLTEPYIAGHNILRAHAMTVDLYNKNYKGTDGRIGLAFDVMGRVPYGNTFLDEQAQERSLDQNLGWFLEPVVRGDYPFSMRSLARKRLPFFTDNEQAMLAGSYDILGINYYTSRFSKHVDFSEDYSPKLNADDAYATAEIFGPDGNSIGPPMGNPWIYMYPKGLKDLLMIMKNKYGNPPIYITENGIGDVDTKDNPLSMQDALDDYKRLDYLQRHISVIKESIDLGADVRGHFTWSLLDNFEWSSGYTERYGIIYVDRDDGYRRYLKRSAKWLREFNGAAKKAEKKVLTPA

SEQ ID NO: 587 - protein, 376 aa, Streptomyces coelicolor A3(2)
MTVTPAEAATRAAQLLARPATINGLTVPNRIAMAPMTRMFSPGGVPGEDVVSYYSRRAAAGVGLIVTEGTYVGHDSAGQSDRVPRFHGEEQLAGWAKVAEAVHAAGGTIVPQLWHIGMVRKAGEQPFPDAPAVGPSGLRIGEDEPTGRAMTQRDLDDVIGAFAESAAAAERIGFDGVEIHGAHGYLVDQFLWSGTNRRTDAYGGDPVARTRFAAEIVAAVRETVSADFPVIFRYSQWKQEAYDARLAETPEELEAILTPLASAGVDAFHASTRRYWLPEFEDSDLNLAGWTKKLTGKAAITVGSVGLDGDFNRAFQGEGAPVGSLDNLLDRLERDEFDLVAVGRALLHDPRWAQKVLDGRFDELAPYDAASLKTLS

SEQ ID NO: 588 - protein, 308 aa, Arabidopsis thaliana
MSVTSTVEENHQKNPSTPAAVEEEKKKRRWVFWDRRWRRLDYVKFSASFTVHSLALLAPFYFTWSALWVTFLFYTIGGLGITVSYHRNLAHRSFKVPKWLEYLLAYCALLAIQGDPIDWVSTHRYHHQFTDSERDPHSPKEGFWFSHLLWIYDSAYLVSKCGRRANVEDLKRQWFYRFLQKTVLFHILGLGFFLFYLGGMSFVTWGMGVGAALELHVTCLINSLCHIWGTRTWKTNDTSRNVWWLSVFSFGESWHNNHHAFKSSARQGLEWWQIDISWYIVRFFEIIGLATDVKVPTEAQRRRMAIVR

SEQ ID NO: 589 - protein, 548 aa, Vibrio sp. Ex25
MAAKDVKFGNDARVKMLEGVNVLADAVKVTLGPKGRNVVLDKSFGAPTITKDGVSVAREIELEDKFQNMGAQMVKEVASKANDAAGDGTTTATVLAQSIVNEGLKAVAAGMNPMDLKRGIDKAVAAAVEQLKELSVECNDTKAIAQVGTISANSDASVGNIIAEAMERVGRDGVITVEEGQALQDELDVVEGMQFDRGYLSPYFINNQESGSVDLENPFILLVDKKISNIRELLPTLEAVAKASRPLLIIAEDVEGEALATLVVNNMRGIVKVAAVKAPGFGDRRKAMLQDIAILTGGTVISEEIGLELEKVALEDLGQAKRVSITKENTTIIDGIGEEEMISGRVAQIRQQIEDATSDYDKEKLQERVAKLAGGVAVIKVGAATEVEMKEKKDRVEDALAATRAAVEEGVVAGGGVALIRAASKIAHLTGDNEEQNVGIRVALRAMEAPIRQITKNAGEEDSVVANNVKAGEGSYGYNAATGEYGDMLEMGILDPTKVTRSALQFAASVAGLMITTEAMVTDLPQKDAPAMPDMGGMGGMGGMGGMM

SEQ ID NO: 590 - protein, 183 aa, Coffea canephora
LVIGAYGIVCSALNSETTEHVALKKIANAFDNRIDAKRTLREIKLLRHMDHENVVAIRDIIPPPQREAFNDVYIAYELMDTDLHQIIRSNQALSEEHCQYFLYQILRGLKYIHSANVLHRDLKPSNLLLNANCDLKICDFGLARVTSETDFMTEYVVTRWYRAPELLLNSSDYTTAIDVWSVG

SEQ ID NO: 591 - protein, 161 aa, Coffea canephora
RRLRMLLITGSMRRGLCERSSFFAIWIMKTSVVAIRDIIPPPQREAFNDVYIAYELMDTDLHQIIRSNQALSEEHCQYFLYQILRGLKYIHSANVLHRDLKPSNLLLNANCDLKICDFGLARVTSETDFMTEYVVTRWYRAPELLLNSSDYTTAIDVWSVG

SEQ ID NO: 592 - protein, 212 aa, Mycobacterium tuberculosis CDC1551
MMAAIERVITHGTFELDGGSWEVDNNIWLVGDDSEVVVFDAAHHAAPIIDAVGGRKVVAVICTHGHNDHVTVAPELGTALDAPVLMHPGDAVLWRMTHPDKSFRAVSDGDAVRVGGTELRALHTPGHSPGSVCWYAPELGPGTGTVFSGDTLFAGGPGATGRSYSDFPTILRSISGRLGALPGDTVVHTGHGDSTTIGDEIVHYEEWVARGH

SEQ ID NO: 593 - protein, 183 aa, Coffea canephora
LVIGAYGIVCSVLNSETNEMVAVKKIANAFDNYMDAKRTLREIKLLRHLDHENVIAIRDVIPPPLRREFSDVYIATELMDTDLHQIIRSNQSLSEEHSQYFLYQILRGLKYIHSAKVIHRDLKPSNLLVNANCDLKIIDFGLARPNTENEVMTEYVVTRWYRAPELLLNSSDYTAAIDVWSVG

SEQ ID NO: 594 - protein, 364 aa, Arabidopsis thaliana
MEKKSEEDGNNTTKEKIFRADKIDLKSLDRQLEKHLSRVWSRNLEVNPKAKEEWEIDLAKLETSNVIARGTYGTVYKGIYDGQDVAVKVLDWEDDGNETTAKTATNRALFRQEVTVWHKLNHPNVTKFVGASMGTTNLNIRSADSKGSLPQQACCVVVEYLPGGTLKQHLIRHKSKKLAFKAVIKLALDLARGLSYLHSEKIVHRDVKTENMLLDAQKNLKIADFGVARVEALNPKDMTGETGTLGYMAPEVIDGKPYNRRCDVYSFGICLWEIYCCDMPYPDLSFVDVSSAVVLHNLRPEIPRCCPTALAGIMKTCWDGNPQKRPEMKEVVKMLEGVDTSKGGGMIPEDQSRGCFCFAPARGP

SEQ ID NO: 595 - protein, 755 aa, Prochlorococcus marinus str. NATL2A
MTVSILLDSLKDDGQRLSECRHESPFSILGPQPFKDKWIIRIWMPEASQVELVTQQTKIKLQNPNHEWIFEGVLEKDPGTDYQIKVNRGGIEHVQHDPWSFRKEWMGEIDRHLFAEGNHHHIWRKMGAHLTEIDKKKGVMFCLWAPHAKSVSVIGDLNSWDGRHHPMQKRLGGIWELFIPGLSEGDLYKYEIRTEKGHCYEKADPYGFQHEVRPAKSSVISKIDSFQWSDQSWISNRDNRDPLEQPISVYEMHLGSWMHASSDDPFINSNGEHRAPVPAADMKPGSRLLTYKELANKVIPYVKERGFTHIELMPISEHPFDGSWGYQVTGWYAPTSRFGSPDEFRAFVDSCHKEGIGIILDWVPGHFPKDQHGLAYFDGSHLYEHSDPRVGEHKEWGTLIFNYSRNEVRNFLVANLIFWFDQFHIDGIRVDAVASMLYKDYLRPEGEWIPNEDGGNENFEAVRFLQQANHVLFQHFPGALSIAEESTTWTGVTKPTDMDGLGFNLKWNMGWMHDMLDYFEIDPWFRQFNQNNITFSICYNFTENFMLALSHDEVVHGKSHLLHKMPGDDWQKYANTRALLAYMWTHPGKKTIFMGMEFGQRQEWNVWDDLQWDLLNYEPHKGIQKLVDDLNNLYKREPALWRNDFDEYGFQWIDCDDNKNSVISFMRREKTDGEWLVIVANFTPQNHSNYRIGVPVDGFYEEIFNTDASQYGGSNLGNMGGKSTDLYNIHGYENSIDLCLPPLSVLVLKHKSKKN

SEQ ID NO: 596 - protein, 494 aa, Cucurbita pepo
MGFHQIDERNQALLSKIAIDDGHGENSAYFDGWKAYDNNPFHPENNPLGVIQMGLAENQLSFGMIVDWIRKHPEASICTPEGLEKFKSIANFQDYHGLQEFRKAMASFMGKVRGGRVKFDPSRIVMGGGATGASETVIFCLADPGDAFLVPSPYYAAFDRDLKWRTRAQIIPVHCNSSNNFQVTEAALEIAYKKAQEANMKVKGVIITNPSNPLGTTYDRDTLKTLVTFVNQHDIHLICDEIYSATVFKAPTFTSIAEIVEQMEHCKKELIHILYSLSKDMGLPGFRVGIIYSYNDVVVRRARQMSSFGLVSSQTQHLLAAMLSDEDFVDKFLAENSKRLGERHARFTKELDKMGITCLNSNAGVFVWMDLRRLLKDQTFKAEMELWRVIINEVKLNVSPGSSFHVTEPGWFRVCFANMDDNTVDVALNRIHSFVENIDKKEDNTVAMPSKTRHRDNKLRLSFSFSGRRYDKGNVLNSPHTMSPHSPLVRARTY

SEQ ID NO: 597 - protein, 605 aa, Legionella pneumophila str. Paris
MFGFISDLLTAAVSSLDELLQDTPAHQIILGTAALYFLYNQYHNPSISRWCRSRNNASMKQRIIDSAYALAKNLPGVNQIIEKELNKELSSTREKLRIQRSGMTLREEIPEEGLSPQDILSAFDVDVEKCHFDFLSVTNDSPEREFLVGRGDGKDSGALYAIHPKELTELLKEVYGATALTNPLHDKWPRINAMQAEVIRWCQNLFHGSKEGYGLLTHGGTTSIIEAMAAYVIRARAKGIDYPEIVVPETAHAAFKKAAELTGAILITVPVDKKTGAVNPNVMSSYITRNTAVMVGSAPSFMNGIHDPISELGQLAKKKNVPFHVDACLGGFLTAFLDTSSEPMDFRVPGVTSISADLHKYGCCPKGTSVCLFSEDSPALSVYAALNWSGGLYATPGILDGSTSGARVAEVYATLSYYGKNKYQEIAKSIIRLRNAIQKELTALVEEGNGLTSEDIYVYGNPQWSILGFRSNTCNAHFIADELEKRGWKLNLLQNPDGFHLCLTHVHTLVGSFETQFIKDLREAVIDVKNYPPGKKPSGNVKVYGAVGMMPVELQKEICKQYQKARLDFTAASHGSLGIFAPSSTEEDDGLRNRKVGEQKVQTSL

SEQ ID NO: 598 - protein, 350 aa, Cryptococcus neoformans var. neoformans JEC21
MAAPQATLGADLEPPATDLITLTRHILSQQYALGESATGDLTMLLIAIQVTSKYIASNVRKARLINLVGLAGASNVQGEDQKKLDVLSNDIMVNALSASGKCSVMVSEEVDEAIIVSGIKGTYCVVFDPLDGSSNIDAGVNVGTIFGVYKVQEGSRGTVEDVLRPGREMVAAGYTMYGSSCNLVLSTGNGVDGFTLDESLGEFILTHPAIKIPSRGKIYSFNEGNSLHFYPPTNDYLNSIKYPENGKPYSARYIGSMVADVHRTLLYGGIFGYPDDKKSKDGKLRMLYEAFPMSFLTEQAGGVATTGSQRILDIVPTSIHGRCPVFLGSKEDVEDLKKFYVNYKDDSRKW

SEQ ID NO: 599 - protein, 476 aa, Lycopersicon esculentum
MDLETSEISNYKSSVVLSKLASNEQHGENSPYFDGWKAYDNDPFHLVNNLNGVIQMGLAENQLSVDLIEEWIKRNPKASICTNDGIESFRRIANFQDYHGLPEFTNAIAKFMEKTRGGKVKFDAKRVVMAGGATGANETLILCLADPGDAFLVPTPYYPGFNRDLRWRSGVQLLPISCKSCNNFKITIEAIEEAYEKGQQANVKIKGLILTNPCNPLGTILDRDTLKKISTFTNEHNIHLVCDEIYAATVFNSPKFVSIAEIINEDNCINKDLVHIVSSLSKDLGFPGFRVGIVYSFNDDVVNCARKMSSFGLVSTQTQHLLAFMLSDDEFVEEFLIESAKRLRERYEKFTRGLEEIGIKCLESNAGVYCWMDLRSLLKEATLDAEMSLWKLIINEVKLNVSPGSSFNCSEVGWFRVCFANIDDQTMEIALARIRMFMDAYNNVNKNGVMKNKHNGRGTTYDLTPQMGSTMKMLLA

SEQ ID NO: 600 - protein, 546 aa, Ustilago maydis 521
MADGPSKDELVEIFKSLKTTQKGNKAADRSPRHSTTRQVCFDCGAKNPTWASATYAIYICLDCSSVHRNMGVHITFVRSTNLDSWHWSQLRLMKVGGNAAAAEFFNKKGGAHLLAPSTEGKVKYTSSVAQAYKDELQKRALLDAAGQSLNSPVYFPGLAVASTETATPSSSTKAGGDDDDFFDSWDKPASAAKPAASTTAKPAPAPVSTRAPAAAAAAPKTVTSASLRASSSAARKTLGAVSRTSSASSTPGTTTPTGTGPTTTASALGAPSARPARAGKLGLGVKKAAAPIDFAAAERKAKEEEAARAAEAKAEQKAEETAREAQKASAEQAEAERIAREAVKAAVGKTSAATPASASSNANVRGAAGSVPDAFAAAKANGDMDRLGMGFGRLGMKANAHQAKLAAERAAAAANNAAAGSDLDAGGDEPSYARNQFSGQKSISSDQYFQRGSYDPQATSEAQQRLQSFQGQTSISSNQYFGRDEDEEAEQQAVQGSGDFADIEATAREYYQRFMANPDVQSSIDSFRAGALKLSQYLEDMSRNGA

SEQ ID NO: 601 - protein, 522 aa, Burkholderia vietnamiensis G4
MIPVKPAIRRVAASRTGAITAAVFIAFAFELAPAALAQTVPASATTATTAMPAPAAAPLPSPCPPDWEAQLCELKAAIEVLKKQHLTDVDIGALLDATVHAGIKTLPYARFFNAAERRQQLDDEGRARDGTPGIGIVFETRPDGLHIIDVIPDAPAEKAGVRPDDLVVAMNDQSVVGLDSADVVKLAKGDAGVPLKLTIRRGPGQATLVVAPVRAIVRPHPASAKRLAGDILYTRLSSFPEPAVGNYIDAVEAARRNGPPVKGVILDLRINGGGALNAAIGITALFAGRERTAMVTLERDGRNRRRITTNWPDYELPVMHGQDPLAPLQADDWWRTVPLVVLVDGQSASAAEATAAALRDLGRARLLGMPTYGKGLAQTGVDLIDGTRLNLTFARNLRPNGCPMDGYGVVPDWLVPPRRDSDVDGVLLWYREVDLARAPYADRLAPDPFATVRDARRKLRDARVRAKVEMSKSAALPQREFGTAADWQLRQALAALAGQPVQTVAAPAQLMPAQPVCERRDD

SEQ ID NO: 602 - protein, 184 aa, Avicennia marina
MASKESADNNPGLHTSLDEATKGYFLQQTMLRVKDPKVSLDFYSRIMGMSLLKRLDFPEMKFSLYFLGYEDTSSAPSDPVERTSWTFGQKAVLELTHNWGTESDPEFKGYHNGNSDPRGFGHIGVTVDDVHKACERFESLGVEFVKKPRDGKIMDVAFIKDPDGYWIEIFDTRTIAKSTADAAV

SEQ ID NO: 603 - protein, 589 aa, Zea mays
  misc_feature (559)..(559): Xaa can be any naturally occurring amino acid
  misc_feature (572)..(572): Xaa can be any naturally occurring amino acid
MCGILAVLGCSDCSQARRARILACSRRLKHRGPDWSGLYQHEGNFLAQQRLAIVSPLSGDQPLFNEDRTVVVVANGEIYNHKNVRKQFTGAHSFSTGSDCEVIIPLYEKYGENFVDMLDGVFAFVLYDTRDRTYVAARDAIGVNPLYIGWGSDGSVWMSSEMKALNEDCVRFEIFPPGHLYSSAGGGFRRWYTPHWFQEQVPRTPYQSLVLREAFEKAVIKRLMTDVPFGVLLSGGLDSSLVASVTKRHLVETDAAEKFGTELHSFVVGLEGSPDLKAAREVADYLGTTHHEFHFTVQDGIDAIEEVIYHDETYDVTTIRASTPMFLMARKIKSLGVKMVLSGEGSDELLGGYLYFHFAPNREELHRETCRKVKALHQYDCLRANKATSAWGLEVRVPFLDKEFVDVAMGMDPEWKMYDKNLGRIEKWVLRKAFDDEEHPYLPEHILYRQKEQFSDGVGYNWIDGLKSFTEQQVTDEMMNSAAQMFPYNTPVNKEAYYYRMIFERLFPQDSARETVPWGPSIACSTPAAIEWVEQWKASNDPSGRFISSHDSAATDRTXATSWRWPTAAGTXAANGTVNGNDVAVAIAV

SEQ ID NO: 604 - protein, 684 aa, Arabidopsis thaliana
MEVGSATKKLQCQRIGCNAMFTDDDNPQGKHTTEKPVLAKSVPKHPVAAPTSSPDANAATKDSCSRCRQGFFCSDHGSQPKEQIKQTLNTPGQAEEEKIEPLAPPVQKAVIDINQPQVCKNKGCGQTFKERDNHETACSHHPGPAVFHDRLRGWKCCDVHVKEFDEFMEIPPCTKGWHSSSPDPAATTISAAEHFPMRLIVPLRGVIQGRGGLFVGSLIPCCLFYFLQLYLKRRRPPPSDPTDLPRTFSRTNLFSRGNSIGRVRVSSRAVPVAKPSDSPYYIGLERVKTDPYDRITNTDGIIQLGLAESTRWMSENLMESMMQSDDGEFDISSIAMYKPFEGLLELRVAFADFMSRIMGGNVSFDPSNMVITAGGTPAIEVLAFCLADHGNAFLIPTPYYPGFDRDIKFRTGVELIPVHCRSSDNFTVTVSALEQALNQARKRGSKVSGILFSNPSNPVGNILSRETLCDILRFAQEKNIHVISDEIFAGSVYGDKEFVSMAEIAGSGEFDKTRVHIIYGLSKDLSIPGFRAGVIYSFHEDVVNAAKKLMRFSSVPVLVQRILISLLSDVRFIEGYMAAHRQRIRDKHIRFVEGLKQLGIPCAESGGGLYCWVDMSSLLTSYSEKGELELFEKLLTVAKINATPGTACYCIEPGWFRCCFTALADEDIPVIMERIRQLAESFRS

SEQ ID NO: 605 - protein, 201 aa, Lilium longiflorum
ELSVLCDAEVALIIFSNHGRLSEFCSSSSMMKTLERYHKCSYNATEDIIPSKETENSYHEYLKLKTRVDYLQRSQRNLLGEDLGPLSTKELEQLENQLEISLKHIRSTKTQLMLDELSDLKGKEHMLQDANQLLRRKSWKNCSRDSGPSMPSDCQPARPERFFQPLACDSSLQIGFHPVGIDQLNNGVSPQNGDDYAPAWM

SEQ ID NO: 606 - protein, 397 aa, Rickettsia rickettsii
MLSKLNKPALFALIFYPIFIISLVVKYSFDYGIGLTEVIFIIASYYINNITVGIGLHRLWSHNAYKINKYAEFVLIMLSAGTLQGPALSWASNHYKHHRYTDQDQDPHTPLKFDNKFLGFMWSHIGWMLVGSGSYKSIDRITWAKHGKNNLLKWQLKYYWQIAAFMNIVVPLFIGYLVGGTMQSAYAGFLFMGLGRFLQQQATFCVNSLCHFAGSKKYYKGTAGDIWWMALFLLGENWHNYHHAFPSDYRNGAKWYHLDVHKWIIFLMSKIGLASELERTTKVRIQAKMQETLSYLSEKQKQKLTLMQTKIDHLLENLCLKIKELEESSITIKEQFKKSFVEIQESLKNLAEQVSAAKQITEKSSEKLLKIVNKKIIDAEQSIYKLYNQLNTLKVSN

SEQ ID NO: 607 - protein, 476 aa, Neurospora crassa
MSLPKDFLWGFATAAYQIEGAIHADGRGPSIWDTFCNIPGKIADGSSGAVACDSYNRTKEDIDLLKSLGATAYRFSISWSRIIPVGGRNDPINQKGIDHYVKFVDDLLEAGITPFITLFHWDLPDGLDKRYGGLLNREEFPLDFEHYARTMFKAIPKCKHWITFNEPWCSSILGYNSGYFAPGHTSDRTKSPVGDSAREPWIVGHNLLIAHGRAVKVYREDFKPTQGGEIGITLNGDATLPWDPEDPLDVEACDRKIEFAISWFADPIYFGKYPDSMRKQLGDRLPEFTPEEVALVKGSNDFYGMNHYTANYIKHKKGVPPEDDFLGNLETLFYNKKGNCIGPETQSFWLRPHAQGFRDLLNWLSKRYGYPKIYVTENGTSLKGENAMPLKQIVEDDFRVKYFNDYVNAMAKAHSEDGVNVKGYLAWSLMDNFEWAEGYETRFGVTYVDYENDQKRYPKKSAKSLKPLFDSLIKKD

SEQ ID NO: 608 - protein, 251 aa, Yersinia pestis CO92
MNLISIPAFQDNYIWLLANRQKHCVIVDPGESAPVLATLAQGQYVPQAILLTHHHNDHVGGVADLRHHFPDIPVYGPQETAKKGATVIVNDGDSLTIAGQNYTIIAVPGHTLGHIAYYSSPYLFCGDTLFSAGCGRLLEGTPEQMYASIQRLAQLPDETLICCAHEYTLSNLKFAHAILPADQDIATYQQQIEQLRSKNLPSLPVKLQFERKINVFLRCNDIDLQRKIGTTSPPDSLVSVFCELRSRKDSF

SEQ ID NO: 609 - protein, 252 aa, Brassica oleracea var. botrytis
MGRGRVEMKRIENKINRQVTFSKRRNGLLKKAYELSVLCDAEVALIVFSSRGKLYEFGSVGVERTIERYHRCYNCSVTNNRPEESKQNWCQEVAKLKAKYESLVRTNRHLLGEDIGEMGVKQLQALERQLEAALTATRQRKTQVMMEEMEDLRKKERQLGDINKQLKIKFEAGGHAFKSFQDFWPNSAASMAGDPNNSKFPVQPSHPDSVDCNTEPFLQIGFQQHYYVQGEGSSVPKSNVACETNFVQDWFL

SEQ ID NO: 610 - protein, 499 aa, Sinapis alba
EITCQENLPFTCGNTDALNSSSFSSDFIFGVASSAYQIEGTIGRGLNIWDGFTHRYPNKSGPDHGNGDTTCDSFSYWQKDIDVLDELNATGYRFSIAWSRIIPRGKRSRGVNEKGIDYYHGLISGLIKKGITPFVTLFHWDLPQTLQDEYEGFLDPQIIDDFKDYADLCFEEFGDSVKYWLTINQLYSVPTRGYGSALDAPGRCSPTVDPSCYAGNSSTEPYIVAHHQLLAHAKVVDLYRKNYTHQGGKIGPTMITRWFLPYNDTDRHSIAATERMKEFFLGWFMGPLTNGTYPQIMIDTVGERLPSFSPEESNLVKGSYDFLGLNYYFTQYAQPSPNPVNSTNHTAMMDAGAKLTYINASGHYIGPLFEKDKADSTDNIYYYPKGIYSVMDYFKNKYYNPLIYVTENGISTPGDENRNQSMLDYTRIDYLCSHLCFLNKVIKEKDVNVKGYLAWALGDNYEFNKGFTVRFGLSYIDWNNVTDRDLKKSGQWYQTFISP

SEQ ID NO: 611 - protein, 627 aa, Bacillus subtilis subsp. subtilis str. 168
MAAASPTAHDVYLFHEGSLFKSYQLFGSHYRELNGKSGYEFCVWAPHASEVRVAGDFNSWSGEEHVMHRVNDNGIWTLFIPGIGEKERYKYEIVTNNGEIRLKADPYAIYSEVRPNTASLTYDLEGYSWQDQKWQKKQKAKTLYEKPVFIYELHLGSWKKHSDGRHYSYKELSQTLIPYIKKHGFTHIELLPVYEHPYDRSWGYQGTGYYSPTSRFGPPHDLMKFVDECHQQNIGVILDWVPGHFCKDAHGLYMFDGEPLYEYKEERDRENWLWGTANFDLGKPEVHSFLISNALYWAEFYHIDGFRVDAVANILYWPNQDERHTNPYAVDFLKKLNQTMREAYPHVMMIAEDSTEWPQVTGAVEEGGLGFHYKWNMGWMNDVLKYMETPPEERRHCHQLISFSLLYAFSEHFVLPFSHDEVVYGKKSLLNKMPGDYWQKFAQYRLLLGYMTVHPGKKLIFMGSEFAQFDEWKDTEQLDWFLDSFPMHQKASVFTQDLLRFYQKSKILYEHDHRAQSFEWIDVHNDEQSIFSFIRYGQKHGEALVIICNFTPVVYHQYDVGVPFFTQYIEVLNSDSETYGGSGQINKKPLSAKKGALHHKPCYITMTIPPYGISILRAVKKRGEIKR

SEQ ID NO: 612 - protein, 317 aa, Debaryomyces hansenii CBS767
MSIKLNSGYDMPLVGFGCWKVDNDTCAATIYNAIKVGYRLFDAAQDYGNCKEIGEGINKALDEGLVARDELFITSKLWNSYHDPKNVELALKKVLSDMKLDYLDLFLIHFPIAFKFVPIEERYPPGFYCGDGDKFHYENVPLADTWKAMEKLTKSGKVKSIGISNFSGALIYDLLRSAEIKPAVLQIEHHPYLQQPRLVEYVQSQNIAITGYSSFGPQSFLELKHSKALDTPTLFEHKTIKSIANKNKKTPAQVLLRWASQRNIAVIPKSNNPDRLLQNLEVNDFDLSKEDFEEISKLDQELRFNNPWDWDKIPIFA

SEQ ID NO: 613 - protein, 387 aa, Moorella thermoacetica ATCC 39073
MPRIWRQIGRGLLALCVLVTLAVGVGVATHFREVEQGVKTYALLRFQALQPISTDKLMEGAIRGMVEALDDPYSTYLDAETYRKLQESVTGSYGGVGLLITLDEKDKRVVVVSPFKGTPAQRAGIKSGDYITAIDGRDTTGMDLETASNLMQGEPGTRVELTILSAGDSNPRKVALTREIIKVPTVDGRMLPGHPGVGYISVTMFNEQTGADLGRELNDLRQQGMQKLILDLRNNPGGALPAAVDVASYFVPQGPVVYIADQKTSEPLMARGYAQPLPLVVLVNKGSASAAEIVAGAIKDTKSGTLVGETTFGKGIVQTIFPLPGDAAVKITTQKYLTPGKHDINKKGITPDYVVPMDPQLEQQVLAHAPDLERDVQLQKALEVLGK

SEQ ID NO: 614 - protein, 589 aa, Helianthus annuus
MCGILALLGCSDDSQAKRFRVLELSRRLKHRGPDWSGLYQHGDNYLSHQRLAVIDPASGDQPLYNEDETVVVTVNGEIYNHMELREKLMGHKFKTGSDCDVIAHLYEEHGENFVDMLDGMFSFVLLGTRDNSYLVARDAIGITSLYIGWGLDGSVLISSGLKGLNDDCEHFEVFLAGHLYSSKIRGFRRWYNLPWFSESIPSTPYDPLVLRCAFENAVIKRLMTDVPFGVLLSGGLDSSLVASVTARHLAGSKAAKQWGAQLHSFCVGLEGSPDLKAAREVADYLGTLHHEFHFTVQDGIDAIEDVIYHIETYDVTTIRASTPMFLMSRKIKSLGVKMVISGEGSDEIFGGYLYFHKAPNKEEFHQETCRKIKALHQYDCLRANKSTSAWGLEARVPFLDKEFINVAMSIDPEAKMINMDQKRIEKWILRRAFDDEEKPYLPKHILYRQKEQFSDGVGYSWIDGLKSHAEQHVTNKMMLNAERIFPHNTPVTKEAYYYRMIFERFFPQNSAKLTVPGGASVACSTAKAIEWDASWSNNLDPSGRAALGVHNAAYKKNSGSISSANLAPSIADNVPRMMDITGPELVIRS

SEQ ID NO: 615 - protein, 154 aa, Bacillus cereus ATCC 14579
MSEEKKDSSRPPVRNYLKQIDDFFEQTPLRNVIADLNHFFQKGNRLLTFPVDLYEVGEELVVTAELPGIQKEQIQIEIQSEYLKVSVKEEILEEEEEQTSHNYYRRERSISEASRLIKLPYSINKKAAKASYQNGVLEIRAPKLPQQHDILSID

SEQ ID NO: 616 - protein, 633 aa, Bacillus cereus ATCC 14579
MCGFVGCLCENPREFSETEKHQFENMNTMIFHRGPDDEGYFRDEHVQFGFRRLSIIDLEAGHQPLTYENDRYVIIFNGEIYNYVELREMLLEKGATFATQSDTEVIIALYAHMKEKCVDYLRGMFAFMIWDREEKKLFGARDHFGIKPLYIAQQGDTTFFASEKKSIMHVMEDKGVNPTSLQHYFTYQYGPEPETLTIDVNKIEPGHYFVKEIGKEMEIHRYWKPYFNASSATKEEHIQAIRDVLYDSVKVHMRSDVPVGSFLSGGIDSSIIASIAREMNPNLLTFSVGFEQRGYSEVDVAKETAEKLGVKNHNVFISAKEFMDEFPKNHWHMDDPLADPAAVPLYFVAKEARKHVTVVLSGEGADELFGGYNIYREPNSLKMFSYIPSPGKSVLKALSGALKEGFKGKSFLERGCTPIEERYYGNAKIFREEEKAELMKYYNESVNYMDITKPLYNEIKDYDDVSKMQYIDMFTWLRGDILLKADKMTMANSLELRVPFLDKEVFDVASKIPTEFKIANGTTKAILREAARGIVPDHVLDRKKLGFPVPIRHWLKDEMHDWAINIINESKTEHLIDKQYVLNLLEAHCADKGDYSRKIWTVLAFMVWHQIYVEHKYDTNKFHEETKRAYSLV

SEQ ID NO: 617 - protein, 199 aa, Arabidopsis thaliana
MVQTKKFRGVRQRHWGSWVAEIRHPLLKRRIWLGTFETAEEAARAYDEAAVLMSGRNAKTNFPLNNNNTGETSEGKTDISASSTMSSSTSSSSLSSILSAKLRKCCKSPSPSLTCLRLDTASSHIGVWQKRAGSKSDSSWVMTVELGPASSSQETTSKASQDAILAPTTEVEIGGSREEVLDEEEKVALQMIEELLNTN

SEQ ID NO: 618 - protein, 416 aa, Zea mays
MSAAFDAYTDKNAVFRRLKAKPENKMCFDCNAKNPTWASVTYGIFLCLDCSAAHRSLGVHITFVRSTNLDSWTPDQLKMMAFGGNNRAHAFFKQHGWTDGGKVEAKYTSRAAELYRQMLTKEVAKSATTDNALPSSPVASEASKPPSDDFPEFKLPDVPAPPAENLNGKHEPKSPRAAPHSPKAATHPTFATSVKKPIGAKKVGGKTGGLGVRKLTTKPNESLYEQKPEEPKPAVPALAASTKKGGQALHSRFEYVENEPSADLRTGGSGSRVSGHVAPPKSSDFFQEYGMGNGFQKKSSNASKTQVEETDEARKKFSNAKAISSSQFFGTQNREEKEAQLSLQKFAGSSSISSADLFGRNDVDNSNLDLSAADLINRISFQASQDLSSLKDIAGETGKKLTSLASNFISDLDRIL

SEQ ID NO: 619 - protein, 227 aa, Arabidopsis thaliana
MALEALTSPRLASPIPPLFEDSSVFHGVEHWTKGKRSKRSRSDFHHQNLTEEEYLAFCLMLLARDNRQPPPPPAVEKLSYKCSVCDKTFSSYQALGGHKASHRKNLSQTLSGGGDDHSTSSATTTSAVTTGSGKSHVCTICNKSFPSGQALGGHKRCHYEGNNNINTSSVSNSEGAGSTSHVSSSHRGFDLNIPPIPEFSMVNGDDEVMSPMPAKKPRFDFPVKLQL

SEQ ID NO: 620 - protein, 510 aa, Neorickettsia risticii
MSKSYGGPEVTKDGYKVINNLNPEDEKIAKIVELLNQATSQANEKAGDGTTTATILVGNMIKNAHKHIAAQRSRTKLKSGMKPRTDEVVKYIQSVAKKINSEEEIAQVGSISANGNSEIGNKIAEAMNKVGKEGVITVEEGKGLDEFSVSVVQGMVFDRGYVSPYFITNPEKMIVEFDNPYVLLANKKLSSIQPMVPLLETIVRSNRAVVIIAEDVEGEALTSLVLSKMRGSLKACAVKAPGFGDRRSEMLEDIRILTGAKTLVSDDLGVTVESLTVEDLGTAKSIIISKDSTTIVDGGGVKTSIDARVKQIKTQIDKTTSDYDKEKLQERLAKLAGGGAVLKVGGATEVEVKERKDRVEDALHATRAAVEEGIVPGGGATLLSAIAVLEKLSSDDDDEQAGINIVKSALKAPISQIVENAGEDASVITYNLLESKDPNRIFDARELKYVDAFKAGIIDPAKVVRVALESAVSVASVLVTTEALIVDLPTKDNGSPSMMPGGGMGGMGGF

SEQ ID NO: 621 - protein, 482 aa, Zea mays
  misc_feature (255)..(255): Xaa can be any naturally occurring amino acid
MAASVTVENLNPKVLKCEYAVRGEIVIHAQRLQQQLQTQPGSLPFDEILYCNIGNPQSLGQQPVTFFREVLALCDHPCLLEKEETKSLFSADAISRAKQILATIPGRATGAYSHSQGIKGLRDAIAAGITSRDGFPANADDIFITDGASPGVHMMMQLLIRNEKDGILCPIPQYPLYSASIALHGGALVPYYLDEKTGWGLEISDLKKQLEDARSKGIDVRALVVINPGNPTGQVLAEDNQYDIVKFCKNEGLVXLADEVYQENIYVDNKKFNSFKKIARSMGYGEDDLPLVSFQSVSKGYYGECGKRGGYMEITGFSAPVREQIYKVASVNLCSNITGQILASLVMNPPKVGDESYASYKAEKDGILQSLARRAKALEDAFNTLEGFSCNKAGGAMYLFPQIHLPHKAIEAAKAAKKAPDAFYALRLLESTGIVVVPGSGFGQVPGTWHVRCTILPQEDKIPAVITRFKAFHEAFMAEYRD

SEQ ID NO: 622 - protein, 176 aa, Triticum aestivum
MVFLSNAISNARIEESHSKGELHHDAVETTIYGTRWASEDIPRFDLPEDEMPSNVAYRLIKDDLALDGNPALNLATFVTTYMEEEAEKLMAENLSKNFIDYEEYPQSVELCNRCVNMIARLYHAPMHSADEEALGCSTVGSSEAIILATLAMKRRWQNARKEKGLPTDKPNLIFGA

SEQ ID NO: 623 - protein, 345 aa, Bacillus cereus E33L
MNSELFSPYTIKDVTLKNRIVMSPMCMYSSENEDGQVTNFHLVHYGTRAAGQVGLVMIEATAVLPEGRISNKDLGIWDDSLIEGLHKTTTFIHDNGAKAAIQLAHAGRKAELETDALAPSAIPFNETMKTPVEMSKHQIKDTILAFQQAAIRSKQAGFDVIEIHGAHGYLINEFLSPLSNKRTDEYGGSPENRYRFLREIIDSINEVWNGPLFVRISANDYHPDGLTVQDYVQYTKWMKEQGVDLIDCSSGAVVPARIDVYPGYQVQYAKHIKEHANIATGAVGLITTGAQAEQILNNNEADLIFIGRELLRNPYFPRIAANELGFELEEPHQYERAPGKISTNK

SEQ ID NO: 624 - protein, 544 aa, Bacillus anthracis str. 'Ames Ancestor'
MAKDIKFSEEARRSMLRGVDTLANAVKVTLGPKGRNVVLEKKFGSPLITNDGVTIAKEIELEDAFENMGAKLVAEVASKTNDVAGDGTTTATVLAQAMIREGLKNVTAGANPMGLRKGIEKAVVAAVEELKTISKPIEGKSSIAQVAAISAADEEVGQLIAEAMERVGNDGVITLEESKGFTTELDVVEGMQFDRGYASPYMITDSDKMEAVLDNPYILITDKKISNIQEILPVLEQVVQQGKPLLIIAEDVEGEALATLVVNKLRGTFNVVAVKAPGFGDRRKAMLEDIAILTGGEVITEELGRDLKSATVESLGRAGKVVVTKENTTVVEGVGSTEQIEARIGQIRAQLEETTSEFDREKLQERLAKLVGGVAVIKVGAATETELKERKLRIEDALNSTRAAVEEGIVAGGGTSLMNVYTKVASIVAEGDEATGINIVLRALEEPVRQIAINAGLEGSVVVERLKGEKVGVGFNAATGEWVNMLETGIVDPAKVTRSALQNAASVAAMFLTTEAVVADKPEPNAPAMPDMGGMGMGGMGGMM

SEQ ID NO: 625 - protein, 532 aa, Xylella fastidiosa Ann-1
MRIKTGIKKAFILMLSVVLVSLVAIAVVAAHQFYIRLPQSRLFYAWKKVDEVYYDRTFAGFDWPAVLATYKKQLPRFDSDGQKTSPIINDMLSLLEVSHLQHFPAFLVPEEKKKTAVLASYFPELRDISGMVMVMDMLPRISRVLSLETWSPLYTHGVRVGDRILLETLDTDISDKNKPVRLYCYHINTAGVKKEFEFDLPAPPLGAQQTAVPAGDHVLHIARFDQGEIQALKHVSEDRNSSITQLHYISLGAVTTALHLPKNKVIDVVKDSEADKAGVEIGSFIGNGTNIKAGPENIGGKKVIKTDSRYEVVLPDGRKVTFSINKIIPKLNDIEGIRSAQLIGKTLVITFNEMSDENTQWALQQIKNTPATAIVLDLRYNTGGSGIAGEKLLAGFLASGTRIATEIRGKKTNEINVPAGYTPTDKPTAVLISLLSASGAELAARTLQFHHRARIYGAQSSGQVLTSRFYKLTDGTYMQIADTNLLDPAGKPIEWYGVMPDVKKWKTLSDVRAGRDPVLECALTDLSGGRCH

SEQ ID NO: 626 - protein, 544 aa, Brucella melitensis biovar Abortus
MAAKDVKFGRTAREKMLRGVDILADAVKVTLGPKANVVIEKSFGAPRITKDGVSVAKEVELEDKFENMGAQMLREVASKTNDTAGDGTTTATVLGQAIVQEGAKAVAAGMNPMDLKRGIDLAVNEVVAELLKKAKKINTSEEVAQVGTISANAKQIGKMIAEAMQKVGNEGVITVEEAKTAETELEVVEGMQFDRGYLSPYFVTNPEKMVADLEDAYILLHEKKLSNLQALLPVLEAVVQTSKPLLIIAEDVEGERLATLVVNKLRGGLKIAAVKRPGFGDRRKRMLEDIAILTGGQVISEDLGIKLESVTLDMLGRAKKVSISKENTTIVDGAGQKAEIDARVGQIKQQIEETTSDYDREKLQERLAKLAGGVAVIRVGGATEVEVKEKKDRVDDALNATRAAVEEGIVAGGGTALLRASTKITAKGVNADQEAGINIVRRAIQAPARQITTNAGEEASVIVGKILENTSETFGYNTANGEYGDLISLGIVDPVKVVRTALQNAASVAGLLITTEAMIAELPKKDAAPAGMPGGMGGMGGMDF

SEQ ID NO: 627 - protein, 260 aa, Thermobifida fusca YX
MARVRGPFVLVDGRGPAVVLRMHLHGQGRGRLRGARRVGGVLSTSRLQLGLVGRPAPPPPVTRNTLNKVEFMGLKFGDDHRRKAARPPHLNPPPPGGHQRVRGGTDMALPVVRSSQPTTGWDPFRELNELHTQLHRWMDSVLERTSGLTADPLSWSPLADLSETEDAYLVEVEVPGVSREDISIDLSGTELVITGERKEREREGWFRHRTRSVGRFHYAVTLPRDIDPDGVDATLSQGVLTVRIPKSKALKPRRIAITER

SEQ ID NO: 628 - protein, 366 aa, Carica papaya
QMGLAENQLCFNLIHEWLLKNPEASICTAQGAAEFRDIAIFQDYHGLAEFREAVAKFMGKVRRNRASFDPDRIVMSGGATGAHEMIAFCLADPGDAFLVPTPYYPGFDRDLRWRTGVKLIPVVCESSNDYQITIEALEAAYETAQEADIKVKGLLITNPSNPLGTIITKDTLEALVTFANHKNIHLVCDEIYAATVFSQPEFTSIAEIIEEDKICCNRDLIHIIYSLSKDMGFPGFRVGIVYSYNDAVVSCARKMSSFGLVSSQTQYLIASMLADDEFVDKFIVESRKRLAMRHSFFTQRLAQVGINCLKSNAGLFVWMDLRRLLKEQTFEAEMVLWRVIINEIKLNVSPGSPFHCSEPGWFRVCF

SEQ ID NO: 629 - protein, 664 aa, Listeria monocytogenes str. 4b F2365
MTDYPSIFEPLTVKRMTIKNRVIMPPMGTNLAGLNGEFLEEHMNYYEQRAKGGTGLITIENACVDFPYGTNGTTQLRIDNDQYIPGFYKLTERLHKHGTCVSIQINHAGASAYPARLNGLQPVSASDIPSKKGGTVPRPLTVEEIYEIVNKYGDAARRAQQAGFDAVEIHGGHSYLLCQFLSPLYNKRTDEFGGSPENRARIVKLILEKVRAEVGPFFPIVLRFSADEFTEGGNHLEDILELLDYCQEEADILNVSAAINDNLYLQIDQMNLEDGWRSYLAKAVKDKFNKPTITSGNIRSPKAAEKILSEGYADLLAMGRGLIAEPNWVNKVATGQEDMLRKCISCNIGCADHRISKSKPIRCTVNPDIIHEDKYKETKVTRPTNVVVIGGGTAGLEAACTAAEVGCNTTLIEASEQTGGLARAIANLPDKSRIADFPNYLANRAEKLTNLKVITGTKADTALIDTFNPDVVVNATGSKPLLPPIKGLHDVIDKEGSKVHSIFGLISNIDDFTEFSNKKVAVIGGGAVGLDVVEYFSERGSDVTIVEMMPLLGKDLDMITRLSMMDIIEKNNVDVQTETALTEVAADHFKVKHDGVDAEIPFDYGFVCLGMRPERPLMEELAAYGKEKQIEIVNIGDSAATRKILEGVREGRNILTTLEKIGSL

SEQ ID NO: 630 - protein, 590 aa, Asparagus officinalis
MCGILAVLGCSDDSQAKRVRVLELSRRLKHRGPDWSGLCQHGDCFLSHQRLAIIDPASGDQPLYNEDKSIVVTVNGEIYNHEELRRRLPDHKYRTGSDCEVIAHLYEEHGEDFVDMLDGMFSFVLLDTRNNCFVAARDAVGITPLYIGWGLDGSVWLSSEMKGLNDDCEHFEVFPPGNLYSSRSGSFRRWYNPQWYNETIPSAPYDPLVLRKAFEDAVIKRLMTDVPFGVLLSGGLDSSLVAAVTARHLAGSKAAEQWGTQLHSFCVGLEGSPDLKAAKEVAEYLGTVHHEFHFTVQDGIDAIEDVIFHIETYDVTTIRASTPMFLMARKIKSLGVKMVISGEGSDEIFGGYLYFHKAPNKEEFHHETCRKIKALHQYDCLRANKATSAWGLEARVPFLDKEFMDVAMSIDPESKMIKPDLGRIEKWVLRKAFDDEENPYLPKHILYRQKEQFSDGVGYSWIDGLKAHAAKHVTDRMMLNAARIYPHNTPTTKEAYYYRMIFERFFPQNSARFTVPGGPSIACSTAKAIEWDARWSNNLDPSGRAALGVHDSAYDPPLPSSISAGKGAAMITNKKPRIVDVATPGVVIST

SEQ ID NO: 631 - protein, 463 aa, Listeria monocytogenes str. 4b H7858
MNNNFLWGGATASYQCEGAWDVDGKAESMWDYYLHEAGLENGDVASDHYHRYEEDIRMMKEGGQNSYRFSLSWPRIIKNRQGDINLKGIEFYQNLLDTCKKYDIEPFVTLYHWDLPQYWEETGGWLDHDVCAAFEHYAKVCYDHFGDKITNWTTFNEPKWFVANGYKIGNYPPGYQDTQKTMIAAYNVMYASALGVKAFKEGGYPGQIGIVHSYTPVNGVDESIETKIAMRYADNYCNNWILDTAALGEFPVDLIAELAKSHDISFMKTDELQTIKQNTVDFIGLNYYSRTLVKPYTGGETQLQFNHSGKKGESKVLIKNWFEQVKDPANETTEWDTEIYPKGLQDGLIEAYERYQLPLYVTENGIGVREDVSVAKVDDAYRIAFMNDHINAIFNAIDAGCDVRGYYAWSPFDLYSWKNGVEKRYGLVAVDFKNNQIRKPKASYYWFKEMIESQGKLIKRREF

SEQ ID NO: 632 - protein, 502 aa, Paracoccidioides brasiliensis
MGADVASSTYRYTETPTYTTSNGCPVMDPESSQRVGMKGPLLLQDFHLIDLAHFDRERIPERVVHAKGAGAYGEFEVLDDISDITVIDMLLGVGKKTKCITRFSTVGGEKGSADSARDPRGFSTKFYTEQGNWDWVFNNTPVFFLRDPSKFPIFIHTQKRNPQNNLKDATMFWDYLSTHQESANRSCMHLFSDRGTPILPTGTCNGILGHHITQWTKPDGTFNYVQIHCKTDQGNKTFNNEEATKMAADNPDWHTEDLFKAIERGEYPSWTCTFRSSAPSRLEIRWNVFDLTKVWPQAEVPLRRFGRFTLCENPQNYFAEIEQAAFSPSHMVPGVEPSADPVLQSRLFSYPDTHRHRLGVNYQQIPVNCPLRAFNPYQRDGAMAINGNYGANPNYPSTFRPMEFKPVKACQEHEQWAGAALSKQIPVTDEDFVQPNGLWQVLGRQPGQQENFVHNVSVHLCGAQEKVRKATYCMFSRINADLGARIEKATERLVASQPQSHL

SEQ ID NO: 633 - protein, 145 aa, Bacillus cereus ATCC 14579
MRNLFPEITKRQNGIFDFGPSLLEGMTDAFFKPLNMDTFKVDVHEQSGKYTVKADLPGFQKENIQVDFEQDILTIQATNHNEVDEKNENGTYIRKERSIGSVTRRFNFKQVEEENVKANYKDGVLTIELPKLKEEKSSKTTINIE

SEQ ID NO: 634 - protein, 383 aa, Pyrococcus horikoshii OT3
MKFPRIGLPKEKVIELINEKTKKDLTFSSGKILGSMCTMPHDLAIEVYTKYIDRNLGDPGLHPGTRKIEEEVIEMISDLLHLEKGHGHIVSGGTEANILAVRAFRNLSDVEKPELILPKSAHFSFIKAGEMLGVKLVWAELNPDYTVDVRDVEAKISDNTIGIVGIAGTTGLGVVDDIPALSDLARDYGIPLHVDAAFGGFVIPFAKELGYELPDFDFKLKGVQSITIDPHKMGMAPIPAGGIVFRRKKYLKAISVLAPYLAGGKVWQATITGTRPGASVIAVWALIKHLGFEGYMRIVERAMKLSRWFAEEIKKINNAWLVREPMLNIVSFQTKNLKKVERELKSRGWGISAHRGYIRIVFMPHVTREMIEEFLKDLKEVLS

SEQ ID NO: 635 - protein, 359 aa, Ralstonia metallidurans CH34
MSALFTPVRVGRYTLKNHLVMAPMTRSRASLDGTPGELAAEYYAQRASVGLIVTEGTQPSDDGQGYLATPGIYTEAHVDGWKNVTAAVHERGGRIFIQLMHAGRMSHPDNTPHHRQGVAPSAIAPGVPMFTLKGMQDIPAPRALTTAEVRQTVDDFRFAARQAIAAGADGVEIHGANGYLVQQFFAPNANTRTDKYGGSIDNRARFAIEVATAIAGEIGADRTAIRLSPGTPLWGIDEGAEGPALYRHLVTELDKLGLAYLHVSLQGNEPQLADIRERWRGTLILNRPGRTREAVGADVASGLADLEAYGQMVLANPDFVTRLKLGAPMNDALPNAFFGGDGRGYIDYPALALTDTVTS

SEQ ID NO: 636 - protein, 140 aa, Ralstonia eutropha JMP134
MTNLRHFDPFSVEPISDMLQGMLRSFRGTADNGLAFKVDVSESESAYTLAAELPGVKKEDIDVSVDRGTVMISAKVEKSSEQKEGERVIRRERYSGSMQRAFTLDASIDEGKVEASYDNGVLRVVLPKKETSPQQRITVK

SEQ ID NO: 637 - protein, 812 aa, Frankia sp. CcI3
MNNGDVNNGTARTGRLATGLAPDRPNPRGAATAVRNGGGRVALADRDASSASAQPGQTADDPAVPSAPPSAPPSALPADPPAVAPAVSVDLPYDDLERLVSGAHHDPHALLGAHPHPGSDATVVRVLRPDARAVTVLVGPARYPATRLHSGGVFGVAVPGMLPDYRIEVTYPDGPYLIDDPYRHLPTLGEMDLHLIIEGRHEQLWKVLGAHPRALTTPGGATVTGVSFAVWAPSARGVRLVGDFDFWDGRAFPMRSLGRSGIWELFVPGAGTGARYKYEILGFDGIWRQKADPLAFHTEVPPATASVVFASDFTWNDGAWLDRRARTAWRTEPVSVYEVHLGSWRRGLSYRELAEELTAYVVENGFTHVEMLPVAEHPFGGSWGYQVSAYYAPTARFGSPDEFRHLVDTLHRAGIGVIVDWVPAHFPRDTWALGRFDGTPLYEHPDPRRGEQPDWGTYVFDLGRPEVRNFLVANALYWFEEFHIDGLRVDAVASMLYLDYSRPEGGWLPNIHGGRENLDAVSFLQETNATVYRRFPGAMMIAEESTAWPGVTRPTHLGGLGFGFKWNMGWMHDTLDYNSRLPIHRMYHHHQMTFSMVYAYSENFILPFSHDEVVHGKGSLLRKMPGDRWAQLANLRALLAYMWAHPGKKLLFMGCEFAQDNEWNESASLEWPLLDDPAHAGVADLVRDLNGLYRTVPALYQHDADPAGFSWIDANDAENNVFSFLRWSGEDPAGGVLACVTNFAGIGHEGYRIGLPFPGRWREILNTDGYRYGGGNIGNLGSVQAVEEPHHGLDASATLTLPPLGAIWLSPA

SEQ ID NO: 638 - protein, 1177 aa, Methylococcus capsulatus str. Bath
MSEDLTSPPAMRQRFLRSLGSICLIVILAEVIVMTLLGALHRGGLELVRWQESALDGLLLGLFSAPLLWIMALRPLAQQIARESQRNKELLDALDAHALVSITDLQGRILYANDNFCAVSRYGREELVGQDHRIVNSGYHGKAYIRDMWRTISRGNIWQGEFCNRRKDGTRYWVDSTIVPLMDNAGKPRQYISIRRDITAQKEAEAQLARLKQAMDANSEMILLTDRAGRIIYANPALCRFSGMAEGELLGQSPSILDSPLADQETLAAMQEALQAGQPWSGRLLNRRRTGPAPHDAEDYWAEISTTPIHTDGNGLVGYVQIQHDVSARVERERALAMEQEDTAARLRITETLQQSAPLDERCRQVLRILFELGTFGLQRKGGIFLKAEHGNCLKLFVLEGKFCDEFVRREQTIPMGACLCGRSAVSGEILVSDDCFQDHRHEHRFEDMESHGHYIVPIASGGDLLGVLFLYTDPNPTRSEARMVMLRQVGEMLALAILEDRAKASLKAAHDAAVDAAQAKSAFLANMSHEIRTPMNGVLGMLELLKDTDMSREQWDLVETASNSAESLLEIINSILDFSKLEAGKVEIERTEFNLPDLVEEVCALLAGRAHDKGLELNCFLPADLPRMWIGDPTRIRQILTNLLGNSVKFTERGEVSVKVMQGEAGAKRTDLSFEIRDTGIGIAPDVQARLFQPFTQADGSTSRRFGGTGLGLSICRNLVELMGGTIGLESAPGRGSRFWFTLPLEPLPGASAPALPDFSHRRVLVVDDNATNRVILSHYLTHWGLEVDEAERGDTALNRLRTALHESRPYDIVLLDLHMPYMDGHELARAMNAEPGLKDTPRLLLSSGGLTGEAELRALGIARSLLKPVRQSLLFNAIAEVLAAKATVQRRPAAKTETVLPAYEGRRVLVVEDNRVNQKVIVAMLGKFGIVPDVADNGQAALELLARSSYDLVLMDCQMPVLGGYEATGELRAREMSAGGRRTPVVALTAHAATGEREKCLAAGMDDYLSKPISRDRLAEALERWLGHPAAPASAETGQGAVNDDGGDRPAGLSWNREETLARLDHDEALLAEMIALCIEELPRHLAALQEAGAANDIAALADAAHAIKGMAGHFCAGSVRDLAARLEDQARKAGSMPDAASIGALETAAARLLEDLHGGSPAGDPAKGTNDAAQ

SEQ ID NO: 639 - protein, 546 aa, Brucella melitensis biovar Abortus
MAAKDVKFGRTAREKMLRGVDILADAVKVTLGPKGRNVVIEKSFGAPRITKDGVSVAKEVELEDKFENMGAQMLREVASKTNDTAGDGTTTATVLGQAIVQEGAKAVAAGMNPMDLKRGIDLAVNEVVAELLKKAKKINTSEEVAQVGTISANAEAEIGKMIAEAMQKVGNEGVITVEEAKTAETELEVVEGMQFDRGYLSPYFVTNPEKMVADLEDAYILLHEKKLSNLQALLPVLEAVVQTSKPLLIIAEDVEGEALATLVVNKLRGGLKIAAVKAPGFGDRRKAMLEDIAILTGGQVISEDLGIKLESVTLDMLGRAKKVSISKENTTIVDGAGQKAEIDARVGQIKQQIEETTSDYDREKLQERLAKLAGGVAVIRVGGATEVEVKEKKDRVDDALNATRAAVEEGIVAGGGTALLRASTKITAKGVNADQEAGINIVRRAIQAPARQITTNAGEEASVIVGKILENTSETFGYNTANGEYGDLISLGIVDPVKVVRTALQNAASVAGLLITTEAMIAELPKKDAAPAGMPGGMGGMGGMDF

SEQ ID NO: 640 - protein, 154 aa, Streptococcus thermophilus
MLNKIQQRNSDTYSVTPFNFFEDFRRNLFNDFFEDFSHNLFNDFKPNLIKTDIHETDNEYFVEAELPGIPKEDIQINYENGVLTISGQRQIDAATEDKKGKLIRNERSLTSVRRQYLLENVKEDEIKASYSDGILKVTLPKDSNKEIKTSIPIE

SEQ ID NO: 641 - protein, 282 aa, Zea mays
IDPAIVVAVLASDRRATTTTSRSLACAREPGSRRELAIGRRSMGRGKIVIRRIDNSTSRQVTFSKRRNGIFKKAKELAILCDAEVGLVIFSSTGRLYEYSSTSMKSVIDRYGKAKEEQQVVANPNSELKFWQREAASLRQQLHNLQENYRQLTGDDLSGLNVKELQSLENQLETSLRGVRAKKDHLLIDEIHDLNRKASLFHQENTDLYNKINLIRQENDELHKKIYETEGPSGVNRESPTPFNFAVVETRDVPVQLELSTLPQQNNIEPSTAPKLGLQLIP

SEQ ID NO: 642 - protein, 323 aa, Arabidopsis thaliana
MQTISKASSATSFFRCSRLSSQPCVRQLNIRKSLVCRVMKLVSSPLRTLRGAGKSIRVSKFCSVSNVSSLQIELVPCLKDNYAYILHDEDTGTVGVVDPSEAEPIIDSLKRSGRNLTYILNTHHHYDHTGGNLELKDRYGAKVIGSAMDKDRIPGIDMALKDGDKWMFAGHEVHVMDTPGHTKGHISLYFPGSRAIFTGDTMFSLSCGKLFEGTPKQMLASLQKITSLPDDTSIYCGHEYTLSNSKFALSLEPNNEVLQSYAAHVAELRSKKLPTIPTTVKMEKACNPFLRSSNTDIRRALRIPEAADEAEALGIIRKAKDDF

SEQ ID NO: 643 - protein, 361 aa, Escherichia coli
DLWHAPAPKNGQAVGTNTIGSSEACMLGGMAMKWRWRKRMEAAGKPTDKPNLVCGPVQICWHKFARYWDVELREIPMRPGQLFMDPKRMIEACDENTIGVVPTFGVTYTGNYEFPQPLHDALDKFQADTGIDIDMHIDAASGGFLAPFVAPDIVWDFRLPRVKSISASGHKFGLAPLGCGWVIWRDEEALPQELVFNVDYLGGQIGTFAINFSRPAGQVIAQYYEFLRLGREGYTKVQNASYQVAAYLADEIAKLGPYEFICTGRPDEGIPAVCFKLKDGEDPGYTLYDLSERLRLRGWQVPAFTLGGEATDIVVMRIMCRRGFEMDFAELLLEDYKASLKYLSDHPKLQGIAQQNSFKHT

SEQ ID NO: 644 - protein, 547 aa, Pseudomonas aeruginosa
MAAKEVKFGDSARKKMLVGVNVLADAVKATLGPKGRNVVLDKSFGAPTITKDGVSVAKEIELKDKFENMGAQLVKDVASKANDAAGDGTTTATVLAQAIVNEGLKAVAAGMNPMDLKRGIDKATVAIVAQLKELAKPCADTKAIAQVGTISANSDESIGQIIAEAMEKVGKEGVITVEEGSGLENELSVVEGMQFDRGYLSPYFVNKPDTMAAELDSPLLLLVDKKISNIREMLPVLEAVAKAGRPLLIVAEDVEGEALATLVVNNMRGIVKVAAVKAPGFGDRRKAMLQDIAILTGGTVISEEVGLSLEGATLEHLGNAKRVVINKENTTIIDGAGVQADIEARVLQIRKQIEETTSDYDREKLQERLGKLAGGVAVIKVGAATEVEMKEKKARVEDALHATRAAVEEGVVPGGGVALVRALQAIEGLKGDNEEQNVGIALLRRAVESPLRQIVANAGDEPSVVVDKVKQGSGNYGFNAATGVYGDMIEMGILDPAKVTRSALQAAASIGGLMITTEAMVAEIVEDKPAMGGMPDMGGMGGMGGMM

SEQ ID NO: 645 - protein, 702 aa, Arabidopsis thaliana
MSGSVSGCGSGGCSIVWFRRDLRVEDNPALAAAVRAGPVIALFVWAPEEEGHYHPGRVSRWWLKNSLAQLDSSLRSLGTCLITKRSTDSVASLLDVVKSTGASQIFFNHLYDPLSLVRDHRAKDVLTAQGIAVRSFNADLLYEPWEVTDELGRPFSMFAAFWERCLSMPYDPESPLLPPKKIISGDVSKCVADPLVFEDDSEKGSNALLARAWSPGWSNGDKALTTFINGPLLEYSKNRRKADSATTSFLSPHLHFGEVAWANEGNEAGEESVNLFLKSIGLREYSRYISFNHPYSHERPLLGHLKFFPWAVDENYFKAWRQGRTGYPLVDAGMRELWATGWLHDRIRVVVSSFFVKVLQLPWRWGMKYFWDTLLDADLESDALGWQYITGTLPDSREFDRIDNPQFEGYKFDPNGEYVRRWLPELSRLPTDWIHHPWNAPESVLQAAGIELGSNYPLPIVGLDEAKARLHEALSQMWQLEAASRAAIENGSEEGLGDSAEVEEAPIEFPRDITMEETEPTRLNPNRRYEDQMVPSITSSLIRPEEDEESSLNLRNSVGDSRAEVPRNMVNTNQAQQRRAEPASNQVTAMIPEFNIRIVAESTEDSTAESSSSGRRERSGGIVPEWSPGYSEQFPSEENGIGGGSTTSSYLQNHHEILNWRRLSQTGYVKSAFGGAKGEEHHKGCNSGEIWLDCKPSTFGTV

SEQ ID NO: 646 - protein, 324 aa, Gibberella zeae PH-1
MVNVPNIKLNSGFDMPQIGFGLWKVDDNCAEVVYNAIKAGYRLLDGACDYGNEKACGEGVARAIKEGIVKREDLFIVSKLWQTYHDKKNVEPITRRQLADWQIDYFDLFLIHFPVALEYVDPEVRYPPGWHYDDAGTEIRWSKATNQETWEGMEDLVEKGLAKSIGISNFQAQGIYDMLKYAKIRPATLQVELHPYHQQSELVSLAKAEGIALTAYSSFGPTGFIELDMDIAKSASPLMQHEVFTTLASKYNKTSAQVLLRWATQQGLAVIPKSTTPQYMAQNFDCFEWSIDEEDMKRISKMNLNLKFNKPTNYFPTEKLWIFG

SEQ ID NO: 647 - protein, 695 aa, Alkalilimnicola ehrlichei MLHE-1
MRVYDPHAEAVAFEDGTKLPRRPGSDFFEGPLPAGLSAPYRLRRTSQDGAAHTAHDPYAFGPALPDYDLHLFGEGRHYHAQRFLGAHPLEHEGVPGVRFAVWAPNAERVSVVGDFNRWDGRCHPMRVRGGSGVWELFIPGLPDGSLYKFELRNRDSGAVLVKTDPYGRRYQLRPDSAAVVEPPADYAWNDREWMAARREDQWQSIPISIYEVHLGSWQRAGDGSFLDYRTLAHRLVDHVLATGFTHIELLPITEHPFDGSWGYQTTGYFAPTTRFGAPDDFRYFVDHCHRHGIGVILDWVPAHFPRDDWALANFDGTPLYEHADPRRGEHRDWGTLIFNFGRNEVRNFLTASALYWLEEFHIDGLRVDAVASMLYLDYSRDEGDWVPNIHGGNENLEAIDFLQELNRITHGEQPGTMIMAEESTSWPQVTRPTWLGGLGFTMKWNMGWMHDTLTYMGEDPIHRRYHHDQLTFGMLYAFTENFVLPFSHDEVVHGKRSLLWRMPGDEWQRFANLRLLYAYQFTYPGKKLLFMGCEFGQGNEWNAEAALDWYVLDYPLHQGVLRLVGDLNALYREVPALHRHDFDEHGFAWIDCHDTEQSAISYLRRDGGHDGEATPPAATVLNFTPVPRHDYRLGVPAPGYWRERLNTDSTHYGGTNLGNGGGVWAEAVPWMGHPWSVVLTLPPLAGVVLSPEAGP

SEQ ID NO: 648 - protein, 554 aa, Vibrio sp. Ex25
MCSVFGILDIKSDAAALRPIALEMSKKLRHRGPDWSGIYSSERAILAHERLAIVGLNSGAQPLYSPDKKLILAVNGEIYNHKEIRARYEGKYEFQTDSDCEVILALYQDMGADLLEELNGIFAFVLYDEEKDEYLVGRDHIGIIPLYQGHDEHGNYYVASEMKALVPVCKTVSEFPPGSYYSSKDAEPTRYYVRDWNEYAAVQGNTTSKEELTEALEAAVKRQLMTDVPYGVLLSGGLDSSITSAVAKRFAAMRIEDDEKSEAWWPQLHSFAVGLEGAPDLKAAREVADQIGTVHHEMTYTIQEGLDAIRDVIYHIETYDVTTIRASTPMFLMGRKIKAMGIKMVLSGEGADEIFGGYLYFHKAPNAKEFHEETVRKLLALNMFDCARANKSLAAWGVEGRVPFLDKEFIDVAMRLNPADKMCGNGKMEKHILRECFEHYLPESIAWRQKEQFSDGVGYSWIDTLKEVAEQKVTDQQMETAQYRFPYNTPTTKEGYVYREIFEELFPLPSAAECVPGGPSVACSSAKAIEWDESFQNCVDPSGRAVQTVHNDAY

SEQ ID NO: 649 - protein, 529 aa, Bacillus subtilis
MSDDQNKRVNEHSKDEQLEQYRTDNSGKKMTTNQGLRVSEDEHSLKAGVRGPTLMEDFHFREKMTHFDHERIPERVVHARGFGVHGFFQVYEPMTEYTRAKFLQDPSVKTPVFVRFSTVAGSKGSADTVRDARGFATKFYTEEGNYDLVGNNIPVFFIQDAIKFPDLVHAFKPEPHNEMPQAATAHDTFWDFVANNPESAHMVMWTMSDRGIPRSYRMMEGFGVHTFRFVNEQGKARFVKFHWKPVLGVHSLVWDEAQKIAGKDPDFHRRDLWETIENGGKVEYELGVQMIDEEDEFKFDFDILDPTKLWPEELVPVKIIGKMTLNRNQDNVFAETEQVAFHPGNVVPGIDFTNDPLLQGRLFSYTDTQLIRLGGPNFHEIPINRPVCPFHNNQYDGYHRMTINKGPVAYHKNSLQNNDPSPATAEEGGYVHYQEKVEGKKIRQRSDSFNDYYSQAKLFWNSMSPVEKQHIISAFCFEVGKVKSKDVQRQVVDVFSNVDADLAEEIAKGVGVAAPRSVKHLKKFLLRLR

SEQ ID NO: 650 - protein, 1101 aa, Arabidopsis thaliana
MASSSADNLTDKNIVFRKLKSKSENKVCFDCSAKNPTWASVTYGIFLCIDCSATHRNLGVHISFVRSTNLDSWSPEQLRTMMFGGNNRAQVFFKQHGWTDGGKIEAKYTSRAADLYRQILAKEVAKAIAEETNSGLLSSPVATSQLPEVSNGVSSYSVKEELPLSKHEATSATSSPKASNTVVPSTFKKPIGAKRTGKTGGLGARKLTTKPKDNLYEQKPEEVAPVIPAVSSTNNGESKSSAGSSFASRFEYNDDLQSGGQSVGGTQVLNHVAPPKSSSFFSDFGMDSSFPKKSSSNSSKSQVEESDEARKKFTNAKSISSAQYFGDQNKNADLESKATLQKFAGSASISSADFYGHDQDDSNIDITASDLINRLSFQAQQDLSSLVNIAGETKKKLGTLASGIFSDIQDRMLNRTLTTMLMAKPDVPSSILPRSSSILPNSIETLDENESIEAQVNNVQSLALSSPNRDRSDDDDNNNNHDSVSIPPPIYDGYSSSSSDESQSVPSPPINLDHDDDECQIPIRNTSQALDDIDDDIWGDDDLPETRRPWTPNVSPGFGSDDDDDNDDDNSKNEPRKSLFYGFRQEPEPVTGVGAGLWNLGNSCFLNSVFQCFTHTVPLIESLLSFRYEVPCHCGNEFFCVIRAIRYHIEAALRPERYFSPDFQRYQQEDAHEFLQAFLEKLEICGSDRTSFRGDITSQDVFSGRLISGLRCCNCDYVSETYEKSVGLSLEIEDVDTLGSALESFTRVEKLDEQLTCDNCNEKVSKEKQLLLDKLPLVATFHLKRFKNNGLYMEKIYKHVKIPLEIDLQPYMRNIQENEVSTKYHLYALVEHFGYSVAYGHYSSYVRSAPKIWHHFDDSKVTRIDEDMVLSQDSYILFYAREGTRWFSSVYEEMQPLVEASLLNSSPKSVLDSSTNGECLSEISYENGDKASKPCDSAGVCNQHVKTKEDFVSLSNDDVFLSAESSSGEESPMGELLDPLDPDDSYSPCTEKESDSCLAIERATIRDDFFPLLLDQNQESSTSSPKLQERTFEMQLLQMEETTKSQEPWKQPLSSISNIADSMEAEFVYGDLMKKPSPRARELLDQAISTNGSPPKKLKTT

SEQ ID NO: 651 - protein, 372 aa, Xanthomonas campestris pv. vesicatoria str. 85-10
MSAVDAALSQLFSPITFGPLALANRIVIAPMCQYSAQDGRASDWHRIHLGTLSQSGAGLLILEAAAVVPEGRISYADLGLYDDATEQALAEVLQSVRRWSPMPIGIQLAHAGRKASTDLPWKGGEAIAPDHAHGWQTVSASALPFRQGQPVPQALDEAGIDAVVDAFVASAKRAERLGLELIELHAAHGYLMHQFLSPLSNQRSDAYGGSLENRMRLTLRIFDAVRAAVSEKIAVGVRISATDWVQGGWDVQQSIALSQALDARGAHYIHVSSGGLDPRQQIPLQAGYQIPFAQEIRAQVNTPVIGVGLITEPAQAEAILQEGQADAIALARGILYDPRWPWHAAAALGASVTPAPQYLRCEPRDARGVFAN

SEQ ID NO: 652 - protein, 439 aa, Musa acuminata
MVNCAESCVPLSEVATSNTHGEDSPYFAGWKAYDEDPYDAASNPAGVIQMGLAENQVSFDLLEKYLDQHPGASGWGCGISGFRENALFQDYHGLQTFRQAIATFMEQIREGRAKFDPERIVLTAATAANELLTFILADPGDCLLIPTPYYPGFDRDLRWRTGVRIIPVHCSSSNGFQVTLQALEDAYVKAEGMKIRVRGLLLTNPSNPLGTAIARHVLEEVLDFVTQKDIHLISDEIYSGSVFSSDEFVSVAEIVEARGYKDCGRVHIVYSLSKDLGLPGFRVGAIYSYNDRMVTAARRMSSFTLVSSQTQRMLASMLADRGFTENYLKTNRERLKNRRDFITEGLKNAGIECLPGNAGLFCWMNLAPLLEEPTREGELRLWSLIVHEAKLNISPGSSCHCSEAGWFRVCFANMSQQTLEVALRRIKDFMKNMKAKQEK

SEQ ID NO: 653 - protein, 545 aa, Eutrema wasabi
MKLHGLALVFLLAVATCKAVEDITCQEKEPFTCSNTDSLNSKSFGKDFIFGVASSAYQIEGGRGRGPNTWDAFTHRYPEKGGPDLANGDTTCESYTNWQKDIDIMDELNATGYRFSFAWSRIIPKGKVSRGVNQGGLDYYHQLIDGLIAKKITPFVTLYHWDLPQTLQDEYEGFLNRTIIDDFRDYADLCFKEFGGKVKHWITINQLYTVPTRGYGIATDAPGRCSPAIDKRCYGGNSSTEPYIVAHNQLLAHAAVVNLYRTKYKFQGGKIGTVMITRWFLPFDENDKDCIDATERMKEFFFGWFMEPLTKGRYPDIMRKIVGSKLPNFTEAEARQVAGSYDFLGLNYYVTQYAQPTKTIVPPENHTAMMDANVTLTYVNSRGELIGPLFAKDDDPKKNSYYYPKGIYFVMDHFRTRYFNPLIYVTENGISSPGTEPREVAIADSKRIDYLCSHLCFLRKVIKETGVNVKGYFAWSLGDNYEFCKGFTVRFGLSYVNWTDVTDRNLKDSGKWYQRFINVTTNNPPAKQDFLRSSLSFHNKNLADA

SEQ ID NO: 654 - protein, 319 aa, Aspergillus niger
MASPTVKLNSGYDMPLVGFGLWKVNNDTCADQIYHAIKEGYRLFDGACDYGNEVEAGQGIARAIKDGLVKREELFIVSKLWNSFHDGDRVEPICRKQLADWGIDYFDLYIVHFPISLKYVDPAVRYPPGWKSEKDELEFGNATIQETWTAMESLVDKKLARSIGISNFSAQLVMDLLRYARIRPATLQIEHHPYLTQTRLVEYAQKEGLTVTAYSSFGPLSFLELSVQNAVDSPPLFEHQLVKSIAEKHGRTPAQVLLRWATQRGIAVIPKSNNPQRLKQNLDVTGWNLEEEEIKAISGLDRGLRFNDPLGYGLYAPIF

SEQ ID NO: 655 - protein, 1131 aa, Sorghum bicolor
MSSSRPAHSSSSSSRTRQSSQARILAQTTLDAELNAEYEESGDSFDYSKLVEAQRSTPSEQQGRSGKVIAYLQHIQRGKLIQPFGCLLALDEKSFRVIAFSENAPEMLTTVSHAVPNVDDPPKLGIGTNVRSLFTDPGATALQKALGFADVSLLNPILVQCKTSGKPFYAIVHRATGCLVVDFEPVKPTEFPATAAGALQSYKLAAKAISKIQSLPGGSMEALCNTVVKEVFELTGYDRVMAYKFHEDEHGEVFAEITKPGIEPYLGLHYPATDIPQAARFLFMKNKVRMICDCRAKSVKIIEDEALSIDISLCGSTLRAPHSCHLQYMENMNSIASLVMAVVVNENEEDDEPGPEQPPQQQKKKRLWGLIVCHHESPRYVPFPLRYACEFLAQVFAVHVNKEFELEKQIREKSILRMQTMLSDMLFKEASPLSIVSGSPNIMDLVKCDGAALLYGDKVWRLQTAPTESQIRDIAFWLSEVHGDSTGLSTDSLQDAGYPGAASLGDMICGMAVAKITSKDILFWFRSHTAAEIKWGGAKHDPSDKDDNRRMHPRLSFKAFLEVVKMKSLPWSDYEMDAIHSLQLILRGTLNDALKPVQASGLDNQIGDLKLDGLAELQAVTSEMVRLMETATVPILAVDGNGLVNGWNQKVAELSGLRVDEAIGRHILTLVEDSSVSIVQRMLYLALQGKEEKEVRFELKTHGSKRDDGPVILVVNACASRDLHDHVVGVCFVAQDMTVHKLVMDKFTRVEGDYKAIIHNPNPLIPPIFGADQFGWCSEWNVAMTKLTGWHRDEVIDKMLLGEVFDSSNASCLLKSKDDFVRLCIIINSALAGEEAENAPFGLFDRNGKYIECLLSVNRKVNADGVVTGVFCFIHVPSDDLQHALHVQQASEQTAQRRLKAFSYMRHAINKPLSGMLYSRETLKSTGLNEEQMRQVHVADSCHRQLNKILADLDQDNITDKSSCLDLDMAEFVLEDVVVSAVSQVLIGCQGKGIRVACNLPERFMKQKVYGDGIRLQQILSDFLFVSVKFSPVGGSVDISSKLTKNSIGENLHLIDFELRIKHQGAGVPAEILSQMYEEDNKEPSEEGLSLLVSRNLLRLMNGNIRHIREAGMSTFILTAELAAAPSAVGQ

SEQ ID NO: 656 - protein, 642 aa, Azoarcus sp. EbN1
MCGIAGLFDLRGKRDFSRDLVRRMNDVQVHRGPDEGGYHFEPGIALAHRRLSIIDLSTGQQPLFNEDGSVAVVFNGEIYNFQELVPELEALGHAFHTRSDTEVIVHAWEAWGEDCVQRFRGMFAFALWDRNRETLFLARDRLAVKPLFYALLPDGTFAFGSELKVLMQHPLLDRRIDAHAVEEYFALGYVAEPRTIFAGAKKLGAAETLCVRRGQPVPQPRCYWDVHFMLDNPLSLAEASAELTARLRESVRLRMIAEVPLGAFLSGGVDSSAVVATMAGLSDEPVHTCSIAFDDPAFNESDFAQKVADRYRTNHYVETVKSDDFDLIDTLAGLYDEPYADSSAIPTWRVCQLARKRVTVALSGDGGDESFGGYRRYRLHLMEERMRGALPLGVRQPMFGLLGRLYPKADWAPRMFRAKTTFQALARDSLQAYFHSVSILRDAMRRQLFSNRFRSELAGYNAIEVFRRHAATAHTDDALALIQYVDLKTYLVGDINTKVDRASMAHSLEVREPLMDHKLVEWLATLPSGLKVKGQEGKYLFKKAMEPLLPNDVLYRPKMGFSVPLSRWFRGPLRERVRQTVLGETLAATGIFNPDYLRHLVDAHQSGARDYSSPLWSLMMFEAFVRSSGGCPARAPELAAAV

SEQ ID NO: 657 - protein, 1131 aa, Sorghum bicolor
MSSSRPAHSSSSSSRTRQSSQARILAQTTLDAELNAEYEESGDSFDYSKLVEAQRSTPSEQQGRSGKVIAYLQHIQRGKLIQPFGCLLALDEKSFRVIAFSENAPEMLTTVSHAVPNVDDPPKLGIGTNVRSLFTDPGATALQKALGFADVSLLNPILVQCKTSGKPFYAIVHRATGCLVVDFEPVKPTEFPATAAGALQSYKLAAKAISKIQSLPGGSMEALCNTVVKEVFELTGYDRVMAYKFHEDEHGEVFAEITKPGIEPYLGLHYPATDIPQAARFLFMKNKVRMICDCRAKSVKIIEDEALSIDISLCGSTLRAPHSCHLQYMENMNSIASLVMAVVVNENEEDDEPGPEQPPQQQKKKRLWGLIVCHHESPRYVPFPLRYACEFLAQVFAVHVNKEFELEKQIREKSILRMQTMLSDMLFKEASPLSIVSGSPNIMDLVKCDGAALLYGDKVWRLQTAPTESQIRDIAFWLSEVHGDSTGLSTDSLQDAGYPGAASLGDMICGMAVAKITSKDILFWFRSHTAAEIKWGGAKHDPSDKDDNRRMHPRLSFKAFLEVVKMKSLPWSDYEMDAIHSLQLILRGTLNDALKPVQASGLDNQIGDLKLDGLAELQAVTSEMVRLMETATVPILAVDGNGLVNGWNQKVAELSGLRVDEAIGRHILTLVEDSSVSIVQRMLYLALQGKEEKEVRFELKTHGSKRDDGPVILVVNACASRDLHDHVVGVCFVAQDMTVHKLVMDKFTRVEGDYKAIIHNPNPLIPPIFGADQFGWCSEWNVAMTKLTGWHRDEVIDKMLLGEVFDSSNASCLLKSKDDFVRLCIIINSALAGEEAEKAPFGLFDRNGKYIECLLSVNRKVNADGVVTGVFCFIHVPSDDLQHALHVQQASEQTAQRRLKAFSYMRHAINKPLSGMLYSRETLKSTGLNEEQMRQVHVADSCHRQLNKILADLDQDNITDKSSCLDLDMAEFVLEDVVVSAVSQVLIGCQGKGIRVACNLPERFMKQKVYGDGIRLQQILSDFLFVSVKFSPVGGSVDISSKLTKNSIGENLHLIDFELRIKHQGAGVPAEILSQMYEEDNKEPSEEGLSLLVSRNLLRLMNGNIRHIREAGMSTFILTAELAAAPSAVGQ

SEQ ID NO: 658 - protein, 207 aa, Moorella thermoacetica ATCC 39073
MFLKTLVVGPLGANCYLIGCPETGEGAVIDPGAEGERILAAAREAGLNIKQIINTHGHGDHIGANGAIKAATGAAILIHRADAHYLTDPGRNLSVLLGSREASPPADRLLEEDDTIAIGKTVTLRVIHTPGHTPGGICLHGEGLVFTGDTLFAGSIGRTDFPGGSYSQLISSIKEKLFTLDDALEVYPGHGPASTIGAERVDNPFFT

SEQ ID NO: 659 - protein, 540 aa, Methylovorus sp. SS1
MAAKEVKFHDHARTRIVQGVNVLADAVKVTLAPRAVMCLIERSFGAPVITKDGVSVAKEIELQDKFENMGAQMVKQVASKTADIAGDGTTTATVLAQAIVQEGMKHVVAGVNPMDLKRGIDKAVATVVDELHKLSKPITTNKEIAQVGSISANSDHPIGKIIADAMDKVGKEGVITVEDGKSLDNELDVVEGMQFDRGYLSPYFINNPEKQTVEFDDPLILLYDKKISSIRDLLPTLENVAKAGKPLLIIAEDLEGEALATLVVNSMRGILKVAAVKAPGFGDRRKAMLEDIAILTGATVISEETGKQLEKASLEDLGRAKRVELQKENTIIIDGAGEQKAIEARVKAIQAQIDESTSDYDREKLQERVAKLSGGVAVIKVGAATEVEMKEKKDRVDDALHATRAAVEEGIVPGGGVALLRARSRIVNLKGDNGDQDAGIRIVLRAIEAPLRAIAANAGDEPSVVINKVLAGSGNFGYNAATGEYADLVETGVVDPTKVTRTALQNAASVASLILTTDASIAELPKEEKAAVPAMPDMGY

SEQ ID NO: 660 - protein, 767 aa, Xanthomonas campestris pv. campestris str. ATCC 33913
MAARAGGLRGWSTLVALAALVAASAAALQWLGVAGPWRIVTTAASVLALVCGICTAVAAYRASRTLSALTRQLDDTNTAQARMQQELQRHGELEQELLRAKQAAEAASLAKGEFLATMSHEIRTPLNGIIPMLELISRGQLSLDQRDMLQTATGSSLQLLRIVDDILDYSKLEANKLELEITTFNLRELLDGVAQLMQRTAEGKQLRLGLDIEPSVRLLVRGDPIRLRQVLGNLIGNAIKFTERGSVDIQLRRLGETRAQHLLRFQVRDTGIGIAADQQARLFRSFAQADASTTRLYGGTGLGLAICKRIIDLMGGRIGVESEPGRGATFWFEIPLLKVIGDLQQTTGADAARVMVISSDARLSQRLKRLLDSWGISHVLMETTQEALERVRRHTDDEGFRCVIADHETLRYSARAVHRALARPEDLSGSRLIWLYGDEPVPDELQANATLVPRQSPDETLRALVLPPEPKPSVAPTLASAMIPEPLPPPVAHARDVRILLVEDNPVNLLVAQKLLGVLGFEADTATDGEAALSSMESTRYDMVFMDCQMPVLDGYAATRRWRAMETESGGRPIPIVAMTANAMAGDRERCLAAGMDDYLSKPVAREQLNACLQRWLPRQALLPGPSTGAPSADAESAASAAQARALPILESGVIDELYEVAGADTIRILQLFLEDAPGIIEGLEAAASNRDSMHLRDLAHTLKSSSANVGAQALANAARRIELAARTGTIERPSVMVALVIAEYARARLALLGQVTRLQAASRAAG

SEQ ID NO: 661 - protein, 312 aa, Saccharomyces cerevisiae
MPATLHDSTKILSLNTGAQIPQIGLGTWQSKENDAYKAVLTALKDGYRHIDTAAIYRNEDQVGQAIKDSGVPREEIFVTTKLWCTQHHEPEVALDQSLKRLGLDYVDLYLMHWPARLDPAYIKNEDILSVPTKKDGSRAVDITNWNFIKTWELMQELPKTGKTKAVGVSNFSINNLKDLLASQGNKLTPAANQVEIHPLLPQDELINFCKSKGIVVEAYSPLGSTDAPLLKEPVILEIAKKNNVQPGHVVISWHVQRGYVVLPKSVNPDRIKTNRKIFTLSTEDFEAINNISKEKGEKRVVHPNWSPFEVFK

SEQ ID NO: 662 - protein, 478 aa, Ashbya gossypii ATCC 10895
MEQVDLPNANKIAAGANKASVRVVNGLGALMGSKAMAAVDFEKDSMAEMLARDQREKEHYRHHKHISEQPWTLNNWHLHVNWVNIVLVVVVPIIGLYLALSGRVPPRFEVLALAIVYYSLGGLGITAGYHRLWAHRSYSARWPLRVMYALFGASSVEGSIKWWGHSHRIHHRYTDTPRDPYDARRGLWYSHMGWMLLQPNPRYRARADIEDLMNDWVVRLQHRHYVLIMAFMAFLLPAIICHFIFRDFWGGLVYAGILRVFAIQQATFCINSLAHYLGDQPFDDRRTPRDNWITALVTLGEGYHNFHHEFPTDYRNAIRWYQYDPTKVFIYCASLVGLAYDLKKFSQNAIQQGLIQQKQKKLDNARSRLNWGTPLSQLPVWDRSEFVRASRENSGLVVISGIVHDVSGYITEHPGGETLIQAALGKDATRAFNGGVYMHSNAAHNILATMRVAVVKEGQDAATRFAARRGEALEKKTA

SEQ ID NO: 663 - protein, 352 aa, Glycine max
MEKYELVKDIGSGNFGVARLMRHKDTKELVAMKYIERGHKIDENVAREIINHRSLRHPNIIRFKEVVLTPTHLGIVMEYAAGGELFERICSAGRFSEDEARYFFQQLISGVSYCHSMQICHRDLKLENTLLDGSPAPRLKICDFGYSKSSLLHSRPKSTVGTPAYIAPEVLSRREYDGKLADVWSCGVTLYVMLVGAYPFEDQEDPKNFRKTINRIMAVQYKIPDYVHISQDCRHLLSRIFVANPARRITIKEIKSHPWFVKNLPRELTEVAQAAYYRKENPTFSLQSIEDIMNIVEEAKAPPPASRSIGGFGWGGEEEEEDETKEAVAETEEDEYEKRVKEAQASGEFHVS

SEQ ID NO: 664 - protein, 630 aa, Magnetococcus sp. MC-1
MCGLSAILDLTGQRLPEAEQLTAMTRALAHRGPDGEGMHREPGVGLGHRRLSIIDLAGGAQPLWNEDRSVAVVFNGEIYNFPDLMQRLQGLGHQFHSRSDTEVIVHAWEQWGEQCVEALQGMFAFALWDRCQGVLFVARDRLGIKPLYYGFSEDGWLLVGSELKALTAHPGLSRSLDPKGVMDYFAYGYIPDPHSIYRQVKKLEPGYCARFTLGSGDWRLRCYWDLSFAAQPLTEAAALQQLQELLGQTVQSHTLADVPLGAFLSGGVDSSLITALLAKQSQTPLQALTVAFTGSREDEAPHARAVAQHLGVQQQLLTVDPLDFERLERLPGLYDEPFADSSAWPTFLLCEAAASRMKVVLSGDGGDELCAGYSRYRLFMAEQQVRQRVPSWLRRGLFGPMGMLYPKLDNAPRWLRAKSTLQALGEGPLEGLFRGASMMDPAMGQGLLAPDLMLLDYHPIEHFYRLNARLPEQVAFHDRMLYLDFKTFLAGRVLTKVDRASMAVGLEVRVPLLDHRLVEWAGRLPWCLKMQGGQGKYLLKKLAAQQVPATAVYRSKQGFIPPLAAWLRGPLQERLQDRLSSRVITESGLFHPRWIHWMLEQHRKKKQDLSMPLWSLLMFEGMLRKAQNKG

SEQ ID NO: 665 - protein, 716 aa, Gibberella zeae PH-1
MVSSKLLVVLGLASLTAAQCPYADPAKLAARDEGSSREHLKDYEVDDSKGHMSSDAGGPFEEQESLKAGERGPTLLEDFIFRQKITHFDHERVPERAVHARGAGAHGYFKSYSDWSNITAASFLSSKDKNTPVFVRFSTVAGSRGSADTVRDVHGFATRFYTDAGLFDIVGNNIPVFFIQDAIQFPDLIHAVKPSPDSEIPQAATAHDSAWDFFSQQTTTLHTLFWAMAGYGIPRSFRHVDGFGVHTFRLVTDEGDTKFVKWHWKSKQGKASLVWDEAQHLAGKNADYHRADLWNAIESGNGPEWELNAQIFDEDQALAFGFDVLDATKIIPEELAPLQPIGVMKLDTNPVNYFAETEQVMFQPGHIVRGIDFTEDPLLQGRIFSYLDTQLNRHGGPNFEQLPINRPLSPIHNNNRDGAGQNFIHKNTAASDSLDTPNTLNKGYPVQANQTQGKGFFTAPGRKVSGNLVRARASTFSDHWSQPRLFYNSLTKVEQQFLINAIRFETSQLMSETVQKNVLYQLNKISHDIAVRVGRALGLKAPEADDKYYHDNTTAGISIFGTKLPSIATLSVGVLVSINSNNSIQQAKALKKALGEDKVTVSIIGEVLGDDVEVTYSAATAAQFDSVVVTSGTESLFNGTGKSTLFPPGRPTQIIVDGYHWGKPVGFIGGAKAAAQAARVSKGKGVYFPKNVNSLVEDLKDGLATFKFTDRFPLDH

SEQ ID NO: 666 - protein, 408 aa, Arabidopsis thaliana
MGSLRRSTSNRSRKKGTAVKMNRMPSSLLPPTPPCSAIVGGTGKSKKRRGGVCLWTRFDRTGFMEVAGCDKSTIIERSSVSAKDLRTAFSHSSKILAREKAIVLNLEVIKAVITSEQVMLLDSLRPEVLTLTDRLKHHFPRKDGPENILQASSHGHQEGGEEGLKSKLPFEFRVLEIAFEVFCSFVDSNVVDLETQAWSILDELTKKVSNENLKDLRSLKTSLTHLLARVQKVRDEIEHFLDDKEDMEDLYLTRKWIQNQQTEAASNSIVSQPNLQRHTSNRISTSMVTEEDDIDDMEMLLEAYFMQLEGMRNKILLMKEHIDSTEAYVKILQNSRRNGLIHLMMLVNIGNYAITAGTVVVNLFGMNIPIGLYSTPDIFGYVVWAVVALCIVLFIVTVGYAKWKKLLD

SEQ ID NO: 667 - protein, 276 aa, Arabidopsis thaliana
MKGEYREQKSNEMFSKLPHHQQQQQQQQQQHSLTSHFHLSSTVTPTVDDSSIEVVRRPRGRPPGSKNKPKPPVFVTRDTDPPMSPYILEVPSGNDVVEAINRFCRRKSIGVCVLSGSGSVANVTLRQPSPAALGSTITFHGKFDLLSVSATFLPPPPRTSLSPPVSNFFTVSLAGPQGQIIGGFVAGPLISAGTVYVIAASFNNPSYHRLPAEEEQKHSAGTGEREGQSPPVSGGGEESGQMAGSGGESCGVSMYSCHMGGSDVIWAPTARAPPPY

SEQ ID NO: 668 - protein, 642 aa, Azoarcus sp. EbN1
MCGIHGIYRFDAAPVSPAQLSAMGDVTRHRGPDDEGRYIDADGRCGIAMRRLSIIDLAGGHQPISNADDTLWGVCNGEIYNFRELRAELQERGYRFKTGSDSEVLVHLYDAFGDDFVHRLDGMFNFALWDARRKRLLIGRDPLGVKPLYVHRSASMLAFATEAKALLELPGVTRELDHDVVADYLHLGYVAAPHSMFRDIRKLPPATLLSVENGEVRQWRYWRLPSSVARYVTEAEWIGRIRDGMERAVHRQMVSDVPIGAFLSGGVDSSAVVAFMAKHSAHPIRTYAIGFEGGEAEQLYNELPYARQVAQLIGTEHHEIVVTPDVVGLLPKLLWHMDEPVSDSAFITTFLVSEFARRDVKVILSGVGGDELFGGYRRYLGGHYVRKLQRLPRWSRQLMSRTAAMLPSDRHSKVLNTMRLARGFLASAELSPDERYRHYLQVLDRASIAELMNGRTGTTDALRDAFAAAGDEDALNRMFAVDAETQLPDDLLLLTDKMSMAVSLECRVPLLDRELVELAAAIPEALKVRDGRLKHLMKEALADVLPASILDRKKRGFGTPMGAWLKRDLAPVLRRLLSADVVRDRALFEPKVIARLMADHDANRIDGTDALLALMNLEIWSRIFLDRRSPDDVTTELKAYLP

SEQ ID NO: 669 - protein, 1131 aa, Sorghum bicolor
MSSSRPAHSSSSSSRTRQSSQARILAQTTLDAELNAEYEESGDSFDYSKLVEAQRSTPSEQQGRSGKVIAYLQHIQRGKLIQPFGCLLALDEKSFRVIAFSENAPEMLTTVSHAVPNVDDPPKLGIGTNVRSLFTDPGATALQKALGFADVSLLNPILVQCKTSGKPFYAIVHRATGCLVVDFEPVKPTEFPATAAGALQSYKLAAKAISKIQSLPGGSMEALCNTVVKEVFELTGYDRVMAYKFHEDEHGEVFAEITKPGIEPYLGLHYPATDIPQAARFLFMKNKVRMICDCRAKSVKIIEDEALSIDISLCGSTLRAPHSCHLQYMENMNSIASLVMAVVVNENEEDDEPGPEQPPQQQKKKRLWGLIVCHHESPRYVPFPLRYACEFLAQVFAVHVNKEFELEKQIREKSILRMQTMLSDMLFKEASPLSIVSGSPNIMDLVKCDGAALLYGDKVWRLQTAPTESQIRDIAFWLSEVHGDSTGLSTDSLQDAGYPGAASLGDMICGMAVAKITSKDILFWFRSHTAAEIKWGGAKHDPSDKDDNRRMHPRLSFKAFLEVVKMKSLPWSDYEMDAIHSLQLILRGTLNDALKPVQASGLDNQIGDLKLDGLAELQAVTSEMVRLMETATVPILAVDGNGLVNGWNQKVAELSGLRVDEAIGRHILTLVEDSSVSIVQRMLYLALQGKEEKEVRFELKTHGSKRDDGPVILVVNACASRDLHDHVVGVCFVAQDMTVHKLVMDKFTRVEGDYKAIIHNPNPLIPPIFGADQFGWCSEWNVAMTKLTGWHRDEVIDKMLLGEVFDSSNASCLLKSKDDFVRLCIIINSALAGEEAENAPFGLFDRNGKYIECLLSVNRKVNADGVVTGVFCFIHVPSDDLQHALHVQQASEQTAQRRLKAFSYMRHAINKPLSGMLYSRETLKSTGLNEEQMRQVHVADSCHRQLNKILADLDQDNITDKSSCLDLDMAEFVLEDVVVSAVSQVLIGCQGKGIRVACNLPERFMKQKVYGDGIRLQQILSDFLFVSVKFSPVGGSVDISSKLTKNSIGENLHLIDFELRIKHQGAGVPAEILSQMYEEDNKEPSEEGLSLLVSRNLLRLMNGNIRHLREAGMSTFILTAELAAAPSAVGQ

SEQ ID NO: 670 - protein, 243 aa, Glycine max
MAFPDPSMSASPQRKMGRGKIEIKRIENTTNRQVTFCKRRNGLLKKAYELSVLCDAEVALIVFSSRGRLYEYANNSVKATIERYKKASSDSSGAGSASEANAQFYQQEADKLRQQISNLQNNNRQMMGDSLGSLTAKDLKNLETKLEKGISRIRSKKNELLFAEIEYMQKREIDLHNNNQLLRAKIAESERNHHNMAVLPGGSNYDSMQSSQQQFDSRGYFQVTGLQPNNQYARQDQMSLQLV

SEQ ID NO: 671 - protein, 1131 aa, Sorghum bicolor
MSSSRPAHSSSSSSRTRQSSRARILAQTTLDAELNAEYEESGDSFDYSKLVEAQRSTPSEQQGRSGKVIAYLQHIQRGKLIQPFGCLLALDEKSFRVIAFSENAPEMLTTVSHAVPNVDDPPKLGIGTNVRSLFTDPGATALQKALGFADVSLLNPILVQCKTSGKPFYAIVHRATGCLVVDFEPVKPTEFPATAAGALQSYKLAAKAISKIQSLPGGSMEALCNTVVKEVFELTGYDRVMAYKFHEDEHGEVFAEITKPGIEPYLGLHYPATDIPQAARFLFMKNKVRMICDCRAKSVKIIEDEALSIDISLCGSTLRAPHSCHLQYMENMNSIASLVMAVVVNENEEDDEPGPEQPPQQQKKKRLWGLIVCHHESPRYVPFPLRYACEFLAQVFAVHVNKEFELEKQIREKSILRMQTMLSDMLFKEASPLSIVSGSPNIMDLVKCDGAALLYGDKVWRLQTAPTESQIRDIAFWLSEVHGDSTGLSTDSLQDAGYPGAASLGDMICGMAVAKITSKDILFWFRSHTAAEIKWGGAKHDPSDKDDNRRMHPRLSFKAFLEVVKMKSLPWSDYEMDAIHSLQLILRGTLNDALKPVQASGLDNQIGDLKLDGLAELQAVTSEMVRLMETATVPILAVDGNGLVNGWNQKVAELSGLRVDEAIGRHILTLVEDSSVSIVQRMLYLALQGKEEKEVRFELKTHGSKRDDGPVILVVNACASRDLHDHVVGVCFVAQDMTVHKLVMDKFTRVEGDYKAIIHNPNPLIPPIFGADQFGWCSEWNVAMTKLTGWHRDEVIDKMLLGEVFDSSNASCLLKSKDDFVRLCIIINSALAGEEAEKAPFGLFDRNGKYIECLLSVNRKVNADGVVTGVFCFIHVPSDDLQHALHVQQASEQTAQRRLKAFSYMRHAINKPLSGMLYSRETLKSTGLNEEQMRQVHVADSCHRQLNKILADLDQDNITDKSSCLDLDMAEFVLEDVVVSAVSQVLIGCQGKGIRVACNLPERFMKQKVYGDGIRLQQILSDFLFVSVKFSPVGGSVDISSKLTKNSIGENLHLIDFELRIKHQGAGVPAEILSQMYEEDNKEPSEEGLSLLVSRNLLRLMNGNIRHLREAGMSTFILTAELAAAPSAVGQ

SEQ ID NO: 672 - protein, 478 aa, Enterococcus faecalis V583
MKNQHLTTSQGSPVGDNQNSLTAGEFGPVLIQDVHLLEKLAHFNRERVPERVVHAKGAGAHGIFKVSQSMAQYTKADFLSEVGKETPLFARFSTVAGELGSSDTLRDPRGFALKFYTDEGNYDLVGNNTPIFFIRDAIKFPDFIHSQKRNPRTHLKSPEAVWDFWSHSPESLHQVTILMSDRGIPLSFRHMHGFGSHTFKWVNAAGEVFFVKYHFKTNQGIKNLESQLAEEIAGKNPDFHIEDLHNAIENQEFPSWTLSVQIIPYADALTMKETLFDVTKTVSQKEYPLIEVGTMTLNRNPENYFAEVEQVTFSPGNFVPGIEASPDKLLQGRLFAYGDAHRHRVGANSHQLPINQAKAPVNNYQKDGNMRFNNGNSEINYEPNSYTETPKEDPTAKISSFEVEGNVGNYSYNQDHFTQANALYNLLPSEEKENLINNIAASLGQVKNQEIIARQIDLFTRVNPEYGARVAQAIKQQA

SEQ ID NO: 673 - protein, 477 aa, Enterococcus faecalis V583
MKRVIWFRRDLRLQDNKALAHALQNSAADELILLFQMNPQQFIQESANHNAFFASLASFKERIDQEAHLQIMVGEPLDLFSRLKRKLPDWQAIYFNEDTCGFGAKRDQQAMRFFEENNIQSFSFQDAYLHGSEEIKKNDGSKYQVFTPYYNKWKEAPKETPIPVSYTAEKIFSACLFPEEEAAYREQIARIPLTHYSVGEETARRRLNTFIDQKLQSYENKRDFPYQDQTSHLSTFLRTGELSIRTIWQELASVPSSLSKETFKKELAWRDFYNMIYSAFPQQKEEAIQEKFRYIQWTNDPEMFVKWQKGETGYPIIDAAMRQLNQTGWMHNRLRMITASFLVKNLHIDWRWGEKYFQKMLIDYDAANNIGGWQWAASTGTDAVPYFRIFNPIIQSKKFDNDGQFIKKYVPELKQVPQKYIHQPNLMNEALQTQYHVHLGENYPKPIVDYASSKKQTLFLYEASKEIHQEMNNPRFQ

SEQ ID NO: 674 - protein, 478 aa, Helicobacter hepaticus ATCC 51449
MSKKFTTATGTPLGDNQNSITAGKKGPTLLQDTWLLEKLAHFDRERIPERVVHAKGSAAYGELTITNDITQYTKAELFNKVGKKTKAFLRFSVVAGERGAADAERDVRGFALKLYTNEGNWDIVGNNTPVFFIKDAIKFPDFIHTQKRDPKTNMKSPTAMWDFWSLHPESLHQVTILMSDRGIPRSYREMHGFGSHTYSFINAKNERFWVKFHFVCLQGIHNLTNKESEAVIAKDRESHQKDLFENIEKGNFPKWRFCIQVMSEKEAENYRFNPFDLTKVWSHKDYPLIEVGILELNKNPENYFAEVEQAAFNPANIVPGVGYSPDKVLQGRLFSYGDTQRYRLGINHTQLPVNAPIVPVNNTHRDGFMQQGQFGDRRNYEPSYFNDYVEDKNALEPPLFVQEGDVMYKYDHREYEDDYFVQAGDLYRLMTAEQKEALCQNIKESMEGVPDEIKKRQLEHFKKADKAYGKRVAELLGL

SEQ ID NO: 675 - protein, 285 aa, Andrographis paniculata
ISNLTCADFLRAPGVQTPVIVRFSTVIHERGSPETLRDPRGFAVKFYTREGNFDLVGNNFPVFFIRDGIKFPDMVHSLKPNPKSHIQENWRILDFFSHHPESLHMFTFLFDDIGIPQDYRHMDGSGVNTYTLINTAGKVHYVKFHWRPTCGVKSLLEEEAIRVGGANHSHATQDLYDSIAAGNYPEWKLFIQTIDPVHEDRFDFDPLDVTKTWPEDILPLQPVGRMVLNKNIDNFFAENEQLAFCPGIIVPGIYYSDDKLLQTRVFSYSDTQRHRLGPNYLLLPA

SEQ ID NO: 676 - protein, 326 aa, Glycine max
MLSKPSSAMPTFPSSMVRSGLCVWPNVRQLCFRKGILYGFMRLFSTPLKTLRGASRSLRVAQFCSVANMSSSLQIELVPCLKDNYAYLLHDVDTGTVGVVDPSEAVPVIDALSRKNRNLTYILNTHHHHDHTGGNVELKARYGAKVIGSGTDKKRIPGIDIHLNDGDKWMFAGHEVRVMDTPGHTQGHISFYFPGSGAIFTGDTLFSLSCGKLFEGTPQQMLSSLKKIMSLPDNTNIYCGHEYTLNNTKFALSIEPENEELQSYAAQVAYLRSKGLPTIPTTLKMEKACNPFLRTSSAAIRQSLNIAATANDAEALGGIRQAKDNF

SEQ ID NO: 677 - protein, 830 aa, Arabidopsis thaliana
MSEPKVRRWVGKYEVGRLIGECNFGKLRSAVDTETGDPVALMILDKDKVLKHKMAEQIKREISIMKLINHPNVVQLYEVLASKAKIYIVLEFISGGKLFDKIKNDGRMNEDEAQRYFQQLINAVDYCHSRGVYHRDLKPENLLLDAQENLKVAEFGLIALSQQAGGDGLRHTACGNPDYPAPEVLNDQGYDGAKADLWSCGVILFVLLAGYLPFEDSSLTTLYKKISSADFSCPPWLSSGVKNLIVRILDPNPMTRITIPEILEDVWFKKDYKPAVFEEKKEANLADVEAVFKDSEEGRVQLRSFPCVICSGGTTCGDVRSRTKLMNGLIERGRPQEAHSIFNTLIEEGHKPSLITYTTLVTALTRQKHFHSLLSLISKVEKNGLKPDTILFNAIINASSESGNLDQAMKIFEKMKESGCKPTASTFNTLIKGYGKIGKLEESSRLLDMMLRDEMLQPNDRTCNILVQAWCNQRKIEEAWNIVYKMQSYGVKPDVVTFNTLAKAYARIGSTLFCFFLQKKKKNNKVKPNVRTCGTIVNGYCEEGKMEEALRFFYRMKELGVHPNLFVFNSLIKGFLNINDMDGVGEVVDLMEEFGVKPDVVTFSTLMNAWSSVGDMKRCEEIYTDMLEGGIDPDIHAFSILAKGYARAGEPEKAEQILNQMRKFGVRPNVVIYTQIISGWCSAGEMKKAMQVYKKMCGIVGLSPNLTTYETLIWGFGEAKQPWKAEELLKDMEGKNVVPTRKTMQLIADGWKSIGVSNSNDANTLGSSFSTSSKLNIPNNIASSRSPLFLKGMPEKPKLCIKSQFGLRQTLLVVLCRDQIGEAGRFCKFM

SEQ ID NO: 678 - protein, 378 aa, Vibrio vulnificus YJ016
MRSILQQQKPPFIWLNIVIFVTSLILALVVTPWYGIKEGFGFEHLIWLLVTFSFTNLSITAGYHRLWSHKTYEAHPLLRVVFAIGGAFSLQNSALHWSSDHRMHHKFVDHHDKDPYSASRGFWFSHIGWMLRDYNQSTYNDYTNCRDLRKDPVIMWQHKYYVPLAIATNLGIPLLLGWYYQDIIGMLLVVGALRLTLSHHSTFFINSLAHIWGKQTFTDKNSARDNGFLAVLTFGEGYHNFHHIFENDYRNGIYWWQYDPTKWLIKSCSWLGLTRNLRLTPQMKIDKARAATRLKNALNQLAQRGEQESLKQQLQLEFDGLVATMKDYYDAKKQLLECKKQTALKKYEVALVKIRYQQAKEDLLSRYKRWHALTAHYA

SEQ ID NO: 679 - protein, 546 aa, Burkholderia sp. 383
MAAKDVVFGDSARSKMVEGVNILANAVKVTLGPKGRNVVLERSFGGPTVTKDGVSVAKEIELKDKLQNMGAQMVKEVASKTSDNAGDGTTTATVLAQSIVREGMKYVASGMNPMDLKRGIDKAVAAAVEELKKISKPCTTNKEIAQVGSISANSDTSIGDRIAEAMDKVGKEGVITVEDGKSLADELDVVEGMQFDRGYLSPYFINNPEKQVAVLDNPFVLLHDKKVSNIRDLLPVLEQVAKAGRPLLIIAEDIEGEALATLVVNNIRGILKTVAVKAPGFGDRRKAMLEDIAILTGGQVIAEETGLTLEKATLAELGQAKRIEVGKENTTIIDGAGEAVNIEARVKQVRAQIEEATSDYDREKLQERVAKLAGGVAVIKVGAATEVEMKEKKARVEDALHATRAAVEEGIVAGGGVALIRARTAIAALTGANADQNAGIKIVLRAMEEPLRQIVTNGGEEASVVVAAVAAGTGNYGYNAATGEYVDMVEAGVVDPTKVTRTALQNAASVAGLLLTTDAAVAELPKEDAPMPGGMPGGMGGMGMDM

SEQ ID NO: 680 - protein, 128 aa, Brassica napus
  misc_feature (116)..(116): Xaa can be any naturally occurring amino acid
MCDPTRDDGSSQSGLVRKENRAYFQREWNSFDVMRTLTVTIVHLLCLLAPFNYKWEALRFGLVLFAVVQLGITFSYHRNLSHRSFKLPKWLEYPFAYSAVFALQGDPMDWVSIHRXHHQFTDTDRDPH

SEQ ID NO: 681 - protein, 718 aa, Blumeria graminis
MRLSLWNLLGLSGLVVASCPYMSGEDQEYHISHIQARGTDSEFLDQFKVEDSNSYLTTDAGGPIQDDASLKAGERGPTLLEDFIFRQKIQHFDHERVPERAVHARGAGAYGTFTSYADWTNITAASFLNSKGKETPVFVRFSTVAGSRGSADTVRDVHGFATRFYTDEGNFDIVGNNIPVFFIQDAILFPDLVHAVKPSPDSEIPQAATGHDSAWDFFSQQPSTLHTLFWAMSGHGIPRSYRHMDGFGVHTMRLVTDDGKSKLVKWHWKTKQGKASLVWEEAQILAGKNPDFHRQDLWDDINAGNGPEWELGVQIVDEEDVQAFGFDLLDPTKFLPEELVPVTILGKMKLTDNPTNYFAETEQVMFQPGHIVRGVDFSDDPLLQGRIYSYLDTQLNRNGGPNFEQLPVNRPRTKVHNNNRDGAGQMFIHTNKAPYSPNSLSGGNPKQANQTKGRGFFTAPSRKVVGSLHRGTASSFADVWSQPRMFYNSLIPSEQQFLVNAIRFEISQLKSDLIKKNTLMQLNRVSNDLATRVAAVIGYKPLDPSPEFYTNATTDYVTIFGKPLPSVVGFTVGILASTSSSTSISQAAQLATSFSSRGIRAVIVGESLLSGTDQTYSSADATAFDAVVVTMGAETLFGPVAKPNTLFPSGRPSQILHDAYRWGKPVGAVSKASVVLEPLPGTKNQGGVYRVESVNELATSIAKGLETFRFVDRFPLDS

SEQ ID NO: 682 - protein, 455 aa, Arabidopsis thaliana
MSFTIPRLFLFTLFFCSVFFVCLLMAEDSNSSESIIVNVTGDDNKSALFGKYDLGKLLGSGAFAKVYQAEDLQNGGESVAIKVVQKKRLKDGLTAHVKREISVMRRLRHPHIVLLSEVLATKTKIYFVMELAKGGELFSRVTSNRFTESLSRKYFRQLISAVRYCHARGVFHRDLKPENLLLDENRDLKVSDFGLSAMKEQIHPDGMLHTLCGTPAYVAPELLLKKGYDGSKADIWSCGVVLFLLNAGYLPFRDPNIMGLYRKIHKAQYKLPDWTSSDLRKLLRRLLEPNPELRITVEEILKDPWFNHGVDPSEIIGIQADDYDLEENGKILNAFDLISSASSSNLSGLFGNFVTPDHCDQFVSDESTAVIMRKVEEVAKQLNLRIAKKKERAIKLEGPHGVANVVVKVRRLTNELVMVEMKNKQRDVGLVWADALRQKLRRLINQPVYKVPDKP

SEQ ID NO: 683 - protein, 214 aa, Arabidopsis thaliana
MYDFMAVDRPSTPLIDRGIALHKMIRLITMGLGGEGYLNFMGNEFGHPEWIDFPRGEQRLSDGSVIPGNNFSYDKCRRRFDLGDADYLRYRGLQEFDQAMQHLEENYGFMTSEHQFISRKDEADRVIVFERGDLVFVFNFHWTSSYFDYRIGCSKPGKYKIVLDSDDPLFGGFNRLDRKAEYFTYDGLYDERPCSFMVYAPCRTAVVYALANHD

SEQ ID NO: 684 - protein, 246 aa, Oryza sativa
  misc_feature (137)..(137): Xaa can be any naturally occurring amino acid
MIRPRRPGSKSGVFQCILELTRIIRIPPLNAAHSPYKSGLPSRSAAQTKIESNSQIAIPCAHIPSFPSTHCFSVHKHSLPSRPNPSTMSLIRRGNAFDPFSLDLWDPVDGFPFGSGGSSSSSGSLFPRANSDAAAFXGARIDWKETPEVHVFKADVPGLKKEEVKVEVDDGNILQISGERSREQEEKSDKWHRVERSSGKFLRRFRLPENTKPEQIKASMENGVLTVTVPKEEPKKPDVKSIQISG

SEQ ID NO: 685 - protein, 158 aa, Xanthomonas campestris pv. campestris str. ATCC 33913
MNIVRYPQWPTHALQNEIKQVFDRFFEQSGDTDESAVVTAQWVPRVDIKEEANQFVLYADLPGIDPSQIEVQMDKGILSIKGERKSESSSETERFSRIERRYGSFHRRFALPDSADADGITADGRNGVLEIRIPKRPAATPRRIQVGGGQDGGGTTVQ

SEQ ID NO: 686 - protein, 206 aa, Alkaliphilus metalliredigenes QYMF
MFLEKIAAGVFGVNCYVISDDETGKAAVVDPGGDADKILELIKDNQFELTHILLTHGHGDHIGAVNELHEKTKAPVYVHEDDLYILKDANINYSARMGGPVVTIDTDVFLKDGEVLTIGNLKLHVLHTPGHSPGGVCIRGEGVVFTGDTLFANSIGRSDLEGGNYDQLIASIQSKLMTLDDELTVLPGHGPASTIGIERMTNPYIK

SEQ ID NO: 687 - protein, 640 aa, Corynebacterium diphtheriae NCTC 13129
MCGLLGMLSSTGQASKYAAAIESALPCMHHRGPDEAGTWHDDHAVFGFNRLSIIDLEHSHQPLRWGPEGEPDRYAMTFNGEIYNYVELRKKLQDLGYTFNTSGDGETIAVGFHHWGADVVLHLRGMFGIAIWDTKEQRLFLARDQFGIKPLYFATTEAGTVFASEKKCILGMADAIGLDLGLDQRAIEHYIDLQYVPEPESLHQHIRRLESGCFAFVSVGGNVEQTRYFRPQFPAQEFPKDKEQDLFDRIAKALEDSVEKHMRADVTVGSFLSGGIDSTAIATLAKRHNPNLLTFTTGFEREGYSEVDVAAESAAAIGVEHIVKIVSPEEYANAIPQIMWYLDDPVADPSLVPLFFVAQEARKHVKVVLSGEGADELFGGYTIYKEPLSLAPFEKIPSPLRRGLGKVAEVFPDGMRGKSLLQRGSMTMEERYYGNARSFNFDQMKRVIPWAKKEWDHREVTAPIYAQSEHMDPVARMQHLDLFTWMRGDILVKADKINMAHSLELRVPFLDKEVFEVAETIPYDLKIANGTTKYALRKAMEQIVPPHVLHRKKLGFPVPMRHWLAGDELFGWAQDTINESMTDQYFDKAAVLAMLNEHKNGVSDHSRRLWTVLAFMIWHGIFVEHRIDPGIEKRDYPVYL

SEQ ID NO: 688 - protein, 502 aa, Lycopersicon esculentum
MVLTTTSIRDSEESLHCTFASRYVQEPLPKFKMPKKSMPKEAAYQIVNDELMLDGNPRLNLASFVSTWMEPECDKLIMSSINKNYVDMDEYPVTTELQNRCVNMLAHLFHAPVGDDETAVGVGTVGSSEAIMLAGLAFKRKWQSKRKAEGKPFDKPNIVTGANVQVCWEKFARYFEVELKEVKLKEGYYVMDPAKAVEIVDENTICVAAILGSTLTGEFEDVKLLNELLTKKNKETGWETPIHVDAASGGFIAPFLWPDLEWDFRLPLVKSINVSGHKYGLVYAGVGWVIWRSKEDLPDELVFHINYLGSDQPTFTLNFSKGSYQIIAQYYQLIRLGFEGYKNVMKNCLSNAKVLTEGITKMGRFDIVSKDVGVPVVAFSLRDSSKYTVFEVSEHLRRFGWIVPAYTMPPDAEHIAVLRVVIREDFSHSLAERLVSDIEKILSELDTQPPRLPTKAVRVTAEEVRDDKGDGLHHFHMDTVETQKDIIKHWRKIAGKKTSGVC

SEQ ID NO: 689 - protein, 262 aa, Glycine max
MVNAMEWQKQRCWQPNRNAEMMCVKVMTDEQLEILRKQIAVYATICEQLIEMHKNISAHQDLAGIRLGNMYCDPLLGSGGLKIASRQRWTPTAMQLQILERIFDQGIGTPTKEKIKEITNELSQHGQISETNVYNGSKTRRARSNPQQQNVAPSANAESEVETEVDSKDKKTKPDEFQAPPSVSAGPADNLGFQNHDSLQYLNPESNKPDSVFPSDGTRNFHHVPAFDGLLSNSRSNYLTGKLETPENYELYQPAGDYNIAG

SEQ ID NO: 690 - protein, 135 aa, Arabidopsis thaliana
  misc_feature (49)..(49): Xaa can be any naturally occurring amino acid
  misc_feature (58)..(58): Xaa can be any naturally occurring amino acid
  misc_feature (68)..(68): Xaa can be any naturally occurring amino acid
  misc_feature (94)..(94): Xaa can be any naturally occurring amino acid
  misc_feature (125)..(125): Xaa can be any naturally occurring amino acid
MDPYRFRPASSYNSPGLTSNYGAAVCNINYFMTVRPRGPILLKDYHLVXKLVIFNREXIPQRLTHARXTSAKDSFVATHYIFHLTCTDFMQAAXLHTPDIVRDSTLIHVRVYPLTFKDPFGCRCXFYTINGNFHL

SEQ ID NO: 691 - protein, 1131 aa, Sorghum arundinaceum
MSSSRPAHSSSSSSRTRQSSRARILAQTTLDAELNAEYEESGDSFDYSKLVEAQRSTPSEQQGRSGKVIAYLQHIQRGKLIQPFGCLLALDEKSFRVIAFSENAPEMLTTVSHAVPNVDDPPKLGIGTNVRSLFTDPGATALQKALGFADVSLLNPILVQCKTSGKPFYAIVHRATGCLVVDFEPVKPTEFPATAAGALQSYKLAAKAISKIQSLPGGSMEALCNTVVKEVFELTGYDRVMAYKFHEDEHGEVFAEITKPGIEPYLGLHYPATDIPQAARFLFMKNKVRMICDCRAKSVKIIEDEALSIDISLCGSTLRAPHSCHLQYMENMNSIASLVMAVVVNENEEDDEPGPEQPPQQQKKKRLWGLIVCHHESPRYVPFPLRYACEFLAQVFAVHVNKEFELEKQIREKSILRMQTMLSDMLFKEASPLSIVSGSPNIMDLVKCDGAALLYGDKVWRLQTAPTESQIRDIAFWLSEVHGDSTGLSTDSLQDAGYPGAASLGDMICGMAVAKITSKDILFWFRSHTAAEIKWGGAKHDPSDKDDNRRMHPRLSFKAFLEVVKMKSLPWSDYEMDAIHSLQLILRGTLNDALKPVQASGLDNQIGDLKLDGLAELQAVTSEMVRLMETATVPILAVDGNGLVNGWNQKVAELSGLRVDEAIGRHILTLVEDSSVSIVQRMLYLALQGKEEKEVRFELKTHGSKRDDGPVILVVNACASRDLHDHVVGVCFVAQDMTVHKLVMDKFTRVEGDYKAIIHNPNPLIPPIFGADQFGWCSEWNVAMTKLTGWHRDEVIDKMLLGEVFDSSNASCLLKSKDDFVRLCIIINSALAGEEAEKAPFGLFDRNGKYIECLLSVNRKVNADGVVTGVFCFIHVPSDDLQHALHVQQASEQTAQRRLKAFSYMRHAINKPLSGMLYSRETLKSTGLNEEQMRQVHVADSCHRQLNKILADLDQDNITDKSSCLDLDMAEFVLEDVVVSAVSQVLIGCQGKGIRVACNLPERFMKQKVYGDGIRLQQILSDFLFVSVKFSPVGGSVDISSKLTKNSIGENLHLIDFELRIKHQGAGVPAEILSQMYEEDNKEQSEEGLSLLVSRNLLRLMNGNIRHIREAGMSTFILTAELAAAPSAVGQ

SEQ ID NO: 692 - protein, 1131 aa, Sorghum arundinaceum
MSSSRPAHSSSSSSRTRQSSQARILAQTTLDAELNAEYEESGDSFDYSKLVEAQRSTPSEQQGRSGKVIAYLQHIQRGKLIQPFGCLLALDEKSFRVIAFSENAPEMLTTVSHAVPNVDDPPKLGIGTNVRSLFTDPGATALQKALGFADVSLLNPILVQCKTSGKPFYAIVHRATGCLVVDFEPVKPTEFPATAAGALQSYKLAAKAISKIQSLPGGSMEALCNTVVKEVFELTGYDRVMAYKFHEDEHGEVFAEITKPGIEPYLGLHYPATDIPQAARFLFMKNKVRMICDCRAKSVKIIEDEALSIDISLCGSTLRAPHSCHLQYMENMNSIASLVMAVVVNENEEDDEPGPEQPPQQQKKKRLWGLIVCHHESPRYVPFPLRYACEFLAQVFAVHVNKEFELEKQIREKSILRMQTMLSDMLFKEASPLSIVSGSPNIMDLVKCDGAALLYGDKVWRLQTAPTESQIRDIAFWLSEVHGDSTGLSTDSLQDAGYPGAASLGDMICGMAVAKITSKDILFWFRSHTAAEIKWGGAKHDPSDKDDNRRMHPRLSFKAFLEVVKMKSLPWSDYEMDAIHSLQLILRGTLNDALKPVQASGLDNQIGDLKLDGLAELQAVTSEMVRLMETATVPILAVDGNGLVNGWNQKVAELSGLRVDEAIGRHILTLVEDSSVSIVQRMLYLALQGKEEKEVRFELKTHGSKRDDGPVILVVNACASRDLHDHVVGVCFVAQDMTVHKLVMDKFTRVEGDYKAIIHNPNPLIPPIFGADQFGWCSEWNVAMTKLTGWHRDEVIDKMLLGEVFDSSNASCLLKSKDDFVRLCIIINSALAGEEAEKAPFGLFDRNGKYIECLLSVNRKVNADGVVTGVFCFIHVPSDDLQHALHVQQASEQTAQRRLKAFSYMRHAINKPLSGMLYSRETLKSTGLNEEQMRQVHVADSCHRQLNKILADLDQDNITDKSSCLDLDMAEFVLEDVVVSAVSQVLIGCQGKGIRVACNLPERFMKQKVYGDGIRLQQILSDFLFVSVKFSPVGGSVDISSKLTKNSIGENLHLIDFELRIKHQGAGVPAEILSQMYEEDNKEQSEEGLSLLVSRNLLRLMNGNIRHIREAGMSTFILTAELAAAPSAVGQ

SEQ ID NO: 693 - protein, 1131 aa, Sorghum arundinaceum
MSSSRPAHSSSSSSRTRQSSQARILAQTTLDAELNAEYEESGDSFDYSKLVEAQRSTPSEQQGRSGKVIAYLQHIQRGKLIQPFGCLLALDEKSFRVIAFSENAPEMLTTVSHAVPNVDDPPKLGIGTNVRSLFTDPGATALQKALGFADVSLLNPILVQCKTSGKPFYAIVHRATGCLVVDFEPVKPTEFPATAAGALQSYKLAAKAISKIQSLPGGSMEALCNTVVKEVFELTGYDRVMAYKFHEDEHGEVFAEITKPGIEPYLGLHYPATDIPQAARFLFMKNKVRMICDCRAKSVKIIEDEALSIDISLCGSTLRAPHSCHLQYMENMNSIASLVMAVVVNENEEDDEPGPEQPPQQQKKKRLWGLIVCHHESPRYVPFPLRYACEFLAQVFAVHVNKEFELEKQIREKSILRMQTMLSDMLFKEASPLSIVSGSPNIMDLVKCDGAALLYGDKVWRLQTAPTESQIRDIAFWLSEVHGDSTGLSTDSLQDAGYPGAASLGDMICGMAVAKITSKDILFWFRSHTAAEIKWGGAKHDPSDKDDNRRMHPRLSFKAFLEVVKMKSLPWSDYEMDAIHSLQLILRGTLNDALKPVQASGLDNQIGDLKLDGLAELQAVTSEMVRLMETATVPILAVDGNGLVNGWNQKVAELSGLRVDEAIGRHILTLVEDSSVSIVQRMLYLALQGKEEKEVRFELKTHGSKRDDGPVILVVNACASRDLHDHVVGVCFVAQDMTVHKLVMDKFTRVEGDYKAIIHNPNPLIPPIFGADQFGWCSEWNVAMTKLTGWHRDEVIDKMLLGEVFDSSNASCLLKSKDDFVRLCIIINSALAGEEAEKAPFGLFDRNGKYIECLLSVNRKVNADGVVTGVFCFIHVPSDDLQHALHVQQASEQTAQRRLKAFSYMRHAINKPLSGMLYSRETLKSTGLNEEQMRQVHVADSCHRQLNKILADLDQDNITDKSSCLDLDMAEFVLEDVVVSAVSQVLIGCQGKGIRVACNLPERFMKQKVYGDGIRLQQILSDFLFVSVKFSPVGGSVDISSKLTKNSIGENLHLIDFELRIKHQGAGVPAEILSQMYEEDNKEQSEEGLSLLVSRNLLRLMNGNIRHLREAGMSTFILTAELAAAPSAVGQ

SEQ ID NO: 694 - protein, 314 aa, Debaryomyces hansenii CBS767
MSEINILTIFRSTKVLKFYNGQEIPATGLGTWQSKDEEVYNAVLAALKIGYKHIDTAACYGNEEPIGRAIRDAGVKREDIFITTKVWGTDHTRVEQALNTSLQKLGLDYVDLYLMHWPVPLNPNGNHPLFPTLPDGNRDISQDWDFTKTYNLMQKLLDLGKTKSIGVSNFSVTNLKKLLNAPTTTVKPVVNQVELHPYLPQHKLLQFAKENDIVLESYSPLGSTDSPLLSDEVVVKIAEKNKVSPATILISWALWRGTVVLPKSVSAHRIESNFNVIDLPDADGKELDDLHKLRGIRRLVLPNWAPVVVFDSDE

SEQ ID NO: 695 - protein, 458 aa, Bdellovibrio bacteriovorus HD100
MQSLKRYWKTYILGGALLLVLFIMAETGFQVRSFAQERYADLQNFSKVLNLIQQYYVEEVNTKKLVYGAIKGMLRELDPHTNFMPPEMFKDFETETSGEFGGLGIEISIQNGILTIISPIEDAPAWEAGIKAGDKVVSIDGTTTKGMSLAEASVMMRGKKGSKIVLRVVRDNEEKPRDITVVRGSVKIKSVKYTDLGDGFAYVRITSFIENTSKDLQKTVENHIKNNKNMAGLLIDMRRNPGGLLDQAIKVSDMFLKDGTIVSTIGRNKNEKEVATASKKGQYTNFPIVILVNEYTASASEIVSGALQDNKRALIVGQRTFGKGSVQSVIKLGDGSGLKLTVARYYTPNGVSIQAEGIHPDIEIEDVDPDAFSKAIVKSVTTREGDIAGHLKGDREKAAEKLDVKEGAEEGALAWWKDVGSKKDEKLSPRDKLFKSDYQAYQAFSYLKAWDTLKALTR

SEQ ID NO: 696 - protein, 455 aa, Staphylococcus aureus
MSQQDKKLTGVFGHPVSDRENSMTAGPRGPLLMQDIYFLEQMSQFDREVIPERRMHAKGSGAFGTFTVTKDITKYTNAKIFSEIGKQTEMFARFSTVAGERGAADAESDIRGFALKFYTEEGNWDLVGNNTPVFFFRDPKLFVSLNRAVKRDPRTNMRDAQNNWDFWTGLPEALHQVTILMSDRGIPKDLRHMHGFGSHTYSMYNDSGERVWVKLHFRTQQGIENLTDEEAAEIIATGRDSSQRDLFEAIEKGDYPKWTMYIQVMTEEQAKNHKDNPFDLTKVWYHDEYPLIEVGEFELNRNPDNYFMDVEQVAFASTNIIPGLDFSPDKMLQGRLFSYGDAQRYRLGVNHWQIPVNQPKGVGIENICPFSRDGQMRVVDNNQGGGTHYYPNNHGKFDSQPEYKKPPFPTDGYGYEYNQRQDDDNYFEQPGKLFRLQSEGAKERILQIQQMQWKA

SEQ ID NO: 697 - protein, 505 aa, Staphylococcus aureus
MSQQDKKLTGVFGHPVSDRENSMTAGPRGPLLMQDIYFLEQMSQFDREVIPERRMHAKGSGAFGTFTVTKDITKYTNAKIFSEIGKQTEMFARFSTVAGERGAADAERDIRGFALKFYTEEGNWDLVGNNTPVFFFRDPKLFVSLNRAVKRDPRTNMRDAQNNWDFWTGLPEALHQVTILMSDRGIPKDLRHMHGFGSHTYSMYNDSGERVWVKFHFRTQQGIENLTDEEAAEIIATDRDSSQRDLFEAIEKGDYPKWTMYIQVMTEEQAKNHKDNPFDLTKVWYHDEYPLIEVGEFELNRNPDNYFTDVEQAAFAPTNIIPGLDFSPDKMLQGRLFSYGDAQRYRLGVNHWQIPVNQPKGVGIENICPFSRDGQMRVVDNNQGGGTHHYPNNHGKFDSQPEYKKPPFPTDGYGYEYNQRQDDDNYFEQPGKLFRLQSEDAKERIFTNTANAMEGVTDDVKRRHIRHCYKADPEYGKGVAKALGIDINSIDLETENDETYENFEK

SEQ ID NO: 698 - protein, 253 aa, Brassica napus
  misc_feature (50)..(50): Xaa can be any naturally occurring amino acid
  misc_feature (58)..(58): Xaa can be any naturally occurring amino acid
NHREYQDLQRLYSEIGHPPSDAFLFLRSYPNRRKQNPPTRFLRLTHKLRXTSTDFILXGNHHHSTIIRIFGYYDECKRRFNVRLWKIFTDCFNCLPVAALIDDKILCMHGGLSPELDNLNQIREIQRPTEIPDSGLLCDLLWSDPDQKIEGWADSDRGISCTFGADKVAEFLDKNDLDLICRGHQVVEDGYEFFAKRRLVTIFSAPNYGGEFDNAGALLSVDESLVCSFEIMKPALASSSGHPLKKVPKMGKS

SEQ ID NO: 699 - protein, 354 aa, Arabidopsis thaliana
MMSLSTTLKPLSHFSPFVKRHNPKTNNTLFTLDTHNFTNSFWSKRGGSVSAVYEAPDHVESSWRRLLSEVVVVRTKRSFWERSWTSWDVSKLVIFVGTHLLSLLAPFYFSWEAFWVFPWLVFINGICITLSYHRNLSHRSFDLPKWLEYLFAYGGVLAFQGDPIEWVSNHRYHHKHCETQRDPHSPTQGFWFSHMAWIFDTSSILENCGGEENVDDLVRQPFYRFLQRTVLLHMMAYSFLFYFCGGMPLLVWGIGITIAVRLHLTFLVNSVCHIWGTRAWNTSDFSKNNWWVAILTLGEGWHNNHHAFEFSARHGLEWWQLDITWCLIRFLEAIGLATNVKLPTETQMKGKALV

SEQ ID NO: 700 - protein, 746 aa, Shewanella oneidensis MR-1
MMTQAQTYFYDGSDVALLNGQYTDVFSLLGMHSINEGKALVVRCFLRNAQKVDVISLKDGRKVASLERVNEAGLFAGTLGRRIKPFLYALRVTYPLCELDIIDPYQFGSLLNREDLYLFGEGSSEQAYRFLGANWRQVDNVEGVHFCVWAPNAKRVSVVGDFNHWDDTRHVMRQHVANGLWEIFLPGVVEGSHYKFDLVYQNGERHAKSDPMATQMECAPHNASIVPKKQQHQWADTQWMDKRAATAWHRAPMSIYEVQLGSWRRKGEFGEQYFDYQDLIEQLIPYVKEQGFTHIELMPVSEYPFDGSWGYQPVGLYAPTYRFGDANGFKAFIDACHQAEIGVLLDWVAAHFPKDPHGLVRFDGTCLYEHEDPRKGTHPDWDTLIYNYGRGEVRSFLLSNACYWLREFHLDGLRLDAVSSMLYLDYSREPGQWLPNAYGGRENLEAIDFLQMLNQRLYQAIPGICMIAEESTAFAGVTKPTDSSGLGFGFKWNMGWMNDSLSYLGRDPIYRQYHHNQLTFSLMYAYSEQFMLSISHDEVVHGKGSLLHKIPGDDWQKFATLRAYYGFMWGHPGKKLLFMGSEFAQRDEWDHDHSLDWHLLAFEPHQGVQRWLRDLNQLYRQFPALSVLDYEPQGFRWLDCDNGRDSIFSFVRYGEGNDVPLVFVVNMTPTVHQGFRIGLPQGGDFCEYLNSDSYLYGGSNQGNGGKIIAQALPWQGMASSALITVPPLGCLILGPATENILRESAL

SEQ ID NO: 701 - protein, 323 aa, Arabidopsis thaliana
MKVRTINIIASSEIPNLGLAVNLAKQMHWQVATATAAIAISLWTLEGEQRKKRLQIDILSEKLRVFEEKRIWEKEREREFPKAELSWVKQILRMGRGKIEIKRIENSTNRQVTFCKRRNGLLKKAYELSVLCDAEVALIVFSTRGRLYEYANNNIRSTIERYKKACSDSTNTSTVQEINAAYYQQESAKLRQQIQTIQNSNRNLMGDSLSSLSVKELKQVENRLEKAISRIRSKKHELLLVEIENAQKREIELDNENIYLRTKVAEVERYQQHHHQMVSGSEINAIEALASRNYFAHSIMTAGSGSGNGGSYSDPDKKILHLG

SEQ ID NO: 702 - protein, 609 aa, Magnetococcus sp. MC-1
MCGILAEVGQQSPAAARQRALDRLRHRGPDHGGQWSAQQPVPVWLGHRRLAIVDTSSAGNQPLHLHAADLHLVGNGEIYNAPALQKTLEALGHVFHSHSDNEAILHAYREWGSDCLAHLEGMFAFVLWDARQQTLLAARDRMGIKPLFYAATPAGGLVLASEASALVGLDGVAQQGYEPQALSHVLAYGHIPDPYAIWRGVNKLSPGQFLRWTPQQGLRLHTYWSPPSQSDAPSDDQAWGQRFEQVLQEHLLSDVPLSLFLSGGLDSTSVAVGVKRLGHQLKAFSLGFPGHPRDESALAQATAERLGHPFEAVVMDGRDLLQQVDAALLQQDEPHLFGSYLTMLNICSAVAKEYKVVLSGDGGDELFAGYNWYRDIPTALPTLAPWKAALAKPLLRHSPLPAALLERARLAFACCSPLHRHAWRTSQRFLPAEVEALLRPAAIRYDDEAFLAPLQRWFTPELPLVRALQRIDLMSFCSNHVCAKVDRASMAHALEVRVPYLDRRLVEWAISRPADPREAQGSKPLIRDYIAPHVPAQVLEQRKQGFSLRTTPPANLESTFVAWIEQSPLISQSILRRDWPRFLRADDRLRAQKLWHLALLARWMHHHPA

SEQ ID NO: 703 - protein, 439 aa, Thermus thermophilus HB27
MKRRAWFMVGLGVLLALVYAQLPRPQAETFLQNPNGQALLEVYQRIQQDYLEPLSKEKLDKLLEGAIGGMVQALEDPFTSYSPPQRSTLRQEDLRGEFFGIGATLSAANPDGTGARIEGVMKGLPAQRAGLRAGDVILEVDGEDVTKLPLLDIVAKIRGREGTKVTLKVRREGVPAPLVFELVRERVEIISVSTAKVGDVGYVALETFANFKVEDQLKRAIEELKAQGVKKLIFDLRDNGGGLLDQGCAVASAFLKEGPIVYTRTKNLTRVWCEATGQTLWDGPMVVLVNGNSASASEIVAGALQDYGRAKVIGEKTFGKGVGQTPYTLANGGELTLVTFEWLTPKRRSINKEGITPDIVVKDTRFPTPFSLQGAGAPPGAEIAVTLNGKTVKVKADAEGKFSYAEPQRQRPLPEDRGQAVLDLENDAILKRALEELNR

SEQ ID NO: 704 - protein, 492 aa, Triticum aestivum
  misc_feature (41)..(41): Xaa can be any naturally occurring amino acid
  misc_feature (302)..(302): Xaa can be any naturally occurring amino acid
  misc_feature (384)..(384): Xaa can be any naturally occurring amino acid
MVVTVAATGSDTAEPLHSTTFASRYVRDQLPRYRMPSGSIXPKEAAYQIISDELMLDGNPRLNLASFVTTWMEPECGKLMMDSVNKNYVDMDEYPVTTELQNRCVNMIAHLFNAPIGEDETAIGVSTVGSSEAIMLAGLAFKRKWQNKRKEQGKPCDKPNIVTGANVQVCWEKFARYFEVELKEVKLSEGYYVMDPVKAVEMVDENTICVAAILGSTLTGEFEDVKLLNDLLVEKNKETGWNVPIHVDAASGGFIAPFLHPELEWDFRLPLVKSINVSGHKYGLVYPGVGWVVWRSKADLPXELIFHINYLGTDQPTFTLNFSKGASQIIAQYYQLIRLGFEGYKHIMENCKLNAAVLKEGIDATGRFDVLSKADGVPLVAIRXLKDSTNFSVFDISENLRRFGWIVPAYTMPADAEHVAVLRIVIREDFNRSLAQRLLADINKIVGELDAHAVHAIKLSTAAAAEGASKSTVDAVTEAFKGLPGNKKAGVC

SEQ ID NO: 705 - protein, 1131 aa, Sorghum arundinaceum
MSSSRPAHSSSSSSRTRQSSRARILAQTTLDAELNAEYEESGDSFDYSKLVEAQRSTPSEQQGRSGKVIAYLQHIQRGKLIQPFGCLLALDEKSFRVIAFSENAPEMLTTVSHAVPNVDDPPKLGIGTNVRSLFTDPGATALQKALGFADVSLLNPILVQCKTSGKPFYAIVHRATGCLVVDFEPVKPTEFPATAAGALQSYKLAAKAISKIQSLPGGSMEALCNTVVKEVFELTGYDRVMAYKFHEDEHGEVFAEITKPGIEPYLGLHYPATDIPQAARFLFMKNKVRMICDCRAKSVKIIEDEALSIDISLCGSTLRAPHSCHLQYMENMNSIASLVMAVVVNENEEDDEPGPEQPPQQQKKKRLWGLIVCHHESPRYVPFPLRYACEFLAQVFAVHVNKEFELEKQIREKSILRMQTMLSDMLFKEASPLSIVSGSPNIMDLVKCDGAALLYGDKVWRLQTAPTESQIRDIAFWLSEVHGDSTGLSTDSLQDAGYPGAASLGDMICGMAVAKITSKDILFWFRSHTAAEIKWGGAKHDPSDKDDNRRMHPRLSFKAFLEVVKMKSLPWSDYEMDAIHSLQLILRGTLNDALKPVQASGLDNQIGDLKLDGLAELQAVTSEMVRLMETATVPILAVDGNGLVNGWNQKVAELSGLRVDEAIGRHILTLVEDSSVSIVQRMLYLALQGKEEKEVRFELKTHGSKRDDGPVILVVNACASRDLHDHVVGVCFVAQDMTVHKLVMDKFTRVEGDYKAIIHNPNPLIPPIFGADQFGWCSEWNVAMTKLTGWHRDEVIDKMLLGEVFDSSNASCLLKSKDDFVRLCIIINSALAGEEAEKAPFGLFDRNGKYIECLLSVNRKVNADGVVTGVFCFIHVPSDDLQHALHVQQASEQTAQRRLKAFSYMRHAINKPLSGMLYSRETLKSTGLNEEQMRQVHVADSCHRQLNKILADLDQDNITDKSSCLDLDMAEFVLEDVVVSAVSQVLIGCQGKGIRVACNLPERFMKQKVYGDGIRLQQILSDFLFVSVKFSPVGGSVDISSKLTKNSIGENLHLIDFELRIKHQGAGVPAEILSQMYEEDNKEQSEEGLSLLVSRNLLRLMNGDIRHIREAGMSTFILTAELAAAPSAVGQ

SEQ ID NO: 706 - protein, 208 aa, Schizosaccharomyces pombe
MSAQKRVFLKVVILGDSGVGKTCLMNQFVNQKFSREYKATIGADFLTKDVVVDDKLVTLQLWDTAGQERFQSLGMAFYRGADCCVIVYNVNNSKSFDSVENWRQEFLYQTSQDECAFPFIIVGNQIDKDASKRAVSLHRALDYCKSKHGSNMIHFEASAKENTNVTDLFETVSRLALENESSRDDFVNDFSEPLLLSKPLNNTSSCNC

SEQ ID NO: 707 - protein, 1131 aa, Sorghum arundinaceum
MSSSRPAHSSSSSSRTRQSSRARILAQTTLDAELNAEYEESGDSFDYSKLVEAQRSTPSEQQGRSGKVIAYLQHIQRGKLIQPFGCLLALDEKSFRVIAFSENAPEMLTTVSHAVPNVDDPPKLGIGTNVRSLFTDPGATALQKALGFADVSLLNPILVQCKTSGKPFYAIVHRATGCLVVDFEPVKPTEFPATAAGALQSYKLAAKAISKIQSLPGGSMEALCNTVVKEVFELTGYDRVMAYKFHEDEHGEVFAEITKPGIEPYLGLHYPATDIPQAARFLFMKNKVRMICDCRAKSVKIIEDEALSIDISLCGSTLRAPHSCHLQYMENMNSIASLVMAVVVNENEEDDEPGPEQPPQQQKKKRLWGLIVCHHESPRYVPFPLRYACEFLAQVFAVHVNKEFELEKQIREKSILRMQTMLSDMLFKEASPLSIVSGSPNIMDLVKCDGAALLYGDKVWRLQTAPTESQIRDIAFWLSEVHGDSTGLSTDSLQDAGYPGAASLGDMICGMAVAKITSKDILFWFRSHTAAEIKWGGAKHDPSDKDDNRRMHPRLSFKAFLEVVKMKSLPWSDYEMDAIHSLQLILRGTLNDALKPVQASGLDNQIGDLKLDGLAELQAVTSEMVRLMETATVPILAVDGNGLVNGWNQKVAELSGLRVDEAIGRHILTLVEDSSVSIVQRMLYLALQGKEEKEVRFELKTHGSKRDDGPVILVVNACASRDLHDHVVGVCFVAQDMTVHKLVMDKFTRVEGDYKAIIHNPNPLIPPIFGADQFGWCSEWNVAMTKLTGWHRDEVIDKMLLGEVFDSSNASCLLKSKDDFVRLCIIINSALAGEEAEKAPFGLFDRNGKYIECLLSVNRKVNADGVVTGVFCFIHVPSDDLQHALHVQQASEQTAQRRLKAFSYMRHAINKPLSGMLYSRETLKSTGLNEEQMRQVHVADSCHRQLNKILADLDQDNITDKSSCLDLDMAEFVLEDVVVSAVSQVLIGCQGKGIRVACNLPERFMKQKVYGDGIRLQQILSDFLFVSVKFSPVGGSVDISSKLTKNSIGENLHLIDFELRIKHQGAGVPAEILSQMYEEDNKEQSEEGLSLLVSRNLLRLMNGNIRHLREAGMSTFILTAELAAAPSAVGQ

SEQ ID NO: 708 - protein, 452 aa, Bartonella vinsonii subsp. arupensis
EDRFENMGAQMLREVASKTNDIAGDGTTTATVLGQAIVQEGVKAVAAGMNPMDLKRGIDAAVDEVVANLFKKAKKIQTSAEIAQVGTISANGAAEIGKMIADAMEKVGNEGVITVEEAKTAETELEVVEGMQFDRGYLSPYFVTNAEKMVADLDDPYILIHEKKLSNLQSLLPVLEAVVQSGKPLLIIAEDVEGEALATLVVNKLRGGLKIAAVKAPGFGDRRKAMLEDIAILTSGQVISEDVGIKLENVTLDMLGRAKKVNISKENTTIIDGAGQKAEINARVNQIKAQIEETTSDYDREKLQERLAKLAGGVAVIRVGGATEVEVKEKKDRVDDALNATRAAVEEGIVAGGGTALLRAANALTVKGSNPDQEAGINIVRRALQAPARQIATNAGEEAAIIVGKVLENNADTYGYNTATGQFGDLIALGIVDPVKVVRSALQNAASIARLL

SEQ ID NO: 709 - protein, 174 aa, Glycine max
  misc_feature (65)..(65): Xaa can be any naturally occurring amino acid
MSDAPASPSHESGGEQSPRGSLSGAAREQDRYLPIANISRIMKKALPPNGKIAKDAKDTMQECVXEFISFITSEASEKCQKEKRKTINGDDLLWAMATLGFEDYIEPLKVYLARYREAEGDTKGSARSGDGSARPDQVGLAGQNAQLVHQGSLNYIGLQVQPQHLVMPSMQGHE

SEQ ID NO: 710 - protein, 557 aa, Debaryomyces hansenii CBS767
MVSEYIQNTKKDPAVYSTSNGVPYANHPYGAQTAGPGGPLLLQDFNLMDDISHFDHERIPERVVHAKGGGAHGYFELTDSLSDLTYARPLQSPGYKCPVSVRFSTVGGERGTPDTIRDPRGFSIKLKTDIGNMDWVFNNTPIFFIRDPIKFSKFIHTQKRDPSTNLNQLTDPYHTWDYFIQNPECLHQITYMFGKRGIPKSWAEMHGYSGHTFKLINDKDEITYIQIHCLADGGFDGFSDKEGKELAGSSPEYNTKDLYERIAAGNYPSYSFYVQTMTPKQAEEFRYSINDLTKVWPHKEFPLRKFGRMVLDKNPVNYHDEIEQIAFSPAHLVPGIEPSNDPVLQSRLYSYSDTHRHRLGANYQQLPVNKPRTFDSNSGCPFLAGNFQREGIASIDNQGSRPNYLSSLLPINSVSNDPKSYKNGLPPVEEKKYLGVVPKRSTDKYEILQKERNLKAHEEKIWLKSYDYISGFSELDVEQPRALYKNIISKQDKGDFIEAIVGHASKISVPQIKERVPQLWGLIDGDLGSEVAKGLGVSYKHLTVDEYIEDLGIAPAN

SEQ ID NO: 711 - protein, 1131 aa, Sorghum x drummondii
MSSSRPAHSSSSSSRTRQSSRARILAQTTLDAELNAEYEESGDSFDYSKLVEAQRSTPSEQQGRSGKVIAYLQHIQRGKLIQPFGCLLALDEKSFRVIAFSENAPEMLTTVSHAVPNVDDPPKLGIGTNVRSLFTDPGATALQKALGFADVSLLNPILVQCKTSGKPFYAIVHRATGCLVVDFEPVKPTEFPATAAGALQSYKLAAKAISKIQSLPGGSMEALCNTVVKEVFELTGYDRVMAYKFHEDEHGEVFAEITKPGIEPYLGLHYPATDIPQAARFLFMKNKVRMICDCRAKSVKIIEDEALSIDISLCGSTLRAPHSCHLQYMENMNSIASLVMAVVVNENEEDDEPGPEQPPQQQKKKRLWGLIVCHHESPRYVPFPLRYACEFLAQVFAVHVNKEFELEKQIREKSILRMQTMLSDMLFKEASPLSIVSGSPNIMDLVKCDGAALLYGDKVWRLQTAPTESQIRDIAFWLSEVHGDSTGLSTDSLQDAGYPGAASLGDMICGMAVAKITSKDILFWFRSHTAAEIKWGGAKHDPSDKDDNRRMHPRLSFKAFLEVVKMKSLPWSDYEMDAIHSLQLILRGTLNDALKPVQASGLDNQIGDLKLDGLAELQAVTSEMVRLMETATVPILAVDGNGLVNGWNQKVAELSGLRVDEAIGRHILTLVEDSSVSIVQRMLYLALQGKEEKEVRFELKTHGSKRDDGPVILVVNACASRDLHDHVVGVCFVAQDMTVHKLVMDKFTRVEGDYKAIIHNPNPLIPPIFGADQFGWCSEWNVAMTKLTGWHRDEVIDKMLLGEVFDSSNASCLLKSKDDFVRLCIIINSALAGEEAEKAPFGLFDRNGKYIECLLSVNRKVNADGVVTGVFCFIHVPSDDLQHALHVQQASEQTAQRRLKAFSYMRHAINKPLSGMLYSRETLKSTGLNEEQMRQVHVADSCHRQLNKILADLDQDNITDKSSCLDLDMAEFVLEDVVVSAVSQVLIGCQGKGIRVACNLPERFMKQKVYGDGIRLQQILSDFLFVSVKFSPVGGSVDISSKLTKNSIGENLHLIDFELRIKHQGAGVPAEILSQMYEEDNKEQSEEGLSLLVSRNLLRLMNGDIRHLREAGMSTFILTAELAAAPSAVGQ

SEQ ID NO: 712 - protein, 365 aa, Burkholderia fungorum LB400
MSALFQPYKLKDVSLRNRIAVPPMCQYSAEEGLINDWHSVHLAALARGGAGLVIVEATAVSPEGRITPGCAGIWTDEQAQAFAPVVASIKAAGAVPGIQIGHAGRKASANRPWEGDDHIAADDSRGWPTIAPSAIAFGANLPKVPKAMTLDDIARVREDFVAAAKRARDAGFEWLELHFAHGYLGQSFFSTHSNQRDDAYGGSLENRSRFLLETLAAVRKVWPEHLPLTARFGVIEYDGRDEQTLVESIELAKNFKREGLDMLSVSVGFSTPTAAIPWAPAFLAPIAQRVRREAGIPVSSAWGIDTPELADGAVKSEQLDLVMVGRAHLANPHWPYYAAKKLGIERPSWTLPAPYAHWLERYAVA

SEQ ID NO: 713 - protein, 359 aa, uncultured bacterium 442
MNYAHLYSPLEMGDLRLRNRIVMAPMTRSRARQDDDAVSELQANYYGQRGDAGLIVTEGVHPSADGKGYNRTPGIYNDTHTKAWSTVTDRVHGRGGLIACQLMHCGRVGHALNKGRNTRFLAPSALAANAEIFTESGMMPMPTPEAMTLAEIKTVVADYQAAAARALKAGFDAVELHCASGYLPAQFLATGSNLRDDQYGGSLENRLRFVEEVLQAIKVETGAGRIGLRISPGNPYNDHVDDNPTETYAALLEVADRLGLAWVHAIRMASTGIDSLALSREYFSGALIGSDSFNAAEADQFIAEHCVDAVSFGRAYIANPDLVTRFACDAPLNTLDKRTIYAGEGSGGYTDYPSLTASG

SEQ ID NO: 714 - protein, 454 aa, Bartonella taylorii
EDRFENMGAQMLREVASKTNDIAGDGTTTATVLGQAIVQEGVKAVAAGMNPMDLKRGIDAAVDEVVANLFKKAKKIQTSAEIAQVGTISANGAAEIGKMIADAMEKVGNEGVITVEEAKTAETELEVVEGMQFDRGYLSPYFVTNAEKMVADLDDPYILIHEKKLSNLQSLLPVLEAVVQSGKPLLIIAEDVEGEALATLVVNKLRGGLKIAAVKAPGFGDRRKAMLEDIAILTSGQVISEDVGIKLENVTLDMLGRAKKVNISKENTTIIDGAGQKSEITARVNQIKAQIEETTSDYDREKLQERLAKLAGGVAVIRVGGATEVEVKEKKDRVDDALNATRAAVEEGIVAGGGTALLRAANALTVKGSNPDQEAGINIVRRALQAPARQIATNAGEEAAIIVGKVLENNADTYGYNTATGQFGDLIALGIVDPVKVVRSALQNAAFNCQASHD

SEQ ID NO: 715 - protein, 1131 aa, Sorghum propinquum
MSSSRPAHSSSSSSRTRQSSRARILAQTTLDAELNAEYEESGDSFDYSKLVEAQRSTPSEQQGRSGKVIAYLQHIQRGKLIQPFGCLLAFDEKSFRVIAFSENAPEMLTTVSHAVPNVDDPPKLGIGTNVRSLFTDPGATALQKALGFADVSLLNPILVQCKTSGKPFYAIVHRATGCLVVDFEPVKPTEFPATAAGALQSYKLAAKAISKIQSLPGGSMEALCNTVVKEVFELTGYDRVMAYKFHEDEHGEVFAEITKPGIEPYLGLHYPATDIPQAARFLFMKNKVRMICDCRAKSVKIIEDEALSIDISLCGSTLRAPHSCHLQYMENMNSIASLVMAVVVNENEEDDEPGPEQPPQQQKKKRLWGLIVCHHESPRYVPFPLRYACEFLAQVFAVHVNKEFELEKQIREKSILRMQTMLSDMLFKEASPLSIVSGSPNIMDLVKCDGAALLYGDKVWRLQTAPTESQIRDIAFWLSEVHGDSTGLSTDSLQDARYPGAASLGDMICGMAVAKITSKDILFWFRSHTAAEIKWGGAKHDPSDKDDNRRMHPRLSFKAFLEVVKMKSLPWSDYEMDAIHSLQLILRGTLNDALKPVQASGLDNQIGDLKLDGLAELQAVTSEMVRLMETATVPILAVDGNGLVNGWNQKVAELSGLRVDEAIGRHILTLVEDSSVSIVQRMLYLALQGREEKEVRFELKTHGSKRDDGPVILVVNACASRDLHDHVVGVCFVAQDMTVHKLVMDKFTRVEGDYKAIIHNPNPLIPPIFGADQFGWCSEWNVAMTKLTGWHRDEVIDKMLLGEVFDSSNASCLLKSKDDFVRLCIIINSALAGEEAEKAQFGLFDRNGKYIECLLSVNRKVNADGVVTGVFCFIHVPSDDLQHALHVQQASEQTAQRRLKAFSYMRHAINKPLSGMLYSRETLKSTGLNEEQMRQVHVADSCHRQLNKILADLDQDNITDKSSCLDLDMAEFVLEDVVVSAVSQVLIGCQGKGIRVACNLPERFMKQKVYGDGIRLQQILSDFLFVSVKFSPVGGSVDISSKLTKNSIGENLHLIDFELRIKHQGAGVPAEILSQMYEEDNKEQSEEGLSLLVSRNLLRLMNGDIRHLREAGMSTFILTAELAAAPSAVGQ

SEQ ID NO: 716 - protein, 423 aa, Bartonella tribocorum
MAGDGTTTATVLGQAIVQEGVKAVAAGMNPMDLKRGIDAAVDEVVANLFKKAKKIQTSAEIAQVGTISANGAAEIGKMIADAMEKVGNEGVITVEEAKTAETELEVVEGMQFDRGYLSPYFVTNAEKMVADLDDPYILIHEKKLSNLQSLLPVLEAVVQSGKPLLIIAEDVEGEAFGNARGQQIARWFENCLLVKAPGFGDRRKAMLEDIAILTSGQVISEDVGIKLENVTLDMLGRAKKVNISKENTTIIDGAGQKAEITARVNQIKAQIEETTSDYDREKLQERLAKLAGGVAVIRVGGATEVEVKEKKDRVDDALNATRAAVEEGIVAGGGTALLRAASALTVKGGNPDQEAGINIVRRALQAPARQIATNAGEEAAIIVGKVLENNADTYGYNTATGEFGDLIALGIVDPVKVVRSAAS

SEQ ID NO: 717 - protein, 146 aa, Triticum aestivum
MAAAAGGTSSEGAARVLLQRYQPFGSPPGEYHHFGPADGGGSADMTEAVVLRTPLKRKHNREDNEVAESNDWMMSPGYANAANSPIPTPPSGKGSKMSAKPKAAKGQKSCPQTPLFSGSPGNPATPVGGCRYDSSLGLLTKKFLNL

SEQ ID NO: 718 - protein, 157 aa, Helianthus annuus
MSIVSSLFGGRRSSVFDPFSLDVWDPFRDFPISSSSDVSRETSALVNARVDWKETPEAHVFKADLPGIKKEEVKVEVEDGNILKITGERNIEKEDKNDKWHRVERSSGKFTRRFRLPENAKMDQVKAAMENGVLTITVPKEEVKKPDVKSIGDLWLE

SEQ ID NO: 719 - protein, 368 aa, Xylella fastidiosa 9a5c
MADTSSMPSIVGLLEPTTFGAIPLNNRVVMAPMTRLRAQADGAPGDLMVEYYRQRAGMGLIVTEGTYPSLESQTGVGQPGIATEEQAGGWRKMTDAVHLAGGHIVLQIMHGGRTAHPGVNGGRRVIAPSAVTLGGEVYTANGKEAFTTPAPMAEADIRDVIAEHVAAAQRAVAAGFDGVEIHGANGYLGQQFLSPASNQRTDQYGGSPENRARFVVELVQAVAEAVGPGRVGLRISPEHNYQETFEPDRSDVLATYGALLDALRPLGLAYLSVLHQEPTGALVEELARRFAGKVAANSGFATFTSLEEAEQIVAAPFIDAVVVGRAALANPDLIERWKSEQPLTEPRYDLFYTHDAAGYTDYPTLAGR

SEQ ID NO: 720 - protein, 467 aa, Methanococcoides burtonii DSM 6242
MTSRLNRSLFVFRRDMRVDDNSALLAALDMSDVVIPCFILDPRLCDPKGKAFNSNALQFLLESLYDLKGQLEKVNGRLYLFSGLPEGVIGQLLENLEIDAVFVNHDYTPFSIKRDMQIASICTDKGVDMLQFHDCLLHEPGSIRTKKGTPYKVFTQFFREASKRDVAVPSMFSGGSFFTGDCGVDEVDEGSFLKRSLPERNEQIFVHGGRANGLSVLQSLSQFVNYDTERDLPSVKGTTGLSAHNKLGTISIREFYYSVIDELGRGHTLINELYWRDFFTQISFEFPDVFKHAFKKKFDHLSWDNDRIFFDAWCLGKTGFPIVDAGMRELNTTGYMHNRVRMIVASFLVKDLHIDWKRGERYFASKLVDYDPCVNNGNWQWAASTGADSQPYFRIFNPWLQQKKFDKDCKYIKKWIPELEDIEPQRIHKLEKGDMDIPGYPAPIVDHSKEREVALFMFKAASQIMDV

SEQ ID NO: 721 - protein, 120 aa, Brassica napus
  misc_feature (40)..(40): Xaa can be any naturally occurring amino acid
MVASKMVAKEAIPLLTTHRMGRFELSHRVVLAPLTRCRSXANVPQPHAAVYYSQRATKGGLLIAEATGVSATAQGYAETPGIWTQQQVDAWKPIVDAVHRKGALFFCQLWHVGRVSTNDF

SEQ ID NO: 722 - protein, 368 aa, Pseudomonas syringae pv. tomato str. DC3000
MNKLFTPFDLAGTSLKNRVVMAPMTRTRTLNNIPNEANALYYAQRASAGLLITEGLPISDESRGYLYTPGIYEDVHLPGWRNVTDAVHAKGGKIFAQLWHVGRMSHISVHGIVPVSSGTVPAVDTTVYAWIEPGKAGPVQPSAPRALETEEVKRVIADFVKSARMAMDAGFDGIEIMAANGFLFDQFLSSSLNTRTDQYGGSIANRQRFLLETIDAIAAEIGGSKIGVRFSPFGRLYDFGVYEGEEETWMSMASALNERELAFVHLNYQPTILAAQTPPGFGAAFREAYKGTVMAAGGFTKEIAESELAKGELDLVAFGTAYIANPDLVERMQNNWPLAESDRATYYGVSGSIEKGYTDYPEYAAAEA

SEQ ID NO: 723 - protein, 248 aa, Arabidopsis thaliana
MGRGRVELKRIENKINRQVTFAKRRNGLLKKAYELSVLCDAEVALIIFSNRGKLYEFCSSSNMLKTLDRYQKCSYGSIEVNNKPAKELENSYREYLKLKGRYENLQRQQRNLLGEDLGPLNSKELEQLERQLDGSLKQVRSIKTQYMLDQLSDLQNKEQMLLETNRALAMKLDDMIGVRSHHMGGWEGGEQNVTYAHHQAQSQGLYQPLECNPTLQMGYDNPVCSEQITATTQAQAQPGNGYIPGWML

SEQ ID NO: 724 - protein, 406 aa, Candida albicans SC5314
MTVESTNSFVVPAGTKQIEIAPLGSTKLFQPIKVGKNILPHRVAHAPTTRFRAAKNHTPSDLQLEYYKTHSQYPGTLIITEATFTSEQGGMDLHVPGIYNDAQTKAWKKINDEIHANGSFSSMQLWYLGRVANPKDLKDAGLPLIGPSAVYWDEESEKLAKSVGNELRELTEKEIDHIVEVEYPNAAKRAIEAGFDYIEVHSAPGYFLDQFLNPASNKRTDKYGGSIENRARLLLRIIDKLIGIVGAEKLAVRLAPWSSFLGMEIEGEEIHSYILQQLQQRADNGQQLAYVSLIEPRVIGIFDASLEDQKGRSNEFAYKYWKGNFVRAGNYTYDAPEFKTLLHDLDNDRTIVGFARFFTSNPDLVEKLKLGKPLNHYDREEFYKYYNYGYNSYDESEKQVIGKPLV

SEQ ID NO: 725 - protein, 429 aa, Methylobacillus flagellatus KT
MQEISKSSKLSNVCYDIRGPVLDRARQMEEDGHRIIKLNIGNPAPFGFAAPEEILQDVIRNMDSASGYTDSKGLFAARKAIMHYTQQKNIQGVTIDDIIIGNGVSELIVMAMQALLNNGDQVLVPMPDYPLWTAAVNLAGGTARHYVCDEQTGWLPDLRDIENKITANTRGIVIINPNNPTGALYPRETLEGIIEIARHHGLVIFADEIYDKVLFDGNTHTSIASLADDVLFVTFNGLSKNYRTCGYRAGWLVISGEKRHAGDYIEGLNMLASMRLCANVPGQLAIQTALGGYQSIDDLVAPTGRLCKQRDLAYKMLTDIPGVSCVKPKAGLYLFPRLDPKIYPIQDDQQFILDLLLEEKVLLVQGTGFNWRAPDHFRVVFLPNVDDLTEAFTRIARFLENYRKQHSTITIVEGKASKEAQTTSQSASA

SEQ ID NO: 726 - protein, 492 aa, Oryza sativa
MVLSHGVSGSDESVHSTFASRYVRTSLPRFRMPEQSIPKEAAYQIINDELMLDGNPRLNLASFVTTWMEPECDKLIQASVNKNYVDMDEYPVTTELQNRCVNMIAHLFNAPLGDSETAVGVGTVGSSEAIMLAGLAFKRRWQNKMKAAGKPCDKPNIVTGANVQVCWEKFARYFEVELKEVKLSDGYYVMDPAKAVDMVDENTICVAAILGSTLNGEFEDVKLLNDLLTKKNAETGWDTPIHVDAASGGFIAPFLYPELEWDFRLPLVKSINVSGHKYGLVYAGIGWCIWRSKEDLPEELIFHINYLGADQPTFTLNFSKGSSQVIAQYYQLIRLGFEGYKNIMENCQENAMVLKQGLEKTGRFNIVSKDNGVPLVAFSLKDSARHNEFEISDFLRRFGWIVPAYTMPPDAQHVTVLRVVIREDFSRTLAERLVLDVEKVLHELDALPARVVANGGDAAAASASEREMEKQREVISLWKRAVLAKKKTNGVC

SEQ ID NO: 727 - protein, 206 aa, Zea mays
MASRRRTLLKVIILGDSGVGKTSLMNQYVNKKFSNQYKATIGADFLTKEVQFEDRLFTLQIWDTAGQERFQSLGVAFYRGADCCVLVYDVNSMKSFDNLHNWREEFLIQASPSDPDNFPFVLLGNKVDVDGGNSRVVSEKKAKAWCASKGNIPYFETSAKDGTNVEDAFQCIVKNALKNEPEEELYVPDTVDVVGGNRAQRSSGCC

SEQ ID NO: 728 - protein, 542 aa, Candidatus Tremblaya princeps
MPAKDVIFGDCARLRLMEGVNTLTDAVKVTLGPKGRNVVLERSYGSPAVTKDGVTVAKDIELRDRLQNMGAQMVKEVAAKTSDNAGDGTTTATVLAQSIVREGMRYVASGVNPMDIKRGIDQAVSSAVMELKKISRPCTTGKEIAQVGSVSANNDRTVGEMIAEAMNKVGKEGVITVEDGKSLADELEVVEGMQFDRGYLSPYFINNPDRQVAVLDSPFVLLCEKKVASIRDLLPIMERVAKAGRPLLIVAEDVEGEALATLVVNNARGILKAAAVKAPGFGDRRKAMLQDIAILTGGHVVSEETGLSLEKVSLPELGQAKRAEVAKDTTTIIDGAGDAKAINARIKHIRLQIEEAASDYDKEKLQERVAKLAGGVAVIRVGAATEVEMKEKKARVEDALHATRAAVEEGIVPGGGVALIRARNAISNLRCDNPDQDAGIRIVLRAMEEPLRQIVANGGEEASVVASSVASGKSISYGYNAAMRVYGDLMDAGVVDPTKVTRSALQNAASVAGLMLTTDVAVCDSPKREEAAPTQPVHGGVG

SEQ ID NO: 729 - protein, 393 aa, Oryza sativa
LKRKHDREENEAAESNDWMMSPGYTNPAGSPVPTPLSGKGSKAFAKSKAAKGQKSCPQTPLCASSPGNPVTPVGGCRYDSSLGLLTKKFLNLLKGAPGGIVDLNNAAETLEVQKRRIYDITNVLEGIGLIEKKLKNNIRWKGIDDSRPGEVSDDMSILQADIEALSLQEHSVDQQISEMRDKLRGLTEDENNQKWLYVTEDDIKSLPCFQNQTLIAIKAPHGTTLEVPDPDEVNDYPQRRYRIVLRSTMGPIDVYLVSQFEEMSGMETPPRTVQPVSMDSLENPRTPLAAEPNKAAESQPNIQDGLLMPSDAPSSSQDIGGMMKIVPSELDTDADYWLLSDAGVSITDMWKTAPEVEWEGIEKFNAEDFLEVSTPRQQDKPSSDIMDGDSCIS

SEQ ID NO: 730 - protein, 519 aa, Candidatus Blochmannia sayi
  misc_feature (510)..(510): Xaa can be any naturally occurring amino acid
  misc_feature (513)..(513): Xaa can be any naturally occurring amino acid
  misc_feature (519)..(519): Xaa can be any naturally occurring amino acid
MAAKDVKFGNDARVKMLRGVNVLADAVKVTLGPKGRNVVLDKSFGAPVITKDGVSVAREIELEDKFENMGAQMVKEVASKANDSAGDGTTTATVLAQSIVNEGLKAVAAGMNPMDLKRGIDKAVVAAVEELKKLSVPCSDPKAIAQVGTISANSDETVGKLIAQAMDKVGKEGVITVEEGSGLQDELDVVEGMQFDRGYLSPYFVNKPESGTVELEHPFILLADKKISNIREMLPILESVAKAGKPLLIIAEDVEGEALATLVVNNMRGIVKVTAVKAPGFGDRRKAMLQDIAILTAGTVISEEIGLELEKSTLEDMGQAKRVVITKDATTIIDGVGNKSAINSRIAQINQQRDEATSDYDREKLQERVAKLAGGVAVIKVGAATEVEMKEKKARVEDALHATRAAVEEGVVAGGGVALIRVANAIRDLCGDNEDQNVGIKVARRAMEAPLRQIMANAGEEPSVIANNVRSGEGNTGYNAATEKYGNMIELGILDPTKVTRSALQYAASXAGXIITTEX

SEQ ID NO: 731 - protein, 434 aa, Bartonella henselae
IAGDGTTTATVLGQAIVQEGVKAVAAGMNPMDLKRGIDAAVDEVVANLFKKAKKIQTSAEIAQVGTISANGAAEIGKMIADAMEKVGNEGVITVEEAKTAETELEVVEGMQFDRGYLSPYFVTNAEKMVADLDDPYILIHEKKLSNLQSLLPVLEAVVQSGKPLLIIAEDVEGEALATLVVNKLRGGLKIAAVKAPGFGDRRKAMLEDIAILTSGQVISEDVGIKLENVTLDMLGRAKKVNISKENTTIIDGAGQKSEINARVNQIKVQIEETTSDYDREKLQERLAKLAGGVAVIRVGGATEVEVKEKKDRVDDALNATRAAVEEGIVAGGGTALLRAANALTVKGSNPDQEAGINIVRRALQAPARQIATNAGEEAAIIVGKVLENNADTFGYNTATGEFGDLIALGIVDPVKVVRSALQNAASIASLLITT

SEQ ID NO: 732 - protein, 755 aa, Symbiobacterium thermophilum IAM 14863
MDVTHILREVYWHSLDGIVVADKDTVILDVNPAYEAVTGYSRDELIGRKTNIVRSGLTPPEVFRDMWTQLGRQGKWVGEVINRHKNGNLWYSFLSITRIVDEGGSVVAYVGIARDITQRKAMEQQLRQNLAEIQSARELAQAQATRLTALLDSVGEAIIMVDTLGICVVANHQAGGMLGLPAEQIVGKSVHELHALALRSLGVSAFQWQPAPNGGPPIEPETNVIETREQRPRVFHEFAAPVTDTEGHVLGRIYVYRDITKETELDRMKTEFIATVSHELRTPMTSIKGALGLVLGGAAGDLPPEARELLTIARNNTDRLIRLINDILDISRIEAGKMEIRRAPLSPADVVRRAVEEMNAFARQRNITLTTDVPEGLARVMADADRLHQVLDNLISNAIKFSPQGSEVLIRARETGDGVRFDVIDRGPGIPADQTGLIFERFYRVDNAASRKTGGTGLGLTICKAIVEEHGGQIWVESALGEGSTFSFTIPVEPGGHVAEPPIPVGSRTVLVVDDDPDIVRIIMLALEREGFHAVGATSGEQALEIARSRHVDVITLDLMMPGADGVQVLRQLKHDPATRDIPVVVVSAYGAGKEPELVATGVSGIVAKPIDENDLLATIRTVLGTWRGERPQPSILVVDDDPDVRRIVSVMLERAGYAVRTAQDGQEAFRMIMAERPDLLILDLMMPNLDGFQLVRLLRQRRWTQQIPLLVLTALDLTEGEKTLLQLGPTRHVTKGPVIQEEIVARVRELLASH

SEQ ID NO: 733 - protein, 535 aa, Candidatus Blochmannia festinatus
  misc_feature (529)..(529): Xaa can be any naturally occurring amino acid
  misc_feature (532)..(532): Xaa can be any naturally occurring amino acid
MAAKDVKFGNDARVKMLRGVNVLADAVKVTLGPKGRNVVLDKSFGAPVITKDGVSVAREIELEDKFENMGAQMVKEVASKANDSAGDGTTTATVLAQSIVNEGLKAVAAGMNPMDLKRGIDKAVVAAVEELKKLSVPCSDPKAIAQVGTISANSDETVGKLIAQAMDKVGKEGVITVEEGSGLQDELDVVEGMQFDRGYLSPYFVNKPESGAVELEHPFILLADKKISNIREMLPILESVAKAGKPLLIIAEDVEGEALATLVVNNMRGIVKVTAVKAPGFGDRRKAMLQDIAILTAGTVISEEIGLELEKATLDDMGQAKRVVITKDATTIIDGVGNKLAIDSRVAQINQQRDEATSDYDREKLQERVAKLAGGVAVIKVGAATEVEMKEKKARVEDALHATRAAVEEGVVAGGGVALIRVANAIRNLCGDNEDQNVGIKVARRAMEAPLRQIMANAGEEPSVIANNVRSGEGNTGYNAATEKYGNMIELGILDPTKVTRSALQYAASIAGLMITTECMVTDFLKKIXLIXGSK

SEQ ID NO: 734 - protein, 458 aa, Bartonella henselae
MTLLVIGTTTATVLGQAIVQEGVKAVAAGMNPMDLKRGIDAAVDEVVANLFKKAKKIQTSAEIAQVGTISANGAAEIGKMIADAMEKVGNEGVITVEEAKTAETELEVVEGMQFDRGYLSPYFVTNAEKMVADLDDPYILIHEKKLSNLQSLLPVLEAVVQSGKPLLIIAEDVEGEALATLVVNKLRGGLKIAAVKAPGFGDRRKAMLEDIAILTSGQVISEDVGIKLENVTLDMLGRAKKVNISKENTTIIDGAGQKSEINARVNQIKVQIEETTSDYDREKLQERLAKLAGGVAVIRVGGATEVEVKEKKDRVDDALNATRAAVEEGIVAGGGTALLRAANALTVKGSNPDQEAGINIVRRALQAPARQIATNAGEEAAIIVGKVLENNADTFGYNTATGEFGDLIALGIVDPVKVVRSALQNAASIASLLITTEAMVAEVPKKDTPVPPSAWWRN

SEQ ID NO: 735 - protein, 371 aa, Exiguobacterium sp. 255-15
MANEKMFDTFTLPNGVTLKNRIMMAPMTNYAAEENGEVSEAELAYYAARSGGVGAVITACANVTADGQGFPNEFGAERDELVPSLKRLATTIQDQGAKAILQIFHAGRMAPPELVGGQTVSASAVAPEREGAMTPRALEAAEVEAIIEAFGQATRRAMEAGFDGVEIHGANTYLIQQFVSPHSNRREDKWGGSLEKRLAFPLAVVDAVEAVAKQDPSFIVGYRFSPEEVENPGITLDDTMQLVDALAKKDLDYLHVSVMDFFAGSIRDQNETRSPISLVQERVGQQVPVIGVGSLHTPEEVERSLEVVPLVALGRELIMEPKWVEKVEAGETESIRTELDPSAQAELVVPDALWQGITSRPGWFPIKQTTK

SEQ ID NO: 736 - protein, 527 aa, Candidatus Blochmannia ocreatus
MAAKDVKFGNDARVKMLRGVNVLADAVKVTLGPKGRNVVLDKSFGAPVITKDGVSVAREIELEDKFENMGAQMVKEVASKANDSAGDGTTTATVLAQSIVNEGLKAVAAGMNPMDLKRGIDKAVVAAVEELKKLSVPCSDPKAIAQVGTISANSDETVGKLIAQAMDKVGKEGVITVEEGSGLQDELDVVEGMQFDRGYLSPYFVNKPESGAVELEHPFILLADKKISNIREMLPILESVAKAGKPLLIIAEDVEGEALATLVVNNMRGIVKVTAVKAPGFGDRRKAMLQDIAVLTAGTVISEEIGLELEKSTLEDMGQAKRVVITKDATTIIDGVGNKSAINSRVAQINQQRDEATSDYDREKLQERVAKLAGGVAVIKVGAATEVEMKEKKARVEDALHATRAAVEEGVVAGGGVALIRVANAIRNLSGDNEDQDVGIKVARRAMEAPLRQIMANAGEEPSVIANNVRSGEGNTGYNAATEKYGNMIELGILDPTKVTRSALQYAASIAGLMITTECMVTELPKE

SEQ ID NO: 737 - protein, 409 aa, uncultured bacterium 442
MLARAYTPLQVGPVTLPNRFIKAGANENMSLRGMPTLAMLKHHESMAAGGVGMTTMAYLSVNKVGRTLPDQIWLHDGVLDELRAVTDAVHAKGGKIAAQITHGGSFVTGVFVPKRLQSSVSGFNPAGLLRGNVLRRGMTEDDMQNMVDDFVTAAEHCVSAGFDAVEIHMGHGYLLNQFLSPMDNKRKDAYGGSAENRARFPTRVLAAVKQRVGQDIAVLAKINVSDGRRRGANVEDAIVTAKLLEAAGADMLVLSGGRNVESGWFMFGSNMNLEAMYRVLGKWSLSGMAIGATAKSAPSIDFRELYFWEYSKKIREAVSLPLTYLGGVKSADNVAQCMAAGFEAVALARALLREPDLVNKWQVHPEEPSLCDNCNSCVAYIYHPAGTWCIHRPANVLEDNQLLASSGGA

SEQ ID NO: 738 - protein, 445 aa, Bartonella henselae
LGQAIVQEGVKAVAAGMNPMDLKRGIDAAVDEVVANLFKKAKKIQTSAEIAQVGTISANGAAEIGKMIADAMEKVGNEGVITVEEAKTAETELEVVEGMQFDRGYLSPYFVTNAEKMVADLDDPYILIHEKKLSNLQSLLPVLEAVVQSGKPLLIIAEDVEGEALATLVVNKLRGGLKIAAVKAPGFGDRRKAMLEDIAILTSGQVISEDVGIKLENVTLDMLGRAKKVNISKENTTIIDGAGQKSEINARVNQIKVQIEETTSDYDREKLQERLAKLAGGVAVIRVGGATEVEVKEKKDRVDDALNATRAAVEEGIVAGGGTALLRAANALTVKGSNPDQEAGINIVRRALQAPARQIATNAGEEAAIIVGKVLENNADTFGYNTATGEFGDLIALGIVDPVKVVRSALQNAASIASLLITTEAMIAEVPKKDTPVPPSAWWRN

SEQ ID NO: 739 - protein, 509 aa, Candidatus Blochmannia schaefferi
  misc_feature (500)..(500): Xaa can be any naturally occurring amino acid
MAAKDVKFGNDARIKMLRGVNVLADAVKVTLGPKGRNVVLDKSFGAPVITKDGVSVAREIELEDKFENMGAQMVKEVASKANDSAGDGTTTATVLAQSIVNEGLKAVAAGMNPMDLKRGIDKAVVAAVEELKKLSVPCSDPKAIAQVGTISANSDETVGKLIAQAMDKVGKEGVITVEEGSGLQDELDVVEGMQFDRGYLSPYFVNKPERGIVELEHPFILLADKKISNIREMLPVLESVAKAGKPLLIIAEDVEGEALATLVVNNMRGIVKVTAVKAPGFGDRRKAMLQDIAILTAGTVISEEIGLELEKATLEDMGQAKRVVITKDATTIIDGVGNKSAINSRIAQINQQRDEATSDYDREKLQERVAKLAGGVAVIKVGAATEVEMKEKKARVEDALHATRAAVEEGVVAGGGVALIRVANAIGNLCGDNEDQNVGIKVARRAMEAPLRQIMANAGEEPSVIANNVRAGEGNTGYNAATEKYGDMIELGILDPTKVXRSALQYAAS

SEQ ID NO: 740 - protein, 467 aa, Bartonella henselae
LREVASKTNDIAGDGTTTATVLGQAIVQEGVKAVAAGMNPMDLKRGIDAAVDEVVANLFKKAKKIQTSAEIAQVGTISANGAAEIGKMIADAMEKVGNEGVITVEEAKTAETELEVVEGMQFDRGYLSPYFVTNAEKMVADLDDPYILIHEKKLSNLQSLLPVLEAVVQSGKPLLIIAEDVEGEALATLVVNKLRGGLKIAAVKAPGFGDRRIAMLEDIAILTSGQVISEDVGIKLENVTLDMLGRAKKVNISKENTTIIDGAGQKSEINARVNQIKVQIEETTSDYDREKLQERLAKLAGGVAVIRVGGATEVEVKEKKDRVDDALNATRAAVEEGIVAGGGTALLRAANALTVKGSNPDQEAGINNVRRALQAPARQNATNAGEEAAVIVGKVLEKNTDIFGYNTATGEFGDLIALGIVDPVKVVRSALQNAASIASLFITTEAMVAEVPKKDTPVPHTCTVAEW

SEQ ID NO: 741 - protein, 516 aa, Candidatus Blochmannia vicinus
  misc_feature (510)..(510): Xaa can be any naturally occurring amino acid
MAAKDVKFGNDARVKMLRGVNVLADAVKVTLGPKGRNVVLDKSFGAPVITKDGVSVAREIELEDKFENMGAQMVKEVASKANDSAGDGTTTATVLAQSIVNEGLKAVAAGMNPMDLKRGIDKAVVAAVEELKKLSVPCSDPKAIAQVGTISANSDETVGKLIAQAMDKVGKEGVITVEEGSGLQDELDVVEGMQFDRGYLSPYFVNKPESGTVELEHPFILLADKKISNIREMLPILESVAKAGKPLLIIAEDVEGEALATLVVNNMRGIVKVTAVKAPGFGDRRKAMLQDIAILTAGTVISEEIGLDLEKATLEDMGQAKRVLITKDATTIIDGVGNKSAINSRVAQINQQRDEATSDYDREKLQERVAKLAGGVAVIKVGAATEVEMKEKKARVEDALHATRAAVEEGVVAGGGVALIRVANAIRNLCGDNEDQNVGIKVARRAMEAPLRQIMANAGEEPSVIANNVRSGEGNTGYNAATEKYGNMIELGILDPTKVTRSALQYAASXAGLMIT

SEQ ID NO: 742 - protein, 510 aa, Pseudomonas syringae pv. tomato str. DC3000
MPLLNWSRHMVHLTAIGLISIPAAYAADTLTRDNGAAVGDNQNSQTAGAQGPVLLQDVQLLQKLQRFDRERIPERVVHARGTGVKGEFTASADISDLSKATVFKSGEKTPVFVRFSSVVHGNHSPETLRDPHGFATKFYTADGNWDLVGNNFPTFFIRDAIKFPDMVHAFKPDPRTNLDNDSRRFDFFSHVPEATRTLTLLYSNEGTPTGYRFMDGNGVHAYKLVNAKGEVHYVKFHWKTLQGIKNLDPKEVAQVQSKDYSHLTNDLVGAIKKGDFPKWDLYIQVLKPEDLAKFDFDPLDATKIWPDVPEKKIGQMVLNKNVDNFFQETEQVAMAPANLVPGIEPSEDRLLQGRVFSYADTQMYRLGANGLSLPVNQPKVAVNNGNQDGAMNSGKTTSGVNYEPSRLEPRPADEKARYSELPISGTTQQAKITREQNFKQAGDLYRSYNAKEQTDLVQSFGESLADTDTESKNIMLSFLYKADPTYGTRVTEAAKGDLAKVKSLAASLKD

SEQ ID NO: 743 - protein, 467 aa, Bartonella henselae
LREVASKTNDIAGDGTTTATVLGQAIVQEGVKAVAAGMNPMDLKRGIDAAVDEVVANLFKKAKKIQTSAEIAQVGTISANGAAEIGKMIADAMEKVGNEGVITVEEAKTAETELEVVEGMQFDRGYLSPYFVTNAEKMVADLDDPYILIHEKKLSNLQSLLPVLEAVVQSGKPLLIIAEDVEGEALATLVVNKLRGGLKIAAVKAPGFGDRRKAMLEDIAILTSGQVISEDVGIKLENVTLDMLGRAKKVNISKENTTVIDGAGQKSEINARVNQIKVQIEETTSDYDREKLQERLAKLAGGVAVIRVGGATEVEVKEKKDRVDDALNATRAAVEEGIVAGGGTALLRAANALTVKGSNPDQEAGINIVRRALQAPARQIATNAGEEAAIIVGKVLENNADTFGYNTATGEFGDLIALGIVDPVKVVRSALQNAASIASLLITTEAMVAEVPKKDTPVPHTCRVAEW

SEQ ID NO: 744 - protein, 244 aa, Glycine max
MGRGKVELKRIENKINRQVTFAKRRNGLLKKAYELSVLCDAEVALIIFSNRGKLYEFCSGHSMAKTLERYHRCSYGALEVQHQPEIETQRRYQEYLKLKSRVEALQQTQRNLLGEELEHLDVKDLEQLERQLDSSLKQIRSNKTQQMLDQLADLHRKEEMLLETNNILRNKLEEINVALQPTWETREQNAPYNYHPSQSEGYYETAHCNSTLRIGYDSSGLNEAGGAAGTSAQNASEFMNGWMN

SEQ ID NO: 745 - protein, 256 aa, Candidatus Blochmannia floridanus
MNIIKCISLQTNYIWIIYNHIRQCIIIDPGESLKVIKMLNHLQLIPEAILLTHNHRDHTNGVFTLIQHFPKIKIYGPIETQNQNFATITVSEGDTLQILNQEIKVLNFPGHTPHHIGFYYKSWLFSGDTIFSAGCGTIQTGYTQAMYKSLLKIQCLPKNTLIYSGHEYTLLNLNFAISILPQDTLIINYLKKITKVLKKNKLLQPTTLQLELKINPFLRCNDINIQKSLNLFPKPGEEWKILQALRNKKDLYLVKN

SEQ ID NO: 746 - protein, 539 aa, Burkholderia pseudomallei
MAAKDVVFGDSARAKMVEGVNILANAVKVTLGPKGRNVVLERSFGGPTVTKDGVSVAKEIELKDKLQNMGAQMVKEVASKTSDNAGDGTTTATVLAQSIVREGMKYVASGMNPMDLKRGIDKAVAAAVEELKKISKPCTTNKEIAQVGAISANSDSSIGDRIAEAMDKVGKEGVITVEDGKSLADELDVVEGMQFDRGYLSPYFINNPDKQVAVLENPFVLLHDKKVSNIRDLLPVLEQVAKAGRPLLIIAEDVEGEALATLVVNNIRGILKTVAVKAPGFGDRRKAMLEDIAILTGGQVIAEETGLTLEKATLAELGQAKRIEVGKENTTIIDGAGEAVNIEARVKQIRTQIEEATSDYDREKLQERVAKLAGGVAVIKVGAATEVEMKEKKARVEDALHATRAAVEEGIVPGGGVALIRARTAIASLTGVNADQNAGIKIVLRAMEEPLRQIVTNGGEEASVVVAAVAAGKGNYGYNAATGEYVDMVEAGVVDPTKVTRTALQNAASVAGLLLTTDAAVAELPKEDAPMPGGMPGGM

SEQ ID NO: 747 - protein, 153 aa, Bdellovibrio bacteriovorus HD100
MANLPNPWRERSLANPFREFGRHQERIDRLLNELMELRSGTLGEDMSLMPSSELVEEEKNYLLKVDLPGIKKEDVKVEVEGDRLTIRAERRSEKEEKSKKRYFSEISYGSCMRSFALPQSIDEKKVDAKFENGVLSVTIPKTTESKSKQISVH

SEQ ID NO: 748 - protein, 524 aa, Burkholderia pseudomallei K96243
MRMKLKNIGLIAAGLATGVFATLQISASAQQAVTTAAAPLPLDQLRLFAEVFGQIKREYVEPVDDKKLLTAAIKGMVSSLDPHSSYLDKTDYQELQEQTKGRFAGLGIEISQEDGLVKVISPIEDTPAFRAGIRPGDLITRINDRPVRGMTLDKAVKQMRGEPGTKVTLTIFRKSDDRTFPVTVTRAVIRVQSVKMKLLDPGYAYIRITSFQERTTPDLAAKLQDIARQQPNLKGLILDLRNNGGGLLQSAVGVAGAFLPPDSVVVSTNGQIPDSKQIYRDNYENYRLPSFDSDPLKNLPAVFKTVPMIVLTNAYSASASEIVAGALQDSHRAVIMGKATFGKGSVQTVRPMTADSALRLTTAYYYTPSGRSIQNKGILPDIPVDQYADGDPDDVLVTREVDYTNHLANTQDPNEKKELEEREQRRMEQLRILEEQNDKKTPEQRQKDRERKPIEFGSADDFMMQQALNKLEGKPVEQSKMIAADSTAKSAAAKAGVASAAKGASGAAAKPASAAKPASAPQPQ

SEQ ID NO: 749 - protein, 546 aa, Xanthomonas campestris pv. campestris str. ATCC 33913
MAAKDIRFGEDARTRMVRGVNVLANAVKATLGPKGRNVVLEKSFGAPTITKDGVSVAKEIELADKFENMGAQMVKEVASKTNDNAGDGTTTATVLAQALIREGAKAVAAGMNPMDLKRGIDQAVKAAVIELKNISKPTTDDKAIAQVGTISANSDESIGNIIAEAMQKVGKEGVITVEEGSGLENELDVVEGMQFDRGYLSPYFINNQQSQSADLDDPFILLHDKKISNVRDLLPVLEGVAKAGKPLLIVAEEVEGEALATLVVNTIRGIVKVVAVKAPGFGDRRKAMLEDMAVLTGGTVISEEVGLALEKATIKDLGRAKKVQVSKENTTIIDGAGDSATIEARVGQIKTQIEDTSSDYDREKLQERVAKLAGGVAVIKVGASTEIEMKEKKARVEDALHATRAAVEEGVVPGGGVALVRALVAVGNLTGANEDQTHGIQIALRAMEAPLREIVANAGEEPSVILNKVKEGTGNYGYNAANGEFGDMVEFGILDPTKVTRSALQNAASIAGLMITTEAMVADAPKKDEPAMPAGGGMGGMGGMDF

SEQ ID NO: 750 - protein, 479 aa, Gluconobacter oxydans 621H
MSSSQNRPAIVWFRDDLRMADHPALHEAAASGWPLICLYILDDVTPALHPLGAAARWWLRGALADLRRNLEKQGGTLLTLSGSAEKLLPQLAKQTDAASVHWHHRLHERERAQDNRIRRTLEEQECEVHAQWGTVLVDPDTVQTKQGGFYKVCGSFWKALQTHAVPEPLEAPSRLSFHAIPASVLSDARLNEDSLCPQAPDWAAGFRKTWEPGEAEGQEHLEDFLKNSVAGYPRGRDRVAEEGTSRLSPYLASGAVSPRQVWAALQKHGAHTDGPRIFLSELGWREFARYTLYHLPKLPFENLSPKFSGMHWRRSAADLKAWQRGQTGVPIVDAGMRQLWQTGWMHNRARMIVGSFLTKHLLIDWKEGDAWFRDTLVDADFANNAMNWQWVAGTGIEATPFFRIFNPTRQAEKFDPNGDYIRQWVPELRRLSGKALFEPWAAKDEELEKAGVRLGKSYPRPIVDLKEGRDRALQAFRSL

SEQ ID NO: 751 - protein, 487 aa, Yersinia pseudotuberculosis IP 32953
MSTHLVWFRNDLRVTDNLALHAACQDPQASVIAVFIATPVQWAAHGMAPRQAAFLRQNLQHLQAALAARGIPLHYHQCDDFQASNTWLVDFCQQQQVDSLFYSQQYELNERLRDDALAVQLSGRAITCQSFHDSVLLAPGTVLTGNNEMYKVFTPFRRAFIQRLLMSDNHCVPAPKARHAPPVLLSPLPFDYPQQSVDSQLFPAGEDAALQRLRRFCREQVQDYRQYRDLPAVPGTSCLSPYLVLGVLSPRQCFNRLWAESPEMLENADSGAFTWLNELIWREFYRHLLVAYPRLCQHHPFIGWTDGLVWNRSESQLKAWQQGQTGYPIVDAAMRQMNETGWMHNRLRMISASFLVKDLLIDWRQGERYFMSQLVDGDLAANNGGWQWAASTGTDAAPYFRIFNPTTQGERFDKDGVFIRRWLPELAAVPDSDIHQPWRWAERQQQHLDYPVPLVDHKQARLATLAAFEAAKRDSTRIPNRKEPSCY

SEQ ID NO: 752 - protein, 260 aa, Lolium perenne
MGRGRVELKRIENKINRQVTFSKRRNGLLKKAYELSVLCDAEVALIIFSSRGKLYEFGSAGTTKTLERYQHCCYNAQDSSSALSETQSWYQEMSKLKAKFEALQRTQRHLLGEDLGPLSVKELQQLEKQLECSLSQARQRKTQLMMEQVEELRRKERQLGEINRQLKHKLDAEGSSSNSFRAMQQITWAAGTVVDEGAGAYHMHHQQQPNHSAAMDCEPTLQIGYPHQFAAAEQAANNIPRSSAPGGENNFMLGWVLGAN

SEQ ID NO: 753 - protein, 464 aa, Listeria monocytogenes
MLYSKENKESYLEPVFGSSAEDRDIPKYTLGKEPLEPRIAYRLVKDELLDEGSARQNLATFCQTYMEDEATKLMSETLEKNAIDKSEYPRTAELENRCVNIIADLWHAPKDQKFMGTSTIGSSEACMLGGMAMKFAWRKRAEKLGLDIYAKKPNLVISSGYQVCWEKFCVYWDIDMRVVPMDKEHMQLNTDQVLDYVDEYTIGVVGILGITYTGRYDDIYALNEKLEEYNSKTDYKVYIHVDAASGGFFTPFVEPDIIWDLRLKNVISINTSGHKYGLVYPGIGWVLWKDESYLPEELIFKVSYLGGEMPTMQINFSRSASHIIGQYYNFLRYGFEGYRTIHQKTSDVAQYLAHAVEQTGYFDIFNDGSHLPIVRYKLKDDANVNWTLYDLADRLQMRGWQVPAYPLPKSLENIIIQRYVCRADLGFNMAEEFIQDFQASIQELNNAHILFHDTQQSGVHGFTH

SEQ ID NO: 754 - protein, 454 aa, Oryza sativa (japonica cultivar-group)
MVKGGREALLGGYEMGRTLGEGNFGKVKYARHLATGGHFAVKILDRGRVVSLRAGDQIRREIATLKLLRHPHVVRLHEVAASKTKIYMVLEFVNGGELFERIAVKGKLSEKEGRRLFQQLIDGVSYCHDRGVYHRDLKPENVLVDQKGNIKISDFGLSALPQHLGNDGLLHTTCGSPNYIAPEVLQNKGYDGSLSDIWSCGVILYVMLIGYLPFDDRNIVVLYQKIFKGDTQIPKWLSHSAQNLLRRILEPNPMKRIDMAGIKSHEWFQKDYIPVLPYDDDDEDVQFGARLPAKEQINDEPGDKNSHQINAFQLIGMASSLDLSGFFEDEEVSQRRIRFTSTHPPKDAFDKIESSATELGFQVQRGHSKLKLMRNCKGSKNPESFMVSAEVFELGPSVNVVELRKSNGDPALYRQLCERISSDMGARNTEQIFATASLEDDLQNSNAGTPLFAL

SEQ ID NO: 755 - protein, 331 aa, Arabidopsis thaliana
MPVISKASSTTTNSSIPSCSRIGGQLCVWPGLRQLCLRKSLLYGVMWLLSMPLKTLRGARKTLKITHFCSISNMPSSLKIELVPCSKDNYAYLLHDEDTGTVGVVDPSEAAPVIEALSRKNWNLTYILNTHHHDDHIGGNAELKERYGAKVIGSAVDKHRIPGIDILLKDSDKWMFAGHEVRILDTPGHTQGHISFYFPGSATIFTGDLIYSLSCGTLSEGTPEQMLSSLQKIVSLPDDTNIYCGRENTAGNLKFALSVEPKNETLQSYATRVAHLRSQGLPSIPTTVKVEKACNPFLRISSKDIRKSLSIPDSATEAEALRRIQRARDRF

SEQ ID NO: 756 - protein, 439 aa, Oryza sativa (japonica cultivar-group)
MESKGKILMERYELGKLLGKGTFGKVHYAGNLESNQSVAIKMMDKQQVLKFGLSEQIRREITTMRLVAHKNIVQLHEVMATRNKIYFVMEYVKGGELFEKVAKRGKLTEVVAISTSSNSLSAVDYCHSRGVYHRDLKPENLLLDENENLKVSDFGLSALSESKRQDGLLHTTCGTPAYVAPEVISKIGYDGAKSDIWSCGVILFVLVGGYLPFQGPNLMEMYRKIQHGEFRCPGWFSRKLQNLLYKIMDPNPSTRISIQKIKESTWFRKGPEENRILKERTLNENPPKNVALVLGVRPKKNAHEDVKPMSVTNLNAFEIISFSKGFDLSGMFIVKEWRNEARFTSNKSASTIISKLEDVAKALNLRVRKKDNGVVKMQGRKEGRNGVLQFDIKIFEVTTSYHIIEMKQTSGDSLEYRQLLEEGIRPALKDIVLAWHGDE

SEQ ID NO: 757 - protein, 235 aa, Oryza sativa (japonica cultivar-group)
MGRGKIVIRRIDNSTSRQVTFSKRRNGIFKKAKELAILCDAEVGLVIFSSTGRLYEYASTSMKSVIDRYGRAKEEQQHVANPNSELKFWQREAASLRQQLHSLQENHRQLMGQDLSGLGVKELQTLENQLEMSIRCIRTKKDQLMIDEIHELNRKGSLIHQENMELYRKVNLIRQENAELYKKLYETGAENEANRDSTTPYNFAVIEEANTPARLELNPPSQQNDAEQTTPPKLG

SEQ ID NO: 758 - protein, 508 aa, Candidatus Blochmannia ulcerosus
MAAKDVKFGNDARVKMLRGVNVLADAVKVTLGPKGRNVVLDKSFGAPVITKDGVSVAREIELEDKFENMGAQMVKEVASKANDSAGDGTTTATVLAQSIVNEGLKAVAAGMNPMDLKRGIDKAVVAAVEELKKLSVPCSDPKAIAQVGTISANSDETVGKLIAQAMDKVGKEGVITVEEGSGLQDELDVVEGMQFDRGYLSPYFVNKPESGTVELEHPFILLADKKISNIREMLPILESVAKAGKPLLIIAEDVEGEALATLVVNNMRGIVKVTAVKAPGFGDRRKAMLQDIAILTAGTVISEEIGLELEKSTLEDMGQAKRVLITKDATTIIDGIGNKLAIDSRVAQINQQRDEATSDYDREKLQERVAKLAGGVAVIKVGAATEVEMKEKKARVEDALHATRAAVEEGVVAGGGVALIRVANAIGSLCGDNEDQNVGIKVARRAMEAPLRQIMENAGEDPSVIANNVRSGEGNTGYNAATEKYGNMIELGILDPTKVTRSALQYAA

SEQ ID NO: 759 - protein, 518 aa, Candidatus Blochmannia pennsylvanicus
  misc_feature (510)..(510): Xaa can be any naturally occurring amino acid
MAAKDVKFGNDARVKMLRGVNVLADAVKVTLGPKGRNVVLDKSFGAPVITKDGVSVAREIELEDKFENMGAQMVKEVASKANDSAGDGTTTATVLAQSIVNEGLKAVAAGMNPMDLKRGIDKAVVAAVEELKKLSVPCSDPKAIAQVGTISANSDETVGKLIAQAMDKVGKEGVITVEEGSGLQDELDVVEGMQFDRGYLSPYFVNKPESGTVELEHPFILLADKKISNIREMLPILESVAKAGKPLLIIAEDVEGEALATLVVNNMRGIVKVTAVKAPGFGDRRKAMLQDIAVLTAGTVISEEIGLELEKATLEDMGQAKRVVITKDATTIIDGVGNKSAINSRVAQINQQRDEATSDYDREKLQERVAKLAGGVAVIKVGAATEVEMKEKKARVEDALHATRAAVEEGVVAGGGVALIRVANAIRNLCGDNEDQNVGIKVARRAMEAPLRQIMANAGEEPSVIANNVRSGEGNTGYNAATEKYGNMIELGILDPTKVTRSALQYAASXAGLMITTE

SEQ ID NO: 760 - protein, 538 aa, primary endosymbiont of Sitophilus oryzae
MAAKDVKFGNDARVKMLRGVNVLADAVKVTLGPKGRNVVLDKSFGAPVITKDGVSVAREIELEDKFENMGAQMVKEVASKANDAAGDGTTTATVLAQSIVNEGLKAVAAGMNPMDLKRGIDKAVIAAVEELKKLSVPCSDSKAIAQVGTISANSDETVGTLIAEAMAKVGKEGVITVEEGSGLQDELDVVEGMQFDRGYLSPYFVNKPETGAIELESPFILLADKKISNIREMLPVLEAVAKAGKPLLIIAEDVEGEALATLVVNTMRGIVKVAAVKAPGFGDRRKAMLQDIAILTAGTVISEEIGLELEKATLEDMGQAKRVVITKDTTTIIDGVGDKALIDSRVTQINQQRDEATSDYDREKLQERVAKLAGGVAVIKVGAATEVEMKEKKARVEDALHATRAAVEEGVVAGGGVALIRVANSIAELRGDNEDQNVGIKVARRAMEAPLRQIVANAGEEPSVIANKVKAGEGNTGYNAATEEYGNMIDMGILDPTKVTRSALQYAASIAGLMITTECMVTDQPKEDKPDLGGMGGM

SEQ ID NO: 761 - protein, 541 aa, Glycine max
  misc_feature (194)..(194): Xaa can be any naturally occurring amino acid
  misc_feature (202)..(202): Xaa can be any naturally occurring amino acid
MRKYAADRFRHLFNRSLLLLRHRHHHNHHPFPYSSSVSSLSPFSRSRFLSSTPFSMASDSPFPVTAQNINPKVLKCEYAVRGEVVTLAQNLQKDLQANPGSHPFDEILYCNIGNPQSLGQQPITFFREVLALCDHPAILDKSETQGLFSTDAIQRAWQIVDQIPGRATGAYSHSQGVKGLRDTIAAGIEERDGXPANPDDIXMTDGASPAVHNMMQLLIRSENDGILCPIPQYPLYSASIALHGGCLVPYYLDEATGWGLEIPELKKQLEAAKSKGINVRALVVINPGNPTGQVLGEANQRDIVEFCKQEGLVLLADEVYQENVYVPEKKFHSFKKVSRSMGYGENDITLVSFQSVSKGYHGECGKRGGYMEVTGFSAEVREQIYKVASVNLCSNISGQILASLVMSPPKVGDESYDSFMAEKENILASLARRAKTLEDAFNKLEGVTCNKAEGAMYLFPQIRLSEKAIKAAEAANATPDNFYCKRLLNATGVVVVPGSGFGQVPGTWHFRCTILPPEEKIPAIVTRLTEFHEKFMDEFRD

SEQ ID NO: 762 - protein, 493 aa, Triticum aestivum
  misc_feature (376)..(376): Xaa can be any naturally occurring amino acid
MVLTHVQSDEAAASAAVFASRYVQEPVPSYELGARSISKDAAYQIIHDELLLDGSPRLNLASFVTTWMEPECDRLILEGMNKNYADMDEYPVTTELQNRCVNIIARLFNAPVGAGETAVGVGTVGSSEAIMLAGLAFKRRWQNRRKAEGKPYDKPNIVTGANVQVCWEKFARYFEVELKEVKLSEGCYVMDPDKAVEMVDENTIFVAAILGSTLTGEFEDVKRLNDLLAAKNKRTRWDTPIHVDAASGGFIAPFLYPELEWDFRLPLVKSINVSGHKYGLVYPGVGWVIWRNKEDLPDELIFHINYLGADQPTFTLNFSKGSSQIIAQYYQFLRLGFEGYRNVMDNCMENAMVLKEGLVRTGRFNIVSKDQGVPLXAFSLKDSSRHDEFEISEFLRRFGWIVPAYTMPPDAQHVTVLRVVIREDFSRTFAERLVIDIEKVLHELDALPSRSSGPALQHPNGDTVSEKDLARQREVVSVWKRAVAARKKTQGVC

SEQ ID NO: 763 - protein, 514 aa, Candidatus Blochmannia chromaiodes
  misc_feature (2)..(3): Xaa can be any naturally occurring amino acid
  misc_feature (510)..(510): Xaa can be any naturally occurring amino acid
  misc_feature (514)..(514): Xaa can be any naturally occurring amino acid
MXXKDVKFGNDARVKMLRGVNVLADAVKVTLGPKGRNVVLDKSFGAPVITKDGVSVAREIELEDKFENMGAQMVKEVASKANDSAGDGTTTATVLAQSIVNEGLKAVAAGMNPMDLKRGIDKAVVAAVEELKKLSVPCSDPKAIAQVGTISANSDETVGKLIAQAMDKVGKEGVITVEEGSGLQDELDVVEGMQFDRGYLSPYFVNKPESGTVELEHPFILLADKKISNIREMLPILESVAKAGKPLLIIAEDVEGEALATLVVNNMRGIVKVTAVKAPGFGDRRKAMLQDIAVLTAGTVISEEIGLELEKATLEDMGQAKRVVITKDATTIIDGVGNKSAINSRVAQINQQRDEATSDYDREKLQERVAKLAGGVAVIKVGAATEVEMKEKKARVEDALHATRAAVEEGVVAGGGVALIRVANAIRNLCGDNEDQNVGIKVARRAMEAPLRQIMANAGEEPSVIANNVRSGEGNTGYNAATEKYGNMIELGILDPTKVTRSALQYAASXAGLX

SEQ ID NO: 764 - protein, 322 aa, Schizosaccharomyces pombe
MDYDIDAIIEKLVKARNGKPSKQVQLSDAEIRYLCTTSRSIFLSQPMLLELEAPLKICGDIHGQYSDLLRLFEYGGYPPDANYLFLGDYVDRGKQSLEVICLLFAYKIKYPENFFLLRGNHEFASINRIYGFYDECKRRYSIKLWKTFTDCFNCMPVAAVIDEKIFCMHGGLSPDLNSLDQIQRIIRPTDIPDTGLLCDLVWSDPEKDLTGWGENDRGVSYTFGADVVSRFLQKHDLDLICRAHQVVEDGYEFFGKRQLVTIFSAPNYCGEFDNVGAMMSVNEDLLCSFQILKPAEKRQRVSQSSIKESKSATNSLKKSKNN

SEQ ID NO: 765 - protein, 545 aa, Candidatus Blochmannia castaneus
MAAKDVKFGNDARVKMLRGVNVLADAVKVTLGPKGRNVVLDKSFGAPVITKDGVSVAREIELEDRFENMGAQMVKEVASKANDSAGDGTTTATVLAQSIVNEGLKAVAAGMNPMDLKRGIDKAVVAAVEELKKLSVPCSGPKAIAQVGTISANSDETVGKLIAQAMDKVGKEGVITVEEGSGLQDELDVVEGMQFDRGYLSPYFVNKPESGTVELEHPFILLADKKISNIREVLPILESVAKAGKPLLIIAEDVEGEALATLVVNNMRGIVKVTAVKAPGFGDRRKAMLQDIAILTAGTVISEEIGLELEKATLEDMGQAKRIVITKDATTIIDGVGNKFAINSRVSQINQQRDEATSDYDREKLQERVAKLAGRVAVIKVGAATEVEMKEKKARVEDALHATRAAVEEGVVAGGGVALIRVANAIRNLCGNNEDQNVGIKVARRAMEAPLRQIMANAGEEPSVIANNVRSGEGNTGYNAATEKYGNMIELGILDPTKVTRSALQYAASIAGLMITTECMVTESPKEDKPDLGNAGGAGGMGGMM

SEQ ID NO: 766 - protein, 397 aa, Thermococcus litoralis
MVKASKRAMSIEYAIRDVVLPARELEKQGIKIIKLNIGDPVKFDFQPPEHMKKAYCEAIMEGHNYYGDSEGDRELREAIVEREKKKNGVDITPEDVQVTAAVTEALQFIFGALIDGGEEILIPGPSYPPYVGLVKFYGGVPKAYRTVEEEGWQPDIDDMRKKITEKTKAIAVINPNNPTGALYEKKTLQEIIDLAGEYDLPIISDEIYDLMTYEGKHVSPGSLTKDVPVIVMNGLSKVYFATGWRLGYMYFVDPENKLAEVREAIGKLARIRLCPNTPAQKAAIAGLRGPMDYLEEYMAKLKERRDYIYKRLNEMPGISTQKPQGAFYIFPKIEEGPWKSDKEFVLDVLHNAHVLFVHGSGFGEGGEMHFRSIFLAPVPVLEEAMDNLEKFMKERLG

SEQ ID NO: 767 - protein, 518 aa, Candidatus Blochmannia noveboracensis
  misc_feature (510)..(510): Xaa can be any naturally occurring amino acid
MAAKDVKFGNDARVKMLRGVNVLADAVKVTLGPKGRNVVLDKSFGAPVITKDGVSVAREIELEDKFENMGAQMVKEVASKANDSAGDGTTTATVLAQSIVNEGLKAVAAGMNPMDLKRGIDKAVVAAVEELKKLSVPCSDPKAIAQVGTISANSDETVGKLIAQAMDKVGKEGVITVEEGSGLQDELDVVEGMQFDRGYLSPYFVNKPESGTVELEHPFILLADKKISNIREMLPILESVAKAGKPLLIIAEDVEGEALATLVVNNMRGIVKVTAVKAPGFGDRRKAMLQDIAVLTAGTVISEEIGLELEKATLEDMGQAKRVVITKDATTIIDGIGNKSAINSRVAQINQQRDEATSDYDREKLQERVAKLAGGVAVIKVGAATEVEMKEKKARVEDALHATRAAVEEGVVAGGGVALIRVANAIRNLCGDNEDQNVGIKVARRAMEAPLRQIMANAGEEPSVIANNVRSGEGNTGYNAATEKYGNMIELGILDPTKVTRSALQYAASXAGLMITTE

SEQ ID NO: 768 - protein, 413 aa, Candida albicans SC5314
MSNSNPLKDSLVFQPIKVGDNTLSNRIVYCPTTRFRAAKGNEEPTYRHVPSDLMLKYYSDRAQYPGTLLVTEATLISNRAGGYDGCPKISTQEETKAWKKIVDAVHSKGSFLSCQFWFLGRVGYPSLLKHRKLDYLAPSPIYENEKHQKQAEKAGLPLREVTEQEIHDIIYNDYTIAAKNAIAAGFDFIELHGAHGYFIDQFLHECSNQRTDKYGGSIENRCRFVLELIDHLITIVGAHRLAIRLSPWAEVQGIVEKESPIPTFSYLINELQKRADQGNQLAYLSVVEPRVQGTITADIKTMKGDNEFVAEIWKGVLLRAGNYTYDAPEFKGIVADTSNNRTLVGFSRFFISNPDLVSKLKNNPSSLVKYDRKLFYEQFNWGYNTYGQDQPVDEEKERKKFPKVIGNIDEARL

SEQ ID NO: 769 - protein, 264 aa, Photobacterium profundum SS9
MLNTLKRLEKKFMLTVQSIPAFNDNYIWLIHNSHNHCVVVDPGDATPVLKVLEEQSLTLDAILITHHHHDHIGGISELKRHYPNLNVVGPASEPIPGISQSVEDGDQVELFGERFMVLGVPGHTLGHVAYVGDGKLFCGDTLFSVGCGRLFEGTPAQMFQSLKKLAALPDETEIYCAHEYTSSNLAFALVAEQDNPHLQRYREDVSRMRAQGISTIPSTLRQEKLVNPFLRCEQPSIKKSVADKAFDDSDLETFAALRRWKDNF

SEQ ID NO: 770 - protein, 403 aa, Candida albicans SC5314
MTIDNEGIVIKPLGSTKLFQPIKLGFNTLSQRIAFAPSTRYRATKDNIPTDLQLEYYSQRSEYPGTLIITEATYTSRQGGLVPYVPGIYNDAQTKSWKKINDAIHANGSFSSVQLWYLGRVANPKNLKDAGLPFVGASSVYWNEESEKLAKEAGNELRELTEEEIDHIVEVEYPNAAKRAIEAGFDYIEVHSAHGYLLDQFLNLASNKRTDKYGCGSIENRARLLLRIIDKLIDIVGAERLAIRLSPWATFQNVDVEGEEIHSYIIDQLQERANSGNELAYISLVEPRVQASWDIAKENQVGSNEFILKHWKGKVIRAGTYAHELNKINEDINNDRTLIAFSRFFISNPDLVKKLHDGISLTPYERATFYNHDNFGYNTWIKYGENKVFNEQEERKKLGKPLA

SEQ ID NO: 771 - protein, 733 aa, Leifsonia xyli subsp. xyli str. CTCB07
MTPLPERAAALPGIDDAVLHAVATGSYHDPHSVLGQHQVAAAGIADPVTVIRTLRPLAEAVFAVLPTGAYLELAHLAHGIWQGVDIAGPGAYEIEARYADGSAWSADDPYRFLPTIGELDLHLIREGRHERLWTALGARLRDLGGVTGTAFTVWAPHARAVRVVGDFNGWDGTLHSLRNMGSSGVWELFVPGVGEGAIYKFDLLAQSGDWVRKIDPMAQLAETPPDTASRIAVSRHEWQDGEWMRRRAASDPHTGPMSIYELHFGSWRPDLGYREAADQLIDYLGALGYTHVEFLPLAEHPFGGSWGYQVTGYYAPTSRFGSPDDLKYLIDRLHRAGIGVLLDWVPGHFPKDDWALARFDGQPLYEHADPRRGEHADWGTYVFDYGNSQVRNFLVANALYWLEEFHIDGLRVDAVASMLYLDYSRDADGWEPNIHGGRENLEAIAFLQEVTATAYKRNPGTIVIAEESTSYPGVTAPTSSGGLGFGLKWNMGWMHDSLQYIREDPLYRSWHHSRITFSFVYAWSESFLLPISHDEVVHGKGSLLGKMPGDHWQQLANMRAYLAFMWAHPGKQLLFMGQEFGQPSEWSEERGLDWWILDQPAHRGLWNLVCELNAVYRGAPALWAHDNDPSGFEWLDGSDAAGNVLAFLRKDGRGEPIAVILNFSGAPHTEYRVGLPFAGGWEELLNTDADVFGGSGVGNFGGVTAVEEPWMGSPASAVLTLPPLGALFLKTGR

SEQ ID NO: 772 - protein, 541 aa, Thermoanaerobacter brockii
MAKQIKYGEEARRALERGVNAVADTVKVTLGPRGRNVVLDKKYGSPTVTNDGVTIAREIELEDPFENQGAQLLKEAATKTNDIAGDGTTTATLLAQAMVREGLKNLAAGANPMLLRRGIAKAVDAAVEGLKRISKPIDNKESIAHVASISAADEEIGKLIAEAMDKVGKDGVITVEESKTLGTTLEVVEGMQFDRGYISPYMVTDAEKMEAVLEEPVILITDKKISNIQDLLPLLEQIVQQGKKLLIIADDVEGEALATLIVNKLRGTFTCVAVKAPGFGDRRKEMLQDIAILTGGQVISEELGYDLKDVRLDMLGRARQVKVTKEYTTIVGGAGDPSEIKKRVNQIKAQIEETTSDYDREKLQERLAKLAGGVAVIQAGAATETELKEKKHRIEDALAATKAAVEEGIVPGGGIALLNVIEDVQKVVDSLEGDFKTGAKIVLRALEEPVRQIATNAGVDGSVIVEKIKAAKDPNFGYDAYKEEFTDMFKAGIVDPTKVTRTALQNAASIASMILTTEAIVVDIPEKNTGMPNPGAGMDMM

SEQ ID NO: 773 - protein, 548 aa, Stenotrophomonas maltophilia
  misc_feature (482)..(482): Xaa can be any naturally occurring amino acid
MAAKDVKFGNDARVKMLRGVNVLADAVKVTLGPKGRNVVLDKSFGAPTITKDGVSVAREIELEDKFENMGAQMVKEVASKANDAAGDGTTTATVLAQAIILKVMKAVAAGMNPMDLKRGIDKAVTVAVEELKALSVPCSDSKAIAQVGTISANSDETVGKLIAEAMDKVGKEGVITVEDGTGLQDELDVVEGMQFDRGYLSPYFINKPETGAVELESPFILLADKKISNIREMLPVLEAVAKAGKPLLIIAEDVEGEALATLVVNTMRGIVKVAAVKAPGFGDRRKAMLQDIATLTGGTVISEEIGMELEKATLEDLGQAKRVVINKDTTTIIDGVGEEAAIQGRVAQIRQQIEEATSDYDREKLQERVAKLAGGVAVIKVGAATEVEMKEKKARVEDALHATRAAVEEGVVAGGGVALIRVASKLADLRGQNEDQNVGIKVALRAMEAPLRQIVLNCGEEPSVVANTVKGGDGNYGYNAVXRRIRQHDRHGYPGSNQITRSALQYAASVAGLMITTECMVTDLPKNDAADLGAAGGMGGMGGMGGMM

SEQ ID NO: 774 - protein, 541 aa, Cyanophora paradoxa
MAKQILYHESARRALEKGMDILAEAVAVTLGPKGRNVVLEKKFGAPQIVNDGVTIAKEIELEDHIENTGVALIRQAASKTNDVAGDGTTTATVLAYAMVKEGMRNVAAGANPMAIKRGIDRATQKVVETIAAHAKPVEDSRAITQVASISAGNDDEVGKMIADAIEKVGKEGVISLEEGKSTTTELEITEGMRFDKGYISPYFVTDPERMEVIQKDAMFLITDKKITLVQDLVPILEQVARARKPLFIIAEDIEKEALATLVVNKLRGNLNVSAVKAPGFGDRRKAMMQDIAVLTNTQVISEQTGLRLDSIKLDVLGKARQVNITKDYTTVIAEGNEEGVSARCEQIRRQIEETDSAYEKEKLQERLAKLAGGVAVIKVGAATETEMKDKKLRLEDAINATKAAVEEGIVPGGGTTLAHLAIELENWVQSNLEHEELIGGMIVARSLTAPLKRIVENAGQNGAVIAEQVKDKPFNIGYNAANAQFVDMFEAGIVDPAKVTRSGLQNAASIAGMVLTTECIVVDKAESQQKAASVNRNSFDY

SEQ ID NO: 775 - protein, 569 aa, Euglena gracilis
MNRAGVLARRGYSSKGKDILFGVDARVKMLAGVNRLSQAVSVTLGPKGRNVVIEQPFGAPKITKDGVTVAKAIEFKDSFENLGAQLVRQVANTTNEIAGDGTTTSTVLANTIFSEGYKAVTQGTSPVDMKRGIDRAVEVVLQSLTEQSKTIVSKEEVTQVATISANGDVEIGQLIGHAMEKVGKAGVITVSDGKTLDTELEVVEGMSLDRGYISPYFVTNAKTQKVEIEDAFILLCQKKVSTIQQILPVLEHIAKANRPLVIIADDVDSEALATLIINKINGKLKVCAVKAPGFGDNKTNMLHDVAIFTGGEVYNEELGMNLEQHFDHRILGFAKKVSVGKDQTIILNGAGDPKAVEERKELIQGMLGKTDSSYEKEKLNERLAKLSGGVAVIKVGGASDVEVGEKKDRVTDALNATRAAVSEGIVPGGGAALLYASSALAELAADPTLTEDQKTGVRIVMSAIKLPAITIVKNAGGEGAVVIHQLLAEKKMQQGYDAQQGKYVNMFEAGIIDPAKVVKTALVDAASVAGLMITTEAAITDIPAPAPAAGGGMDGMGGMGGMGGMGGMY

SEQ ID NO: 776 - protein, 580 aa, Chlamydomonas reinhardtii
MAQSQLAKGSRQTTGRPFQNKPARAARRLVIRAADAKEIVFDQESRRRLQAGINKVADAVGVTLGPRGRNVVLEQKFGVPQVINDGVSIRRAIELKDPVENAGAQLIKEVAGRTNDAAGDGTTTASVLAREMIHYGLQSVTAGANPIAVKRGLDKTAEYLVAKLKEHAKPVKGRDDIKNVASISAGNDNAIGEMIADALDKVGSNGVLSIETSNSTETVVEVQEGMEIDRGYISPQFVTNQERLLVEYDNCRVLVTDQKIDAIRDIIPILEQVTRLNAPLLIIAEDVSGEALATLVVNKLRGVLNVCAIKAPGFGERRKSLLQDIAIVTGAEFIAKDLGMKVEQAVVEQLGVARKVTVANNTTTLIADAASKDEIEMRIAQLKKELAETDSVYDTEKLSERIAKLSGGVAVIKVGAATEAELEDRKLRIEDAKNATFAAVEEGIVPGGGAALLHLSELVPAFKETLTDAEEKLGADIVMKSLRAPCRLIADNAGVEGEVIVQRLLGKPFEVGYNAMIDKVENLLDAGVIDPAKVTRNGLLNSVSIAGIMLTTQAVMVEKHKPSEIPGGMTASGMPSGMTI

SEQ ID NO: 777 - protein, 479 aa, Nostoc sp. PCC 7120
MSDLVLFWHRRDLRIADNIGLAAARQQSSKVVGVFCLDPNILERDDVAPARVTYMIGSLQELQQRYVQAGSQLLILHGDPVQAIPHLAEALNAKAVFWNWDVEPYSQTRDRAILDILKDKGIQFLTHKWDQILHSPDEIRSGSNTPYTVYTPFWKNWSSKPKAKPVETLQNAEGLTESEQELAQKAGVKTLPTAKDLGFFWDADLIIAPGEAAAQAKLEEFTAKAITEYQEQRNFPAVDGTSQLSAALKFGVIGIRTVWQATLEALENSRSEEASAAIRTWQQELAWREFYQHAMYNFPELADGAYRETFKNFPWETNEEHFQAWREGKTGYPIVDAAMRQMNESGWMHNRCRMIVASFLTKDLLINPQLGEKYFMQKLIDGDLSANNGGWQWSASSGMDPKPLRIFNPASQSQKFDPDAEYIRRWVPELRSMDTEYLVTGKITPLERHAVGYVKPIVDHQKQQQLFKQRYQQQKATSL

SEQ ID NO: 778 - protein, 518 aa, Candidatus Blochmannia americanus
  misc_feature (509)..(514): Xaa can be any naturally occurring amino acid
  misc_feature (516)..(518): Xaa can be any naturally occurring amino acid
MAAKDVKFGNDARVKMLRGVNVLADAVKVTLGPKGRNVVLDKSFGAPVITKDGVSVAREIELEDKFENMGAQMVKEVASKANDSAGDGTTTATVLAQSIVNEGLKAVAAGMNPMDLKRGIDKAVVAAVEELKKLSVPCSDPKAIAQVGTISANSDETVGKLIAQAMDKVGKEGVITVEEGSGLQDELDVVEGMQFDRGYLSPYFVNKPESGTVELEHPFILLADKKISNIREMLPILESVAKAGKPLLIIAEDVEGEALATLVVNNMRGIVKVTAVKAPGFGDRRKAMLQDIAILTAGTVISEEIGLELEKATLEDMGQAKRIVITKDATTIIDGVGNKFSINSRVAQINQQRDEATSDYDREKLQERVAKLAGGVAVIKVGAATEVEMKEKKARVEDALHATRAAVEEGVVAGGGVALIRVANAIRNLCGDNEDQNVGIKVARRAMEAPLRQIMANAGEEPSVIANNVRSGEGNTGYNAATEKYGNMIELGILDPTKVTRSALQYAAXXXXXXIXXX

SEQ ID NO: 779 - protein, 542 aa, Ruminococcus flavefaciens
MAKDIKYGEDARKALQAGIDKLADTVRITMGPKGRNVVLDKKFGAPLITNDGVTIAKDIELEDAFENMGAQLVKEVATKTNDAAGDGTTTATLLAQTIVREGMKNIAAGANPMVLKKGIAKAVDAAVKAIVDNSKAVQGSEDIARVGTVSSADENVGKLIAEAMEKVTSDGVITIEESKTAETYSEVVEGMQFDRGYISPLHGLQMPDKMEAVYDDAYVLITDKKISSIQEDPPALEQIVKMGQKVVIIAEDVEGEALTNYHPQQPSRGTFKVAAVKAPGFGDRRKEMLKDIAVLTGGEVISSELGLELSETQLSQLGQAKQVVIQKENTIIVDGAGDKEAIKSRVAQIRAAIENTTSDFDREKLQERLAKLAGGVAVIKVGAATEIEMKEKKLRIEDALAATKAAVEEGIVAGGGTAFVNAIPAVIKLVPTLEGDEKTGAKIILKALEAPVRQIAENAGLEGSVIVDKIIRSRKVGYGFDAYNEVYTDMIPAGIVDPTKVTRSALQNAASVASMVLTTESLVADIKEDAPAAPAMPAGGMY

SEQ ID NO: 780 - protein, 546 aa, Acetobacter aceti
MAAKDVKFGADARQRMRAGVDILADAVKVTLGPKGRNVVLDKSFGAPRITKDGVSVAKEIELADKFENMGAQMLREVASKTNDIAGDGTTTATVLAQAIVREGHKAVAAGMNPMDLKRGIDKAVAVVIEELKKNAKKVTTPAETAQVGTISANGESEIGQMISEAMQKVGSEGVITVEEAKHFQTELDVVEGMQFDRGYISPYFVTNPEKMTADLENPYILIHEKKLSSLQPMLPLLESVVQSGRPLLIIAEDVDGEALATLVVNKLRGGLKIAAVKAPGFGDRRNVMLEDIAILTGGQVISEDLGIKLETVTLNMLGTAKKVHIDKENTTIVDGAGKADDIKGRVKQIRAQIEETSSDYDREKLQERLAKLAGGVAVIRVGGSTEVEVKERKDRVDDALHATRAAVEEGIVPGGGTALARATLKLEGLHYHNDDQRVGGDIIRRALQAPLRQIAHNAGEDGAVIANKVLENSDYNFGFDAQAGEYKNLVEAGIIDPAKVVRTALQDAASVAGLLITTEAMVAERPEKKAAPAGGPDMGGMGGMDF

SEQ ID NO: 781 - protein, 505 aa, Candidatus Blochmannia nearcticus
  misc_feature (3)..(3): Xaa can be any naturally occurring amino acid
  misc_feature (481)..(481): Xaa can be any naturally occurring amino acid
MAXKDVKFGNDARVKMLRGVNVLADAVKVTLGPKGRNVVLDKSFGAPVITKDGVSVAREIELEDKFENMGAQMVKEVASKANDSAGDGTTTATVLAQSIVNEGLKAVAAGMNPMDLKRGIDKAVVAAVEELKKLSVPCSDPKAIAQVGTISANSDETVGKLIAQAMDKVGKEGVITVEEGSGLQDELDVVEGMQFDRGYLSPYFVNKPESGTVELEHPFILLADKKISNIREMLPILESVAKAGKPLLIIAEDVEGEALATLVVNNMRGIVKVTAVKAPGFGDRRKAMLQDIAILTAGTVISEEIGLELEKSTLEDMGQAKRVVITKDATTIIDGVGNKSAINSRIAQINQQRDEATSDYDREKLQERVAKLAGGVAVIKVGAATEVEMKEKKARVEDALHATRAAVEEGVVAGGGVALIRVANAIRNLCGDNEDQNVGIKVARRAMEAPLRQIMANAGEEPSVIANNVRSGEGNTGYNAXTEKYGNMIELGILDPTKVTRSALQ

SEQ ID NO: 782 - protein, 140 aa, Oryza sativa
MRKYRVAGLVAALLVLHSLATPSAQAEAHRAGGEGEEKMSSDGGPVLGGVEPVGNENDLHLVDLARFAVTEHNKKANSLLEFEKLVSVKQQVVAGTLYYFTIEVKEGDAKKLYEAKVWEKPWMDFKELQEFKPVDASANA

SEQ ID NO: 783 - protein, 1208 aa, Magnaporthe grisea 70-15
MEVRPQARVPPRPVLEEASMRTNYSISQNSATPPNYQHGGLKTENIRPAQPQKTRRDIPVSSSHVPLNPRLYEIREEAQSTPQSKRESQASTASYKSSSSNTFRKPKTHVGPWQLGKTLGKGSSARVRLARHTSTHQYVAVKIVAKSTCKMTQAGSLAKLDEIDSAAPEKVEGMRRMPIALEREVAILKLIEHPNIVKLYDIWENSNEIYLILEYVERGDLFDFISKHGPMPEEEAIFVFRQIMSALEYCHSYGICHRDLKPENILLKSNGQVKIADFGMAALHQGPRTPLWTFCGSPHYAAPELLREKAYRGEKSDIWSMGVILFAMMAARLPFDDEDMNLMFAKARKAIYHMPSFFSDEAKDLIHRLLQVDPRKRLSMRQMWQHPVVWKYGYLDELGGEGIPEVPNPRTRQEIKPLDLCDIDPQILRPIQSMWHTLSEDELVKKLISDDYRERQLENYDPSLTHSPSDYHHIRPPLWLTKVSTRQFMTNKANGQGRSISKFTVISNVTETGTGANLGTVRSYDPYKSPAVKQPQATHARIVIHRDSTDTDRNAASLGSTSHRRPRANSTGSWKRPARRSQLGSRILTPRSTASSVQSSRKFHARSRTSSRQKRAMDFSTARRKAAAAKLSNQQTLLGTDGSKTVTGWNIQCSSDPDIPGDTADSSNARLRSKDRLHEELRHFSSSIAKDCDEAFNSSLLSVSQFDGDRSRQGSPFSLSLGTPVSATPVTPVVTPTIPRPSARPWDSRPLPPTPPSSSHEKESAVNFGENPSILARRGQPPTQGYNLRSGPVAMTPTPSDRRVVSAPVHGGQYGGCATGKLPSIEEATPNTIQDEVNRSRIVSLPAKPVATAPTSNEARGLEFLSNAEQTIRIVHSPSAQRESGITRRPHPIQANAKPSKMVGTSTGPVKQASIDLYHADDSIISHRNAQLAQTSSHGSASTFAMRKKTSSWFKRLSRESKGSKGSLCDELDDTKSIDVPHGLTSGPIKNERDNSSINMSHRPPEKTSNKKKSFFLPFWRHKSEPRMSLAEPDFEESPSPETNAAVKSHKTSGNNLLNFGDAESAERMIKPQQNWLARLFRVKPVTRVICLSISRRRARQEVAILLRDWRKYGIRDVEVDKKRNVVFARLSSKNHLNIKEVALACEIITVIEHGKRNHLSIVRFTQEKGAASSFQRVVDTMRDVLGNRNLLVTDKSKAKMMIKTLNS

SEQ ID NO: 784 - protein, 508 aa, Candidatus Blochmannia floridanus
MAAKDVKFGNDARVKMLRGVNVLADAVKVTLGPKGRNVVLDKSFGAPVITKDGVSVAREIELEDKFENMGAQMVKEVASKANDSAGDGTTTATVLAQSIVNEGLKAVAAGMNPMDLKRGIDKAVVAAVEELKKLSVPCSDPKAIAQVGTISANSDETVGKLIAQAMDKVGKEGVITVEEGSGLQDELDVVEGMQFDRGYLSPYFVNKPESGTVELEHPFILLADKKISNIREMLPILESVAKSGKPLLIIAEDVEGEALATLVVNNMRGIVKVTAVKAPGFGDRRKAMLQDIAILTSGTVISEEIGLELEKATLEDMGQAKRVLITKDATTIIDGVGNKSSIDSRVAQINQQRDEATSDYDREKLQERVAKLAGGVAVIKVGAATEVEMKEKKARVEDALHATRAAVEEGVVAGGGVALIRVANAIRNLCGDNEDQNVGIKVARRAMEAPLRQIMANAGEEPSVIANNVRSGEGNTGYNAATEKYGNMIELGILDPTKVTRSALQYAA

SEQ ID NO: 785 - protein, 492 aa, Nicotiana tabacum
MDPYKYRPSSAFNSPFCTTNSGAPVFNNNSSLTVGARGPVLLEDYHLVEKLANFDRERVPERVVHARGASAKGFFEVTHDITHLTCADFLRAPGVQTPVIVRFSTVIHERGSPETLRDPRGFAVKFYTREGNFDLVGNNFPVFFIRDGMKFPDMVHALKPNPKSHIQENWRVLDFFSHVPESLHMFTFLFDDIGIPQDYRHMDGSGVHTFTLINKAGKSTYVKFHWKPTCGVKSLLEEEAARIGGANHSHATQDLYDSIAAGNYPEWKLFIQTMDPDHEDRFDFDPLDVTKTWPEDILPLQPVGRLVLNKNIDNFFNENEQLAFCPSIVVPGVYYSDDKMLQTRIFSYSDTQRYRLGPNYLQLPANAPKCAHHNNHYDGSMNFMHRDEEIDYFPSRYDPVRHAEKYPIPSTMCTGKREKCVIQKENNFKQPGDRYRSFTPDRQERFIRRWVEALSDPRITYEIRTIWISYWSQADKSLGQKLASRLNVRPSI

SEQ ID NO: 786 - protein, 255 aa, Silicibacter pomeroyi DSS-3
MPLEIVTVPCLSDNYAYLIHDADAGKTALVDAPEAAPIQSELDRRGWSLDQVWLTHHHWDHVDGLAALRDRYKPTVIGAEADAHRLPPLDLAVSEGDRFDLGGAPVEVLDVSGHTVGHIAFHLPTGKAVFTADSLMALGCGRLFEGTPDQMWASLSKLAALPDDTLVCSGHEYTQSNARFALSVDPDNAALKTRAAEIDQARAEGRPTVPSLLSLEKSTNPFLRAADPGIQSLLGMQGADPARVFAEIRARKDHF

SEQ ID NO: 787 - protein, 241 aa, Petunia x hybrida
MGRGRVELKRIENKINRQVTFAKRRNGLLKKAYELSVLCDAEVALIIFSNRGKLYEFCSSSSMLKTLERYQKCNYGAPETNISTREALEISSQQEYLKLKARYEALQRSQRNLLGEDLGPLNSKELESLERQLDMSLKQIRSTRTQLMLDQLQDLQRKEHALNEANRTLKQRLMEGSTLNLQWQQNAQDVGYGRQATQTQGDGFFHPLECEPTLQIGYQNDPITVGGAGPSVNNYMAGWLP

SEQ ID NO: 788 - protein, 187 aa, Glycine max
  misc_feature (146)..(146): Xaa can be any naturally occurring amino acid
  misc_feature (153)..(153): Xaa can be any naturally occurring amino acid
MLHMFSKASSAMATFPCSRVKSGLCVWPDVRQLCFRKGMLYGFMRLFSTPLKTLRGASRSLRVTQFCSVANMSSSLQIELVPCLKDNYAYLLHDVDTGTVGVVDPSEAVPIIDALSRKNRNLTYILNTHHHHDHTGGNVELKARYXAKVIGSXTDKERIPGIDIHLNDGDKWMFAGHEVRVMDTPGH

SEQ ID NO: 789 - protein, 338 aa, Bacillus subtilis
  misc_feature (1)..(1): Xaa can be any naturally occurring amino acid
  misc_feature (14)..(14): Xaa can be any naturally occurring amino acid
  misc_feature (22)..(22): Xaa can be any naturally occurring amino acid
  misc_feature (25)..(25): Xaa can be any naturally occurring amino acid
  misc_feature (27)..(27): Xaa can be any naturally occurring amino acid
  misc_feature (42)..(42): Xaa can be any naturally occurring amino acid
  misc_feature (134)..(134): Xaa can be any naturally occurring amino acid
  misc_feature (238)..(238): Xaa can be any naturally occurring amino acid
  misc_feature (278)..(278): Xaa can be any naturally occurring amino acid
  misc_feature (285)..(285): Xaa can be any naturally occurring amino acid
  misc_feature (291)..(291): Xaa can be any naturally occurring amino acid
XARKLFTPITIKDXTLKNRIVXSPXCXYSSHEKDGKLTPFHXAHYISRAIGQVGLIIVEASAVNPQGRITDQDLGIWSDEHIEGFAKLTEQVKEQGSKIGIQLAHAGRKAELEGDIFAPSAIAFDEQSATPVEXSAEKVKETVQEFKQAAARAKEAGFDVIEIHAAHGYLIHEFLSPLSNHRTDEYGGSPENRYRFLREIIDEVKQVWDGPLFVRVSASDYTDKGLDIADHIGFAKWXKEQGVDLIDCSSGALVHADINVFPGYQVSFAEKIREQADXATGAVGXITDGSXAEEILQNGRADLIFIGRELLRDPFFARTAAKQLNTEIPAPVQYERGW

SEQ ID NO: 790 - protein, 251 aa, Salmonella enterica subsp. enterica serovar Typhi Ty2
MNLNSIPAFQDNYIWVLTNDEGRCVIVDPGEAAPVLKAIAAHKWMPEAIFLTHHHYDHVGGVKELLQHFPQMTVYGPAETQDKGATHLVGDGDTIRVLGEKFTLFATPGHTLGHVCYFSHPYLFCGDTLFSGGCGRLFEGTPSQMYQSLMKINSLPDDTLICSAHEYTLANIKFALSILPHDSFINEYYRKVKELRVKKQMTLPVILKNERKINLFLRTEDIDLINEINKETILQQPEARFAWLRSKKDTF

SEQ ID NO: 791 - protein, 485 aa, Oryza sativa
MFGGGGGGGRKPLDYEELNENVKKVQYAVRGELYLRASELQKEGKKIIFTNVGNPHALGQKPLTFPRQVVALCQAPFLLDDPNVGLIFPADAIARAKHYLAMAPGGLGAYSDSRGIPGIRKEVAEFIERRDGYPSDPELIYLTDGASKGVMQMLNTIIRNERDGILVPVPQYPLYSAAISLFGGSLVPYYLEEEANWGLDFVNLRQTVASARSKGITVRAMVIINPGNPTGQCLSEGNIKELLKFCFHENLVLLADEVYQQNIYQDERPFISARKVLFDMGPPMSREVQLVSFHTVSKGYWGECGQRGGYFEMTNLPPKTVDEIYKVASIALSPNVPGQIFMGLMVNPPKPGDISYLKFSAESKSILESLRRRARLMTDGFNSCRNVVCNFTEGAMYSFPQIRLPPKAIDAAKRAGKAADVFYCLKLLEATGISTVPGSGFGQKEGVFHLRTTILPAEEDMPAIMTSFKKFNDTFMDQYDGYSRM

SEQ ID NO: 792 - protein, 439 aa, Oryza sativa (japonica cultivar-group)
MESRGKILMERYELGRLLGKGTFGKVHYARNLESNQSVAIKMMDKQQVLKVGLSEQIRREITTMRLVAHKNIVQLHEVMATRNKIYFVMEYVKGGELFEKVAKRGKLTEVVAHKYFQQLISAVDYCHSRGVYHRDLKPENLLLDENENLKVSDFGLSALSESKRQDGLLHTTCGTPAYVAPEVISKIGYDGAKSDIWSCGVILFVLVAGYLPFQGPNLMEMYRKIQHGEFRCPGWFSRKLQKLLYKIMDPNPSTRISIQKIKESTWFRKGPEENRILKERTLNENTTKNVALVLGVRRKKNAHEDVKPMSVTNLNAFEIISFSKGFDLSGMFIVKEWRNEARFTSDKSASTIISKLEDVAKALNLRVRKKDNGVVKMQGRKEGRNGVLQFDIEIFEVTTSYHIIEMKQTSGDSLEYRQLLEEGIRPALKDIVLAWHGDE

SEQ ID NO: 793 - protein, 453 aa, Ralstonia metallidurans CH34
MPPGLPRLASLIADAPPDAQDNPEIPRFRCRQRPAACPDIANTAVKPIQKSHKLQNVCYDIRGPVLEKAKQMEEEGHKIIKLNIGNLAVFGFDAPEEIQQDMMRNLPNSAGYSDSKGIFAARKAIMHYTQEKKIQGVGLDDIYVGNGASELIVMAMNALLNSGDEMLVPAPDYPLWTAAVSLSGGTPVHYVCDEANEWMPDLDDIRRKITPNTRGIVIINPNNPTGALYSDELLKEIVAIAREHGLIIFADEIYDKVLYDGNTHTSIGSLSTDVLTVTFNGLSKNYRSCGYRAGWMVVSGDKRPALDYIEGLNMLSSMRLCANVPGQWAIQTALGGYQSINDLVTEGGRLRRQRDLAYELITKIPGVTCVKPKAALYLFPKLDLSMYPIQDDQEFIYELLQESKVLLVQGTGFNWGAPDHFRIVFLPHEEDLREAITRVGRFLESYRKRHGTA

SEQ ID NO: 794 - protein, 210 aa, Gerbera hybrid cv. 'Terra Regina'
MGRGKVQLKRIENKINRQVTFSKRRGGLLKKAHEISVLCDAEVALIVFSAKGKLFEYSTDSCMENILDRYEQYSNIDRQHVAVDTDSPIRWTQECNKLKSRAELLQRNLRHYMGEDIESLGLREIQNLEQQLDTALKRIHSKKNQLLHQSISELQKKEKAIQEQNNTLIKNIKEKEKTITQKAQWEPHNYGPNTTPLLFSLPPHSSLNIG

SEQ ID NO: 795 - protein, 209 aa, Bacillus thuringiensis serovar konkukian str. 97-27
MKWIQMPLGPLQTNAYILKNDQNECVIFDPGHEGEKLVTYLQEEQLKPLAVLLTHAHFDHIGAVDAVREAFHIPVYVHKEEEDWLGDATVNGSQIFMMNRSITAKPADHIIDAEGTLAIGSFNFEIFETPGHSPGSISYYCKEANAVFSGDVLFQMSIGRTDLPGGSFAELIGSIEEKLFVLPDETAVLCGHGPETSIGFEKENNPFLQ

SEQ ID NO: 796 - protein, 479 aa, Triticum aestivum
MMGRKALDYEELNENVKKVQYAVRGELYLRASELQKEGKRIIFTNVGNPHALGQKPLTFPRQVVALCQAPFLLDDPNVGLIFPADAIARAKHYLSLAPGGLGAYSDSRGIPGVRQEVAEFIQRRDGYPSDPELIYLTDGASKGVMQMLNAIIRNERDGILVPVPQYPLYSAAISLFGGSLVPYYLEEEANWGLDLVSTRQSVAEARSKGITVRAMVIINPGNPTGQCLSEANIRELLNFCYQENLVLLADEVYQQNVYQDERPFISARKVMFDMGPPVSREVQLISFHTVSKGYWGECGQRGGYFEMTNIPPKTVDEIYKVASIALSPNVPGQIFMGLMVNPPKPGDISYLKYSAESKSILESLRRRAQIMTDGFNSCRNVVCNFTEGAMYSFPQIRLPQRAMDVAKSAGKAPDVYYCLKLLEATGISTVPGSGFGQKEGVFHLRTTILPAEEDMPAIMSSFKKFNDSFMEQYQDHSRL

SEQ ID NO: 797 - protein, 323 aa, Yarrowia lipolytica CLIB122
MAGGPTLKLNSGHEIPQIGLGTWLSKPNEVAKAVESALKDGYRHIDGATIYQNENEVGAGWKASGVPREEIFLTTKNWNNARTKEGVKKQLDQSLKELQTDYVDLLLIHWPVVFKTGEELFPHNADGTVALGEVPVEETWEAFEELVKEGKVKSIGVSNFTEERIEKLLKTAKIPPAVNQIEYHPYLQQPGLAKYLASKNIVLEAYSPLGNNTYGFPRAIDDERVIDLAKKKGKDAAALIVNWIRSKNHVVLPKSVTPSRIKSNFEVFDLSPEEIKFLDSLDEESRRNDPIEWGVDIFGTATPEEIKKRVDEAAKKYLAEQKK

SEQ ID NO: 798 - protein, 485 aa, Gluconobacter oxydans 621H
MKFRSGLLLGTAFLAGLAVGPGALRLAGSGDFPGAALAREISHDNSAETVRLLTLLGTVMDVVKAEYVHPVSDKDLINNALDGMVGNLDPHSSYMTAAQFHDMQTEISGKFGGLGLQVQGESGHVRVVSPIDGTPAARAGIQPGDFITMVDHKSIDDLTLDQAVRKMRGDPGTKISLTIVRPKTGKTLTFDMTREIVHVQIVKSALYGSTGYIRLTEFDDDLESAMHAAFDKLKAQATKASGGKLTGIILDLRSNPGGKLDQAIAVSDDFIKDGEIVSIRGRHAENNQRWDAKGTDITNGLPIVVLTNGGSASASEIVAGALKDHHRAIILGEKTFGKGSVQTLIPIGDQGAVRLTTARYYTPSGRSIQGLGITPDIPVAETKDDDAYGYREADLSHILTNIGGNRTNETPRTDIPPIAKSIPKMPDASWPAFDATKPATDFQLQQAIKVINAMAGLSNPAPATAPATEVKAAAPTAPKPPEAHH

SEQ ID NO: 799 - protein, 670 aa, Bacteroides fragilis NCTC 9343
MEKTLNLIKNDPWLEPYKDAIVGRFEHAMDKKAELTNGGKSTLSDFASGYLYFGLHRTDKGWIFREWAPNASHIYMVGTFSNWEEKPAYKLKRLKNGSWEIKLPIDTIQHGDLYKLHVYWEGGQGERIPAWANRVVQDDNTKIFSAQVWAPEKPFKFKKKTFKPSTDPLLIYECHIGMAQQEEKVGTYNEFREKILPRIAKEGYNCIQIMAIQEHPYYGSFGYHVSSFFAASSRFGTPEELKQLIDTAHGLGIAVIMDIVHSHAVKNEVEGLGNFAGDPNQYFYPGGRREHPAWDSLCFDYGKNEVMHFLLSNCKYWLEEYHFDGFRFDGVTSMLYYSHGLGEAFCNYGDYFNGHQDDNAICYLTLANELIHEVNPKAITIAEEVSGMPGLAAKVEDGGYGFDYRMAMNIPDYWIKTIKEKIDEDWKPSSMFWEVTNRRQDEKTISYAESHDQALVGDKTIIFRLIDADMYWHMQKGDENYIVHRGVALHKMIRLLTASTINGGYLNFMGNEFGHPEWIDFPREGNGWSCKYARRQWDLVDNKNLTYHYLGDFDADMLKVIKSVKNIQQTPVQEIWHNDGDQVLAYQRKDLVFVFNFNPSQSFTDYGFLVTPGTYEVVLNTDNIIYGGNGLSDDSVKHFTLPDPLYKKEKKEWLKLYIPARTAMVLRRTK

SEQ ID NO: 800 - protein, 312 aa, Saccharomyces cerevisiae
MPATLKNSSATLKLNTGASIPVLGFGTWRSVDNNGYHSVIAALKAGYRHIDAAAIYLNEEEVGRAIKDSGVPREEIFITTKLWGTEQRDPEAALNKSLKRLGLDYVDLYLMHWPVPLKTDRVTDGNVLCIPTLEDGTVDIDTKEWNFIKTWELMQELPKTGKTKAVGVSNFSINNIKELLESPNNKVVPATNQIEIHPLLPQDELIAFCKEKGIVVEAYSPFGSANAPLLKEQAIIDMAKKHGVEPAQLIISWSIQRGYVVLAKSVNPERIVSNFKIFTLPEDDFKTISNLSKVHGTKRVVDMKWGSFPIFQ

SEQ ID NO: 801 - protein, 225 aa, Glycine max
  misc_feature (200)..(200): Xaa can be any naturally occurring amino acid
SGIKQRLLSFIFQGLWNEERDDTLRIQRLRKKFYFHFQDYVDLIIWKVQFLDRHHLLIKFGSVDGGVSRNADHHPAFVAVYNMDTTEIVSFYQNSADELYLLFEQFCDHFHATSRNSMYMNFISSHSNNIHALEQLRSIKDKASSSAQFVKKMLASLPFSCQSQSPSPYFDQSLFRFDDKLISATDRHRQSTDHPIKFIXGGPEAGSMDGRAKKNSSFLFIQFWP

SEQ ID NO: 802 - protein, 512 aa, Schizosaccharomyces pombe
MNSKDSNTVPVYTTNTGCPIFNPMAAARVGKGGPVLLQDSHLIDVFQHFDRERIPERVVHAKGSGAFGEFECTDDITKYTKHTMFSKVGKKTPMVARFSTVGGERGTPDTARDPRGFALKFYTDEGIFDMVGNNTPVFFLRDPAKFPLFIHTQKRNPQNDMKDATMFWDYLSQNAESIHQVMILFSDLGGTPYSYRFMDGFSSHTYKFVNDKGEFYYCKWHFITNQGTKGLTNEEAAALDGSNPDHARQDLFEAIERGDYPSWTLYVQVMTPQEAEKYRYNIFDLTKVWPHKDVPMQRVGRFTLNQNPTNFFADIEQAGFSPSHMVPGIEVSADPVLQVRTFSYPDTHRHRLGANFEQIPVNSPKCPVFNYSRDGPMNVNGNQGNWPNYPSSIRPLAKVQYEPDEGHEKWVGQVTYHMDEITDVDFEQPRAFWQNVLGKKPGQQDNFVKNVAGHLSGAISPVRERQYGVFTRVDSELGRRIREATEAEVKKMEEKAPKPINKGEPHMFQGSS

SEQ ID NO: 803 - protein, 270 aa, Exiguobacterium sp. 255-15
MQYAKLSNGVTIPQIGFGVWQVDEETEAPAAVAEALRVGYRHIDTAAVYKNERGVAKGIKESGVNREDLFLTSKVWNDDIRAGRTKEAFAESLERLETDYLDLYLIHWPVEGYIEAWKAMVELYEAGKIKAIGVSNFKEHHLDTLAEEGLMTPMINQVELHPQLPQHELHEYLQDHSIQVEAWSPLMQGKFLEINDFKEIAEKHGKSPSQVVLRWHLDNGIVALPKSVTPERIAENFDVFDFQLDADDLEKIDRLATDVRLGPDPDEIDF

SEQ ID NO: 804 - protein, 504 aa, Vibrio parahaemolyticus
MQMSKSFLLITVGLASTSLQAQTLTRDNGAPVGDNQNSITAGENGSVLLQDVHLIQKLQRFARERIPERVVHARGTGAHGEFVASGDFSDLTVSAPFTEKGKVTPVFVRFSTVIHSKGSPETLRDPRGFATKFYTEQGNWDLVGNNLPVFFIRDSIKFPDMVHSLKPSPVTNVQDPNRFFDFFSHEPSATHMLTWVYSNLGTPASYRTMDGFGVHAYKWINQQGDVNYVKFQWKSQQGIKSLRPNKVTEMQGKDFNHLTNDLYAAIGRGNYPKWDLYVKVLSPEALSKLDYNGLDATKVWLNVPDRKVGTMTLNRLPENFFLETEQSAFAPSNLIPGIEPSEDRLLQGRLFAYADTQLYRLGANLFQLPVNRPLTSVNNHNQNGLSNNAQLSNGDVNYEPSRKLNLAEDNQFKAVETKLVGTVQQKAISKPRDFYQAGVLYRSMNEQDRSDLIANLAGDLNKVIDKDIKATMVSYFYRADKEYGSRLAEATDTNLSQVKNKAMM

SEQ ID NO: 805 - protein, 392 aa, Barnebya dispar
DLEPVNPADVPVTAAGALKSYKFAAKAISRLQSLPSGNIFLLCDVLVKEVRDLTGYDRVMVYKFHEDEHGEVVSECRRSDLESYLGLHYPATDIPQASRFLFMKNKLRMICDCLAPPVKVIQDENLPQPLSLCGSTLRSPHGCHAQYMTNMGTIASLVMSVTINEDDDMKDCEQPQMPRKLWGLVVCHHTSPRFIPFPLRYACEFLIQVFGVQINKEVELAAQVREKHILRIQTLLCDMLLRDAPVAIITQSPNVMDLVRCDGAALYYKNKFWLLGVTPTEAQIRDIAEWLLECHSGNTGLSTDSLMEAGYPGASVLGDAVCGMAAISITSRDFLFWFRSHTAKEIKWGGAKHDPDDKDDGRKMHPRSSFKAFLEVVKWRSLPWEDVEMDAI

SEQ ID NO: 806 - protein, 206 aa, Symbiobacterium thermophilum IAM 14863
MQLWHRALGAFMANCYIVACGETRQALVIDPGVPDPWIQSCVMENDLTVVGIVLTHGHLDHIGGVDWVKGWSGAPVAIHEADADCLTSPARNGSLYFGMTVQASPADRLLRDGDEVEAGGLRFRVIHTPGHSPGGICLYRPGHLLAGDTLFAGSIGRTDLPGGDYHTLIQSIKERLLTLPPDTAVYPGHGPSTTIGDEKAYNPFLA

SEQ ID NO: 807 - protein, 377 aa, Oryza sativa
MGRDKARRLSGSRHFRQRVVLATLTSTAITIDDIRSGGAAPGLRPHEVSLLHLLHKISDHHSLDLNETGTKLRYKPGVIVGGRDLEHDCGVHRGIGYFLEPLILLGLFARAPISIRLKGITNDTKDPSVDTFRMVTLHMLKQFGVPLEGLELKIESRGAPPLGGGEVFLRVPNIKSTLKAANWADEGMVKRIRGVSFSTRVSPQIENRIIYAARGIFNRFIPDVHIFTDHRSGSAGGRSAGYGVSVVAETTTGCLLSADATVSYPNVDEMNEESENLELTSPEDLGVQVASMLLEEVAQGGVVDSAHQGLLFILCALSPPDVSKVRVGQLTPYAIETLRNIRDFLDVKFIIKPDPNSNTVTLKCVGAGVKNLARKTS

SEQ ID NO: 808 - protein, 392 aa, Blepharandra heteropetala
DLEPVNPADVPVTAAGALKSYKLAARAISRLQSLPSGNISLLCDVLVKEVRDLTGYDRVMVYKFHEDEHGEVISECRRPDLEAYLGLHYPATDIPQASRFLFMKNKVRMICDCLAPAVKVIQDERLPQALSLCGSTLRSPHGCHAQYMANMGTIASLVMSVIINEDNDMMDGDQQHIARKLWGLVVCHHTSPRFVPFPLRYACEFLIQVFGVQINKEVELAAQVREKHILRTQTLLCDMLLRDAPVAIITQSPNVMDLVKCDGAALYYRKKFWLLGVTPTEVQIRDIAEWLLEYHGGNAGLSTDSLMEAGYPGASDLGNAVCGMAAVRITSRDFLFWFRSHTAKEIKWGGAKHHPNDKDDVRKMHPRSSFKAFLEVVKWRSLPWEDIEMDAI

SEQ ID NO: 809 - protein, 459 aa, Clostridium perfringens str. 13
MKYTFPENFWWGAATSGPQSEGRFNKKHDNVFDHWFDINPELFHNGIGPNIASNFYNSYKEDLAMLKEIGLNSFRTSIQWTRLIKDFETGEPDEDGVRFYNGVIDECLANGIDIIMNLHHFDLPVELYDKYGGWESKHVVELFAKFAKTAFSLFGDRVKKWATFNEPIVIIEGQFLYKWHYPCIVDGKRGLQAAYNIALASARAIEEYRKLGQDGEIGIIVNLTPAYPRSESKEDLRAAEIANAFFNELFLDPATKGEFPKKLVEVLEKDGVMWNSTKEELEVIKNNTVDFLGVNYYQPRRVKDREEEYGGETWAPEKYFDNYDMPGKRMNPHRGWEIYPKAIYDIAKNVQENYGNIKWFISENGMGVEGEEKFKNAEGIIEDDYRIEFIIEHLEWLHKAIEEGSNCVGYHLWTPIDCWSWLNSYKNRYGFISLDLETQKKTIKKSGRWIKEVSKNNGF

SEQ ID NO: 810 - protein, 711 aa, Debaryomyces hansenii CBS767
MSLSTGSTGSERSNQSLIKGALDLDPWLEPFSGQLIHRQLNLRKWYDEFKQNEGSLTNFASAYEKYGLHANWDTKEVFINEYIPNVVEVSLVGDFNNWDTNTHKLKPVNDFGLWSLTIKPTENNEFAVPHDSRYKISMVTASGERIYRLCPWLKRATPSTENNLYEGRFWNPQPTETYKFKHERPRLESKDGIKIYEAHVGISTPEPKVGSYKNFTTKVLPVIHKLGYNTIQLMAVMEHAYYASFGYQVTNFFAISSRFGTPEDLKELIDEAHRLGIRVLLDVVHSHSSKNVEDGLNMFNGTDHYLFHGGTKGSHELWDSRLFNYSNYETLRFLLSNLRFYIDVFKFDGFRFDGVTSMLYKHHGLSFGFSGDYNEYFNSEWVDNDAITYLMLGHKLLDEISVRENNYKFVSIAEDVSGMPTLCLPIGQGGIGFDYRLSMAIPDMWIKIIKHLSDEEWDMGSLVHTLTNRRHGERCISYCESHDQALVGDKTIAFWLMDKEMYTNMSTLTPFTPVIDRGIALHKMIRLITFSLGGEGYLNFEGNEFGHPEWLDFPRKGNGESYAYARRQFNLIEDDLLRYKFLFAFDGAMQHLDTKYGILLSSQAYVSLKNENDKVIVFERNGLLFIFNFHPTNSYADYKIGVETPGVYQIVLNSDSLSFGGHGRIEETNKETGEKLQFFTNNERWNDRSNALFCYIPSRTAIVLQVKEKVV

SEQ ID NO: 811 - protein, 392 aa, Blepharandra heteropetala
DLEPVNPADVPVTAAGALKSYKLAARAISRLQSLPSGNISLLCDVLVKEVRDLTGYDRVMVYKFHEDEHGEVISECCRPDLEAYLGLHYPATDIPQASRFLFMKNKVRMICDCLAPAVKVIQDERLPQALSLCGSTLRSPHGCHAQYMANMGTIASLVMSVIINEDNDMMDGDQQHIARKLWGLVVCHHTSPRFVPFPLRYACEFLIQVFGVQINKEVELAAQVREKHILRTQTLLCDMLLRDAPVAIITQSPNVMDLVKCDGAALYYRKKFWLLGVTPTEVQIRDIAEWLLEYHGGNAGLSTDSLMEAGYPGASDLGNAVCGMAAVRITSRDFLFWFRSHTAKEIKWGGAKHHPNDKDDVRKMHPRSSFKAFLEEVKWRSLPWEDIEMDAI

SEQ ID NO: 812 - protein, 495 aa, Arabidopsis thaliana
MRLIVPLRGVIQGRGGLFVGSLIPCCLFYFLQLYLKRRRPPPSDPTDLPRTFSRTNLFSRGNSIGRVRVSSRAVPVAKPSDSPYYIGLERVKTDPYDRITNTDGIIQLGLAESTLCFDLLQRWMSENLMESMMQSDDGEFDISSIAMYKPFEGLLELRVAFADFMSRIMGGNVSFDPSNMVITAGGTPAIEVLAFCLADHGNAFLIPTPYYPGFDRDIKFRTGVELIPVHCRSSDNFTVTVSALEQALNQARKRGSKVSGILFSNPSNPVGNILSRETLCDILRFAQEKNIHVISDEIFAGSVYGDKEFVSMAEIAGSGEFDKTRVHIIYGLSKDLSIPGFRAGVIYSFHEDVVNAAKKLMRFSSVPVLVQRILISLLSDVRFIEGYMAAHRQRIRDKHIRFVEGLKQLGIPCAESGGGLYCWVDMSSLLTSYSEKGELELFEKLLTVAKINATPGTACYCIEPGWFRCCFTALADEDIPVIMERIRQLAESFRS

SEQ ID NO: 813 - protein, 392 aa, Blepharandra heteropetala
DLEPVNPADVPVTAAGALKSYKLAARAISRLQSLPSGNISLLCDVLVKEVRDLTGYDRVMVYKFHEDEHGEVISECCRPDLEAYLGLHYPATDIPQASRFLFMKNKVRMICDCLAPAVKVIQDERLPQALSLCGPTLRSPHGCHAQYMANMGTIASLVMSVIINEDNDMMDGDQQHIARKLWGLVVCHHTSPRFVPFPLRYACEFLIQVFGVQINKEVELAAQVREKHILRTQTLLCDMLLSDAPVAIITQSPNVMDLVKCDGAALYYRKKFWLLGVTPTEVQIRDIAEWLLEYHGGNAGLSTDSLMEAGYPGASDLGNAVCGMAAVRITSRDFLFWFRSHTAKEIKWGGAKHHPNDKDDVRKMHPRSSFKAFLEVVKWRSLPWKDVEMDAI

SEQ ID NO: 814 - protein, 392 aa, Caucanthus auriculatus
DLEPVNPADVPVTAAGALKSYKLAAKAISRLQSLPSGNISLLCDVLVKEVRDLTGYDRVMVYKFHEDEHGEVVSECHRSDLESYLGLHYPATDIPQASRFLFMKNKVRMICDCVAPPVKVIQEERLPQPLSPCGSTLRSPHGCHAQYMTNMGIIASLVMSVTVNEEDDMVDGDQPQMARKLWGLVVCHHTSTRFVPFPLRYACEFLIQVFGVQINKEVELAAQVREKHILQIQTMLCDMLLRDAPVAIITQSPNVMDLVKCDGAALYFKNKTWLLGVTPTEEQIRDIAEWLPEYHSGNTGLSTDSLMEAGYPGASALGDAVCGMAAVSITSRDFLLWFRSHTAKEIKWGGAKHDPDDKDDGRKMHPRSSFKAFLEVVKWRSMPWEDVEMDAI

SEQ ID NO: 815 - protein, 410 aa, Medicago truncatula
MNHECKATSTITIKGILSLLMESVGENNDDNSKRVISLGMGDPTLSTCFPNAKVAEEAVADALCSGNFHGYAPTAGLLQARNAIAKYLSDDLPYELSSDDVFITCGCTQAIDVSVALLSRPGANILLPRPGFPIYELCAAFRQVEVRHYDLLPEKGWEVDLDAIETLVDQNTVALVIINPGNPCGNVYTYHHLEKIAETAKRLGTIVIADEVYGHLAFGDNPFVPMGVFGSTVPVITLGSLSKRWIVPGWRLGWFVTNDPSGTFRKPKVVERIKKYFDLLGGPATFIQAAVPRIITQTEEVFFRKTIDKLRHTADICCQEMEDIPCISFPCKPQGSMAMMVELNLSLLEDISDDIDFCFKLAKEESVIILPGTAVGLKDWIRITFAADPSALRDGMQRIKSFSQRHARKQ

SEQ ID NO: 816 - protein, 111 aa, Zea mays
MARYFRSSNLASRIFDRQLISPLPGATVNTIRQFYENLVPSYTIYDIDCPDYSFRKFTDDGKYLVAFSRNHQDLIVYRPIWVTYSCNEECETHELPPKAKKFDSFFKQLYS

SEQ ID NO: 817 - protein, 478 aa, Staphylococcus aureus subsp. aureus Mu50
MTKLPQNFMWGGALAANQFEGGYEKGGKGLSVIDVMTSGAHGKARQITESIDLNHYYPNHEGIDFYHRYKEDIALFKEMGLKCLRTSIAWTRIFPNGDEDVPNEEGLAFYDRIFDELIAQGIEPVVTLSHFEMPLHLAKHYGGFRNREVVDYFVHFARVVFERYKDKVTYWMTFNEINNQMDTSNPIFLWTNSGVALTENDNPEEVLYQVAHHELLASALAVRLGKEINPKFKIGTMISHVPIYPYSCHPKDMMEAQIANRLRFFFPDVQVRGYYPSYAKKMLARKGYDVGWQEGDDSILQQGTVDYIGFSYYMSTAVKHDVDTTVENNIVNGGLNHSVENPHIATSDWGWAIDPDGLRYTLNVLYDRYQLPLFIVENGFGAVDEVVDGHIHDDYRIEYLKAHITAAIEAVDQDGVDLIGYTPWGIIDIVSFTTGEMKKRYGLIYVDRDNDGHGTMERLKKDSFYWYQQVIASNGDKL

SEQ ID NO: 818 - protein, 636 aa, Rhodopseudomonas palustris CGA009
MAGKLRIRSRLRLLARRHPRITMAGRAVMAFSAGFGGAYGLLLGSNPETSGYDPHAFAVGASFLFALACLALAVQTMRLRRMRGRLRLLTASQEPPPDLQPNQSKTRALIAARESADAANHAKSRLLAMASHEIRTPLNGIIGMSRLLLDTPLSAEQATYAKAVKTSGEALLALTDELLDYARIEAGKIELDCRPFVLSSLIEDIIELLAPRAQARGLEIAADIDERLPVSLIVDAARLRQVLLNLCGNAIKFTETGGVALIVERGDQSGELRIIVRDTGIGIAPDAQARIFHEFEQADAGIARNFGGTGLGLSISDRIVAAMGGRIALESKPGEGSTFTITLPLSTAENDRATAAFAPPDLHGSSVMIVSAHGVEASLAARRLERWGAETCLCDDLAAAIARLPERSWHAVLIDHALGSDAIETLAREAQARATHRLVMLTPAARHELLPDLPAAFTGYLVKPLRSASLAARLGTAVEVATPSIADGDPPPVQDASSAITHEAFAILVAEDNDINALLIRALLHRLGHHAEIVGDGRRAVEAWGAADNTGTPFDLVLMDVQMPILDGLAAARQIRTLEAERARSRVPILALTANTLAEDREACLESGMDGFLVKPIDPDRLAAILAGVAAAHQAA

SEQ ID NO: 819 - protein, 207 aa, Elaeis guineensis
MGRGRVELKRIENKINRQVTFAKRRNGLLKKAYELSVLCDAEVALIIFSNRGKLYEFCSSSSMMKTLERYQKCNYGAPETNIISRETQSSQQEYLKLKARAEALQRSQRNLLGEDLGPLSSKELEQLEGQLDASLKQIRSTRTQYMLDQLADLQRKEQMLCEANKSLRRRLEESNQAGQQQVWDPTAHAVGYGGSHLNHRAMDSTNR

SEQ ID NO: 820 - protein, 224 aa, Elaeis guineensis
  misc_feature (62)..(62): Xaa can be any naturally occurring amino acid
  misc_feature (126)..(126): Xaa can be any naturally occurring amino acid
  misc_feature (199)..(199): Xaa can be any naturally occurring amino acid
MGRGKIEIKRIENTTNRQVTFCKRRNGLLKKAYELSVLCDAEVALIIFSSRGRLYEYANNSXKATIERYKKHVLDTSNSGSVSEADSQYYQQESLKLRQQITSLQNSNRNLMGDSLGSMSLRDLKXLEGRLEKGINKIRTKKNELLFAEIEYMQKRETELQNANMYLRNKIAENEGAQQQMNMLPATTEYEVMPPYDSXNFLQVNLMQSNQHYSHQQQTALQLG

SEQ ID NO: 821 - protein, 562 aa, Saccharomyces cerevisiae
MNVFGKKEEKQEKVYSLQNGFPYSHHPYASQYSRPDGPILLQDFHLLENIASFDRERVPERVVHAKGGGCRLEFELTDSLSDITYAAPYQNVGYKCPGLVRFSTVGGESGTPDTARDPRGVSFKFYTEWGNHDWVFNNTPVFFLRDAIKFPVFIHSQKRDPQSHLNQFQDTTIYWDYLTLNPESIHQITYMFGDRGTPASWASMNAYSGHSFIMVNKEGKDTYVQFHVLSDTGFETLTGDKAAELSGSHPDYNQAKLFTQLQNGEKPKFNCYVQTMTPEQATKFRYSVNDLTKIWPHKEFPLRKFGTITLTENVDNYFQEIEQVAFSPTNTCIPGIKPSNDSVLQARLFSYPDTQRHRLGANYQQLPVNRPRNLGCPYSKGDSQYTAEQCPFKAVNFQRDGPMSYYNFGPEPNYISSLPNQTLKFKNEVNDEVSDKFKGIVLDEVTEVSVRKQEQDQIRNEHIVDAKINQYYYVYGISPLDFEQPRALYEKVYNDEQKKLFVHNVVCHACKIKDPKVKKRVTQYFGLLNEDLGKVIAEGLGVPWEPVDLEGYAKTWSIASAN

SEQ ID NO: 822 - protein, 427 aa, Synechocystis sp. PCC 6803
MGKRTRRFWALAFSLLMGALIYLGNTPSALAFTEEQKLLLQSWRLVNQSYLDETFNHQNWWLLREKYVKRPLRNREETYTAIEEMLATLDEPFTRLLRPEQYGNLQVTTTGELSGVGLQININPETNQLEIMAPLAGSPAEEAGLQPHDQILAIDGVDTQTLSLDEAAARMRGPKNTKVSLEILSAGTEVPQEFTLTRQLISLSPVAAQLDDSRPGQSVGYIRLSQFSANAYKEVAHALHQLEEQGADGYILDLRNNPGGLLQAGIDIARLWLPESTIVYTVNRQGTQESFTANGEAATDRPLVVLVNQGTASASEILAGALQDNQRATLVGEKTFGKGLIQSLFELSDGAGIAVTVAKYETPQHHDIHKLGIMPDEVVEQPLISFAEITSPADVQYQAALDLLTGGVAIAHKSSSIPAMATAHKPN

SEQ ID NO: 823 - protein, 663 aa, Yarrowia lipolytica CLIB122
RRQKRVERASAAPKNHCSNTKLCERLHHHYPHLSIRQLATSPKAVVSLFATQPKSHRHKDPCSCFSSTFSKLLPTTLTNIMSNTLVKKGQGQAASNAKKIGYNKKKGGGQTKGRPAFVFKLWNMVNDPAYDEYIRWMPDGKSFQITGREQLEKIVLPRFFKHNNFSSFVRQLNMYGWHKVQDVTSGSMQSNDEVWQFKSPNFIRGREDLLDNIVRNKGTKGSDEEEEMDMTTLMDELQQIKLNQLNLTQEVNKLRTDNQLLWQENLGFKDKHKQHGETLERIMRFLASLYGNQGKVLGEAISGNRNQRLLLGNTDPAQATHMINEAAAAAAAENSGNFPFEMNDMFNNNNNNNNNSNNPNDSPSFARVQPLSSTNSPQTVTGSPREENNKTNNTNNTSNNYDKITAYDTDTGSELPDNLQDLTDLSDFTPSMLDPQTVQQSMEPPMGFGDLNKNSSLILSNNSNNSINMPQTPMRNNSTSSHSSQNMSHHNYNYQPSTPGALFPELEAFQGANDQLIRSAERPRNNLNINGNGKADDLQRQLQDHGRHIDQFTDRLKKQQGYQPQQLQHQQQPQQPQQQPTPMQAPAPTPASTISSAPTPDPTSDLFNVGDPNIVPMQDFNMDDYIDNEADMFDPEVKIEEDMPLVTELDSPAPRPKKRKAGE

SEQ ID NO: 824 - protein, 701 aa, Xanthomonas campestris pv. campestris str. ATCC 33913
MAKSPSKPAQIPSVGSSASAHELRGTGDELHQKAGGSHPQLTTNQGIPVGDNQNSLRATPRGPTLLEDFILREKITHFDHERIPERIVHARGSAAHGYFELTKSLSQYTTAKLLTEVGEKTPLFTRFSTVAGGAGSVDTPRDVRGFAVKFYTKEGNWDLVGNNIPVFFIQDAMKFPDLIHAVKMEPDRGFPQAASAHDTFWDFISLTPESMHMIMWAMSDRTIPRSLRMIEGFGIHSFRLLNENGDSTFVKFHWRPKLGLQSTIWDEAVKLAGADPDFQRRDLFEAIQKGDFPEWELGVQLFTEAEAEAFPFDHLDSTKVIPEELVPLQIVGRMVLDRWPDNFFAETEQVAYCPANIVPGIDFSNDPLLQGRLFSYLDTQLSRLGGPNFHQIPINAPKCPFANNQRDGHMQMGVPKGRVAYEPSSLQADAPREALRGFPSHATPAEDGAKGRVRAESFADHYSQARMFFRSQTAPEQAHLASALVFELSKVETAHVREAIVGHLRHIDEALAKRVADGMGMTSLPPAPPAAVAPTDMQLSPALQLIGKMKDTLQGRTVGILIHDGSDAAAIKAVRKAAEAAGATVKIVAPKLGGAKLSDGKQLAADGQLAGTPSIVFDAVAVLLSSEAAKALTRESAALDFVSNAWAHLKAIAFDDGAQLLLKAGNVGKDPGVVDAADTKAFITAAKTRQWAREPKVRMLA

SEQ ID NO: 825 - protein, 560 aa, Caulobacter crescentus CB15
MLVVTRRSRAARLIATAMVGGLLFFYLGWTALIVWLVANTICELWVVYLERAYRPHWGQGVIRFMRIGPPSAFAMVWSFMSAYCVLNGPMAMRYAALLILFGIVVEGVRYAMNSLAAMLSLTVWPFLMLAALPLLAKRFDLLDRLAAFAILLGLIGYVADAVRTMRASAKAREEAEAQALEASRAKSAFLAMMSHELRTPMNGVLGLAHALRGTKLDAQQSEYLEMIEQSGHGLMTILNDILDLSKIEAGKLNLEVAPFDLRKLALQTRAVWSESARLKGLDLILEVSPSAPPWVSGDATRVRQILMNLVSNALKFTESGRVVIRLGGEAGGVVTLSVTDTGVGMTAEQIGRLFTPFAQGDASIARRFGGTGLGLSICRQLAELMAGEIIVSSEPGVGSTFTVRLGLPAAAPLVAAPARAAVTQLDGARVLVVDDNLVNQTVARTILEAVGAAVAVAGDGHAALARLRIEDFDVVLMDVHMPGMDGVEAVRRIRAGEAGRTDLPVVALTADAMVGDAERLLAQGFDDAHPKPVQPAGLLATVASLRKAPTELQRLRAVGM

SEQ ID NO: 826 - protein, 392 aa, Caucanthus auriculatus
DLEPVNPADVPVTAAGALKSYKLAAKAISRLQSLPSGNISLLCDVLVKEVRDLTGYDRVMVYKFHEDEHGEVVSECHRSDLESYLGLHYPATDIPQASRFLFMKNKVRMICDCVAPPVKVIQEERLPQPLSLCGSTLRSPHGCHAQYMTNMGIIASLVMSVTVNEEDDMVDGDQPQMARKLWGLVVCHHTSTRFVPFPLRYACEFLIQVFGVQINKEVELAAQVREKHILQIQTMLCDMLLRDAPVAIITQSPNVMDLVKCDGAALYFKNKTWLLGVTPTEEQIRDITEWLLEYHSGNTGLSTDSLMEAGYPGASALGDAVCGMAAVSITSRDFLLWFRSHTAKEIKWGGAKHDPDDKDDGRKMHPRSSFKAFLEVVKWRSMPWEDMEMDAI

SEQ ID NO: 827 - protein, 634 aa, Citrus sinensis
MESCDCIDTQWPPDELLVRYQYISDILIALAYFSIPVELIYFVQKSAFFPYRWVLMQFGSFIILCGLTHFISLWTFTVHSKAVAVVMTIAKMACAFVSCITALMLVHIIPDLLSVKTRELFLKNRADELDREMGLILTQEETGRHVRMLTHEIRSTLDRHTILKTTLVELGRTLGLEECALWMPSRTGLNLELSYTLNNQIQIGSSVPINLPIVTDVFNSAQAMRLPYNCPLARIRLLVGRYVPPDIVAVRVPLLHLSNFQINDWPELPAKSYAVMVLMLPTDGGRKWRDHELELIDVVADQVAGALSHAAILEDSMRARNQLMGQNVALDSARREAEKAIHARNDFRAVMNHEMRTLMHAIIALSSLLLETDLTPEQRVMIETVLKSSNLLTTLVDDVLDLSRLEDGSLELDNGPFNLQIVLREVIKLIKPVASCKKLSMTLIMAPELPTYAVGDEKRLMQTILNIVGNAVKFTKEGYVSIIAFVAKPESLSDWRPPKFYPVSTDGHFYLRVQVNDSGCGVPPQDIPLIFTKFAQSRGSSCQTPRAGLGLAICRRFVNLMGGHIWLESEGLDKGSTVTFLVKLGICNNPGSPIHPVALKGRASHGSADLTGPKPLFRDNDQIASTKSRYQRSV

SEQ ID NO: 828 - protein, 392 aa, Caucanthus auriculatus
DLEPVNPADVPVTAAGALKSYKLAAKAISRLQSLPSGNISLLCDVLVKEVRDLTGYDRVMVYKFHEDEHGEVVSECHRSDLESYLGLHYPATDIPQASRFLFMKNKVRMICDCVAPPVKVIQEERLPQPLSLCGSTLRSPHGCHAQYMTNMGIIASLVMSVTVNEEDDMVDGDQPQMARKLWGLVVCHHTSTRFVPFPLRYACEFLIQVFGVQINKEVELAAQVREKHILQIQTMLCDMLLRDAPVAIITQSPNVMDLVKCDGAALYFKNKTWLLGVTPTEEQIRDIAEWLLEYHSGNTGLSTDSLMEAGYPGASALGDAVCGMAAVSITSRDFLLWFRSHTAKEIKWGGAKHDPDDKDDGRKMHPRSSFKAFLEVVKWRSMPWEDVEMDAI

SEQ ID NO: 829 - protein, 392 aa, Diacidia ferruginea
DLEPVNPADVPVTAAGALKSYKLAARAISRLQSLPSGNISLLCDVLVKEVRDLTDYDRVMVYKFHEDEHGEVISECCRPDMEAYLGLHYPATDIPQASRFLFMKNKVRMICDCLATPVKVIQDERLPQPLSLCGSTLRSPHGCHAQYMANMGAIASLVMSVTINEDDDMMDGDRQHRARKLWGLVVCHHTSPRFLPFPLRYACEFLIQVFGVQINKEVELAAQVREKHILRTQTLLCDMLLRDAPVAIITQSPNVMDLVKCNGAALYYKKKFWLVGLTPTEAQIRDIAEWLLEYHNGNTGLSTDSLMEAGYPGASELGDTVCGMAVVKITSRDFLFWFRSHTAKEIKWGGAKHDPDDKDDGRKMHPRSSFKAFLEVVKWRSLPWEDIEMDAI

SEQ ID NO: 830 - protein, 337 aa, Sulfolobus solfataricus
MIEIDGSFGEGGGQILRTSLTLSVITGKPFRIFNIRANRPNPGLQRQHLWAVRAMKMISNAETKGDEVGSKELTFIPHEIKGNSIIDIDIGTAGSVTLIMQTMIPAIINKNMRIKIKGGTDVPKSPTIDYIRLVYLEILRKIGIESKVNLIKRGHYPEGGGEVIIENVNGNPSDFSLLELGKLIMIKGISHVSSLPSHIAERQKDSAKAILSKLGVQIEIETDVRQGEVSKGSGIALAAIGEKSIIGADSLGERGKRAEIVGEEAARKLIDNLNTKAAVDVHMSDMLMIFTSLFGGEYIGAELTSHAYTNMEIIRKFLDVKIEISGKRPFRFKAKIF

SEQ ID NO: 831 - protein, 691 aa, Sorghum bicolor
MSAVSSSSLCGGDPAMRSVVWFRRDLRVEDNPALAAAARAGGEVVPAYVWSPEEEGPYYPGRVSRWWISQSLKHLDASLRRLGAGKLVTRRSADAVVALLQLVRDTGATHVYFNHLYDPISLVRDHRLKEMLAAEGIVVQSFNADLLYEPWEVVDDERQPFTMFTAFWNRCLSMQYDPPAPLLPPKKINSGDLSMCPSEDLIFEDDSERGSNALLARAWTPGWQNADKALTAFLNGPLADYSVNRKKADSASTSLLSPHLHFGELSVRKVFHLVRMKQLVWSNEGNHAAEESCTLFLRSIGLREYSRYLSFNHPSSHERPLLAHLRFFPWVVNESYFKIWRQGRTGYPLVDAGMRELWATGWLHDRIRVVVSSFFVKVLQLPWRWGMKYFWDTLLDADLESDALGWQYITGSLPDSRELDRIDNPQFEGYKFDPHGEYVRRWIPELVRLPTEWIHHPWDAPVSVLQAAGIELGSNYPLPIVELDAAKARLQEALSEMWQLEAASRATMNNGMEEGLGDSSEVPFPEELQMEVDRATANVVMTVRRREDQMVPTMTSSLNRAETEVSADLGNSEDTRAQVPFHAHFHPRVEREDMIQNTEGPALRINGTHQHNIFQQPQNHRREALAPSVSEASSSWTGREGAVVPVWSPPAASGHSETFAADEADVSSRSYLDRHPQSHRLMNWSQLSQSL

SEQ ID NO: 832 - protein, 392 aa, Dinemandra ericoides
DLEPVNPADVPVTAAGALKSYKLAAKAISRLQSLPSGNIPLLCDVLVKEVRDLTGYDRVMVYKFHEDEHGEVVSECRRSDMESYLGLHYPATDIPQASRFLFMKNKVRMICDCLSPPVEVIQDERLPQPLSLCGSTLRSPHGCHAQYMANMGTIASLVMSVTVNEDDDMMDGDQQRMARKLWGLVVCHHTSPRFVPFPLRYACEFLIQVFGVQINKEVDLAAQVREKHILRIQTMLCDMLLRDAPVAIITQSPNVMDLVKCDGAALYYKNKFWLLGVTPTEAQIRDIAEWLLEYHRGNTGLSTDSLMEAGYPGASVLGDAVCGMAAVSITSRDFLFWFRSHTAKEIKWGGAKHDPGDKDDGRKMHPRSSFKAFLEVVKWRSLPWKDVEMDAI

SEQ ID NO: 833 - protein, 210 aa, Geobacillus kaustophilus HTA426
MEWTRIPVGPIQANAYLLSSADRQCLIVDPGAEGAALVRRIEEKGLTPLAILLTHAHFDHIGGIPDVLARWDIPVYVHEKEKQWLQDPALNGSLYFGGPVAVRCEPTCLKGPTVLNIGPFALDVRETPGHSPGSVSYYCKQANIVFSGDALFAGSIGRTDLPGGNHQQLLKSIHDELLTLPEETIVLSGHGPETTIAAEMDANPFLHGFS

SEQ ID NO: 834 - protein, 473 aa, Salmonella typhimurium LT2
MPTHLVWFRRDLRLQDNLALAAACRDASARVLALYISTPAQWQAHDMAPRQAAFISAQLNALQTALAEKGIPLLFHEVADFNASIETVKNVCRQHDVSHLFYNYQYEFNERQRDAAVEKTLPSVICEGFDDSVILAPGAVMTGNHEMYKVFTPFKNAWLKRLKEDIPPCVPAPKIRVSGALSTPLTPVSLNYPQQAFDAALFPVEENAVIAQLRQFCAQGADEYALRRDFPAVDGTSRLSASLATGGLSPRQCLHRLLAEQPQALDGGPGSVWLNELIWREFYRHLMTWYPALCKHQPFIRWTKRVAWQENPHYFQAWQKGETGYPIVDAAMRQLNATGWMHNRLRMITASFLVKDLLIDWRLGERYFMSQLIDGDLAANNGGWQWAASTGTDAAPYFRIFNPTTQGERFDRDGEFIRQWLPALRDIPGKAIHEPWRWAEKAGVVLDYPRPIVEHKQARIATLSAYEAARKGA

SEQ ID NO: 835 - protein, 392 aa, Dinemandra ericoides
DLEPVNPADVPVTAAGALKSYKLAAKAISRLQSLPSGNIPLPCDVLVKEVRDLTGYDRVMVYKFHEDEHGEVVSECRRSDMESYLGLHYPATDIPQASRFLFMKNKVRMICDCLSPPVEVIQDERLPQPLSLCGSTLRSPHGLHAQYMANMGTIASLVMSVTVNEDDDMMDGDQQRMARKLWGLVVCHHTSPRFVPFPLRYACEFLIQVFGVQIHKEVDLAAQVREKHILRIQTMLCDMLLRDAPVAIITQSPNVMDLVKCDGAALYYKNKFWLLGVTPTEAQIRDIAEWLLEYHRGNTGLSTDSLMEAGYPGASVLGDAVCGMAAVSITSRDFLFWFRSHTAKEIKWGGAKHDPGDKDDGRKMHPRSSFKAFLEVVKWRSLPWEDVEMDAI

SEQ ID NO: 836 - protein, 397 aa, Arabidopsis thaliana
MENGEAKQSVPLLTPYKMGRFNLSHRVVLAPLTRQRSYGNVPQPHAAIYYSQRTTPGGFLITEATGVSDTAQGYQDTPGIWTKEHVEAWKPIVDAVHAKGGIFFCQIWHVGRVSNSGFQPNGKAPISCSDKPLMPQIRSNGIDEALFTPPRRLGIEEIPGIVNDFRLAARNAMEAGKHILDLEFKKLKPFKILICVLVVAGFDGVEIHGANGYLIDQFMKDTVNDRTDEYGGSLQNRCKFPLEIVDAVAKEIGPDRVGIRLSPFADYMESGDTNPGALGLYMAESLNKYGILYCHVIEARMKTMGEVHACPHTLMPMRKAFKGTFISAGGFTREDGNEAVSKGRTDLVAYGRWFLANPDLPKRFQVDAPLNKYDRPTFYTSDPVVGYTDYPFLESTA

SEQ ID NO: 837 - protein, 261 aa, Zea mays
IKPPDFAVLLPTTRACALPPRPEPPPPLTLRAPSCSSCYSSVARPSRSEEQPWAGHVLGGVKENPAAANSAESDGLGRFAVDEHNRRENALLEFVRVVEAKEQVVAGTLHHLTLEAVEAGRKKLYEAKVWVKPWLDFKELQEFSHKGDATAFTNADLGAKQGGHEPGWREVPVEDPVVKDAAHHAVKSIQERSNSLFPYELLEILRAHAQVVEDFAKFDILMKLKRGSKEEKIKAEVHKSLEGAFVLNQHQPAEHDESSSQ

SEQ ID NO: 838 - protein, 254 aa, Legionella pneumophila str. Lens
MTILPISAFSDNYIWTFIDKIAGVLDCVDPGESAPIIRFAQSNQLTLRTILLTHHHYDHIGGVDSLIKQWPSCKVYGPIDERISNLTHPIKQGQSVQVGSLHFHILFNPGHTSTHISYYEPQQGWLFCGDTLFSAGCGRVFDGTIEELHESLLLFKKLPRNTKIFCAHEYTLQNLKFAHTVEPCNSSVINYMQQILKQPSPCTLPSNIDLELSINPFLRTDKEQVKQYALSHGANSSDSLDVFEVLRNQKNSFK

SEQ ID NO: 839 - protein, 181 aa, Arabidopsis thaliana
FHVDPRVRTYYPGLCEPVSQGGLGFDYYVNLSASEMWVSLLDNVPDNEWSMSKIVSTLVANKEYADKMLSYAENHNQSISGGRSFAEILFGGVDNGSPGGKELLDRGISLHKMIRLITFTSGGRAYLNFMGNEFGHPERVEFPTQSNNFSFSLANRRWDLLESGVHHHLFSFDKELMDLDK

SEQ ID NO: 840 - protein, 467 aa, Alkaliphilus metalliredigenes QYMF
MKNIIKLMKMKKPTIVLVFLIALLTTSAVYAQPASDYEMELIRHYIRGSYVEPIDLDEITGQTPEEMFSGLDDYSTYFPKEDLEMFLEDVRGEFAGIGVYITEQMGKVIIAEPIENSPAQRAGIQPGDEILSVDGEDVKGRPLDVVAAMVKGPEGTQVKIEVKRQGQEDTIIFSMDRAFITVNPVAHQVIEDIGYIEIKSFNEHMTENIEKVLMGFKEQNVDKLIIDLRNNPGGSLDEAVKLSRLLLPKGPIVHIQYRDHQTTVVSYLEEPPFENMVVLINEASASASEIFAVAAKESGIATLIGKTTFGKGSVQRVYTLPTGTGFKLTEARYLSPEENEIDNVGVAPHIEVERFVPDVLTVDFLPLKMTRKPQIGDEGSDVEGAQQRLKAMGYTIKDPQGVMGESTYQAIYQFQEDAGLYPYGILDFSTQGALDRLFNQWIQGPDQDEQLKHAVRHFSGYSMFVVK

SEQ ID NO: 841 - protein, 374 aa, Arabidopsis thaliana
MEMVNAEAKQSVPLLTPYKMGRFNLSHRVVLAPLTRQKSYGSVPQPHAILYYSQRTSPGGFLIAEATGVSDTAQGYPDTPGIWTKEHVEAWKPIVDAVHAKGGIFFCQIWHVGRVSNRGFQPRRQAPISCTGKPIMPQMRANGIDEARFTPPRRLSIEEIPGIVNDFRLAARNAMEAGFDGVEIHGANGYLIDQFMKDTVNDRTDEYGGSLQNRCKFPLEIVDAVAKEIGPDRVGIRLSPFADYMESGDTNPGALGLYMAESLNKYGILYCHVIEARMKTMGEVHACPHTLMPMRKAFKGTFISAGGFTREDGNEAVSKGRTDLVAYGRWFLANPDLPKRFQVDAPLNKYDRPTFYTSDPVVGYTDYPFLESTA

SEQ ID NO: 842 - protein, 473 aa, Malus x domestica
MRMLSRNATFNSHGQDSSYFLGWQEYEKNPYHEVHNTNGIIQMGLAENQLCFDLLESWLAKNPEAAAFKKNGESIFAELALFQDYHGLPAFKKAMVDFMAEIRGNKVTFDPNHLVLTAGATSANETFIFCLADPGEAVLIPTPYYPGFDRDLKWRTGVEIVPIHCTSSNGFQITETALEEAYQEAEKRNLRVKGVLVTNPSNPLGTTMTRNELYLLLSFVEDKGIHLISDEIYSGTAFSSPSFISVMEVLKDRNCDENSEVWQRVHVVYSLSKDLGLPGFRVGAIYSNDDMVVAAATKMSSFGLVSSQTQHLLSAMLSDKKLTKNYIAENHKRLKQRQKKLVSGLQKSGISCLNGNAGLFCWVDMRHLLRSNTFEAEMELWKKIVYEVHLNISPGSSCHCTEPGWFRVCFANLPERTLDLAMQRLKAFVGEYYNVPEVNGGSQSSHLSHSRRQSLTKWVSRLSFDDRSPIPGR

SEQ ID NO: 843 - protein, 477 aa, Oryza sativa
MVKGGREALLGGYEMGRTLGEGNFGKVKYARHLATGGHFAVKILDRGRVVSLRAGDQIRREIATLKLLRHPHVVRLHEVAASKTKIYMVLEFVNGGELFERIVSPCFNDLLRYFLAAKIFMPATMAVKGKLSEKEGRRLFQQLIDGVSYCHDRGVYHRDLKPENVLVDQKGNIKISDFGLSALPQHLGNDGLLHTTCGSPNYIAPEVLQNKGYDGSLSDIWSCGVILYVMLIGYLPFDDRNIVVLYQKIFKGDTQIPKWLSHSAQNLLRRILEPNPMKRIDMAGIKSHEWFQKDYIPVLPYDDDDEDVQFGARLPAKEQINDEPGDKNSHQINAFQLIGMASSLDLSGFFEDEEVSQRRIRFTSTHPPKDAFDKIESSATELGFQVQRGHSKLKLMRNCKGSKNPESFMVSAEVFELGPSVNVVELRKSNGDPALYRQLCERISSDMGARNTEQIFATASLEDDLQNSNAGTPLFAL

SEQ ID NO: 844 - protein, 484 aa, Saccharomyces cerevisiae
MADKIERHTFKVFNQDFSVDKRFQLIKEIGHGAYGIVCSARFAEAAEDTTVAIKKVTNVFSKTLLCKRSLRELKLLRHFRGHKNITCLYDMDIVFYPDGSINGLYLYEELMECDMHQIIKSGQPLTDAHYQSFTYQILCGLKYIHSADVLHRDLKPGNLLVNADCQLKICDFGLARGYSENPVENSQFLTEYVATRWYRAPEIMLSYQGYTKAIDVWSAGCILAEFLGGKPIFKGKDYVNQLNQILQVLGTPPDETLRRIGSKNVQDYIHQLGFIPKVPFVNLYPNANSQALDLLEQMLAFDPQKRITVDEALEHPYLSIWHDPADEPVCSEKFEFSFESVNDMEDLKQMVIQEVQDFRLFVRQPLLEEQRQLQLQQQQQQQQQQQQQQQQPSDVDNGNAAASEENYPKQMATSNSVAPQQESFGIHSQNLPRHDADFPPRPQESMMEMRPATGNTADIPPQNDNGTLLDLEKELEFGLDRKYF

SEQ ID NO: 845 - protein, 371 aa, Zea mays
  misc_feature (282)..(282): Xaa can be any naturally occurring amino acid
MIKANPDSMLPPGFRFHPTDEELIVNYLRNRAANTPCPVAIIADVDIYKLDPWDLPSRAAYGDKEWYFFSPRDRKYPNGVRPNRAAGSGYWKATGTDKPIHGSATGGSVVGVKKALVFYKGRPPKGAKTNWIMHEYRLAAADAHAAHSYYRSMKSRNASMRLDDWVLCRIYKKASHVPPMAVPPLSDHEQDEPCGFDENPYAATTSAAVLLQGASCPALQAAAGAQRMPRIPSLTELFSDPSLAHLFEEGGMQDMARLGNHHQQHQQQHGALLGRPVTTHEXLLVNNANSLSGEKIPRMDPPASTSAAGHGAAGKRKRSSEASTTSASQCAVEPGVCSHETTDRTAGATFQIGNGLQQQGSLGHRQMLLHS

SEQ ID NO: 846 - protein, 508 aa, Vibrio vulnificus
MHMSKSFLLISMGLASISVHAQTLTRDNGAPVGDNQNSITAGENGSVLLQDVHLIQKLQRFARERIPERVVHARGTGAHGEFVVSGDFSDLTLSSPFAQSGKVTPVFVRFSTVIHSKGSPETLRDPRGFATKFYTDQGNWDLVGNNLPVFFIRDSIKFPDMVHSLKPSPVTNLQDPNRFFDFFSSQPSATNMLTWVYTNLGTPASYRTMDGFGVHAYKWINRKGEVNYVKFHWKSQQGVKSLRPAEVTKVQGEDFNHLTNDLYTQINAGNFPKWDLYVKVLSPKALSKLDYNGLDATKVWLDVPEKKVGTMTLNRVPDNFFLETEQSAFAPSNIIPGIEPSEDRLLQGRLFAYADTQLYRLGANLFQLPVNSPKSPVANHNQDGPSNNSTGLGNVDSLDVNYEPSRLVNLTVDKQARAVETPLSGHVQQQAIRNPRDFFQAGVLYRSLSEQDKADLIHNLSGDLNKVNDAEVKAIMVSYFYRADKEYGTRLAKATDVNLKQVTKLASM

SEQ ID NO: 847 - protein, 370 aa, Triticum aestivum
MSNAASTTPLLAHYKMGKFDLSHRVVLAPLTRERSFGNVPQPHAILYYQQRATKGGLLIAEATGVSDTAQGYKDTPGIWTKKQVEAWKPIVDGVHAKGGIFFCQVWHVGRVSNHTFQPNGQAPISSTDKPIKPATRADGIGLAKVSTPRRLTTDEIPLVIDDFRVAARNAIEAGFDGVEIHGAHGYLIDQFLKDQVNDRTDKYGGSLENRCRFALEVVQAVADEIGADKVGIRLSPFASYSDASDSNPEALGLYMAQALNKLGILYCHMVEPRMVNIGEKLETPHSLRAMRDAFKGTFIVAGGYGRDDGDKAIADGYADLVAYGRLFLSNPDLPRRFEIDGPLNKYNRDTFYLSDPVIGYTDYPFLPSDI

SEQ ID NO: 848 - protein, 222 aa, Glycine max
MGSEGPTTPTTTIHVTGFKKFHGVSENPTETIANNLTEYMNKKGLPKRLVIGSSSILETAGQGALVPLYQRLQSAVNAKDSESSNSNKIIWLHFGVNSGATRFAIEKQAVNEANFRCPDEMGWKPQKVPIVPSDGGISRTRETTLPVVEITKALTEKGYEVMVSDDAGRFVCNYVYYHSLRFAEQNGIKSLFVHVPLFVTINEETQMQFAASLLEVLASIPQ

SEQ ID NO: 849 - protein, 312 aa, Bradyrhizobium japonicum USDA 110
MTTSDSLRDTRIPTHESVTIPAVGFGTLIPDPLVTRQAIRAALEAGFRHLDCAERYRNEAAVGDAMQDAFKAGKLRREELFVTTKLWNTNHRPERVKPAFDASRRRLQLDEIDCYIIHTPFAFQPGDEQDPRDASGRVIYDSGVTLVETWHALERLVDEGHCKSIGLSDITLEKLREIVAVARIRPAMVQVESHPYLPEWDLLDFCREHGIVLQAFAALGHAMEPRVLEDPVITAIARRVQKTPAQVCLAWAVQRGTAFLTTSTNPARIRENFDISALPEDAMREIRDGITTNVRFNAVVETGVPGFIPRAR

SEQ ID NO: 850 - protein, 471 aa, Clostridium acetobutylicum ATCC 824
MGVKFPEGFLWGGATAANQFEGAYNQDGKGLSIQDIMPKGIRGPITDKPTEDNMKLIGIDFYNRYKEDIKLFAEMGFKTFRLSIAWSRIFPNGDDKQPNEKGLQFYDNVFDELAKYNIEPLVTISHYETPLALAKNYDGWTNRKLIGFFENYVRTIFNRYKNKVKYWLTFNEINSALHAPYMSAGIWTPKEKLSKQDLYQAMHHELLASALAVKIGHEINPEFKIGCMILGVPNYPLTSKPSDVLKAMNQDRENLFFADVHARGRYPKYMNRLFKENNVHIKMEPGDEEILKNTVDFISFSYYMSSCATSDTKKSKGGAGNIISGVPNPYLKASEWGWQIDPEGLRYILNLLYDRYQKPLFIVENGLGAVDELITDERGNKTVNDDYRINYLNDHLVQVGEAIEDGVELMGYTTWGCIDLVSASTAELKKRYGFIYVDRHDDGSGTLERYKKKSFYWYKEVIATNGASLKK

SEQ ID NO: 851 - protein, 392 aa, Dinemandra ericoides
DLEPVNPADVPVTAAGALKSYKLAAKAISRLQSLPSGNIPLLCDVLVKEVRDLTGYDRVMVYKFHEDEHGEVVSECRRSDMESYLGLHYPATDIPQASRFLFMKNKVRMICDCLSPPVEVIQDERLPQPLSLCGSTLRSPHGCHAQYMANMGTIASLVMSVTVNEDDDMMDGDQQRMARKLWGLVVCHHTSPRFVPFPLRYACEFLIQVFGVQINKEVDLAAQVREKHILRIQTMLCDMLLRDAPVAIITQSPNVMDLVKCDGAALYYKNKFWLLGVTPTEAQIRDIAEWLLEYHRGNTGLSTDSLMEAGYPGASVLGDAVCGMAAVSITSRDFLFWFRSHTAKEIKWGGAKHDPGDKDDGRKMHPRSSFKAFLEVVKWRSLPWKDMEMDAI

SEQ ID NO: 852 - protein, 237 aa, Nocardia farcinica IFM 10152
MSSDRLYFRQLLSGRDFAVGDPIATQMRNFAYLIGDRETGDCVVVDPAYAAGDLVDIAEADGLRLTGVLATHHHPDHVGGTMLGFTLRGVAELLEKTSVPVHVNARELSWVADVTGIAPSELTGHEHGDTVAVGAMTIELLHTPGHTPGSQCFLFEDRLIAGDTLFVDGCGRTDFPGGDSDEMFRSLRYLAGLSGDPVVYPGHWYSEEPSAALSTVRNNNYVMRPQTLEQWHMLMPG

SEQ ID NO: 853 - protein, 392 aa, Dinemandra ericoides
DLEPVNPADVPVTAAGALKSYKLAAKAISRLQSLPSGNIPLLCDVLVKEVRDLTGYDRVMVYKFHEDEHGEVVSECRRSDMESYLGLHYPATDIPQASRFLFMKNKVRMICDCLSPPVEVIQDERLPQPLSLCGSTLRSPHGCHAQYMANMGTIASLVMSVTVNEDDDMMDGDQQRMARKLWGLVVCHHTSPRFVPFPLRNACEFLIQVFGVQINKEVDLAAQVREKHILRIQTMLCDMLLRDAPVAIITQSPNVMDLVKCDGAALYYKNKFWLLGVTPTEAQIRDIAEWLPEYHRGNTGLSTDSLMEAGYPGASVLGDAVCGMAAVSITSRDFLFWFRSHTAKEIKWGGAKHDPGDKDDGRKMHPRSSFKAFLEVVKWRSLPWEDIEMDAI

SEQ ID NO: 854 - protein, 235 aa, Musa acuminata
MGRGKIEIKRIENTTNRQVTFCKRRNGLLKKAYELSVLCDAEVALIVFSSRGRLYEYANNNIKSTIERYKKACADSSSSDAIVDVNSQHYYQQESAKLRHQIQVLQNANRHLMGDALSSLNVKELKQLENRLERSITRIRSKKHELLFAEIEYMQKREVELQSDNMYPRAKIAENERVQQLSIVEAGAEYDAIPGAFDSRNYYHANILEAAAHYSHHQDQTALQLGYETKADSAA

SEQ ID NO: 855 - protein, 392 aa, Hiraea fagifolia
DLEPVNPADVPVTAAGALKSYKLAAKAISRLQSLPSGNISLLCDVLVKEVRDLTGYDRVMVYKFHEDEHGEVVSECRRPDLESYLGLHYPATDIPQASRFLFMKNKVRMICDCLAPPVKVIQDKRLPQPLSLCGSTLRSPHGCHAQYMTNMRTIASLVMSVTINEDDDTMDGDQQQMTRKLWGLVVCHHTSPRFVPFPLRYACEFLIQVFGVQINKEVELAAQVREKHILQIQTMLCDMLLRDAPVAIITQSPNVMDLVKCDGAALYFKNKIWLLGVTPKEEQIRDIAEWLLEYHSGNTGLSTDSLMEAGYPGASVLGDAICGMAAASITSRDFLFWFRSHTAKEIKWGGAKHEPGDKDDGRKMHPRSSFKAFLEVVKWGSMPWEDIEMDAI

SEQ ID NO: 856 - protein, 419 aa, Corynebacterium glutamicum ATCC 13032
MGADQAARPTRRTTRRIFDQSEKMKDVLYEIRGPVAAEAERMELDGHNILKLNTGNPAVFGFDAPDVIMRDMIANLPTSQGYSTSKGIIPARRAVVTRYEVVPGFPHFDVDDVFLGNGVSELITMTTQALLNDGDEVLIPAPDYPLWTAATSLAGGKPVHYLCDEEDDWNPSIEDIKSKISEKTKAIVVINPNNPTGAVYPRRVLEQIVEIAREHDLLILADEIYDRILYDDAEHISLATLAPDLLCITYNGLSKAYRVAGYRAGWMVLTGPKQYARGFIEGLELLAGTRLCPNVPAQHAIQVALGGRQSIYDLTGEHGRLLEQRNMAWTKLNEIPGVSCVKPMGALYAFPKLDPNVYEIHDDTQLMLDLLRAEKILMVQGTGFNWPHHDHFRVVTLPWASQLENAIERLGNFLSTYKQ

SEQ ID NO: 857 - protein, 392 aa, Hiraea fagifolia
DLEPVNPADVPVTAAGALKSYKLAAKAISRLQSLPSGNISLLCDVLVKEVRDLTGYDRVMVYKFHEDEHGEVVSECRRPDLEPYLGLHYPATDIPQASRFLFMKNKVRMICDCLAPPVKVIQDKRLPQPLSLCGSTLRSPHGCHAQYMTNMRTIASLVMSVTINEDDDTMDGDQQQMTRKLWGLGCCHHTSPRFVPFPLRYACEFLIQVFGVQINKEVELAAQVREKHILQIQTMLCDMLLRDAPVAIITQSPNVMDLVKCDGAALYFKNKIWLLGVTPKEEQIRDIAEWLLEYHSGNTGLSTDSLMEAGYPGASVLGDAVCGMAAASITSGDFLFWFRSHTAKEIKWGGAKHEPGDKDDGRKMHPRSSFKAFLEVVKWRSMPWEDVEMDAI

SEQ ID NO: 858 - protein, 412 aa, Burkholderia vietnamiensis G4
MKPIQKSNKLLNVCYDIRGPVLEHAKRLEEEGHRIIKLNIGNLAPFGFDAPDEIIQDMIRNLPASSGYSDSKGVFSARKAVMHYTQQKGVVGVGLDDIYIGNGASELIVMATQALLNDGDEVLLPAPDYPLWTAAVSLSGGTPVHYVCDEQNAWMPDPDDIRRKITPNTKALVVINPNNPTGALYSDELLLELLEIARQHGLIVFADEVYDKIVYDGLEHTALGSLSEDVITVTFNSLSKSYRSCGYRAGWMSVSGLGGDNRRRANDYLEGLGILSSMRLCANVPGQFAIQTALGGYQSINELIVPSGRLYKQRELAYDMLTSIPGVTCVKPQAALYMFPRLDPKLYPIQNDQQFILDLLLEERVLLVQGTGFNWAQPDHFRVVFLPNLDDLADSISRIARFLDGYRKRHSV

SEQ ID NO: 859 - protein, 255 aa, Debaryomyces hansenii CBS767
MHVESIPMRWGTGDNYSYLLIDTPTKNAWLIDPAEPEDVIAYFNKHNPSFELKAIVNTHHHYDHSGGNSDFHLKYPDLPIIAGKDSPQVTYTPSHQEVIDLGDNLSITALHTPCHTQDSICYYVKDSSTKEKAVFTGDTLFISGCGRFFEGSGEEMDKALNSILGKLPKETKVYPGHEYTKSNVKFSKTILNNDAIKKLDKFVNENEFTAGKFTIGDELEFNPFMRLNDPDVQKITGASDSAEVMGKLREMKNNM

SEQ ID NO: 860 - protein, 392 aa, Hiraea fagifolia
DLEPVNPADVPVTAVGALKSYKLAAKAISRLQSLPSGNISLLCDVLVKEVRDLTGYDRVMVYKFHEDEHGEVVSECRRPDLESYLGLHYPATDIPQASRFLFMKNKVRMICDCLAPPVKVIQDKRLPQPLSLCGSTLRSPHGCHAQYMTNMRTIASLVMSVTINEDDDTMDGDRQQMTRKLWGLVVCHHASPRFVPFPLRYACEFLIQVFGVQINKEVELAAQVREKHILQIQTMLCDMLLRDAPVAIITQSPNVMDLVKCDGAALYFKNKIWLLGVTPKEEQIRDIAEWLLEYHSGNTGLSTDSLMEAGYPGASVLGDAVCGMAAVSITSRDFLFWFRSHTAKEIKWGGAKHDPGDKDDGRKMHPRSSFKAFLEVVKWRSMPWEDIEMDAI

SEQ ID NO: 861 - protein, 277 aa, Yersinia pestis KIM
MTMQPLIKLYDGRLMPQLGLGVWQASIQETELAVSKALEVGYRSIDTAAIYKNEEGVGKALKAAAVARDELFITTKLWNDDQHNPQQALETSLQKLQLDYVDLYLIHWPDPKQDHYVSAWRELVTLKEQGLIRSIGVCNFHIPHLQRLIDETGIAPTVNQIELHPLLQQRQLHAWNATHHIATESWSPLAQGGKGVFDQEIIRKLAQQYNKTPAQIVIRWHLDSGLIVIPKSVTPARIRENFEVFDFKLQKEELLAITKLDCGKRLGPDPEVFGSDR

SEQ ID NO: 862 - protein, 395 aa, Legionella pneumophila str. Lens
MVFGFLNLSFWGYVLATFILTQITIASVTIYLHRNQTHRALTLHPVVSHFFRFWLWLTTGMVTADWVAIHRKHHATTDVEGDPHSPVVEGIRKVFWQGAELYREARKDRDMVAKYSHGTPTDWIERNVYSRHSSKGILLMLLLDLFFFGIPGMTVWAIQMMWIPLFAAGVINGIGHYWGYRNFECPDAATNIIPWGFWIGGEELHNNHHTFASSAKFSVKWWEFDIGWMYIRILSFFGLAKVKKLPPKLAMDEGKFHVDLDTVRAVISNRFQVMSDYYKNVIRPILKYEKNTGIETKEDKKLFQRAGRLLRREDKLLSTKAKTRLQKLLDAREQLRVVYSYKQSLQNVWLKTATTQKELVEALQQWCRQAEESGLDVLKQFAQQLKGYVPVYTRE

SEQ ID NO: 863 - protein, 365 aa, Yersinia pseudotuberculosis IP 32953
MKTAKLFSPLKVGALTLPNRVFMAPLTRLRSIEPGDIPTPLMAEYYRQRASAGLTITEATQISFQAKGYAGAPGLHTQEQLNAWKKVTQGVHNEGGHIAVQLWHVGRISHNSLQPGQQAPVAPSAIAADTRTTVRDETGAWVRVPCSTPRALETEEIPGIINDFRQATANAREAGFDYIELHAAHGYLLHQFMSPASNQRTDQYGGSIENRTRLTLEVVDATAAEWGADRIGIRISPLGPFNGLDNGEDQEEAALYLIDQLNKRNIAYLHISEPDWAGGKPYSDTFRAAVRAHFNGVIVGAGAYSAEKAECLIQKGFIDAVAFGRSYISNPDLVTRLQQHAPLNEPDSNTFYGGGAKGYTDYPTL

SEQ ID NO: 864 - protein, 486 aa, Oryza sativa
MSYNHSPSITAETINQKVRIFTYEPCGEIVRHARRLEKEIYENPGSLPFQEIIYCNLGNPQALGQRPINFFREVLSLCDNPSLIDRDEARALFSPCALKRARKIIESLPGRDSGSYTSSQGVRGLREAVADGIAARDGFPSKPDNIFLTDGASSAINMMMQILIRSHEDGILCPLPEYPLYSASIILHGGTMVPYNLTEDSIWGLEIFEVKRCLEDARASGLTIRAMVVINPGNPTGQVLSITNQEEIVEFCRKEGLVILADEVYQENVYTENKRFNSFKKVARSLGYDHHDLSIVSFHSVSMGYYGECGRRGGYMEICGFGDDVIDEMYKLASLTICPNIAGQILISLVMDPPKLGDEAFEIFMVEKEETYSSLLKRAKALQKAFNGLEGVSCNKFEGAMYLFPRLRLPQAAIKAAQLEGVSPDVFYAHRLLDATGIAVVPGSGFHPVSGTSHIRCTILPGEETITAMVPSLQAFHEAFMDEFRG

SEQ ID NO: 865 - protein, 535 aa, Arabidopsis thaliana
MFKRVDEFNLVSSTIDHRIFKSRMDGSGTGSRSGVESILPNYKLGRTLGIGSFGRVKIAEHALTGHKVAIKILNRRKIKNMEMEEKVRREIKILRLFMHPHIIRLYEVIETPTDIYLVMEYVNSGELFDYIVEKGRLQEDEARNFFQQIISGVEYCHRNMVVHRDLKPENLLLDSKCNVKIADFGLSNIMRDGHFLKTSCGSPNYAAPEVISGKLYAGPEVDVWSCGVILYALLCGTLPFDDENIPNLFKKIKGGIYTLPSHLSPGARDLIPRMLVVDPMKRVTIPEIRQHPWFQAHLPRYLAVPPPDTVQQAKKIDEEILQEVINMGFDRNHLIESLRNRTQNDGTVTYYLILDNRFRASSGYLGAEFQETMEGTPRMHPAESVASPVSHRLPGLMEYQGVGLRSQYPVERKWALGLQSRAHPREIMTEVLKALQDLNVCWKKIGHYNMKCRWVPNSSADGMLSNSMHDNNYFGDESSIIENEAAVKSPNVVKFEIQLYKTRDDKYLLDLQRVQGPQFLFLDLCAAFLAQLRVL

SEQ ID NO: 866 - protein, 312 aa, Arabidopsis thaliana
MSVTSTVEENHQKNPSTPAAVEEEKKKRRWVFWDRRWRRLDYVKFSASFTVHSLALLAPFYFTWSALWVTFLFYTIGGLGITVSYHRNLAHRSFKVPKWLEYLLAYCALLAIQGDPIDWVSTHRYHHQFTDSERDPHSPKEGFWFSHLLWIYDSAYLVSKVILFCGRRANVEDLKRQWFYRFLQKTVLFHILGLGFFLFYLGGMSFVTWGMGVGAALEVHVTCLINSLCHIWGTRTWKTNDTSRNVWWLSVFSFGESWHNNHHAFESSARQGLEWWQIDISWYIVRFFEIIGLATDVKVPTEAQRRRMAIVR

SEQ ID NO: 867 - protein, 727 aa, Xanthomonas oryzae pv. oryzae KACC10331
MTYNVPVSMKAGLLALVLTTPMALLARADTALPAAATPDQATATKLVYGLLSDSRYAYRPRVLDEAMSKDVFKRYLETLDGGKQFFTQADIDSFAPLQAGVGDALRGGNLEPAFQVFSLYKKRVDQRVKYALDLLKQDFDFSGNDKFEYDRKDVPWAADDKQLDVLWRQSVMNDWLRLKLAGKKPDDIRKTLDKRYVALADSVKQLKGEDVFQFFVNAYTNAVDPHTDYFTPRTAETFNQQMSLSLEGIGAQLQKQDDMVVIREVIPGGPAAVDGTLKPGDRIVGVGQTKTGAIEDVIGWRIDDVVAKIRGSKDTQVRLEYIPAESGIDGKHRTVTLTRQKVRLAEQAAKGETITLPATGTEPQRRIGIIKLPGFYQDFEGRRRNATDYASATRDVAKLLAGFKTDKVDGVVLDLRNNGGGSLDEAIELTGLFIEQGPVVQVRESGGRVTVNGDSDPKVAWDGPLGVLINRGSASASEIFAGAIQDYGRGLVIGETSFGKGTVQNIVDLDRWPAAEGQRYGQVKLTIAQFFRVSGSSTQHKGVVPDIVFPASVDATEFGESTYDNALPWTRIAAAPHTQYGNFAPLLPKLQALHTARIATDKEFQWWEEDVKQFRDEKAKKYISLNEAERVAERQKQDQQRKDRQQIRKQLGLPLDPLAEDSDDGLTGNERDIVKDTAREKAAEKRPDPLLHESAAILADALGLLSQDKPLSAQVLPKSTAPGRWAD

SEQ ID NO: 868 - protein, 548 aa, Escherichia coli
MAAKDVKFGNDARVKMLRGVNVLADAVKVTLGPKGRNVVLDKSFGAPTITKDGVSVAREIELEDKFENMGAQMVKEVASKANDAAGDGTTTATVLAQAIITEGLKAVAAGMNPMDLKRGIDKAVTAAVEELKALSVPCSDSKAIAQVGTISANSDETVGKLIAEAMDKVGKEGVITVEDGTGLQDELDVVEGMQFDRGYLSPYFINKPETGAVELESPFILLADKKISNIREMLPVLEAVAKAGKPLLIIAEDVEGEALATAVVNTIRGIVKVAAVKAPGFGDRRKAMLQDIATLTGGTVISEEIGMELEKATLEDLGQAKRVVINKDTTTIIDGVGEEAAIQGRVAQIRQQIEEATSDYDREKLQERVAKLAGGVAVIKVGAATEVEMKEKKARVEDALHATRAAVEEGVVAGGGVALIRVASKLADLRGQNEDQNVGIKVALRAMEAPLRQIVLNCGEEPSVVANTVKGGDGNYGYNAATEEYGNMIDMGILDPTKVTRSALQYAASVAGLMITTECMVTDLPKNDAADLGAAGGMGGMGGMGGMM

SEQ ID NO: 869 - protein, 351 aa, Medicago truncatula
MEKYEVVKDIGSGNFGVARLMRHKDTKQLVAMKYIERGHKIDENVAREIINHRSLRHPNIIRFKEVVLTPTHLGIVMEYAAGGELFDRICSAGRFSEDEARYFFQQLISGVSYCHSMQICHRDLKLENTLLDGSPAPRLKICDFGYSKSSLLHSRPKSTVGTPAYIAPEVLSRREYDGKLADVWSCGVTLYVMLVGAYPFEDQDDPKNFRKTINRIMAVQYKIPDYVHISQECRHLLSRIFVASPARRITIKEIKSHPWFLKNLPRELTEMAQAVYYRKENPTYSLQSIEDIMKIVEEAKNPPQASRSVGGFGWGGEEDDDEINEAEAELEEDEYEKRVKEAQESGEIHVN

SEQ ID NO: 870 - protein, 500 aa, Arabidopsis thaliana
GSSLSPISFTKPNKINPNFSIQISKASKFSYARSRSNISRSNAANPGVVFVCNRFLCVIERNDQRKLSGKVMMKSSVNFRQNLSVALVRIVSVLLVSSISVVTTDSPPSWGLTEENLLFLEAWRTIDRAYIDKTFNGQSWFRYRETALRNEPMNTREETYMAIKKMVATLDDPFTRFLEPGKFKSLRSGTQGAVTGVGLSIGYPTASDGPPAGLVVISAAPGGPANRAGILPGDVIQGIDNTTTETLTIYDAAQMLQGPEGSAVELAIRSGPETRLLTLTRERVSVNPVKSRLCELPGSGSNSPKIGYIKLTTFNQNASSAVREAIETLRGNNVNAFVLDLRDNSGGSFPEGIEIAKFWLDKGVIVYICDSRGVRDIYDTDGSNAIATSEPLAVLVNKGTASASEILAGALKDNKRALVYGEPTYGKGKIQSVFELSDGSGLAVTVARYETPAHTDIDKVGVTPDHPLPKSFPKDEEAFCGCLKDPTAACYLNQGLLFSR

SEQ ID NO: 871 - protein, 392 aa, Hiraea fagifolia
DLEPVNPADVPVTAAGALKSYKLAVKAISRLQSLPSGNISLLCDVLVKEVRDLTGYDRVMVYKFHEDEHGEVVSECRRPDLESYLGLHYPATDIPQASRFLFMKNKVRMICDCLAPPVKVIQDKRLPQPLSLCGSTLRSPHGCHAQYMTNMRTIASLVMSVAINEDDDTMDGDQQQMTRKLWGLVVCHHASPRFVPFPLRYACEFLIQVFGVQINKEVELAAQVREKHILQIQTMLCDMLLRDAPVAIITQSPNVMDLVKCDGAALYFKNKIWLLGVTPKEEQIRDIAEWLLEYHSGNTGLSTDSLMEAGYPGASVLGDAVCGMAAVSITSRDFLFWFRSHTAKEIKWGGAKHDPGDKDDGRKMHPRSSFKAFLEVVKWRSMPWEDVEMDAI

SEQ ID NO: 872 - protein, 647 aa, Nocardia farcinica IFM 10152
MCGLLGFLTADAATSEVVDQVYNALHCMRHRGPDERGTWHDDHLVFGFNRLSIIDIEHSHQPLRWGPPENPERYALTFNGEIYNYLELREELAAAHAAEFGDAPMFRTEGDSEAIVAAYHYWGAEAVAKLRGMFGFAIWDTQTRELFLARDPFGIKPLFLATGPGGTAFGSEKKSLLDLLPALRLSDDLDPRALEHYTVLQYVPEPETLHKGIRRLESGTYAVVRPGAAPQVTRYFTPRFPVRPFAPGSAQTRYNEIAAALEDSVAKHMRADVTVGSFLSGGIDSTAVAALAMRHNPNLITFTTGFEREGYSEVDVAAESAAAIGARHIVKVVSPAEFAAAIPEIVWYLDDPVADPALVPLYFVAKEARKHVKVVLSGEGADELFGGYTIYREPLSLKPFEYLPRGLRRLAGRLSERIPDGTRGKSLLHRGSLTLEERYYGNARSFNDAQLRAVLREFRPEWTHQDVTAPIYAQSRGWDPVARMQHLDLFTWLRGDILVKADKMTMANSLELRVPFLDTEVRRVAEQLPFDQKITKDTTKYALRQALEGIVPAHVLHRAKLGFPVPLRHWLRGTELYDWAHTQIAESQTDHLLDKAAITAMLVEHRAGRADHSRRLWTLLVFMVWHGIFVEDRIKPDIQEPVYPVTL

SEQ ID NO: 873 - protein, 541 aa, Enterococcus faecalis
MAKEIKFAEDARAAMLRGVDVLADTVKVTLGPKGRNVVLEKSFGSPLITNDGVTIAKEIELEDHFENMGAKLVSEVASKTNDIAGDGTTTATVLTQAIVREGLKNVTAGANPLGIRRGIELATKTAVEELHNISSVVDSKEAIAQVAAVSSGSEKVGQLIADAMEKVGNDGVITIAESKGIETELDVVEGMQFDRGYLSQYMVTDNDKMEAVLENPYILITDKKISNIQDILPLLEQILQQSRPLLIIADDVDGEALPTLVLNKIRGTFNVVAVKAPGFGDRRKAMLEDIAILTGGTVITDDLGLELKDTTIENLGNASKVVVDKDNTTIVEGAGSKEAIDARVHLIKNQIGETTSDFDREKLQERLAKLAGGVAVVKVGAATETELKELKLRIEDALNATRAAVEEGMVSGGGTALVNVIGKVAALEAEGDVATGIKIVVRALEEPIRQIAENAGYEGSVIVDKLKNVDLGIGFNAANGEWVNMVEAGIVDPTKVTRSALQNAASVSALLLTTEAVVADKPEPAAPAPMMDPSMGMGGMM

SEQ ID NO: 874 - protein, 392 aa, Janusia californica
DLEPVNPADVPVTAAGALKSYKLASKAISRLQSLPSGNISLLCDVLVKEVRDLTGYDRVMVYKFHEDEHGEVVSECRRSDLESYLGLHYPATDIPQASRFLFMKNKVRMICDCLAPPVKVIQDERLPQPLSLCGSTLRSPHGCHAQYMTNMGTIASLVMSVTVNEGDDTMDGDQQRMTRKLWGLVVCHHTSPQFVPFPLRYACEFLIQVFGVQINKEVELAAQVREKHILQIQTMLCDMLLRDAPVAIITQSPNVMDLVKCDGAALYFKNKTWLLGVTPTEEQIRGIAEWLLKYHSGNTGLSTDSLMEAGYPGASGLGDAVCGMAAVSITSRDFLFWFRSHTAKEIKWGGAKHDPDDKDDLRKMHPRSSFKAFLEVVKWRSMPWEDVEMDAI

SEQ ID NO: 875 - protein, 392 aa, Janusia californica
DLEPVNPADVPVTAAGALKSYKLASKAISRLQSLPSGNISLLCDVLVKEVRDLTGYDRVMVYKFHEDEHGEVVSECRRSDLESYLGLHYPATDIPQASRFLFMKNKVRMICDCLAPPVKVIQDERLPQPLSLCGSTLRSPHGCHAQYMTNMGTIASLVMSVTVNEDDDTMDGDQQQMTRKLWGLVVCHHTSPQFVPFPLRYACEFLIQVFGVQINKEVELAAQVREKHILQIQTMLCDMLLRDAPVAIITQSPNVMDLVKCDGAALYFKNKTWLLGVTPTEEQIRGIAEWLLKYHSGNTGLSTDSLMEAGYPGASGLGDAVCGMAAVSITSRDFLFWFRSHTAKEIKWGGAKHDPDDKDDLRKMHPRSSFKAFLEVVKWRSMPWEDVEMDAI

SEQ ID NO: 876 - protein, 392 aa, Janusia californica
DLEPVNLADVPVTAAGALKSYKLASKAISRLQSLPSGNISLLCDVLVKEVRDLTGYDRVMVYKFHEDEHGEVVFECRRSDLESYLGLHYPATDIPQASRFLFMKNKVRMICDCLAPPVKVIQDERLPQPLSLCGSTLRSPHGCHAQYMTNMGTIASLVMSVTVNEDDDTMDGDQQQMTRKLWGLVVCHHTSPQFVPFPLRYACEFLIQVFGVQINKEVELAAQVREKHILQIQTMLCDMLLRDAPVAIITQSPNVMDLVKCDGAALYFKNKTWLLGVTPTEEQIRGIAEWLLKYHSGNTGLSTDSLMEAGYPGASGLGDAVCGMAAVSITSRDFLFWFRSHTAKEIKWGGAKHDPDDKDDLRKMHPRSSFKAFLEVVKWRKMPWEDIEMDAI

SEQ ID NO: 877 - protein, 1012 aa, Neurospora crassa
MVQAPMISVPLKATSEIDWVAPLKNYIRNTYGDDPERYAEECATLNRLRQDMRGAGKDSTSGRDLLYRYYGQLELLDLRFPVDEKNIKISFTWFDAFTHKPTAQYSLAFEKASIIFNISAVLSCHAAHQLRTEEAGLKTAYHSFQASAGMFTYINENFLHAPSSDLSRETVKTLISIMLAQAQEVFLEKQIADQKKNGLLAKLSSQAAALYAQAVEGVQENVTKAIFEKVWLSVVQIKLNFMNSLAQYYQALADEDANSYGVAIARLEIAQGLAKEANKMAHSFPTSVPPNSNLTSDCGHILADATKRHLATVKEKLEELNKENDMIYHQPVPAEASVAPVPKLPAAKPIPVSELYAGQDIQRITGPDLFAKIVPLAVTESASLYDEEKAKLVRAETERVETANSEMAASLDYLRLPGALQVLKGGFDQDILPDEDFRTWCVDVADHESPHRIFEYLHTEKQAISTILDKSSRQLDMEESVCEKMRSKYDAEWTQQPSSRLTTTLRTDIRRYREALEVAAKSDGQLATKLRANETELDEMRQAAQHGEIDELFQRAVRKSRKSNPNSPATVEPNLLEADFDDGGPSVVEQIQKVEDILKKLSLVKKERLQVLQDLKQKAHSDDISQILILNKKSIANYEQQLFQQELEKFRPHQNRLVQASHKQAALMRELTVTFNNLLQDKRVRADQSRYESVQRSRTSVINKYKRAYQEFLDLEAGLQSAKNWYKDMRQEAESLEKNVEAFVNNRRAEGAQLLNQIEQDRAANKSSHAALEQERLKNLMERMSMDPSPTSPKPSSGSGGRPTPAPLSFAPAAVSNTPLSAYQKSNFSTQYPASPPATQVPHNPGGQQQTPYQQYNPSSLGRIPGPASPPPNQTSFNIGPGRHPASPPPTQTSFAQSRPYSLTTYGNPSALNPQGGQPQQSQPGGYVPPGFVPPPPPPGPPPLGPQQTVHYGGNEYYAGAMGNPNIGRPGSGQQGPQGQQGGWGQPPPQQQLYQQQGGGGGDPWAGLSAWK

SEQ ID NO: 878 - protein, 174 aa, Triticum aestivum
  misc_feature (151)..(151): Xaa can be any naturally occurring amino acid
MSTSSGAKEAPANNPGLQAEADPATKGYIMQQTMFRVKDPKVSLDFYSRVMGMSLLKRLDFPEMKFSLYFLGYEDLSAAPADPVQRTGWTFGQKATIELTHNWGTESDPEFKGYHNGNSDPRGFGHIGVTVDDVYKACERFESLGVEFVKXPDDGKMKGIAFIKDPDGYWIENI

SEQ ID NO: 879 - protein, 392 aa, Mascagnia chasei
DLEPVNPADVPVTAAGALKSYKLASKAISRLQSLPSGNISLLCDVLVKEVRDLTGYDRVMVYKFHEDEHGEVVSECRRSDLESYLGLHYPATDIPQASRFLFMKNKVRMICDCLAPPVEVIQDERLAQPLSLCGSTLRSPHGCHAQYMTNMGTIASLVMAVTINEDDDMMDGDQQQMTRKLWGLVVCHHTSPRFVPFPLRYACEFLIQVFGVQINKEVELAAQVREKHILQIQTMLCDMLLRDAPVAIIMQSPNVMDLVKCDGAALYFKNKTWLLGVTPTEEQIRDIAEWLLEYHSGNTGLSTDSLMEAGYPGASALGDAVCGMAAVSITSRDFLFWFRSHTAKEIKWGGAKHDPDVKDDGRKMHPRSSFKAFLEVVKWRKMPWENIEMDAI

SEQ ID NO: 880 - protein, 373 aa, Brassica napus
MSAENCFGGGGGDQSTKGLATHGGQYVQYNVYGNIFEVTRKYVPPLRPIGRGAYGIVCAATNSETGEEVAIKKIGNAFDNIIDAKRTLREIKLLKHMDHENVIAVKDIIRPPLRENFNDVYIVYELMDTDLHQIIRSNQPLTDDHCQFFLYQLLRGLKYVHSANVLHRDLKPSNLLLNANCDLKLGDFGLARTKSETDFMTEYVVTRWYRAPELLLNCSEYTAAIDIWSVGCILGETMTREPLFPGKDYVHQLRLITELIGSPDDSSLGFLRSDNARRYVKQLPQYPRQNFAARFPNMSAGAADLLEKMLVFDPSRRITVDEALCHPYLAPLHDINEEPVCVRPFNFDFEQPSLTEENIKELIYRETVNFNPQ

SEQ ID NO: 881 - protein, 251 aa, Yersinia pseudotuberculosis IP 32953
MNLISIPAFQDNYIWLLANRQKHCVIVDPGESAPVLATLAQGQYVPQAILLTHHHNDHVGGVADLRHHFPDIPVYGPQETAKKGATVIVNDGDSLTIAGQNYTIIAVPGHTLGHIAYYSSPYLFCGDTLFSAGCGRLLEGTPEQMYASIQRLAQLPDETLICCAHEYTLSNLKFAHAILPADQDIATYQQQIEQLRSKNLPSLPVKLQFERKINVFLRCNDIDLQRKIGITSPPDSLVSVFCELRSRKDSF

SEQ ID NO: 882 - protein, 464 aa, Hordeum vulgare subsp. vulgare
MAAAFSSTVGAPASTPTNFLGKKLKKQVTSAVNYHGKSSKANRFTVMAAENIDEKRNTDKWKGLAYDISDDQQDITRGKGIVDSLFQAPTGHGTHEAVLSSYEYVSQGLRKYDFDNTMGGFYIAPAFMDKLVVHLSKNFMTLPNIKIPLILGIWGGKGQGKSFQCELVFAKMGINPIMMSAGELESGNAGEPAKLIRQRYREAADMIKKGKMCCLFINDLDAGAGRMGGTTQYTVNNQMVNATLMNIADAPTNVQLPGMYNKRENPRVPIVVTGNDFSTLYAPLIRDGRMEKFYWAPTRDDRIGVCKGIFQTDNVSDESVVKIVDTFPGQSIDFFGALRARVYDDEVRKWVGSTGIENIGKRLVNSRDGPVTFEQPKMTVEKLLEYGHMLVQEQDNVKRVQLADTYMSQAALGDANQDAMKTGSFYGKGAQQGTLPVPEGCTDQNAKNYDPTARSDDGSCLYTF

SEQ ID NO: 883 - protein, 456 aa, Oryza sativa
  misc_feature (240)..(240): Xaa can be any naturally occurring amino acid
  misc_feature (261)..(261): Xaa can be any naturally occurring amino acid
MSTTKVKRRVGKYELGRTIGEGTFAKVKFARDTETGDPVAIKILDKEKVLKHKMVEQIKREISTMKLIKHPNVVRIYEVMGSKTNIYIVLEYVTGGELFDTIVNHGRMREDEARRYFQQLINAVDYCHSRGVYHRDLKPENLLLDSYGNLKVSDFGLSALSQQIKDDGLLHTTCGTPNYVAPEVLEDQGYDGAMADLWSCGVILFVLLAGYLPFEDSNLMTLYKKISNAEFTFPPCDVFXPAQRLLTRILDPNPMTRVTIXPEILEDEWFKKGYKRPEFDEKYDTTLDDVDAVFNDSEEHHVTEKKEEPEALNAFELISMSAGLNLGNLFDSEQEFKRETRFTSKCPPKEIVRKIEEAAKPLGFDVQKKNYKICSPCLTTICMNIPFKLRLEKVKAGRKGNLNVATEILQVAPSLHMVEVRKAKGDTLEFHKFYKNLSRTLKDVVWKSDDLQNQLS

SEQ ID NO: 884 - protein, 468 aa, Streptomyces coelicolor A3(2)
MTGTPQRSHPQPERTFVTIDFAALPDDFLWGTATSAYQIEGAVAEDGRSPSIWDTFSHTPGKIDNGDHGDVACDHYHRTHEDIELMRRLGTNAYRLSVAWPRVVPGGDGPVNAKGLAFYDRLVDDLLAAGITPSVTLYHWDLPQVLQDRGGWPERDTAEHFAAYAAVVAERLGDRVAHWATLNEPLCSAWIGHLEGKMAPGQTDLTAAVRASYHLLLGHGLAMQAIRAAAPDAQVGIVNNLSTIHAATDREEDLAAARRMDGHTNRWWLDPVHGRGFPQDMREVYGVELPERPGDMRLIGAELDWLGLNYYFPQTVAADPTGPAPQVRTVRRAGVPRTGMDWEIDAGGIEELLLRLTEEYGPRKLYVTENGSSFPDLVRPDGSVDDPERQEYLTAHLAACASAARKGAPLAGYFAWSLLDNFEWAYGYDKRFGLVHVDYATQVRTIKGSGHHYADIIGRARGRERKAA

SEQ ID NO: 885 - protein, 414 aa, Acinetobacter sp. ADP1
MSQIAEPITIRNVTFKNRIIKGAMSEALANRAGQPNDLHFGLYQAWAQGGLGCAITGNVMVDLRAKNEPGVVAIESERDLERLKKWADIGKKYGMVQLIQLSHPGRQCPKGLNQETVAPSAVPFSPMLATMFATPRELHHEEILDIIQRFADAARVCEKAGFEGVQLHGAHGYLISQFLSPLTNKRQDQWGGSIENRMRFLLEIYHAVRAATSENFIISVKLNSADFQRGGITEEDVIAVFKAIDQAGIDLIEVSGGTYEAPAMAGVKAEKRKASTIAREAYFLEFAEKIRDSVQCKLMVTGGFRSVEGMNAALQSGACDFIGIARPFAVETDLTHRLIAGQDVKYAVKPIKTGVPFVDKMAVMEIIWYAAQFKAIGKGKKPNPKLSPLLVFLNYAKGNVKALIQGRINSRKSA

SEQ ID NO: 886 - protein, 232 aa, Triticum aestivum
RVPASRAAWAAERIPVGGAQTRQVDRRGRVSGSVARTQPRGALGGLADPRGGSQRTRVPAPGSPAQPPPSRAVLRAGTYKRRGARAHAAGAGAVGRRLPAPKRWDVPRAPAGGVHSGPACVRKSGACRSTRARGCTIAPHRFGKYGAIRQIRLGNAKDTRGTAYVVYEDIYDAKNAVDHLSGFNVANRYLIVLYSQLNRMSKKTDIKKKEDEITRLQEKYGVGSKTPSANDA

SEQ ID NO: 887 - protein, 480 aa, Glycine max
  misc_feature (66)..(66): Xaa can be any naturally occurring amino acid
MIIHKTPNMGKDDEGFDVPKTMSNLTSASGEARASSGNRTEIGTDYSQQYFTPPPTQTQPPLKKKXNLPGNLDPEAEVVALSPKTLLATNRFICEICNKGFQRDQNLQLHRRGHNLPWKLKQRSSKDIIRKKVYVCPEPSCVHHEPSRALGDLTGIKKHFCRKHGEKKWKCDKCSKKYAVQSDWKAHSKTCGTREYRCDCGTLFSRRDSFITHRAFCDALAEESARSVTGIVANSTTQPTEAAGVVISSSSLHQDMIHASNNNFPLKKEQQGCIPHWLGQPSPSSASSSFLFSHQDHHLHENPNPRGGPTLLPPPYHQTAPHMSATALLQKAAQMGATMSKTGSMIRTHQQQAHVSANAALNLSSRDHQMNPTPHDLLPFGNNKAVDNGVGVSPSLLHHVINSFSSSPFEGTFEDTFGGGDAMTADEGGGGGAGGNNNEGLTRDFLGLRHLSHTDILNIAGVGNCMNSSQHNQTRNPWQG

SEQ ID NO: 888 - protein, 660 aa, Bacillus cereus G9241
MVKYKKFCHLSEVSILSVINCEEVKRDEFHTEKYYDSYNIFGAHIVTEDEMRGVRFTVWAPHAKAMSVVGDFNEWDYEQHKMLQVTEEGIWSLFIPHIEEREIYKYAIETMAGDVILKADPYAVYAEVRPNTASVVFDIKGYEWNDKNWSRKKKKKSVYKEAMTVYELHFGSWKKKEDGTLYSYREMAEELIPYVVEHQFTHIEIMPLVEHPYDRSWGYQGTGYYAATSRFGTPHDLMHFVDECHKYGIGVILDWVPGHFCKDAHGLYLFDGTPTYEYKDKDVQENPVWGTVNFDLGKREVRNFLISNALFWMRYFHIDGFRVDAVANMLYWNKEGQEQSNEHAVSFLRELNEAVFAEDEDFLMTAEDSTAWPLVTAPTYEGGLGFNYKWNMGWMNDVLKYMECAPEYRKYIHEKMTFSLLYAYSENFILPLSHDEVVHGKKSLLNKMPGDYWDKFAQLRLLYGYFFTHPGKKLLFMGGEFGQFDEWKDLEDLDWNLHDFEMHRYMHDYFKELIALYKRSKPLWQLDHSPEGFQWIDANNNEQSIFSFIRQGDKQEDALVVVCNFTKATYENYKVGVPDFEYYNEILNSDAEQYGGSGQVNKKRLKAIQEPYHNQAAHVEITIPPFGVSILRPVKTRKGSKKQDGSKTKVRSNVTSRGKR

SEQ ID NO: 889 - protein, 392 aa, Peixotoa glabra
DLEPVNPSDVPVTAAGALKSYKLAAKAISRLQSLPSGNISLLCDVLVKEVRDLTGYDRVMVYKFHEDEHGEVVSECRRSDLESYLGLHYPATDIPQASRFLFMKNKVRMICDCLAPPVQVIQDERLPQPLSLCGSTLRSPHGCHAQYMTNMGTIASLVKSVTVNEDDDTMDGDQQQMTRKLWGLVVCHHTSPRFVPFPLRYACEFLIQVFGVQINKEVELAAQVREKHILQIQTMLCDMLLRDAPVAIITQSPNVMDLVKCDGAALYFKNKTWLLGVTPTEEQIRDIAEWLLKYHSGNTGLSTDSLMEAGYPGASTLGDAVCGMAAVSITSRDFLFWFRSHTAKEIKWGGAKHDPDDKDDLRKMHPRSSFKAFLEVVKWRSMPWEDVEMDAI

SEQ ID NO: 890 - protein, 392 aa, Tetrapterys discolor
DLEPVNPADVPVTAAGALKSYKLAAKAISRLQSLPSGNISLLCDVLVKEVRDLTGYDRVMVYKFHEDEHGEVVSECRRSDLESYLGLHYPATDIPQASRFLFMKNKVRMICDCLAPPVKVIQDERLPQPLSLCGSTLRSPHGCHAQYMTNMGTIASLVMSVTVNDDDDMMDGDQQQMTRKLWGLVVCHHTSPRFVPFPLRYACEFLIQVFGVQINKEVELTAQVREKHILQIQTMLCDMLLRDAPVAIITQSPNVMDLVKCDGAALYFKKKTWLLGVTPMEEQVRDIAEWLLEYHSGSTGLSTDSLMEAGYPGASDLGDAVCGMAAVSITSRDFLFWFRSHTAKEIKWGGAKHDPDDKDDGRKMHPRSSFKAFLEVVKWRSVPWEDIEMDAI

SEQ ID NO: 891 - protein, 433 aa, Saccharomyces cerevisiae
MATDTERCIFRAFGQDFILNKHFHLTGKIGRGSHSLICSSTYTESNEETHVAIRKIPNAFGNKLSCKRTLRELKLLRHLRGHPNIVWLFDTDIVFYPNGALNGVYLYEELMECDLSQIIRSEQRLEDAHFQSFIYQILCALKYIHSANVLHCDLKPKNLLVNSDCQLKICNFGLSCSYSENHKVNDGFIKGYITSIWYKAPEILLNYQECTKAVDIWSTGCILAELLGRKPMFEGKDYVDHLNHILQILGTPPEETLQEIASQKVYNYIFQFGNIPGRSFESILPGANPEALELLKKMLEFDPKKRITVEDALEHPYLSMWHDIDEEFSCQKTFRFEFEHIESMAELGNEVIKEVFDFRKVVRKHPISGDSPSSSLSLEDAIPQEVVQVHPSRKVLPSYSPEFSYVSQLPSLTTTQPYQNLMGISSNSFQGVN

SEQ ID NO: 892 - protein, 392 aa, Tristellateia madagascariensis
DLEPVNPADVPVTAAGALKSYKLAAKAISRLQSLPSGNISLLCDVLVKEVRDLTGYDRVMVYKFHEDEHGEVVSECRRSDLESYLGLHYPATDIPQASRFLFMKNKVRMICDCLAPPVKVIQDERLPQPLSLCGSTLRSPHGCHAQYMANMGTIASLVMSVTINEDDDTMDGDQQQMARKLWGLVVCHHTSPRFVPFPLRYACEFLIQVFGVQINKELELAAQVREKHILRIQTMLCDMLLRDAPVGIITQSPNVMDLVKCDGAALFYKNKFWLLGITPTEAQIRDIAEWLLEYHSGNTGLSTDSLMEAGYPGASVLGDAVCGMASVSITSRDFLFWFRSHTAKEIKWGGAKHDPDDKDDGRKMHPRSSFKAFLEVVKWRSLPWKDMEMDAI

SEQ ID NO: 893 - protein, 370 aa, Agrobacterium tumefaciens str. C58
MTSLFEPAQAGDIALANRIVMAPLTRNRSPGAIPNNLNATYYEQRATAGLIVTEGTPISQQGQGYADVPGLYKQEAIEGWKKITDGVHSAGGKIVAQIWHVGRISHTSLQPHGGQPVAPSAIPAKSKTYIINDDGTGAFAETSEPRALTIDDIGLILEDYRSGARAALEAGFDGVEIHAANGYLIEQFLKSSTNQRTDDYGGSIENRARFLLEVVDAVAEEIGAGRTGIRLSPVTPANDIFEADPQPLYNYVVEELGKRNLAFIHVVEGATGGPRDFKQGDKPFDYATFKGAYRNAGGKGLWIANNGYDRESAIEAVESGKVDAVAFGKAFIANPDLVRRLKDNAPLNEPNQPTFYGGGAEGYTDYPALG

SEQ ID NO: 894 - protein, 392 aa, Tristellateia madagascariensis
DLEPVNPADVPLTAAGALKSYKLAAKAISRLQSLPSGNISLLCDVLVKEVRDLTGYDRVMVYKFHEDEHGEVVSECRRSDLESYLGLHYPATDIPQASRFLFMKNKVRMICDCLAPPVKVIQDERLPQPLSLCGSTLRSPHGCHAQYMANMGTIASLVMSVTINEDDDTMDGDQQQMARKLWGLIVCHHTSPRFVPFPLRYACEFLIQVFGVQINKELELAAQVREKHILRIQTMLCDMLLRDAPVGIITQSPNVMDLVKCDGAALFYKNKFWLLGITPTEAQIRDIAEWLLEYHSGNTGLSTDSLMEAGYPGASVLGDAVCGMASVSITSRDFLFWFRSHTAKEIKWGGAKHDPDDKDDGRKMHPRSSFKAFLEVVKWRSLPWEDVEMDAI

SEQ ID NO: 895 - protein, 541 aa, Nocardioides sp. JS614
MPKLIAFNEEARRGLERGMNTLADAVKVTLGPKGRNVVLEKKWGAPTITNDGVSIAKEIELEDPYEKIGAELVKEVAKKTDDVAGDGTTTATVLAQAMVREGLRNVAAGANPMGLKRGIEAAVEAVSGQLLSMAKDVETKEQIASTASISAADTTVGEIIAEAMDKVGKEGVITVEESNTFGLDLELTEGMRFDKGYISAYFVTDPERMETVLEDPYVLIANQKISSVKDLLPLLEKVMQSGKPLLILAEDVDGEALSTLVVNKIRGTFKSVAVKAPGFGDRRKAMLQDIAILTGGQVISEEVGLKLESTGIELLGQARKVVITKDETTIVEGAGDADQIAGRVNQIRAEIEKSDSDYDREKLQERLAKLAGGVAVIKVGAATEVELKERKHRIEDAVRNAKAAVEEGIVAGGGVALVQAANAAFDKLDLTGDEAVGAQIVRFATDAPLKQIAINAGLEGGVVAEKVRGLTAGHGLNAATGEYVDMIASGIIDPAKVTRSALQNAASIAALFLTTEAVVADKPEKAAPMGDPSGGMGGMDF

SEQ ID NO: 896 - protein, 358 aa, Legionella pneumophila subsp. pneumophila str. Philadelphia 1
MTCRRFIMVNSDLILSPYQLNDKITLKNRVIMAPMTRNMANDDFSPTRQMADYYARRADAGLIITEGTIISPDGQGYSNAPGIFTQTHIDGWKMVTDAVHERGGKIFLQIWHVGRVSHPIFLHGNLPISASETMMTGKVRRADDLYYGKSRAATLEEINELIQNYALAARRAMIAGFDGIEIHGANGYLIDQFLHYHTNQRHDQYGQYPENMGRFALEVVKACINEIGGQSVGLRLSPGAYLNEIVGDERDAMVFRYVLEELNHYGIAYVHTGNFDDGIQFKELGFKTMTEFMRAHFKGTLIASGSYTLHQARKDIQNKKYDLIALGRPFIANPDLMNRIKWNADFLPYENRMLDTLF

SEQ ID NO: 897 - protein, 392 aa, Tristellateia madagascariensis
DLEPVNPADVPLTAAGALKSYKLAAKAISRLQSLPSGNISLLCDVLVKEVRDLTGYDRVMVYKFHEDEHGEVVSECRRSDLESYLGLHYPATDIPQASRFLFMKNKVRMICDCLAPPVKVIQDERLPQPLSLCGSTLRSPHGCHAQYMANMGTIASLVMSVTINEDDDTMDGDQQQMARKLWGLVVCHHTSPRFVPFPLRYACEFLIQVFGVQITKELELAAQVREKHILRIQTMLCDMLLRDAPVGIITQSPNVMDLVKCDGAALFYKNKFWLLGITPTEAQIRDIAEWLLEYHSGNTGLSTDSLMEAGYPGASVLGDAVCGMASVSITSRDFLFWFRSHTAKEIKWGGAKRDPDDKDDGRKMHPRSSFKAFLEVVKWRSLPWEDVEMDAI

SEQ ID NO: 898 - protein, 634 aa, Desulfotalea psychrophila LSv54
MCGLAGFFNYQFIADNTILHLQSMGKSISHRGPDASGTWYDADTGIGLVHTRLAIVDLSSAGHQPMHSQCDRYVIAFNGEIYNHLMLRQKLEQANQAPAWRGHSDTETLLACFVAWGIEQTLKVTVGMFALALWDKQEQNLTLARDRAGEKPLYWGWQGDTLLFGSELKALKAHPDFKAKVSRDALAVYMRHNYISAPQSIYEGIYKLLPGHYVTLNSVSNIDTATPKAYWTMNQAIESGIAQPFSGTDIEAVDLLEHRLSQSIGGQMLADVPLGAFLSGGVDSSVVVALMQKQAQQSVKTYAIGFDDPRYNEAQYAAAVARHLGTEHTELYVSAQDALELVPQLPSIYCEPFADSSQLPTFLVTKMARQHVTVALSGDGGDELFGGYTPYLFTPRYWNLLKCYPQPLRAALAASMSRLPLPDKFLKLAEVMGASNKESFYRSIMSHWGQPEDVVIGAKEPASVLNSSDLWPETDSFEHWMMAMEAQMYMPDDILVKVDRAAMANSLETRVPLLDHRVIELAWQLPLSMKIRDGKGKWVLREVLYRHVPRELIERPKKGFSIPLANWLRGPLRDWAEALLDEKRLRGEGYFYPAPIREAWQQHVQGKRDNASKLWSVLMFQAWLDEQDANSITL

SEQ ID NO: 899 - protein, 484 aa, Oryza sativa
MALSTAQTGESMHSSTFASRYVRTALPRFRMPEKSIPKDAAYQIINDELMLDGNPRLNLASFVTTWMEPECDKLMMAAINKNYVDMDEYPVTTELQNRCVNMIAHLFNAPIGDDETAVGVGTVGSSEAIMLAGLAFKRKWQNRMKAEGKPHDKPNIVTGANVQVCWEKFARYFEVELKEVKLTQGYYVMNPEKAVEMVDENTICVAAILGSTLNGEFEDVKMLNDLLTAKNAETGWNTPIHVDAASGGFIAPFIYPELEWDFRLPLVKSINVSGHKYGLVYAGVGWVIWRNKEDLPDELIFHINYLGADQPTFTLNFSKGSNQIIAQYYQLIRLGFEGYKDIMQNCRDNATVLREGIEKTGHFDVVSKDSGVPLVAFSLKDSSRYTVFEVAESLRRFGWIVPAYTMPADAEHVAVMRVVIREDFSRGLAERLITDLTKTVADMDAHAVKKAAAEPAKKTVREIEKEVTTYWRSFVARKKSSLVC

SEQ ID NO: 900 - protein, 205 aa, Dehalococcoides ethenogenes 195
MLNRKLRLGLLGTNCYILGDEESREGLIIDPAAISNSIPETVTEHHLNVKYILLTHGHLDHLAGLEYVRKLYPGAKLCFNPSDSHLSENIELVSYLGMPALPNLVPDIPLDEGSTLELGKTRFSVISIPGHTPGGICLYTPGYLFSGDTLFNSGIGRSDFEESDTEALRQNIINRLLSLPPETLVFPGHGRETTIGREKAGNPFI

SEQ ID NO: 901 - protein, 432 aa, Candida albicans SC5314
MTVTIPLTETNLFKPISIGDVKLNHRIVHAPTSRKRSTKDNYPTDFMIDYYKSRSQYPGSFIIFESCLVSERSGLVPHKIGLWDEKHCLALKQIVDQVHNNNCVISCQIMANGRTSNAKLMQSKNLPILAPSITYPNEAAEKLATELNFPIKPLTVDEIHNIQDDFVNAAVNSLKIADFDFVELHATSGFLIEQFLSPLSNKRTDEYGGDLVNRCRFLIEIIDKFINHPDIGPKKFGVRISPWYSHNGMVYPEEVNLEDGIPYQFCQYILKQLEVRKSQGNEIAYVSIVEPRVSGNSDVDSFGDKSNDEIIKSWSGKLIRAGGYATNFNVENPTLIKTNKQVTNEGGEIVHYANLINDVNNDDRTLIGFSRPFTSNPDLVYRLENNLKLEYYDRPTFYTQTGEGYLTFKNYDGSAVTKLPEKELMREGISLQ

SEQ ID NO: 902 - protein, 676 aa, Acinetobacter sp. ADP1
MTSYAHILKPLHLGFTTIKNRVVMGSMHTGLEDRFYNYPKLAAYFGERAKGGVGLIITGGISPNRQGWLLPAGGTMNSLADIPHHRLVTHAVHKHGGKILMQILHAGRYGYQPFIVSASPIKSPISPFKPRQMSEKNILDTIEDYARCSELAKKAGYDGIEIMGSEGYLLNQFLSRHVNQREDRWGGAIENRMRFAIEIVKAIREKVGEKFIISFRLSMLDLVHDGNTMQEVIIVAKALEKVGVTLLNTGIGWHEARVPTIVTSVPRAAFVDYTAYVKQHVTIPVIASNRINMPDVAENILATGKADMIQMARPLLADAFWVTKVATNRVDEINTCIACNQACLDHTFKNQRATCLVNPRAAYETELTYIKTKKPKKIAVVGGGVAGMSAATVAASRGHQVTLFEASHDVGGQFNLAKVVPGKEEFHETIRYFKVQIEKTGVDLRLNTRVNREQLEREGFDEVIVATGVIPRQLKIQGSDAPQVLSYAEVLKGASVGHKVAVIGAGGIGFDVSEFLLRPEHQPQPQPLAQWQREWGIDPMPDYITEGGLVPTELEPPVRQIYLLQRKTSPLGVGLGKTSGWVHRAQLKKHAVRMMRGVQYKAVTNEGLWIELDGHDQLLRVDTIVVCAGQESVKDIMPKEDENTLAHYHIIGGAKLAAELDAKRAIREGAELAAKL

SEQ ID NO: 903 - protein, 208 aa, Pyrococcus furiosus
MKVLVTGFEPFGGEKINPTERIAKDLDGIKIGDAQVFGRVLPVVFGKAKEVLEKTLEEIKPDIAIHVGLAPGRSAISIERIAVNAIDARIPDNEGKKIEDEPIVPGAPTAYFSTLPIKKIMKKLHERGIPAYISNSAGLYLSNYVMYLSLHHSATKGYPKMSGFIHVPYIPEQIIDKIGKGQVPPSMSYEMELEAVKVAIEVALEELL

SEQ ID NO: 904 - protein, 309 aa, Prochlorococcus marinus str. NATL2A
MVSSLIEASAPLKKPVAADKAMAASKKLQGHVPRRIQNKRARKRWGTVIFMLTIHALTIFTLQAQFWSWLAFSGFIFLYWVTACLGVTTGYHRLLSHRSFQVPKWLERFFATCGALSCQHGPIDWVGLHRHHHTFSDTEADHHDSNKGFWWSHMGWMFEDVPAMKAVPRLSGDLIKDPYYRFLNKNFLLLQLPLGATLYLIGQSAGVGGWAMVLWGIPLRLVFVYHITWLVNSATHCWGTIAYESGDNSKNNKWVAALTFGEGWHNNHHAFPNSAKHGLQRKQIDLTWQHIRFLKAIGLAKKIRLPVAS

SEQ ID NO: 905 - protein, 863 aa, Arabidopsis thaliana
MVSLSNQTRFSFHPNNLVVSEKRRLGISGVNFPRKIKLKITCFAAERPRQEKQKKKSQSQSTSDAEAGVDPVGFLTRLGIADRIFAQFLRERHKALKDLKDEIFKRHFDFRDFASGFELLGMHRHMEHRVDFMDWGPGSRYGAIIGDFNGWSPTENAAREGLFGHDDYGYWFIILEDKLREAEEIFQKANDEYWEPGEDRFIKNRFEVPAKLYEQMFGPNSPQTLEELGDIPDAETRYKQWKEEHKDDPPSNLPPCDIIDKGQGKPYDIFNVVTSPEWTKKFYEKEPPIPYWLETRKGRKAWLQKYIPAVPHGSKYRLYFNTPDGPLERVPAWATYVQPEDEGKQAYAIHWEPSPEAAYKWKYSKPKVPESLRIYECHVGISGSEPKVSTFEEFTKKVLPHVKRAGYNAIQLIGVPEHKDYFTVGYRVTNFFAASSRYGTPDDFKRLVDEAHAADQMVGLSLFDGSNDCYFHYGKRGHHKHWGTRMFKYGDLDVLHFLISNLNWWITEYQVDGYQFHSLASMIYTHNGFASFNNDLDDYCNQYVDRDALMYLILANEILHVQHPNIITIAEDATYYPGLCEPVSQGGLGFDYYVNLSASEMWVSLLDNNKTFVLLSDVQPVLQIVSTLVANKEYADKMLSYAENHNQSISGGRSFAEILFGGVDNGSPGGKELLDRGISLHKMIRLITFTSGGRAYLNFMGNEFGHPERVEFPTQSNNFSFSLANRRWDLLESGVHHHLFSFDKELMDLDKSKGILSRGLPSIHHVNDANMVISFSRGPFLFIFNFHPSNSYEKYDVGVEEAGEYTMILNSDEVKYGGQGIVTEDHYLQRSISKRIDGQRNCLEVFLPSRTAQVYKLTRILRI

SEQ ID NO: 906 - protein, 546 aa, Bradyrhizobium japonicum USDA 110
MAAKEVKFSVDARDKMLRGVDILANAVKVTLGPKGRNVVLDKSFGAPRITKDGVTVAKEIELEDKFENMGAQMVREVASKSADAAGDGTTTATVLAQAIVREGAKSVAAGMNPMDLKRGIDLAVEAVVADLVKNSKKVTSNDEIAQVGTISANGDAEIGKFLADAMKKVGNEGVITVEEAKSLETELDVVEGMQFDRGYISPYFVTNADKMRVEMDDAYILINEKKLSSLNELLPLLEAVVQTGKPLVIVAEDVEGEALATLVVNRLRGGLKVAAVKAPGFGDRRKAMLQDIAILTGGQAISEDLGIKLENVTLNMLGRAKKVMIDKENTTIVNGAGKKADIEARVSQIKAQIEETTSDYDREKLQERLAKLAGGVAVIRVGGATEVEVKERKDRVDDAMHATRAAVEEGIVPGGGVALLRASEQLKGLRTKNDDQKTGVEIVRKALSAPARQIAINAGEDGSVIVGKILENKTYAYGFDSQTGEYVNLVTKGIIDPTKVVRTAIQNAASVAALLITTEAMVAELPKKGGAGPAMPPGGGMGGMDF

SEQ ID NO: 907 - protein, 391 aa, Androstachys johnsonii
DLEPVNPADVPVTAAGALKSYKLAAKAISRLQSLPSGNISLLCDVLVKEVSDLTGYDRVMVYKFHEDEHGEVVAECRRPDLEPYLGLHYPATDIPQASRFLFMKNKVRMICDCLAPPVEVVQDGKLSQPLGLCGSTLRSPHGCHSQYMRNMGTIASLVMSVTINENDDEMEGDQQKGRKLWGLVVCHHTSPRFVPFPLRYACEFLIQVFGVQINKEVELAAQMREKHILRTQTLLCDMLLRNAPVAIITQSPNVMDLVKCDGAALYYRKKFWLLGITPTEAQIRDIAEWLLEYHSGTTGLSTDSLMEAGYPGASILGDAVCGMAAVRITSKDFLFWFRSHTAKEIKWGGAKHDPNDKEDGRKMHPRSSFKAFLEVVKRRSLPWEDMEMDAI

SEQ ID NO: 908 - protein, 392 aa, Blepharandra heteropetala
DLEPVNPADVPVTAAGALKSYKLAARAISRLQSLPSGNISLLCDVLVKEVRDLTGYDRVMVYKFHEDEHGEVISECCRPDLEAYLGLHYPATDIPQASRFLFMKNKVRMICDCLAPAVKVIQDERLPQALSLCGSTLRSPHGCHAQYMANMGTIASLVMSVIINEDNDMMDGDQQHIARKLWGLVVCHHTSPRFVPFPLRYACEFLIQVFGVQINKEVELAAQVREKHILRTQTLLCDMLLRDAPVAIITQSPNVMDLVKCDGAALYYRKKFWLLGVTPTEVQIRDTAEWLLEYHGGNAGLSTDSLMEAGYPGASDLGNAVCGMAAVRITSRDFLFWFRSHTAKEIKWGGAKHHPNDKDDVRKMHPRSSFKAFLEVVKWRSLPWEDIEMDAI

SEQ ID NO: 909 - protein, 392 aa, Lophanthera lactescens
DLEPVNPADVPVTAAGALKSYKLAARAISRLQSLPSGNISLPSDVLVKEVRDLTGYDRVMVYKFHEDEHGEVVSECCRPDLEAYLGLHYPATDIPQASRFLFMKNKVRMICDCLAPPVKVIQDERLPQPLSLCGSTLRSPHGCHAQYMANMGSIASLVMSVTVNEDDDMVDGDQQQMARKLWGLVVCHHTSPRFVPFPLRYACEFLIQVFGVQINKKVELAAQVREKHILRTQTLLCDMLLRDAPVAIVIQSPNVMDLVKCDGAALYYRKKFWLLGVTPTEAQIRDIAEWLLEYHSGNTGLSTDSLMEAGYPGTSVLGNAVCGMAAVKITSRDFLFWFRSHTAKEIKWGGAKHDPGDKDDIRKMHPRSSFKAFLEVVKWRSLPWEDIEMDAI

SEQ ID NO: 910 - protein, 380 aa, Diacidia ferruginea
ETPAGALKSYKLAARAISRLQSLPSGIISLLCDVLVKEVRDLTDYDRVMVYKFHEDEHGEVISECCRPDMEAYLGLHYPATDIPQASRFLFMKNKVRMICDCLATPVKVIQDERLPQPLSLCGSTLRSPHGCHAQYMANMGAIASLVMSVTINEDDDVMDGDRQHRARKLWGLVVCHHTSPRFLPFPLRYACEFLIQVFGVQINKEVELAAQVREKHILRTQTLLCDMLLRDAPVAIITQSPNVMDLVKCNGAALYYKKKFWLVGLTPTEAQIRDIAEWLLEYHNGNTGLSTDSLMEAGYPGASELGDTVCGMAVVKITSRDFLFWFRSHTAKEIKWGGAKHDPDDKDDGRKMHPRSSFKAFLEVVKWRSLPWEDVEMDA

SEQ ID NO: 911 - protein, 214 aa, Agrobacterium tumefaciens str. C58
MGKLQAGIIPVTPFEQNCTILFDQDTKEGVVVDPGGDVDVILQVVAENGITLKAIWLTHGHLDHAGGADELREKLSLSVIGPHEHDRPLLERIEVQAQKYGISGLKNVEPDSWLKDGDKVSFGDHVFEVYHCPGHAPGHVIYYNRDQNFAHVGDVLFSGSVGRTDLPGGNHEQLMASIRDKLLPLGDDVGFICGHGPGGRLGEERLNNPYLKGL

SEQ ID NO: 912 - protein, 392 aa, Byrsonima crassifolia
DLEPVNPADVPVTAAGALKSYKLAARAISRLQSLPSGNISLLCDVLVKEVRDLTGYDRVMVYKFHEDEHGEVISECRRPDLEAYLGLHYPATDIPQASRFLFMKNKVRMICDCLAPPVKVIQDERLLQPLSLCGSTLRSPHGCHAQYMANMGTIASLVMSVTINEDDDMMDMDQQHMAGKLWGLVVCHHTSPRFVPFPLRYACEFLIQVFGVQINKEVELAAQVREKHILRTQTLLCDMLLRDAPVAIITQSPNVMDLVKCNGAALYYRKKFWLLGVTPTEAQIRDIAEWLLEYHSGNTGLSTDSLMEAGYPGASDLGHAVCGMAAVKITSRDFLFWFRSHTAKEIKWGGAKHDPDDKDDGRKMHPRSSFKAFLEVVKWRSLPWEDMEMDAI

SEQ ID NO: 913 - protein, 475 aa, Cucurbita maxima
MKMLSTKATCNSHGQDSSYFLGWEAYENNPFHHTSNPNGIIQMGLAENQLSFDLLESWLSKNPDAASFKRDGKSIFRELALFQDYHGLPAFKKALVEFMAEIRGNKVSFEANNIVLTAGATSANETLMFCLAEAGDAFLLPTPYYPGFDRDLKWRTGVEIVPIHCTSSNGFQITQSALEQAYKDAQTRNLRVKGVLVTNPSNPLGTTMNRDELNLVFDFITSKGIHLISDEIYSGTVFGSPGFVSAMEVLKERSSEDEEVWKRVHIVYSLSKDLGLPGFRVGAIYSNDDMVVAAATKMSSFGLVSSQTQYLLSAMLSDKKFTISYISENQKRLKQRQKMLVSGLQKAGINCLDSNAGLFCWVDMRHLLESDKFESELELWKKIVYEVGLNISPGSSCHCTEPGWFRVCFANMSESTLKLAVRRLKSFVTELRSTTTSNHRNHDNKICKNIKKNIFTKWVFRQSAQEANRKMQAER

SEQ ID NO: 914 - protein, 154 aa, Lycopersicon peruvianum
MSLIPRIFGDRRSTSVFDPFSIDVFDPFKELGFTVSNSGETSAFANTRIDWKETPEAHVFKADLPGLKKEEVKVEVEEDRVLQISGERNVEKEDKNDTWHRVERSSGKFMRRFRLPENAKMDQVKASMENGVLTVTVPKEEVNNPDVKSIEISG

SEQ ID NO: 915 - protein, 155 aa, Lycopersicon peruvianum
MDLRLLGIDNTPLFHTLHHMMEAAGEDSVNAPSKIYVRDAKAMAATPADVKEYPNSYVFVVDMPGLKSGDIKVQVEEDNVLLISGERKREEEKEGAKFIRMERRVGKFMRKFSLPENANTDAISAVCQDGVLTVTVQKLPPPEPKKPKTIEVKVA

SEQ ID NO: 916 - protein, 400 aa, Saccharomyces cerevisiae
MPFVKDFKPQALGDTNLFKPIKIGNNELLHRAVIPPLTRMRAQHPGNIPNRDWAVEYYAQRAQRPGTLIITEGTFPSPQSGGYDNAPGIWSEEQIKEWTKIFKAIHENKSFAWVQLWVLGWAAFPDTLARDGLRYDSASDNVYMNAEQEEKAKKANNPQHSITKDEIKQYVKEYVQAAKNSIAAGADGVEIHSANGYLLNQFLDPHSNNRTDEYGGSIENRARFTLEVVDAVVDAIGPEKVGLRLSPYGVFNSMSGGAETGIVAQYAYVLGELERRAKAGKRLAFVHLVEPRVTNPFLTEGEGEYNGGSNKFAYSIWKGPIIRAGNFALHPEVVREEVKDPRTLIGYGRFFISNPDLVDRLEKGLPLNKYDRDTFYKMSAEGYIDYPTYEEALKLGWDKN

SEQ ID NO: 917 - protein, 477 aa, Bacillus clausii KSM-K16
MSNYKFPDGFLWGGAIAANQAEGAYLEGGKGLTIVDLLPTGEQRRAIMEGYVQSLIPEEGVYYPSHEAIDFYHRYKEDIKLFAEMGFKALRVSIAWARIFPTGEDEEPNEDGLLFYDRLFNELLAHNIEPVVTLAHFDVPVHLIEKYGSWRSRKLVGLFEMYAKTVFTRYKNKVKYWMTFNEINMLLHLPFLGAGLVFKEGDNKQQIQYQAAHHQLVASALAVKACHEIIPDAKIGCMLAAGSFYPYTCNPKDIFKGMEKDRESYFFIDVQSRGEYPPYAMRFFKDNQLDIAMEPGDTELLKAHTVDYIGFSYYSSRTTSTDPEVNKNQTTGNVFGSIVNPYLEKSEWGWTIDPLGFRITANQLYDRYQKPLFVVENGLGAVDEWNEEGQIDDSYRIDYLGSHLAALGEAIKDGVEIIGYTSWGPIDIVSASSGEMKKRYGYIYVDRDNEGNGTLNRAKKASFDWYKQVIATNGESL

SEQ ID NO: 918 - protein, 443 aa, Brassica napus
  misc_feature (18)..(18): Xaa can be any naturally occurring amino acid
SIFPGLKGLLPLNQKMGXVNCGETGKVEPLLQFGKSRERNPDKDPLMIWLTGGPGCSSICGFLFANGPLAFKGDEYNGTLPPLELTSFSWTKVANILYLESPAGSGYSYAKTRRAAETSDTKQIHQIDQFLRSWFVDHPEFISNSFYVGGDSYSGKIVPGVVQQISLGNEKGLTPLINIKGYVLGNPAVRTNLEPNHRVSFAHRMGLISDELHESLERNCGGKFFNVDPSNAKCSNGLLAYHQCISEIYIEQILLPNCKVDYVLADISQTLPNIRTSRRRELKEFSRNDSSSLPPPSCFTYRYFLSAFWANDENVRRALGVKKGFGKWSRCNTQNIPHTYDIHNAIPYHVNNSRKGFRALIYSGDHDMMIPFSSTEAWIKSLNYSIVDDWRPWMMTSNQVAGYTRTYANKITFAPIKGGAHTAEYNPDQCSLMFKRWIDGESL

SEQ ID NO: 919 - protein, 233 aa, Haemophilus somnus 2336
MLIPIPALNDNYIWVYKRENLSVIVIDIPEIAALSQFIQAQNLVIGALLITHNHRDHIGALAEFKQFYPHVHIYGPAECADQGVTQVIDAGRLIIDEYHIDVLPTGGHTAQHLSFLVDGHLFCGDTLFSAGCGRVFTGDYSQMFTSLQLLKSLPDETIVCPAHEYTLGNLAFALTTGKNKSAVQKQLEKVKKLRAENNPSLPTTLALEKQINPFLQVEGLEEFIELRKAKDMF

SEQ ID NO: 920 - protein, 189 aa, Oryza sativa (japonica cultivar-group)
MADAGHDESGSPPRSGGVREQDRFLPIANISRIMKKAVPANGKIAKDAKETLQECVSEFISFVTSEASDKCQKEKRKTINGEDLLFAMGTLGFEEYVDPLKIYLHKYREMEGDSKLSSKAGDGSVKKDTIGPHSGASSSSAQGMVGAYTQGMGYMQPQSNFHILVVLQSFAFPYMYQVAQIYCKYPSIE

SEQ ID NO: 921 - protein, 431 aa, Thermus thermophilus HB8
MTENAEKFLWGVATSAYQIEGATQEDGRGPSIWDAFAQRPGAIRDGSTGEPACDHYRRYEEDIALMQSLGVRAYRFSVAWPRILPEGRGRINPKGLAFYDRLVDRLLASGITPFLTLYHWDLPLALEERGGWRSRETAFAFAEYAEAVARALADRVPFFATLNEPWCSAFLGHWTGEHAPGLRNLEAALRAAHHLLLGHGLAVEALRAAGARRVGIVLNFAPAYGEDPEAVDVADRYHNRFFLDPILGKGYPESPFRDPPPVPILSRDLELVARPLDFLGVNYYAPVRVAPGTGTLPVRYLPPEGPATAMGWEVYPEGLYHLLKRLGREVPWPLYVTENGAAYPDLWTGEAVVEDPERVAYLEAHVEAALRAREEGVDLRGYFVWSLMDNFEWAFGYTRRFGLYYVDFPSQRRIPKRSALWYRERIARAQT

SEQ ID NO: 922 - protein, 163 aa, Helianthus annuus
MSIIPNFFGRRRTNCFDPFSLDVWDPFEGFPFNNNNFGSLSDQVRSSSETSSFVNANVDWRETNDAHVFKADVPGLKKEEVKVEVEDDRVLQISGERNKESEEKGDTWHRVERSSGKFVRRFRLPENAKVDQVKAAMENGVLTVTVPKVEVKKPDVKSIQISG

SEQ ID NO: 923 - protein, 732 aa, Corynebacterium diphtheriae NCTC 13129
MVSPTQITPVHPDVLHALKICQYHDPHGVYGWHEVDAERAVIRTRHIGAERVETLLSDSTVVELAAVGDDIFEAIVDHDASCDYRLRIHWQGGQVTEQADAYHFLPTLGDLDLHLINEGRHERLWEVLGANPTTITTAMGDVEGTAFAVWAPNASGVAVIGDFCGWNPSQYPMRSLGSTGIWELFIPNIGVGTVYKFAIHTHEGHRLDKADPMAKRAEVAPATGSIIASSSYTWNDDTWMTNRAHTDHDNTAMSVYEVHLGSWSQGQNYEELATNLVDYVKEMGYTHVEFLPVAEHPFGGSWGYQVSGYYAPTSRWGTPDQLRLLIDAFHQAGIGVIVDWVPAHFPKDAFALGRFDGQALYEHPDWRRGEQKDWGTYVFDFGRNEVRNFLVANALYWLEEFHVDGLRVDAVASMLYLDYSREPGEWLPNIYGGRENLEAVQFLQEMNATVHKSHPGVMTIAEESTSWPGVTSPTWEGGLGFSMKWNMGWMNDTLEYFSHEPIHRMYHHNDITFSMVYAYSEKFVLPFSHDEVVHGKGSLWTRMPGDAWNKAAGLRTLYAYMYAHPGKNLLFQGQEFGQVKEWSEERSLDWGDMDGWEGEYHRGIRTLVQDLNALYKDSPALYSQDNNPAGFSWTKSDDAANNILSFVRYGADGSKILAVFNFGGADHPSYKLGVPEGGNWKCILNTDAGIYEGEDNYLDSDVMAWDTDWDGYQHSLTVHIPAMSGQLYRWEA

SEQ ID NO: 924 - protein, 485 aa, Betula pendula
MGFMNSNAKHLLSKIATGNGHGENSPYFDGWKAFESNPFHPTKNPQGVIQMGLAENQLCFDLVQEWILKNPQASICTPEGVYDFSEIAVFQDYHGLPEFRNAVAKFMAKVRGNRVRFDPDRIVMSGGATGAHETIAFCLADPGEAFLVPTPYYPGFDRDLRWRTGVQLLPVTCESPNNFKVTRKALEAAYESAQEKNIRVKGLLITNPSNPLGTILDKQTLRELVSFINEKSIHLICDEIYAATVFSQPDFVSISEVIEEEKEIACNRDLIHIVYSLSKDMGFPGFRVGIIYSYNDAVVQCCRKMSSFGLVSSQTQHLLASMLSDDVFVDRFIAESSKRLEKRYQDFTFPLAQVGINCLKSNAGLFLWMDLRHLLKNQTPEAEMELWKVIIDEVKLNVSPGDSFHCSEPGWFRVCLAQKGQSRRRVALTRIRTFVHQNKEVKNRLKRKCWNSNLRLSFSSLRVDHDNMMSPHSPMAQSPLVRAMN

SEQ ID NO: 925 - protein, 85 aa, Verbascum nigrum
GSVSEANTQYYQQEASKLRAQISNLQNQNRNMLGESLGGLTLRDLKNLETRVEKGISRIRSKKNELLFTEIEYMQKRQEIDLHHN

SEQ ID NO: 926 - protein, 740 aa, Pleurotus ostreatus
MSSVTAAAKQAVSSITDNAKMASLTQFRVECGPSQRMTTDQGLHVADTDNCNSNVGPALLEDHIAREKIMRFDHERIPERVVHARGAGAHGYFKAYDSSAEQWTKAKVLMDPSRTTPVFVRFSTVQGSRGSADTVRDVRGFAVKFYTEEGNWDIVGNNIPVFFIQDAIKFPDIIHAVKPEPHNEVPTGQSAHNNFWDFVGLQPESAHMIMWVMSDRAIPRSYRMMQGFGVNTYTLLNATGEKHFVKFHWIPELGVHSLVWDEALKIAGQDPDFHRKDLNEAIESGAYPKWRLALQVISEKDEHNFDFDILDATKIWPEELVPLHFVGEMVLNKVVDEYFAEVEQVAFCTSNIVPGIGFSDDPLLQGRNFSYLDTQLSRLGINWQQIPINRPVCPVMNFQRDGQMQMKIHKGTVNYWPNRQEAVQPVAVSEGGYDDHVRKISGIAQRMRGPKFNEHYSQAQLFYNSLSPTEQTHLQSALAFELSHCEDPAVYRNYINILNNIDYQLAKYVAVAVGGDVPDASAKPNEGNKSARLSQVYYAPKEPTIKGRRIAILLADGFDKAEVVAIKALITSASANAFVIGPRRGKVYAAGEKIGVEGGGIDADHHFEGQRSTMFDALVIPSGEHVALLMKSGRAVHWLREAFGHCKAIGAVGEAILFVQQAINLPEVQYADPTDSSMEVVASYSVVTTAHYGVSTAIGDATKMTLNIGEKGFMERFAYEVSKHRCFKREEDGLTARIAY

SEQ ID NO: 927 - protein, 367 aa, Betula pendula
QMGLAENQLCFDLIEEWIKKNPKASICTAQGVNELKNIAIFQDYHGLPEFRQAVANFMGRVRGGRVRFDPDRIVMSGGATGANELITFCLADPGDVFLVPSPYYPAFDRDMGWRTGVQILPVHCDSSNGFLITKAALEAAYEKAQEENIKIKGLLIANPSNPLGTVLDRETLTSVVSFVNEKNIHLVCDEIYSATVFGSATFTSISEIIEEVEYCNRDLIHIVYSLSKDMGLPGFRVGIVYSYNDAVVSCGRKVSSFGLVSSQTQHLLASLLSDEEFVGKYLSESSKRLAKRHDMFTKGLEKAGISCLKSNAGLFVWMDLRWLLEKQTFEEELVLWRVIINQVKLNVSPGTSFHCSEPGWFRVCFAA

SEQ ID NO: 928 - protein, 134 aa, Zea mays
MRKHRIVSLVAALLILLALAVSSTRNAQEDSMADNTGTLAGGIKDVPGNENDLHLQELARFAVDEHNKKANALLGFEKLVKAKTQVVAGTMYYLTIEVKDGEVKKLYEAKVWEKPWENFKELQEFKPVDEGASA

SEQ ID NO: 929 - protein, 368 aa, Betula pendula
QMGLAENQVSFDLLEEYLEKHSEASTWGKGASGFRENALFQDYHGLLSFRKAMASFMEQIRGDRVKFDPERVVLTAGATAANELLTFILADPGDALLVPTPYYPGFDRDLRWRTGVKIVPIHCESSNNFQITPKALEDAYNNAEAMNIKVRGVLITNPSNPLGATIQRSVLEEILDFVTRKNIHLVSDEIYSGSVFSSSEFISVAEILEAREYRKEYSERVHIVYSLSKDLGLPGFRVGTIYSYNDDVVKTARRMSSFTLISSQTQHLLASMLSNKKFTENYIQINRERLRKRYEMIIEGLRSAGIECLKGNAGLFCWMNLSPLLDEPTREGELVVWDSMLHEVKLNISPGSSCHCSEPGWFRVCFAA

SEQ ID NO: 930 - protein, 220 aa, Oryza sativa
MVMNPDAVRNVVGIIGNLISFGLFLSPLPTFVTIVKKKDVEEFVPDPYLATFLNCALWVFYGLPFIHPNSILVVTINGTGLLIEIAYLAIYFAYAPKPKRCRMLGVLTVELVFLAAVAAGVLLGAHTYDKRSLIVGTKQVIATKSVEYMPFTLSLVSFINGICWTIYAFIRFDILITIPNGMGTLLGAAQLILYFCYYDGSTAKNKGALELPKDGDSSAV

SEQ ID NO: 931 - protein, 392 aa, Coleostachys genipifolia
DLEPVNPADVPVTAAGALKSYKLAARAISRLQSLPSGNISLLCDVLVKEVRDLTGYDRVMVYKFHEDEHGEVVSECRRPDLEAYLGLHYPATDIPQASRFLFMKNKVRMICDCLAPPVKVIQDKRLVQPLSLCGSTLRSPHGCHAQYMANMGAIASLVMSVTINEGDDTMDGDQQQMARKLWGLVVCHHTSPRFVPFPLRYACEFLIQVFGVQINKEVELAAQVREKHILRTQTLLCDMLLRDAPVAIITQSPNVMDLVKCDGAALYYRKKFWLLGVTPTEAQIKEIAQWLIEYHSGDTGLSTDSLMEAGYPSASVLGDAVCGMAAVKITSRDFLFWFRSHTAKEIKWGGAKHDPDDKDDGRKMHPRSSFKAFLEVVKWRSLPWEDVEMDAI

SEQ ID NO: 932 - protein, 553 aa, Alkalilimnicola ehrlichei MLHE-1
MAAKEIRFSDDARQRMMKGVNTLANAVKATLGPRGRNAVLDKSFGAPTVTKDGVSVAKEIELEDKFENMGAQMLKEVSSQTSDIAGDGTTTATVLAQAILREGMKAVAAGMNPMDLKRGIDKGVSAATKYLADELSKPCETDTSIAQVGSISANSDESVGRIIADAMQKVGKEGVITVEEGSGLENELDVVEGMQFDRGYLSPYFINNQQSMKAELEDAFILLHDKKISNIRDLLPLLENVAKANKPLLIISEDIEGEALATLVVNSIRGIVKVAAVKAPGFGDRRKAMLQDIAVLTGGTVISEEVGLSLEKATLDDLGQAKKVDVSKEETTIVGGAGRHDDIMARVEQIRAQIEESTSEYDKEKLQERVAKLAGGVAVIKVGATSEIEMKEKKARVEDALHATRAAVEEGIVPGGGTALLRAQASLDGLEYANHDQEVGINIVRRAMEEPLRQIVYNAGGDGAVVVNEVRNGEGNYGYNAQSGEYGDLVEMGILDPTKVTRTALQNAASVAALMITTEVMVADLPKDDDAGAGGGMGDMGGMGGMGGMGGMM

SEQ ID NO: 933 - protein, 392 aa, Acmanthera latifolia
DLEPVNPADVPVTAAGALKSYKLAARAISRLQSLPSGNISLLCDVLVKEVRDLTGYDRVMVYKFHEDEHGEVVSECRRPDLEAYLGLHYPATDIPQASRFLFMKNKVRMICDCLAPPVKVFQDKRLAQPLGLCGSTLRSPHGCHAQYMANMGAIASLVMSVTINEGDDMIDGDQQQMARKLWGLVVCHHTSPRFVPFPLRYACEFLIQVFGVQINKEVELAAQVREKHILRTQTLLCDMLLRDAPVAIVTQSPNVMDLVKCDGAALYYRKKFWLLGVTPTEVQIKEIAEWLIEYHSGNTGLSTDSLMEAGYPGASVLGDAVCGMAAVKITSKDFLFWFRSHTAKEIKWGGAKHDPDDKDDGRKMHPRSSFKAFLEVVKWRSLPWEDMEMDAI

SEQ ID NO: 934 - protein, 744 aa, Calothrix viguieri
MTETSPKPIVTTAAFPANEVERLEALRRYNILDTPPEVAFDRITSLAARLFNVPITLVSLVDESRGWFKSSYGFEMREVRRDTTICSFALLSDEVLVIPDTREDSRLVCNPFVQNEPGLRFYAGAPLLTQDGFNLGTLCLLDTKPRDGLSDEQKSVLSDLAAMVMDELELRLAARKVAQMDTALLEVTQGVSTATGEAFFSALVQHMLKVLGVDYVYIGLVDPDNQEIIRTIAACAKGQIIGNFEYLLHDTPCEQVLQKRKLCCYPHRVQALFPKAPLLEPLGVESYVAVPFFDTTGIPLGLLGVMDGNALTNIQLAESLLTIFALRIATELERQQTEAARQQAQYELERLVEQRTTELSKANELLKVLLDNVQAGIVACDAEGILTLFNQAARQFHGLPEQALPPEEWAKHYDLYLPDGKTRMSKNEIPLFRALQEQTVKNVEMVIAPKHGKVKTLLASGQAIVDNEGKKQGAVVVMHDITERKIAEAERIQLIRQQVQEQSARLKAEEANRLKDEFLAVLSHELRTPLNPILGWTKLLRAGKLDSAKTDYALETIERNAKLQTQLIGDLLDVSRILQGKLSLNMAAVNLAPTISAAIETVQLAAQAKSIQIETVFDPNVGQVLGDSTRLQQVVWNLLSNAVKFTKNGGRVEIRLECVDSQAEIKVSDTGKGISPDFLPHVFESFRQADATITRKFGGLGLGLAIVRHLVELHGGTIYAESPGEDLGATFTVRLPLIAVVKTC

SEQ ID NO: 935 - protein, 392 aa, Pterandra arborea
DLEPVNPADVPVTAAGALKSYKLAARAISRLQSLPSGDISLLCDVLVKEVRDLTGYDRVMVYKFHEDEHGEVVSECRRPDLEAYFGLHYPATDIPQASRFLFMKNKVRMICDCLAPPVQVIQDKRLAQPLSLCGSTLRSPHGCHAQYMANMGAIASLVISVTINEGDDMMDGDQQQMARKLWGLVVCHHTSPRFVPFPLRYACEFLIQVFGVQITKEVELAAQVREKHILRTQTLLCDMLLRDAPVAIITQSPNVMDLVKCDGAALYYRKKFWLLGVTPTEAQIKEIAEWLLEYHSGNMGLSTDSLMEAGYPGASVLGNAVCGMAAVKITSRDLLFWFRSHTAKEIKWGGAKHDPDDKDDGRKMHPRSSFKAFLEVVKWRSLPWEDVEMDAI

SEQ ID NO: 936 - protein, 467 aa, Zea mays
MMLKDLAAIQHQQQQLAADENMSNLTSASGDLQASVSSHPAPPPAKKKRSLPGNPDPDAEVIALSPRTLMATNRYVCEVCGKGFQRDQNLQLHRRGHNLPWKLKQRNPKEAVRKKAYVCPEPGCVHHDPARALGDLTGIKKHFSRKHGEKKWKCDRCAKRYAVHSDWKAHSKVCGTREYRCDCGTHFSRRDSFITHRAFCDALAEESARAVTAAAAVVVGQQQAAGGGDGSAGLHLPPDVLDPSQTLGGGHGMSLQELCLKREQQQQFAPSSWLTAHHQQELPGSARLLEQHEYIGSSTPESTAGLSGFVGLSPSAAGEAAASAHMSATALLQKAAQMGATLSRPSNQEQMASTHSHSSTTNAGTGSASAAAAAAINVPGTGAGAFGFGAPHHFGAEERTTTSADRDACGNAAAVSVVGANDGFTRDFLGLRAFSHGDILTMAGFDPCMSSAAYEQGHHQSSKQWHV

SEQ ID NO: 937 - protein, 392 aa, Galphimia gracilis
DLEPVNPADVPVTAAGALKSYKLAARAISRLQSLPSGNISLLCDVLVKEVRDLTGYDRVMVYRFHDDEHGEVVSECCGPDLEAYLGLHYPATDIPQASRFLFMKNKVRMICDCLAPPVKVLQDERLPQPLSLCGSTLRSPHGCHAQYMANMGTMASLVMSVTINEDDNMLDGDQQHMARKLWGLVVCHHTSPRFVPFPLRYACEFLIQVFGVQINKEVELAAQMTEEHILRTQTLLCDMLLRDAPVAIITQSPNVMDLVKCDGAALYYRKKFWLLGVTPTEAQIRGIAEWLLEYHGGNTGLSTDSLMEAGYPGASVLGDAVCGMAAVKITSRDFLFWFRSNTAKEIKWSGAKHDPGDKDDIKKMHPRSSFKAFLEVVKWRSLPWEDVEMDAI

SEQ ID NO: 938 - protein, 474 aa, Pyrus communis
MHMLSRNATFNPHGQDSSYFLGWQEYEKNPYHEVHNTNGIIQMGLAENQLCFDLLESWLAKNPEAAAFKKNGESIFAELALFQDYHGLPAFKKAMVDFMAEIRGNKVTLDPNHLVLTAGATSANETFIFCLADPGEAVLIPTPYYPGFDRDLKWRTGVEIVPIHCTSSNGFQITETTLEEAYQEAEKRNLRVKGVLVTNPSNPLGTTMTRNELYLLLSFVEDKGIHLISDEIYSGTAFSSPSFISVMEVLKDRNCDKNSEVWQRVHVVYSLSKDLGLPGFRVGAIYSNDDMVVAAATKMSSFGLVSSQTQHLLSAMLSDKKLTKNYIAENHKRLKQRQKNLVSGLQKAGISCLNGNAGLFCWVDMRHLLRSNTFEAEMELWKKIVYEVHLNISPGSSCHCTEPGWFRVCFANLPERTLDLAMQRLKAFVGEYYNVPEVNGRSQSSHLSHSRGQSLTRKWVSRLSFDDRCSIHGR

SEQ ID NO: 939 - protein, 392 aa, Acridocarpus natalitius
DLEPVNPADVPVTAAGALKSYKLAAKAISRLQSLPSGNISLLCDVLVKEVRDLTGYDRVMVYKFHEDEHGEVVSECRRSDLEAYLGLHYPATDIPQASRFLFMKNKVRMICDCLAPPIKVIQDERLPQPLSLGGSTLRSPHGCHAQYMANMGTIASLVMSVTINEDDDMMDGDQQQMARKLWGLVVCHHTSPRFVPFPLRYACEFLIQVFGVQINKEVELAAQVREKHILQIQTLLCDMLLRDAPVAIITQSPNVMDLVKCDGAALYYKKKFWLLGITPTEAQIRDIVEWLLEFHSGNTGLSTDSLMEAGYPGASVLGDAVCGMAAVSITSKDFLFWFRSHTAKEIKWGGAKHDPDVKDDGRKMHPRSSFKAFLEVVKWRSLPWEDVEMDAI

SEQ ID NO: 940 - protein, 446 aa, Pyrus communis
MAIDIEQQQQPSPGLSKIAISDTHGEDSPYFAGWKAYDENPYHESSNPSGVIQMGLAENQVSFDLLEKHLEENSEASNWGSKGSKGASGFRENALFQDYHGLLSYKKAMANFMEQIRGGRAKFDPVRVVLTAGATAADELLTFIIADPGDALLVPTPYYPGFDRDLRWRTGVNIVPIHCESSNNFQITPQALEAAYKEAEARNMRVRGVLFTNPSNPLGATIQRTVLEEILDFVTQKNIHLVSDEVYSGSAFSSSEFISVAEIMEDRQYKDAERVHIVYSLSKDLGLPGFRVGTVYSYNDKVVTTARRMSSFTLISSQTQHLLASMLSDKEFTENYIKTNRERLRRRYDMIVEGLKKSGIECLKGNAGLFCWMNLSPFLDEPTRESELTLWDSMLHEVKLNISPGSSCHCSEPGWFRVCFANMSEQTLGIALTRIHNFMEKRERAC

SEQ ID NO: 941 - protein, 670 aa, Bacteroides fragilis YCH46
MEKTLNLIKNDPWLEPYKDAIVGRFEHAMDKKAELTNGGKSTLSDFASGYLYFGLHRTDKGWIFREWAPNASHIYMVGTFSNWEEKPAYKLKRLKNGSWEIKLPIDAIQHGDLYKLHVYWEGGQGERIPAWANRVVQDDNTKIFSAQVWAPEKPFKFKKKTFKPSTDPLLIYECHIGMAQQEEKVGTYNEFREKILPRIAKEGYNCIQIMAIQEHPYYGSFGYHVSSFFAASSRFGTPEELKQLIDTAHGLGIAVIMDIVHSHAVKNEVEGLGNFAGDPNQYFYPGGRREHPAWDSLCFDYGKNEVMHFLLSNCKYWLEEYHFDGFRFDGVTSMLYYSHGLGEAFCNYGDYFNGHQDDNAICYLTLANELIHEVNPKAITIAEEVSGMPGLAAKVEDGGYGFDYRMAMNIPDYWIKTIKEKIDEDWKPSSMFWEVTNRRQDEKTISYAESHDQALVGDKTIIFRLIDADMYWHMQKGDENYIVHRGVALHKMIRLLTASTINGGYLNFMGNEFGHPEWIDFPREGNGWSCKYARRQWDLVDNKNLTYHYLGDFDADMLKVIKSVKNIQQTPVQEIWHNDGDQVLAYQRKDLVFVFNFNPSQSFTDYGFLVTPGTYEVVLNTDNIIYGGNGLSDDSVKHFTLPDPLYKKEKKEWLKLYIPARTAMVLRRTK

SEQ ID NO: 942 - protein, 446 aa, Pyrus communis
MAIDIEQRKQPSPRLSKIAVSDTHGEDSPYFAGWKTYDENPYHESSNPSGVIQMGLAENQVSFDLLENHLEENSEASTWGSKGSKGVSGFRENALFQDYHGLLSFRKAMASFMEQIRGGRAKFDPARVVLTAGATAANELLTFVIADPGDALLVPTPYYPGFDRDLRWRTGVNIVPIHCESSNNFQITPQALEAAYKEAEAKNMRVRGVLFTNPSNPLGATIQRTVLEEILDFVTQKNIHLVSDEIYSGSAFSSSEFISVAEILENRQYKDAERVHIVYSLSKDLGLPGFRVGTVYSYNDKVVTTARRMSSFTLISSQTQHLLASMLSDKEFTENYIKTNRERLRRRYDMILEGLKKSGIECLKGNAGLFCWMNLSPFLDEPTRESELTLWDSMLHEVKLNISPGSSCHCSEPGWFRVCFANMSEQTLGIALTRIKNFMEKRERAC

SEQ ID NO: 943 - protein, 506 aa, Acinetobacter sp. ADP1
MSDDKLKCPVTHLTTDAGAPVVDNQNSMTAGARGPLLTQDLWLNEKMANFAREVIPERRMHAKGSGAFGTFTVTHDITQYSRAKIFSEIGKKTEMFARFSTVAGERGAADAERDIRGFALKFYTEEGNWDMVGNNTPVFFMRDPRKFPDLNKAVKRDPKTNLRSATYNWDFWTLLPEALHQVTIVMSDRGIPDGYRHMHGFGSHTYSFINASNERFWVKFHFRTQQGIKNLTDAEAEAIVAKDRESSQSDLFNAIEQGNYPKWTMFVQIMPETDAEKVPYHPFDLTKVWPHGDYPLIEVGEFELNRNAENYFQDVEQATFAPSNLVPGISYSPDRMLQARLVNYADAHRYRVGVNHTQIPVNAPRCPVHSNRRDGQGRMDGNYGGLPHYEPNSFHQWQEQPEFREPPLKITGDADFWDFRQDDSDYFSQPRALFNLMNDEQKQALFGNTARAMGDALDFIKYRHIRNCYACDPAYGEGVAQALGMTVADAQAARDSDPAKGHPGFL

SEQ ID NO: 944 - protein, 147 aa, Geobacter sulfurreducens PCA
MAIVKYSPFRDMMNMQEQMNRLLDLAWSKQGGEELREGAWQPPVDIFEDENAVIIKAELPGIDQKDIEVRIEDNTLTIRGERKHEEEVRKENYHRVERYYGSFQRSFSIPATIDQEKVRASSDKGVLTITLPKREEVKPKQITVEVT

SEQ ID NO: 945 - protein, 632 aa, Coxiella burnetii RSA 493
MCGIAGIFNLNGKPVAFDQIKAMTDSIAHRGPDGEGQFTDKYIGLGHRRLAIIDLSPAGHQPMQTKDGRYLITYNGEVYNFKILRKELETLGYSFFSNTDTEVVLNAYVQWGEKCLEKFNGMFAFAVWDRKEKTLFLARDRYGIKPLYYYQTNDCFVFASEIKAIIASGLYGAEINKEALVEYLTFQNFFTDRTLFKDVRIMPAGHFMMVKRENSSLHQYWDFNFTNDSALSEKMLLEKINDLFQQAVNRQLVSDVPVNSYLSGGVDSGSITMIAAKQLPHIRTFTVGFDLSSASGLELAFDERQAAEHLSYLAGTEHYEMVLKAGDMERCMQDLVWHLEEPRIGQSYPNFYAAKLASKFGKVVLAGTGGDELYAGYPWRYLCGQSSENFEDYIDKYYQYWQRLMSNKNLFKVLAPIAEEVKSIWTRDIFANVFRIKDTPIKTEDYINYSLYFEAKTFLHGLLVVEDKLSMAHGLETRVPCLDNDFVDFALQVPVKYKLSDFAFERVNENDTFSKREKRMNGKKILRKMMSRYVPDNVAHAPKQGFSAPDASWFKGESIEFVRSLLGDRNAKIFELLDYSVVNHLVNDHIQNHHNHRLLIWSLIYLEIFMQVHLSKGHKSNYHLFTPETVEL

SEQ ID NO: 946 - protein, 484 aa, Enterococcus faecalis
MKNQHLTTSQGSPVGDNQNSLTAGEFGPVLIQDVHLLEKLAHFNRERVPERVVHAKGAGAHGIFKVSQSMAQYTKADFLSEVGKETPLFARFSTVAGELGSSDTLRDPRGFALKFYTDEGNYDLVGNNTPIFFIRDAIKFPDFIHSQKRNPRTHLKSPEAVWDFWSHSPESLHQVTILMSDRGIPLSFRHMHGFGSHTFKWVNAAGEVFFVKYHFKTNQGIKNLESQLAEEIAGKNPDFHIEDLHNAIENQEFPSWTLSVQIIPYADALTMKETLFDVTKTVSQKEYPLIEVGTMTLNRNPENYFAEVEQVTFSPGNFVPGIEASPDKLLQGRLFAYGDAHRHRVGANSHQLPINQAKAPVNNYQKDGNMRFNNGNSEINYEPNSYTETPKEDPTAKISSFEVEGNVGNYSYNQDHFTQANALYNLLPSEEKENLINNIAASLGQVKNQEIIARQIDLFTRVNPEYGARVAQAIKQQAHHHHHH

SEQ ID NO: 947 - protein, 1122 aa, Stellaria longipes
MASRAQSQSSTNSGRSKHSARIIAQTIQDAKFHAEFEESSNEFDYSSSVRGSTSGVNQLPKSDKVTSSYLLQIQKGKFIQPFGCLLALDDKTFRVIAFSENAPEMLTMVSHAVPSVGDLPVIGIGTDIRTIFTGPSASALQKALGFTDVSLLNPILVHCKNSGKPFYAIVHRVTRSLVIDFEPVKPYEVPMTAAGALQSYKLAAKAITRLQSLPSGNMVRLVDTMVQEVFELTGYDRVMAYKFHDDDHGEVVSEVTKPNLDSYLGLHYPATDIPQAARFLFMKNKVRLICDCRAKNVRVVQDEKLSVDLTLCGSTLRAPHGCHAQYMENMNSIGSLVMAVVVNDEDDEDGGSAPAQPHKRKRLWGLVVCHHTSPRFVPFPLRYACEFLAQVFAIHVNKELELENQFLEKKILRTQTLLCDMLIRDAPLGIVTHSPNIMDLVKCDGAALLYNNKVWRLGSTPTDYQLQEIGGWLSRDHMDSTGLSTDSLYDAGYPAALELGDSVCGMAAVSITVNDMLFWFTSHTAAEIKWGGAKHEAGEKDDGSKMHPRSSFKAFLEVVKRRSVPWKDYEMDAIHSLQLILRNAFKDGEAADLNTSVIHSKISDLQISGLKELEAVTSEMVRLIETATVPIFAVDSDGLVNGWNTKIYELTGIPVEEAVGKHIAALVEDSSIDNVKQMLQSALQGEEKKNVQFEVKRHHSIPDSGPISLIVNACASKDVNGNVVGVCLIAQDITGQKTVMDKFLRIEGDYKAIIQSPNPLIPPIFGTDEFGWCSEWNPAMAKLTGWTREEVIDKMLLGEVFGMHKSCCRLKNQEAFVNLGVLLNGAMSGQNIEKLSIGFFTRSGKYIECLLCVNKKLNGEGDVTGVFCFLQLASHDLQHALHIQRLAEQAATKRANVLAYMKRQIKNPLAGIIFSGKILDGTNVDEKQRLVLQTSARCQGQLNKILDDSDLDSIIDGYCELEMVEFAVQDILVASISQVMAKSSEKGIQMSNNCTEHGFKETLYGDSLRLQQILADFLSISVNFTSPGGHIGVTVRLTKDKIGESVQLANLEFRIMHTGGGISEELLSEMFESRGNASEDGISLLISRKLVKLMNGDIQYLRSAGTSTFIISVELAVAGNSS

SEQ ID NO: 948 - protein, 226 aa, Pinus halepensis
DDQQDIRRGKGKVDSLFQAPMGSGTHNAIMSSYDYISTAQRTYSLDNMMDGYYIAPAFMDKLVVHISKNFMNLPNIKVPLILGIWGGKGQGKSFQCELVFAKLGINPIMMSAGELESGDAGEPAKLIRKRYREAADIVKKGKMCVLFINDLDAGAGRMGSTTQYTVNNQMVNATLMNIADNPTNVQLPGMYNKEENPRVPIVVTGNDFSTLYAPLIRDGRMEKFYW

SEQ ID NO: 949 - protein, 162 aa, Zea mays
MSLIRRGSAFDPFSLDLWDPFQGFPFGSGSSSSSSLFPSFGGTTTSSETAAFAGARVDWKETPEAHVFKTDVPGLKKEEVKVELEDGNVLQISGERSKEQEEKTDTWHRVERSSGKFLRRFRLPENARTEQISASMENGVLTVTVPKEEAKKADVKSIQISG

SEQ ID NO: 950 - protein, 483 aa, Thermococcus kodakarensis KOD1
MCLIAGGMGGNLREKLIKMAIAGKHRGPESFGVWTDGGVLKSDDFSKLTEIPDGRIGLLQCRLAITGSKSFTQPFINDLALVHNGEIYNHAALREYLERRGVSFESDVDSEVVLRLIEFLREEHLSYPEIVKKLFWMLEGDYAVAFSDGERIYLFRDPLGIRPLYFSRNGLFASEKKVLWAVGEREVEPVQPGELVVLEKNGVRRARLFSLENLKSKAKCERKDPVGGVGKLLRYAVKNRVSKKTGVLFSGGLDSTLVAYLASQYSDVILYTAGTEDSPDIEWARKVADHFGWALRERTFEVEDVRDAVKRVMYAIEEPNPMNLAIGLPLYFASGLASSDGTRVLLSGQGADELFGGYAKYLERPELMEEDIALISERNLARDDKITMLNGVEGRYPFLALPVVSFALKLPLEAKIVDGTRKVILRKLALRLGIPEWIAEREKRAAQYGSRAQKLLEKIAREEGLTLREFAEKLFRETFPNAF

SEQ ID NO: 951 - protein, 256 aa, Zea mays
  misc_feature (175)..(175): Xaa can be any naturally occurring amino acid
  misc_feature (193)..(193): Xaa can be any naturally occurring amino acid
  misc_feature (209)..(209): Xaa can be any naturally occurring amino acid
RTLSLRLKVKIIRYAPCGEIVKHASRLEQEIEENPASIPFQEIIYCNLGNPQVLGQPPLTFFREVLSLCDNPALMDRDEARALFSPCSIRRARRILNSIPSKDTGGYTDCRGIKCLRQVVADGITARDGFPSTADDIFLTDGATSAINLMMQILIRSHEDGILSPLPEYPLYSAXIILHGGTMVPYNLTEDNXWGLEIFEVKRCLEEAXSAGLTGRAMVVINPGNPTGQVYQENIYAENKKFHSFKKGARSLAYDE

SEQ ID NO: 952 - protein, 1268 aa, Vibrio cholerae
MKSLISVPKFSLRSWLMSLWLPLGLLVIGYFVATSKVDQQQQTQAKRISDAVTVRLNLIAAGVQEKVTLYQYGLRGIRTAVMLLSPEHFDYNDMQAYTQARDYKREFPGARGFGLIIKVEPNQTAAFLDRMAAERPSYNFQIRQLTPHQDSLFVITYIEPEQNNREAVGVDIGSEAMRRKAALDAAFNNDVRLTAPITLVQANERAQQGFLILMPVYKTTTVPQDSRQRLEHLFGWSYATILINDVLNSVAGLENDVFLQISDITEQTPIEFFSQEVKDTYDAALQQKLNLSVFGRQWQLSLTPTNRFINELQLRSGTSLFFEVMAVSTILAFGVYLLQLMLMRRSQLIRHKQELASIAEQTLLKANAELEQQVALRTAEISRVNILQRSILSSAGYAIIATDEEGIITAFNPAAEKLLGYRAEEVLFQQTPSIFHLPAEVEHHAAKLTTELGSNIAVGFETLVAKARLGQTDNARWTYLTKTGEQVQVKLNVSALKDEQGQLAGFLSIAFDLTKQLKYEAELAQAKEQAESANKAKSEFLANMSHEIRTPMNGVLGLLQLVANSTLDQRQADYIEKAYSAAKSLLTLLNDILDFSKIEAGKLELDPHPFSLTDLMQDIGLVFSSSAEQKGLEVLYDVTADVPEHLLGDSFRIKQVLINLVGNAIKFTDKGEILISIRSQSLPEGEINLSFSIKDTGIGITLEQQNALFSGFQQADSSISRRYGGTGLGLAISKRLVNLMGGEIGVESEFGCGSTFSFNVVVRNAEKRAIQNSQTFTRSNEKLSVLIVDDNDSSRIILQGIAVSLGWQAKIASDAQEASLLVKQAHRDSTRYDVVFVDWRMPGKDGLTFARELRELHSSVVSLIVMITAHGKELLDEQNNDYERYLDGFLIKPVTKNMMLQAVKSVVFGDLDLSLPTSPLPHELPLQGISLLLVEDNLTNQLVASELLQQLGATIKIASSGEEALEMLESTAEHFDMVLMDIQMPGMDGYQTTREIRKLPRHQLLPIIAITAHAMSDDIAACLAAGMQDHIAKPFDLNELTTKILSHHKAEKAPHVKQVNKSNLNFDQAALAFCQQHHIELEAAVQRLGYSLTIYVNVLKQFEQDLRQALQQLEDKTLTRRNARLLFHSLKGAAGTLGFSNLAKLTARLEDELREHSDDGYQVDNNVLDILKLTLNTATDLVKLLQVEQQIATAQAPVSRTEQAAQLMTLKQHLNLANMAALPLYQQLAPSLQAQTPELNKELEEALVNLTFEQAVVIVDKMLSQFKE

SEQ ID NO: 953 - protein, 420 aa, Thermus thermophilus HB8
MGPLLVWHRGDLRLHDHPALLEALARGPVVGLVVLDPNNLKTTPRRRAWFLENVRALREAYRARGGALWVLEGLPWEKVPEAARRLKAKAVYALTSHTPYGRYRDGRVREALPVPLHLLPAPHLLPPDLPRAYRVYTPFSRLYRGAAPPLPPPEALPKGPEEGEIPREDPGLPLPEPGEEAALAGLRAFLEAKLPRYAEERDRLDGEGGSRLSPYFALGVLSPRLAAWEAERRGGEGARKWVAELLWRDFSYHLLYHFPWMAERPLDPRFQAFPWQEDEALFQAWYEGKTGVPLVDAAMRELHATGFLSNRARMNAAQFAVKHLLLPWKRCEEAFRHLLLDGDRAVNLQGWQWAGGLGVDAAPYFRVFNPVLQGERHDPEGRWLKRWAPEYPSYAPKDPVVDLEEARRRYLRLARDLARG

SEQ ID NO: 954 - protein, 582 aa, Kluyveromyces lactis NRRL Y-1140
MGKMSFIEGLQKRFFLGYSYKYNTFELDPIILATSIKVAVLDYFRNTPWYWIIRDAVFYHLLFNVLSRIILYIRGYGLLTSISKLFHYASRRLFEVLLSLPMVRGSVDKEVSKVLATIEKDMIKNDANLKDFPELPRTGLSEADVLKELDKLNSVLKHSDWENGKVSGAVYHGGDDLIDLQSKAFKKFCVANQLHPDVFPGVRKMEAEVVSMVLNLFNAPPTGCGTTTSGGTESLLLACVSAKMLGLRYKGITEPEIIIPKTAHAGFDKAGYYFGIKIHHVDLDPVTFQADVKQMRKLINRNTVMLAGSAPNFPHGIIDDIVSIGKLGETYKIPVHVDCCLGSFIVAFMSKAGFNDVPLFDFRVPGVTSISCDTHKYGFAPKGSSVIMYRNPELRKQQYYVSTEWTGGLYGSPTLAGSRPGALVVGCWATMVHVGADGYINSCKDIVGKARELKEFIQKEIPELQILGDPLCSVISFTSNKIDIYELSDTLSKSGWHLSALQNPSSIHLALTKLSLKSVDELKHLLKSTVDKMKQSPDAKPSSDGTSALYGVAGSVKTVGVADRLIEGFLDSLYKLEPEHAT

SEQ ID NO: 955 - protein, 612 aa, Arabidopsis thaliana
MKMDKKTIVWFRRDLRIEDNPALAAAAHEGSVFPVFIWCPEEEGQFYPGRASRWWMKQSLAHLSQSLKALGSDLTLIKTHNTISAILDCIRVTGATKVVFNHLYDPVSLVRDHTVKEKLVERGISVQSYNGDLLYEPWEIYCEKGKPFTSFNSYWKKCLDMSIESVMLPPPWRLMPITAAAEAIWACSIEELGLENEAEKPSNALLTRAWSPGWSNADKLLNEFIEKQLIDYAKNSKKVVGNSTSLLSPYLHFGEISVRHVFQCARMKQIIWARDKNSEGEESADLFLRGIGLREYSRYICFNFPFTHEQSLLSHLRFFPWDADVDKFKAWRQGRTGYPLVDAGMRELWATGWMHNRIRVIVSSFAVKFLLLPWKWGMKYFWDTLLDADLECDILGWQYISGSIPDGHELDRLDNPALQGAKYDPEGEYIRQWLPELARLPTEWIHHPWDAPLTVLKASGVELGTNYAKPIVDIDTARELLAKAISRTREAQIMIGAAPDEIVADSFEALGANTIKEPGLCPSVSSNDQQVPSAVRYNGSKRVKPEEEEERDMKKSRGFDERELFSTAESSSSSSVFFVSQSCSLASEGENLEGIQDSSDQITTSLGKNGCQ

SEQ ID NO: 956 - protein, 569 aa, Zea mays
MAAVTPPPQSDLSPQTGRPASSAATAAKPGRGAAGATGRLVGKYKLGRLLGHGTFAKVYQARHVDTGESVAIKVLDKEKAVERGLVSHIKREIAVLRRVRHPNIVHLFEMMATKTKIYFVMELVRGGALFSRVSKGRLREDTARRYFQQLVSAVGFCHVRGVFHRDLKPENLLVDEHGNLKVSDFGLSAVADQFHPDGLLHTLCGTPAYLAPEVLGRRGYDGAKADVWSCGVILFVLMAGYLPFHDKNIMDMYRKIYKGEFRCARWFSQDLTSLLTRILDTDPNTRITLPEIMESRWFMKGFKPVKFYIEDDQLHNIIDDEDVPLDMGSPGSVPPPLPPSPPPLPPPKVDGDESGSDSDSSISSCPASLLSDESQRPRCSLPRPASLNAFDIISFSRGFNLSRLFEDKGDEVRFISVEPMSDITTTLEDIAKLKSFKMRRKDWRICLEITREGVKGPLTIAAEIFELTPPLVMVEVKKKAGDTQEYEDFCNKDLKPGMQHLVHRMVRSQRILLLIFERTDFTNYMLETSEGFELNMHGTIDNRNDIPTGLTFGLSEPHEARDSIDQKRS

SEQ ID NO: 957 - protein, 242 aa, Populus tremuloides
MGRGRVQLKRIENKINRQVTFAKRRNGLLKKAYELSVLCEAEVALIIFSNRGKLYEFCSGSSMLKTLERYQKCNYGAPEPNVSAREALELSSQQEYLKLKARYEGLQRTQRNLLGEELGPLSSKDLESLERQLDMSLKQIRSTRTQYMLDQLNDLQHKEHMLTAANKSLKERLMEGYQLNSLQLNPSAEDVEYARQQAQPQGDGFFHALECEPTLQIGYQPENITMVTAGPSMTTYMPGWLA

SEQ ID NO: 958 - protein, 392 aa, Acridocarpus macrocalyx
DLEPVNPADVPVTAAGALKSYKLAAKAISRLQSLPSGNISLLCDVLVKEVRDLTGYDRVMVYKFHEDEHGEVVSECRRSDLEAYLGLHYPATDIPQASRFLFMKNKVRMICDCLAPPVKVIQDERLPQPLSLCGSTLRSPHGCHAQYMANMGTIASLVMSVTVNEDDDMMDGDQQQMARKLWGLVVCHHTSPRFVPFPLRYACEFLIQVFGVQINKEVELAAQVREKHILQIQTLLCDMLLRDAPVAIITQSPNVMDLVKCDGAALYYKKKFWLLGITPTEAQIRDIVEWLLEYHSGNTGLSTDSLMEAGYPGVSVLGDAVCGMAAVSITSKDFLFWFRSHTAKEIKWGGAKHDPDDKDDGRKMHPRSSFKAFLEVVKWRSLPWEDMEMDAI

SEQ ID NO: 959 - protein, 392 aa, Triaspis hypericoides
DLEPVNPADVPVTAAGALKSYKLAAKAISRLQSLPSGNISLLCDVLVKEVRDLTGYDRVMVYKFHEDEHGEVVSECRRSDLESYLGLHYPATDIPQASRFLFMKNKVRMICDCVAPPVKVIQDKRLPQPLSLCGSTLRSPHGCHAQYMTNMGIIASLVMSVTVNEEDDMVDGDQLQMARKLWGLVVCHHTSTRFVPFPLRYACEFLIQVFGVQINKEVELAAQVREKHILQIQTMLCDMLLRDAPVAIITQSPNVMDLVKCDGAALYFKNKTWLLGVTPTEEQIRDIAEWLLEYHSGNTGLSTDSLMEAGYPGASALGDAVCGMAAVSITSTDFLLWFRSHTAKEIKWGGAKHDPDDKDDGRKMHPRSSFKAFLEVVKWRSMPWEDVEMDAI

SEQ ID NO: 960 - protein, 392 aa, Triopterys rigida
DLEPVNPADVPVTAAGALKSYKLAAKAISRLQSLPSGNISLLCDVLVKEVRDLTGYDRVMVYKFHEDEHGEVVSESRRSDLESYLGLHYPATDIPQASRFLFMKNKVRMICDCLAPPVKVIQDERLSQPLSLCGSTLRSPHGCHAQHMTNMGTIASLVMSVTVNEDDDMVDGDQPQMTRKLWGLVVCHHTSPRFVPFPLRYACEFLIQVFGLQINKEVELAAQVREKHILQIQTMLCDMLLRDAPVAIITQSPNVMDLVKCDGAALYFKNKTWLLGVTPTEEQIRDIAEWLLEYHSGNTGLSTDSLMEAGYPGASAVGDAVCGMAAVSITSRDFLFWFRSHTAKEIKWGGAKHDPDDKDDGRKMHPRSSFKAFLEVVKWRSMPWEDVEMDAI

SEQ ID NO: 961 - protein, 542 aa, Rhodobacter sphaeroides 2.4.1
MSAKEVRFGTDARGRMLKGINTLADTVKITLGPKGRNVILDTSYGAPRITKDGVTVAREIELSDRFENVGAQMVKEVASRTNEEAGDGTTTATVLAQAIAKEGMKAVAAGMNPMDLKRGIDRAVAIVIAEIRSMSRPVGDSAEIAKVGALSANGEAAIGRQIADAMAKVGTAGVIKVEENKGLETETEVVEGMQFDRGYLSPYFITHAQKMVVELDDCAILLHEGKLTSLASMVPLLEAVVQAEKQLLVVAEDVEGEALTTLVVNKLRGGLKVAAAKAPGFGDGRAAMLEDLAVLTGAHLISAELGTKLETVTLDMLGFAKKVVLTKDSTILIDSAGDKAAIASRIGQIRNQIEDTTSAYNKEKLQERLARLAGGVAVIRVGGATEIEVKERRDRVEDTLNATRAAVQEGVVPGGGAALIHAGKALAGLKGDNPDQDAGIKIIRRAIQAPLRQIADNAGIDGSVVAGKVIENDSATFGFDAQLETYGDMLQAGIIDPTKVVRIALEDAASIAGLLITTEVIIAHKPERGERMSQMDEMGGMM

SEQ ID NO: 962 - protein, 392 aa, Peregrina linearifolia
DLEPVNPADVPVTAAGALKSYKLAAKAISRLQSLPSGNISLLCDVLVREVRDLTGYDRVMVYKFHEDEHGEVVSECRRSDLESYLGLHYPATDIPQASRFLFMKNKVRMICDCLAPPVKVIQHERLPQPLSLCGSTLRSPHGCHAQYMTNMATIASLVMSVTVNEDDETMDGDQQQMTRKLWGLVVCHHTSPRFVPFPLRYACEFLIQVFGVQINKEVELAAQVREKHILQIQTMLCDMLLRDAPVAIITQSPNVMDLVKCDGAALYFKNKTWLLGVTPTEEQIRGIAEWLLEYHSGNTGLSTDSLMEAGYPGASGLGDAVCGMAAVSITSRDFLFWFRSHTAKEIKWGGAKHDPDDKDDLRKMHPRSSFKAFLEVVKWRSMPWEDMEMDAI

SEQ ID NO: 963 - protein, 543 aa, Streptococcus pyogenes serotype M6
MAKDIKFSADARAAMVRGVDMLADTVKVTLGPKGRNVVLEKAFGSPLITNDGVTIAKEIELEDHFENMGAKLVSEVASKTNDIAGDGTTTATVLTQAIVHEGLKNVTAGANPIGIRRGIETATATAVEALKAIAQPVSGKEAIAQVAAVSSRSEKVGEYISEAMERVGNDGVITIEESRGMETELEVVEGMQFDRGYLSQYMVTDNEKMVADLENPFILITDKKVSNIQDILPLLEEVLKTNRPLLIIADDVDGEALPTLVLNKIRGTFNVVAVKAPGFGDRRKAMLEDIAILTGGTVITEDLGLELKDATMTALGQAAKITVDKDSTVIVEGSGSSEAIANRIALIKSQLETTTSDFDREKLQERLAKLAGGVAVIKVGAPTETALKEMKLRIEDALNATRAAVEEGIVAGGGTALITVIEKVAALELEGDDATGRNIVLRALEEPVRQIALNAGYEGSVVIDKLKNSPAGTGFNAATGEWVDMIKTGIIDPVKVTRSALQNAASVASLILTTEAVVANKPEPAAPAPAMPAGMDPGMMGGF

SEQ ID NO: 964 - protein, 392 aa, Janusia anisandra
DLEPVNPADVPVTAAGALKSYKLAAKAISRLQSLPSGNISLLCDVLVKEVRDLTGYDRVMVYKFHEDEHGEVVSECRRSDLESYLGLHYPATDIPQASRFLFMKNKVRMICDCLAPPVKVIQDERLPQPLSLCGSTLRSPHGCHAQYMTNMGTIASLVMSVTVNEDDDTMDGDQQQMARKLWGLVVCHHSSPQFVPFPLRYACEFLIQVFGVQINKEVELAAQVREKHILQIQTMLCDMLLRDAPVAIITQSPNVMDLVKCDGAALYFKNKTWFLGVTPTEEQIRGIAEWLLKYHSGNTGLSTDSLMEAGYPGASGLGDAVCGMAAVSITSRDFLFWFRSHTAKEIKWGGAKHDPDDKDDLRKMHPRSSFKAFLEVVKWRSVPWEDVEMDAI

SEQ ID NO: 965 - protein, 542 aa, Nocardia asteroides
MAKTIAYDEEARRGLERGLNSLADAVKVTLGPKGRNVVLEKKWGAPTITNDGVSIAKEIELEDPYEKIGAELVKEVAKKTDDVAGDGTTTATVLAQALVREGLRNVAAGANPLGRKRGIEKAVEAVTAKLLDTAKEVETKEQIAATAGISAGDAAIGELIAEAMDKVGKEGVITVEESNTFGLQLELTEGMRFDKGYISGYFATDPERQEAVLEDPYILLVGSKVSTVKDLLPLLEKVIQAGKPLLIIAEDVEGEALSTLVVKKILGTFKSVAVKAPGGGDRRKAQLADIAILTGGQVISEEVGLSLETAGIELLGQARKVVVTKDETTIVEGAGDAEAIAGRVSQIRAEIENSDSDYDREKLQERLAKLAGGVAVIKAGAATEVELKERKHRIEDAVRNAKAAVEEGIVAGGGVAFLQSVPALDDFKLEGDEATGANIVRVALSAPLKQIAFNAGLEPGVLAEKVSNLPAGQGLNAQTNEDEDLLAAGVADPVKVTRSALQNAASIAALFLTTEAVVADKPEKASAAPATGHRFKMGGMDF

SEQ ID NO: 966 - protein, 255 aa, Pseudomonas fluorescens Pf-5
MIQISALPAFTDNYIWLLQDHRSQRCAVVDPGDAAPVLAWLEQHPGWVLSDILITHHHHDHVGGVERLKQHSAATVHGPAREKIPARDIGLEDNQRVSILGWEFEVFAVPGHTLGHIAYYHHGLLFCGDTLFAAGCGRLFEGTPEQMHHSLGRLAALPDDTLIYCTHEYTLSNLRFAQAVEPANPDIAERLAKVTQMREQGRMTLPSTLALEKLTNPFLRTGETSVKQKADERNGQDNQSQSAVFAALRAWKDKF

SEQ ID NO: 967 - protein, 548 aa, Neorickettsia sennetsu
MANEVISGEQLQRVIRDAADLVVSSAGVTLGPEGRPVIMSKSYGGPEVTKDGYKVMNQLKPEDEKVAKIVELLNQATSQANEKAGDGTTTATILVGNMIKNAHKHIAAQRSRMKLKSGMKRARDEVVKYIQSVAKKINSEEEIAQVGSISANGNSEIGGKIAEAMNKVGKEGVITVEEGKGLDEFSVSVVQGMVFDRGYVSPYFITNPEKMIVEFDNPYVLLANKKLSSIQPMVPLLETIVRSNRAVVIIAEDVEGEALTSLVLSKMRGSLKACAVKAPGFGDRRSEMLEDIRILTGAKTLVSDDLGVTVESLTVEDLGTAKSIIISKDSTTIVDGGGEKTAIEARVKQIKTQIDKTTSDYDKEKLQERLAKLAGGVAVLKVGGATEVEVKERKDRVEDALHATRAAVEEGIVPGGGATLLSAIAVLEKLSSDDDDEQAGINIVKTALKAPISQIVENAGEDASVITYNLLESKDPNRIFDARELKYVDAFKAGIIDPAKVVRVALESAVSVASVLVTTEALIVDLPTKDNGSSSMMPGGGMGGMGGF

SEQ ID NO: 968 - protein, 637 aa, Coxiella burnetii RSA 493
MCGIVGFWDFRRSWKKEQYQKVAAKMADQITSRGPDSSGVWCDEKTGLAFGHRRLAVIDLSTAGHQPMLSHSGNTAIIYNGEIYNAPFIRRELENAGIYCCGHSDTEVLLEACELWGVKSAVKKMNGMFAFAYWNKLEKKLYLGRDRLGIKPLFWSLKNNIFYFSSQLKALAAHPVWNVEIDRTALTSYFRFNYIPAPLSIYKGVYKLKPGTILTIDPNQKIIEETFWSLETVCQKNINKKKIDDNEVLEKTETLLRDAVKCRMYSDVPLGAFLSGGIDSSAVVALMQAQSTNRIKTFSIGFYEKEYNEASYAKEVAQHLKTDHHELYLHVDEAARLIPQIPEWYDEPFADSSQIPTYLVSQLARQHVTVSLSGDGGDELFAGYNRYLLAENLWSKLVRFPLWMRQSGSKTINFFSPSAWDKFANVIPRKLRPSSVGDKAHKLAALLTQSSEDLYKGLVSLWERPAELVIDGSDISLWPEPLPDLNFTERMQYIDTLTYLPDDILTKVDRASMAVSLEARIPLLDYRLVEYIWSLPMRFKLERGETKWLLRRVLGKYVPEKLFTRPKMGFGVPIDHWLRCQLREWAEDLLSVPKLEKDGLLHSSLIRQRWQEHLSGKRNWQYSLWSVLMFQLWRERW

SEQ ID NO: 969 - protein, 540 aa, Enterobacter aerogenes
MAAKDVKFGNDARVKMLRGVNVLADAVKVTLGPKGRNVVLDKSFGAPTITKDGVSVAREIELEDKFENMGAQMVKEVASKANDAAGDGTTTATVLAQAIVNEGLKAVAAGMNPMDLKRGIDKAVVAAVEELKALSVPCSDSKAIAQVGTISANSDETVGKLIAEAMDKVGKEGVITVEDGTGLEDELDVVEGMQFDRGYLSPYFINKPDTGAVELESPFILLADKKISNIREMLPVLEAVAKAGKPLVIIAEDVEGEALATLVVNTMRGIVKVAAVKAPGFGDRRKAMLQDIATLTGGTVISEEIGMELEKATLEDLGQAKRVVINKDTTTIIDGVGEEAAIQGRVAQIRKQIEEATSDYDREKLQERVAKLAGGVAVIKVGAATEVEMKEKKARVDDALHATRAAVEEGVVAGGGVALVRVAAKIAGLTGQNEDQNVGIKVALRAMEAPLRQIVSNAGEEPSVVANNVKAGDGNYGYNAATEEYGNMIDFGILDPTKVTRSALQYAASVAGLMITTECMVTDLPKGDAPDLGAAGGMGG

SEQ ID NO: 970 - protein, 480 aa, Rosa hybrid cultivar 'Kardinal'
MKRHRSNSNPPTPPPSPDSDSDHHPAGQLVEVPVLPRSMSRSHLSPRNPGPVHVSGRANSVLKGGEPPYYVGLRKVAEDPYDELGNPDGVIQLGLDENKLALDLVRDWLLENAKDAILGGEELGISGIACYQPSDGLMELKLAVAGFMSKAIGNSVTYNPSQIVLTAGATPAIEILSFCLADSGNAFLVPAPYYPGLDRDVKWRTGVEIIPVPCRSADKFNLSITALDRAFNQAKKRGVKVRGIIISNPSNPGGSLLTRESLYNLLDFAREKNIHIISNELFAGSTYGSEEFVSMAEIVDLEDLDQNRVHIVYGISKDLSLPGFRVGAIYSFNKNVLTAAKKLTRFSSISAPSQRLLISMLSDTKFMHKFIEINRERLRGMYLRFVTGLKQLGIECTKSNGGFYCWADLSGLIRSYSEKGELELWDRLLNVGKLNVTPGSSCHCIEPGWFRFCFTTLTEKDIPVVIERIRNIAETCKSHS

SEQ ID NO: 971 - protein, 477 aa, Acinetobacter sp. ADP1
MNQLIWFRNDLRLNDHAALWHATQAGSTIAFVALSPLQWQQHDDAIIKIDFYMRQLTQLKQELNTINIPLIVQIIPLWKDIATEIISISDRYHIQDVYANIETGINEIERDHAVQEALSKIGKNLILFHDKTLFPLGSIRNKSQAPYQVFTPFKKTCYERLNIDIPKCFPYPHKQKQQPEIAKKEAAIPSLKQLGYSQIDQHIQNEWPIGETFALNLLEDFTQDKINRYHESRDYPAQDGTSHISAYLTIGILSIRQCIQAIFQKQHGQFFLNNKGQEIWLNELLWREFYQQLLFDFPKLSRHQPFQDHTKNIPWNENDEHFEAWIQGKTGIPIVDAGMRQLKATGWMHNRVRMICAMFLSKNLLIDWRKGEKWFMQHLIDGDLAANDGGWQWSASTGTDASPYFRIFNPVTQSQKFDPEGVFLKKWIPELKHLDSKHIHDPYAYQHKTELNYPKPIIDLKATRKNAIEVFKKSSSL

SEQ ID NO: 972 - protein, 569 aa, Rhodospirillum rubrum
MTAKLAPRGPDDGGILVHGPVALGHRRLSIIDLSPKAAQPMVDSDLGLSIVFNGCIYNYPALRSELEALGYRFFSGGDTEVILKAYHAWGTACVKRFNGMFAFAIHERDSGKVVLARDRFGIKPLYLAEVDGGLLFASSLPALLATGRVDKAIDPLALRFYISFHAVVPAPRTILKGVRKLPPATLRVVSADGSSFDEVYWRLDFRALPGEDGRSAKDWEDGLFEAVRAAVARRIIADVPVGVLLSGGLDSSLIVGLLAEAGQRDVETFSIGFEEANGEKGDEFFYSDLIAERYATRHHKIFIPEADMIAALPGAIAAMSEPMVSYDNVAFYLLAREVSKRVKVVLSGQGADEIFGGYHWYRPLVGSTDPVADYAAHFFDRTPERLARHLSPAWLGTTDEARAFVAAHFAEDGAPDPVDKALRLDSTVMLVEDPVKRVDNMTMAFGLEARVPFLDHQLAEFAGRIPSSLKLAQNGKGILKEVARRVVPAAVIDREKGYFPVPGLKYIEGSRLDYVRDGLSSRAARQRGLFREDYLASLYENPRDAITPLRGSELWQVGLLELWLQEHGI

SEQ ID NO: 973 - protein, 277 aa, Bacillus cereus G9241
MNLTSLKDYTTLHNGVKMPWFGLGVFKVEDGSEVIESVKAAIKNGYRSIDTAAIYQNEEGVGQAIRESGISREELFITSKVWNSDQGYETTLQAFETTLEKLGLEYLDLYLVHWPVKGKYTESWKALEKLYKDGRVRAIGVSNFHIHHLQDVFEIAEIKPMVNQVEYHPRLAQEELHAFCKEHNIQLEAWSPLMQGQLLDNPTLQDIATKYNKSTAQIILRWDLQNEVVTIPKSIKEHRIIENANIFDFELSADDMKAIQALNEDRRVGPDPDNFNF

SEQ ID NO: 974 - protein, 503 aa, Vibrio cholerae
  misc_feature (456)..(456): Xaa can be any naturally occurring amino acid
MHMSKSFLIISMGFVAVSVQAQTLTRDNGAPVGDNQNSITAGEHGSVLLQDVHLIQKLQRFARERIPERVVHARGTGAHGEFVASGDFSDLTLSAPFTSKGKITPVFVRFSTVIHSKGSPETLRDPRGFATKFYTEQGNWDLVGNNLPVFFIRDSIKFPDMVHSLKPSPVTNLQDPNRFFDFFSHEPGSTHMLTWVYTNLGTPASYRTMDGFGVHAYKWINQKGDVNYVKFHWKSLQGIESLRPDEVVKVQGQDFNHLTNDLYTQINAGNHPKWDLYVQVLTPEQLSKLDYNGLDATKVWLDVPEKKVGTMTLNKVPDNFFLETEQSAFAPSNLIPGIEPSEDRLLQGRLFAYADTQLYRLGANLFQLPINRPLVEVNSHNQEGASNSAQTASDINYQPSRKLELKEDPQFKAVQTQLVGSVQQKAISNPRNFYQAGVLYRSLNEQDKQDLITNLXGBLNKVTDKEIKATMVSHFYRADKDYGTRLARATNTDLKQVAKLAAM

SEQ ID NO: 975 - protein, 661 aa, Bacillus anthracis str. A2012
MEQLKHHVTDNQRKHALTTNQGVKIAEDEFSLKMGLRGPTLMEDFHFREKMTHFDHERIPERIVHARGVGAHGYFQLYESLEAYTKADFLTNPSKKTPVFVRFSTVQGSKGSNDAVRDVRGFATKFYTDEGNYDLVGNNMPVFFIQDAIKFPDFVHAVKPEPHNDIPQGASAHDTFWDFVAHNPESTHMVMWQMSDRAIPRSLRMMEGFGVHTFRLINKEGKAHFVKFHWKPALGVHSLVWDEAQKIAGKNPDFHRQDLYEAIEKGDYPEWELGLQLIPEEDEHTFDFDILDPTKLWPEEEVPVKLVGKMTLNKNVDNFFAETEQVAFHPGHVVPGIDFSNDPLLQGRLFSYTDTQLSRLGGPNFHQTPINQPVCPFHNNQRDGMHQMQIHRGQTSYHPNGLNDNQPATVQAEQGGYEHYQEKIDGHKIRGRSKSFLNFYSQAKLFYNSMSPIEKQHIKEAFCFEVGKCKSDMVKANVIALLNHVDRQLAQEVANIIGAPLPKENHEVNSDAKSPALSMSNTIFKADSKNVAIVLNGDPSVSLLSEWIQAFAQHRINYSIVDNKIYQFNNSIKVTDTYTTTDSSLFDAVLVFSSESAIHPPVLEFAETTFKHFKPIAHVLSNPHALDNSKIKLDGAGIYNLANTSIESFIEGIAQGRFWNR

SEQ ID NO: 976 - protein, 765 aa, Anabaena variabilis ATCC 29413
MRIDLESPNINVTSLKEAPIHLSGQIQPHGVLLVLEEPDLKILQVSNNTWSILGIKTEDILQKKLEDLLDSFQIERIQAGLSSGNLEFINPTKIWIRKKGDDYAVFDAVFHRNTEGFLILELEPAITQENIPFLSFYHLAKASINQLQKTANLRDFCQIIVQEVRKVTDFDRVMLYKFDDDGHGSVIAEEKLDSLEPYLGLHYPESDIPKPARKLFISNSIRVIPNAQAQAIQMIPSVNPVSDRPVDLTNSILRSAANCHLEYLHNMGVGASLTISLIKDNKLWGLIACHHLSAKYVSYELRKACEFLGRVIFAEISAREETEDYDYRMNLTHIQSLLVEYMSQEDNFVDGLVKHQPNLLDLTSAQGAAVCFGDHCTLIGETPKAEDLVFLVQWLKNNVEEEVFYTDSLPQVYPDAERYKNVASGLLAIPISQRNYVLWFRPEVIQTVNWGGDPNQPFEVNKLDGNVRLCPRKSFELWKETVRLTSLPWRYVEIKAALELRKAIVNIVLRQADELAQLAQDLERSNAELKKFAYVASHDLQEPLNQVANYVQLLEMRYQDELDADANEFITFAVEGVSLMQTLIDDVLAYSKVDTQAIAFQLTEVEKALDKALGNLRQRIAETGATITHDPLPTVMAGSTQLMQLFQNLIANAIKFHSQEAPQIHIGAERLEDEWLFSVRDNGIGIDPQFSDRIFVIFQRLHTRDEYHGTGMGLAICKKIIECHRGRIWVESQLGEGATFYFTIPVGGRERERRNGRKTQNNLFS

SEQ ID NO: 977 - protein, 255 aa, Pseudomonas fluorescens PfO-1
MIQISALPAFTDNYIWLLQDHATQRCAVVDPGDAAPVQAWLDAHPGWVLGDILITHHHHDHVGGVETLKKATGATVYGPASENIPGRDVALKDNDTVRVLGWDFDVYAVPGHTLGHIAYYHHGLLFCGDTLFAAGCGRLFEGTPQQMHQSLSRLAALPEDTLVYCTHEYTLSNLKFAAAVEPDNRDIAARLEKVTRQRENGVMTLPSTLALEKLTNPFLRTGEILVTQKVDERNGPQNRAPSEVFAALRAWKDTF

SEQ ID NO: 978 - protein, 1131 aa, Zea mays
MSSLRPAQSSSSSSRTRQSSQARILAQTTLDAELNAEYEESGDSFDYSKLVEAQRSTPPEQQGRSGKVIAYLQHIQRGKLIQPFGCLLALDEKSFRVIAFSENAPEMLTTVSHAVPNVDDPPKLGIGTNVRSLFTDPGATALQKALGFADVSLLNPILVQCKTSGKPFYAIVHRATGCLVVDFEPVKPTEFPATAAGALQSYKLAAKAISKIQSLPGGSMQALCNTVVKEVFDLTGYDRVMAYKFHEDEHGEVFAEITKPGIEPYLGLHYPATDIPQAARFLFMKNKVRMICDCRARSVKIIEDEALSIDISLCGSTLRAPHSCHLQYMENMNSIASLVMAVVVNENEDDDEPESEQPPQQQKRKKLWGLIVCHHESPRYVPFPLRYACEFLAQVFAVHVNKEFELEKQIREKSILRMQTMLSDMLFKESSPLSIVSGSPNIMDLVKCDGAALLYGDKVWRLQTAPTESQIRDIAFWLSEVHGDSTGLSTDSLQDAGYPGAASLGDMICGMAVAKITSKDILFWFRSHTAAEIKWGGAKHDPSDEDDSRRMHPRLSFKAFLEVVKMKSLPWSDYEMDAIHSLQLILRGTLNDALKPAQSSGLDNQIGDLKLDGLAELQAVTSEMVRLMETATVPILAVDGNGLVNGWNQKVADLSGLRVDEAIGRHILTLVEDSSVPIVQRMLYLALQGREEKEVRFELKTHGSKRDDGPVILVVNACASRDMHDHVVGVCFVAQDMTVHKLVMDKFTRVEGDYRAIIHNPNPLIPPIFGADQFGWCSEWNAAMTKLTGWHRDEVIDRMLLGEVFDSSNASCLLKSKDAFVRLCIIINSALAGEEAEKAPIGFFDRDGKYIECLLSVNRKVNADGVVTGVFCFIHVPSDDLQHALHVQQASEQTALRRLKAFSYMRHAIDKPLSGMLYSRETLKGTDLDEEQMRQVRVADNCHRQLNKILADLDQDNITDKSSCLDLDMAEFVLQDVVVSAVSQVLIGCQGKGIRVACNLPERSMKQKVYGDGIRLQQILSDFLFVSVKFSPAGGSVDISSKLTKNSIGENLHLIDFELRIKHQGAGVPAEILSQMYGEDNREQSEEGLSLLVSRNLLRLMNGDIRHLREAGMSTFILTAELAAAPSAAGH

SEQ ID NO: 979 - protein, 140 aa, Arabidopsis thaliana; identical to SEQ ID NO: 98

SEQ ID NO: 980 - protein, 756 aa, Candida glabrata CBS138
MTASKRHTYYGGGSISYERTNNSEHDKTQRPQDHQGPKHRKHVTFGPYVIGATLGEGEFGKVKLAWSKSAYQQCDNTEGNAGNKPMTFKVPKQVAIKLIKRDFITKDPSKETKIYREINALKHLSHPNIVKLEEVLQNSKYIGIVLEYAAGGEFYKFIQRKRRLKENHACRLFSQLISAVHYIHSKGLVHRDLKLENLLLDNEENLIITDFGFVNEFLRQNGMMKTSCGSPCYAAPELVVSNRPYDARKADTWSCGIILFAMLAGYLPWDDDPKNPDGHDISRLYNYILNTPLKFPEYINPVPRDLLRKILVIDPKKRINIRSIEKHPWLESHSTFLSITPDEWDRLSNTKNIYRKSKPQFYPNKRPGSTYSNYSSGSKDNKRDSLIIDSALVSLPVPPKEFQSHILARPSSLVVESRYSPLGKRNGHNRSNSAASAALQAVFDASERESLKSVDSKPRSRSNDHKDIIEGIQPQKHAFVKPSRKVRPTSMQAPGSSYIHHGNFEGLHELMKRDNSTASSHQTSISSEARIFDASPTLIPDLTKSPSSSTGNSPKLLPRKSFTVSKPLLDLKFASADIIKANESTDSLSKRIHDQIYEVEHPRQRRHSYRYSGIISDLIFGTLSEEGEINTFENKDHKSDAEESEMTISESKLDSVSICSQQSNIHRNISKQASSVSLLRTTSNHSTNNLNVGSRTYGRAELYDKRHLRQIPSNTLNQINAPGNTHRNSAIYSEDDKRKSTAKRVFEFFKRRSMRV

SEQ ID NO: 981 - protein, 635 aa, Oryza sativa
  misc_feature (160)..(160): Xaa can be any naturally occurring amino acid
MDGSCDCIEPLWQADDLLVKYQYISDFFIALAYFSIPLELIYFVKKSAFFPYRWVLIQFGAFIVLCGATHLINLWTFAIYTKTIAVVLTVAKAATAVVSCITALMLVHIIPDLLNVKLRERFLKDKADELDREMGIIRTQEETGRHVHMLTHEVRSTLDXHTILRTTLVELGRTLALAECALWMPTRSGSALQLSHTIYNSAAIGSVVPINLPIVSKVFNSNRVVKIPHTSPLASITADKSRYVPPEVVAIRVPLLHLTNFQINDWPELSAKSFAVMVLMLPPDSAREWRPHERELVEVVADQVAVALSHAAILEESMRARDLLMEQNIALDAARREAEMAICARNDFLAVMNHEMRTPMRAIVSLSSLLLETNLSAEQRLMVETILKSSDLLATLTNDVLDVSKLENGSLELEIAPFNLHSTFTDVVNLIKPVAACKRLSVMVTLAPELPLHAIGDQKRLMQIILNVAGNSIKFTKEGHVSITASMARPDALRGPHEPDYHPVVSDGFFYLAVQVKDTGCGISPQDMPHTFRKFAHPENAGKWNSGSGLGLALSRRFVSLMEGNIWLESEGVGKGCTAMFFVKLGMPEKPNANLRRMAPHPLQPNQGAGGPDALSISIMDSNPRVPRVRYQSSV

SEQ ID NO: 982 - protein, 539 aa, Pantoea agglomerans
  misc_feature (533)..(533): Xaa can be any naturally occurring amino acid
MAAKDVKFGNDARVKMLRGVNVLADAVKVTLGPKGRNVVLDKSFGAPTITKDGVSVAREIELEDKFENMGAQMVKEVASKANDAAGDGTTTATVLAQAIITEGLKAVAAGMNPMDLKRGIDKAVASAVEELKALSVPCSDSKAIAQVGTISANSDETVGKLIAEAMDKVGKEGVITVEDGTGLEDELDVVEGMQFDRGYLSPYFINKPETGAVELESPFILLADKKISNIREMLPVLEAVAKAGKPLVIIAEDVEGEALATLVVNTMRGIVKVAAVKAPGFGDRRKAMLQDIATLTGGTVISEEIGMELEKATLEDLGQAKRVVINKDTTTIIDGVGEEAAIQGRVGQIRKQIEEATSDYDREKLQERVAKLAGGVAVIKVGAATEVEMKEKKARVDDALHATRAAVEEGVVAGGGVALVRVAAKLAGLTAQNEDQNVGIKVALRAMEAPLRQIVSNAGEEPSVVANNVKAGEGNYGYNAATEEYGNMIDFGILDPTKVTRSALQYAASVAGLMITTECMVTDMPKGDAPDLXAAGMGG

SEQ ID NO: 983 - protein, 539 aa, Enterobacter amnigenus
  misc_feature (533)..(533): Xaa can be any naturally occurring amino acid
  misc_feature (535)..(535): Xaa can be any naturally occurring amino acid
MAAKDVKFGNDARVKMLRGVNVLADAVKVTLGPKGRNVVLDKSFGAPTITKDGVSVAREIELEDKFENMGAQMVKEVASKANDAAGDGTTTATVLAQAIITEGLKAVAAGMNPMDLKRGIDKAVIAAVEELKTLSVPCSDSKAIAQVGTISANSDETVGKLIAEAMDKVGKEGVITVEDGTGLEDELDVVEGMQFDRGYLSPYFINKPETGAVELESPFILLADKKISNIREMLPVLEAVAKAGKPLLIIAEDVEGEALATLVVNTMRGIVKVAAVKAPGFGDRRKAMLQDIATLTGGTVISEEIGMELEKATLEDMGQAKRVIINKDTTTIIDGVGEEAAIQGRVGQIRKQIEEATSDYDREKLQERVAKLAGGVAVIKVGAATEVEMKEKKARVDDALHATRAAVEEGVVAGGGVALIRVASKLSELRGQNEDQNVGIKVALRAMEAPLRQIVLNCGEEPSVVANTVKAGDGNYGYNAATEEYGNMIDMGILDPTKVTRSALQYAASVAGLMITTECMITDVPKGDGPDLXAXGMGG

SEQ ID NO: 984 - protein, 213 aa, Kineococcus radiotolerans SRS30216
MSARIEHLVTSGTFSLDGQTFDVDNNVWIVGDDREVVVLDAPHDVDVIAAAIGERTLLAVLCTHAHDDHVRRAPALAGRFSTPERRVPVLLHPADREVWDLTHPGVATTDLSNGEVVTVAGTELHVLHTPGHTPGAVSVYAPELSTVFTGDTLFAGGPGATGRSFSDFATIVDSIRDVLFELPADTRVHTGHGEDTTIGDESPHLQEWIARGH

SEQ ID NO: 985 - protein, 539 aa, Enterobacter asburiae
  misc_feature (533)..(533): Xaa can be any naturally occurring amino acid
MAAKDVKFGNDARVKMLRGVNVLADAVKVTLGPKGRNVVLDKSFGAPTITKDGVSVAREIELEDKFENMGAQMVKEVASKANDAAGDGTTTATVLAQAIITEGLKAVAAGMNPMDLKRGIDKAVTAAVEELKALSVPCSDSKAIAQVGTISANSDETVGKLIAEAMDKVGKEGVITVEDGTGLEDELDVVEGMQFDRGYLSPYFINKPETGAVELESPFILLADKKISNIREMLPVLEAVAKAGKPLVIIAEDVEGEALATLVVNTMRGIVKVAAVKAPGFGDRRKAMLQDIATLTGGTVISEEIGMELEKATLEDLGQAKRVVINKDTTTIIDGVGEEAAIQGRVGQIRKQIEEATSDYDREKLQERVAKLAGGVAVIKVGAATEVEMKEKKARVDDALHATRAAVEEGVVAGGGVALVRVAAKLAGLTAQNEDQNVGIKVALRAMEAPLRQIVSNAGEEPSVVTNNVKAGEGNYGYNAATEEYGNMIDFGILDPTKVTRSALQYAASVAGLMITTECMVTDLPKGDAPDLXAAGMGG

SEQ ID NO: 986 - protein, 540 aa, Enterobacter gergoviae
MAAKDVKFGNDARVKMLRGVNVLADAVKVTLGPKGRNVVLDKSFGAPTITKDGVSVAREIELEDKFENMGAQMVKEVASKANDAAGDGTTTATVLAQSIITEGLKAVAAGMNPMDLKRGIDKAVAAAVEELKALSVPCSDSKAIAQVGTISANSDETVGKLIAEAMDKVGKEGVITVEDGTGLQDELDVVEGMQFDRGYLSPYFINKPETGAVELDSPFILLADKKISNIRELLPVLEAVAKAGKPLLIIAEDVEGEALATLVVNTMRGIVKVAAVKAPGFGDRRKAMLQDIATLTAGTVISEEIGMELEKATLEDLGQAKRVVINKDTTTIIDGVGEEVAIQGRVTQIRQQIEEATSDYDREKLQERVAKLAGGVAVIKVGAATEVEMKEKKARVEDALHATRAAVEEGVVAGGGVALIRVASKITELKGQNEDQNVGIKVALRAMEAPLRQIVLNCGEEPSVVANTVKSGDGNYGYNAATEEYGNMIDMGILDPTKVTRSALQYAASVAGLMITTECMVTDLPKADAPDLGGAGGMGG

SEQ ID NO: 987 - protein, 355 aa, Dechloromonas aromatica RCB
MSHLFDPLKLRDITLKNRIGIPPMCQYSAQDGMAADWHFVHYGSRAVGGAGLMIVEATAVVPEGRISPGDLGLWKDEQIEPLAKIARFAREQGCVAAIQLAHAGRKASVGLGWGEQRTLRADEGGWQSVAPSAISFGEGYAVPHELSIAGIAEVVAAFVAAARRAVVAGFQAIEIHAAHGYLMHQFLSPLSNQRTDAYGGSFENRTRLLREVVTAVRAVWPESLPLLIRLSATDWVEGGWSADETVALCRDLKTLGVDLADISTAGLVPTAKIPVGPGFQTEFAARVRHEAGLPTAAVGLITSAAQADHVLRTGQADMVLLGREILRNPYWPQQAAQELRQGGAWPNQYLRAALR

SEQ ID NO: 988 - protein, 539 aa, Kluyvera intermedia
MAAKDVKFGNDARVKMLRGVNVLADAVKVTLGPKGRNVVLDKSFGAPTITKDGVSVAREIELEDKFENMGAQMVKEVASKANDAAGDGTTTATVLAQSIIAEGLKAVAAGMNPMDLKRGIDKAVVAAVEELKALSVPCSDSKAIAQVGTISANSDETVGKLIAEAMDKVGKEGVITVEDGTGLEDELDVVEGMQFDRGYLSPYFINKPETGAVELESPFILLADKKISNIREMLPVLEAVAKAGKPLLIIAEDVEGEALATLVVNTMRGIVKVAAVKAPGFGDRRKAMLQDIATLTGGTVISEEIGMELEKATLEDMGQAKRVVINKDTTTIIDGVGEEAAIQGRVAQIRKQIEEATSDYDREKLQERVAKLAGGVAVIKVGAATEVEMKEKKARVDDALHATRAAVEEGVVAGGGVALIRVASKLSNLRGQNEDQNVGIKVALRAMEAPLRQIVLNCGEEPSVVANTVKAGDGNYGYNAATEEYGNMIDMGILDPTKVTRSALQYAASVAGLMITTECMVTDLPKGDAPDLRAAGMGG

SEQ ID NO: 989 - protein, 540 aa, Erwinia aphidicola
MAAKDVKFGNDARVKMLRGVNVLADAVKVTLGPKGRNVVLDKSFGAPTITKDGVSVAREIELEDKFENMGAQMVKEVASKANDAAGDGTTTATVLAQSIITEGLKAVAAGMNPMDLKRGIDQAVIAAVDELKKLSVPCSDSKAIAQVGTISANSDATVGELIAQAMEKVGKEGVITVEEGTGLQDELDVVEGMQFDRGYLSPYFINKPETGAVELESPFILLADKKISNIREMLPVLEAVAKAGKPLLIIAEDVEGEALATLVVNTMRGIVKVAAVKAPGFGDRRKAMLQDIAVLTGGTVISEEIGMELEKAGLEDMGQAKRVVINKDTTIIIDGTGEEATINGRVTQIRQQIEEATSDYDREKLQERVAKLAGGVAVLKVGAATEVEMKEKKARVEDALHATRAAVEEGVVAGGGVALVRVASKLAELRGQNEDQNVGIKVALRAMESPLRQIVSNAGEEPSVVTNNVKAGEGNYGYNAQTEEYGDMIDFGILDPTKVTRSALQYAASVAGLMITTECMVTDLPKGDAPDLGAGGGMGG

SEQ ID NO: 990 - protein, 540 aa, Pectobacterium carotovorum
MAAKDVKFGNDARVKMLRGVNVLADAVKVTLGPKGRNVVLDKSFGAPTITKDGVSVAREIELEDKFENMGAQMVKEVASKANDAAGDGTTTATVLAQAIITEGLKAVAAGMNPMDLKRGIDKAVIAAVEELKALSVPCSDSKAIAQVGTISANSDETVGKMIAEAMDKVGKEGVITVEEGTGLQDELDVVEGMQFDRGYLSPYFINKPETGAVELESPFILLADKKISNIREMLPVLEAVAKAGKPLVIVAEDVEGEALATLVVNTMRGIVKVAAVKAPGFGDRRKAMLQDIATLTGGTVISEEIGLELEKATLEDLGQAKRVVINKDTTTIIDGTGEEAAIQGRVAQIRQQVEEATSDYDKEKLQERVAKLAGGVAVIKVGAATEVEMKEKKARVEDALAATRAAVEEGVVAGGGVALVRVAAKLASLTAQNEDQNVGIKVALRAMEAPLRQIVSNAGEEPSVVANNVKAGDGNYGYNAATEEYGNMIDFGILDPTKVTRSALQFAASVAGLMITTECMVTDLPKGDAPDLGGAGGMGG

SEQ ID NO: 991 - protein, 492 aa, Vitis vinifera
MDPYKYRPSSAYNSPYFTTNAGAPVYNNDSSLTVGSRGPVLLEDYHLVEKLANFQRERIPERVVHARGASAKGFFEVTHDVSDLTCADFLRAPGVQTPVIVRFSTVIHERGSPETIRDPRGFAVKFYTREGNFDMVGNNFPVFFIRDAMKFPDVIHAFKPNPKSHIQEYWRVVDFLSYHPESLSTFAFLFDDVGIPQDYRHMEGFGVHTFTLLNKAGKANYVKFHWKPTCGVKCLLEDEAIRVGGTNHSHATQDLYDSIKAGNYPEWKLFIQTMDPEHEDKFDFDPLDVTKTWPEDILPLQPVGRLVLNKNIDNFFAENEMLAFNPALVVPGIYYTNDKMLQGRIFAYSDTQRHRLGPNYLQLPVNAPKCAFHNNHHDGSMNFMHRDEEVDYFPSRFDPVRHAETFPIPSTICHGKREKVVIEKENNFKQPGERYRSFAPDRQERFINRWVETLSDPRVTYEIRSIWISYWSQADRSLGQKLASRLNVKPKY

SEQ ID NO: 992 - protein, 1122 aa, Rhodopirellula baltica SH 1
MTDPDSPLIVGVGASVAGQEAFRLLAEASSRIVWIADCDGKFIEDSPSWRAFTGQTIDQLASTRWLDTVHPEDQRSVADALKDSRRDGGVSVEFRLRRHDGAFIGVQVQGVPQRQPEGSIDCWVLMSSAIDDPGTHQSKQASLSESAGQPKTARQSEAAEREAHLRRVINHQLGLVGVIDRDGILVEVDDRSLEIAKVARQDVIGKHFAEAPWWTYDPRVAARVREAMQRAFAGEVVRFDVSLFAYGEEGVRIDFMIAPVINDEGEVEFLIPSGTDIRDRHRAEVELRKSERLVRTIAENSTQGLVMMDATGHVIYCNQALLDMTGFDSEEIRSAPLHDLIHHHYPDGRPYPMSECPIDRALPEDFSVRAHEDLFFRKDGSSFSVVCAASPIFEDGKPVSTVIEVRDTTVQKAHEVELKRAAARLDKSLAFAGIAAWGWDHSEQRLILDVPLRRMWGFDDEQDVTLDDFAQRITPNHRDRVVASITNAMKTFSSYREEYTIDLPSGNQRWIRAIGQVVADGNGGIADFFGVTMDVTADLRRQVKARVRSELLEQLSELTDPEAIMQLATQRIRKHFSASRCYLAYIRLDAQTTEVFHESHDEHLSPIVGTHQIRDFLNDHEMREIESGKPVRIDDISQSGRSSEKVQQFADLGIAAVTQGSFEATKVLHRTLFITKDKPYRWRDDEVRFLDNLTEMVYLRIERAESQLELEQARAVAEAASQSKSAFVANMSHEIRTPMTAILGYADLVRDMIEDPQAIEHLETIRRNGDYLLEIINDILDLSKIEAGKLEVNHEKFEPARLIEDVRSIMEVRAKEGGLSLDVQYIGLLPKTIESDGKRLKQILINLVGNAIKFTQKGWVQIRVRFNKLLHIDIVDTGIGMSDEQQKRLFKPFSQGDASVTRTFGGTGLGLAISKRLTEMLGGTIIASSTEGVGSTFTVSVAVGDLADVAMVDYSHTFDADHDETSSKYADGSLGTGVNRLAGVEKPLRCHVLVVDDRHDIRFLSRALLTKAGATVDECEDGQLAVDYMTDRLNNDDCPDLILLDMQMPNLDGYETARTLRRMGYSGWIIALTADAMQGDMNECLEAGCNDYLSKPIDANRMIGLIAQFTQSNSDAVERKGN

SEQ ID NO: 993 - protein, 443 aa, Silicibacter pomeroyi DSS-3
MKKVVLAGLAGTLAGIIATTQIAGPLVAQEAKANSNVYEQLDLFGDIFERIRAQYVEEVDAGELIEAAIDGMLTSLDPHSSYLSPDDAAQMRVQTRGEFGGLGIEVTQEEGFVKVVSPIDGTPADEAGIEAGDFITHVDGESVLGLTLDKAVDLMRGPVGSEIVITVVREGEDEPFDVSIIRDTIKLTAVRARTEGTSVVLRVTTFNDQTYSNLEDGLAKQVEAAGGIDKINGFVLDLRNNPGGLLTQAIKVSDAFLDSGEIVSTRGRNPEDGERFNATLGDLAQGKPVVVLINGGSASASEIVAGALQDHRRAIVVGTKSFGKGSVQTVMPLRGDGAMRLTTARYYTPSGRSIQALGVSPDIVVEQPRRRPEAEEERVTPRSRSEADLRGRLNNDSLSEDEIRQIEEDRAKAEATAELRQEDYQLAYAIDILKGLSAFAPAD

SEQ ID NO: 994 - protein, 857 aa, Arabidopsis thaliana
MENGNSSSDNKSSHKPIRCKAAVSRKAGEPLVMEEIMVAPPQPFEVRIRIICTALCHSDVTFWKLQVPPACFPRILGHEAIGVVESVGENVKEVVEGDTVLPTFMPDCGDCVDCKSHKSNLCSKFPFKVSPWMPRYDNSSRFTDLNGETLFHFLNVSSFSEYTVLDVANVVKIDSSIPPSRACLLSCGVSTGVGAAWETAKVEKGSTVVIFGLGSIGLAVAEGARLCGASRIIGVDINPTKFQVGQKFGVTEFVNSMTCEKNRVSEVINEMTDGGADYCFECVGSSSLVQEAYACCRQGWGKTITLGVDKPGSQICLDSFDVLHHGKILMGSLFGGLKAKTHIPILLKRYLSNELELDKFVTHEMKFEEINDAFQLLLEGKCISDFPEDFIFGAATSAYQVEGAAHEDGRGPSIWDTFSEKYPEKIKDGSNGSIASDSYHLYKEDVGLLHQIGFDAYRFSISWSRILPRGNLKGGINQAGIDYYNNLINELLSKGIKPFATIFHWDTPQSLEDAYGGFLGAEIVNDFRDYADICFKNFGDRVKHWMTLNEPLTVVQQGYVAGVMAPGRCSKFTNPNCTAGNGATEPYIVGHNLILAHGEAVKVYREKYKASQKGQVGIALNAGWNLPYTESAEDRLAAARAMAFTFDYFMEPLVTGKYPVDMVNNVKDGRLPTFTAKQSKMLKGSYDFIGINYYSSSYAKDVPCSSENVTLFSDPCASVTGEREGVPIGPKAASDWLLIYPKGIRDLLLYAKYKFKDPVMYITENGRDEASTGKIDLKDSERIDYYAQHLKMVQDAISIGANVKGFFAWSLLDNFEWATGYSVRFGLVYVDFNDGRKRYPKKSAKWFRKLLSEKKRN

SEQ ID NO: 995 - protein, 554 aa, Holospora obtusa
MSVKQIAFGSKVGESLLNGVIKLANCVQVTLGPNGRNVLIEQSFGDPRVTKDGVTVAKHVELEDRYENLAAQLVKSVASKTADMVGDGTTTATVLARSIYSEAFKGTSAGMNSMELRAGIDHAVEIVVEKLKELSIPVKGDYQKISQVATVSANGDTEIGDMIAQAMEKVGSDGVITVEEAKSFKTELDVVPGMQFDRGYISPYFITRQDKGIAELERSYILLYDGKISSAQSLLPVLEKCAKESASLLIIAEDVEGEALRMLVVNKLRGVLKVAAVKSPGFGDRRKAMLGDIAVLTNGYVVSSEVGMRLEDVRIEDLGRADTIVIEKDNTTVIVNGPARSSVKERCDKIRSEIQEATSDYDKEKLQERLAKLSGGVAVIRVGGATEVELKERKDRVEDAMHATKAAVEEGIIPGGGTAFLRCVKPLEEVIKSAKVQERGRDFICGIDAVRKALSSPCYQIASNAGKEGGVVVAEVLKASDVNVGYDARHDQYVDMIKSGIIDPTKVARTALQNAGSVAGLLNTTEVIIAQVPEKEKPNMGGGMGGGMGGGMDF

SEQ ID NO: 996 - protein, 355 aa, Rhodococcus equi
  misc_feature (152)..(152): Xaa can be any naturally occurring amino acid
MTTNQGVKVSEDEHSLKAGSRGPTLMEDFHFREKMTHFDHERIPERVVHARGFGAHGYFQVYEPMAEYTRAKFLQDPSVKTPVFVRFSTVAGSRGSADSVRDARGFATKFYTEEGNYDLVGNNIPVFFIQDAIKFPDLVHSFKPEPHNEMPXASTAHDTFWDFVANILKQAHMIMWTMSDRAIPRSFRMMEGFGVHTFRFVNEQGKARFVKFHWKPVLGTHSLVFDEAQKLAGKDPDFHRRDLWEAIEMGNYPEFELGVQMIEEEDEFSFDFDILDATKLWPEEMVPVKIIGKMTLNRNQDNVFAETEQAAFHPGHVVPGIDFSNDPLLQGRLFSYTDTQLIRLGGPNFHEIPIK

SEQ ID NO: 997 - protein, 485 aa, Lycopersicon esculentum
MGFEIAKTNSILSKLATNEEHGENSPYFDGWKAYDSDPFHPLKNPNGVIQMGLAENQLCLDLIEDWIKRNPKGSICSEGIKSFKAIANFQDYHGLPEFRKAIAKFMEKTRGGRVRFDPERVVMAGGATGANETIIFCLADPGDAFLVPSPYYPAFNRDLRWRTGVQLIPIHCESSNNFKITSKAVKEAYENAQKSNIKVKGLILTNPSNPLGTTLDKDTLKSVLSFTNQHNIHLVCDEIYAATVFDTPQFVSIAEILDEQEMTYCNKDLVHIVYSLSKDMGLPGFRVGIIYSFNDDVVNCARKMSSFGLVSTQTQYFLAAMPSDEKFVDNFLRESAMRLGKRHKHFTNGLEVVGIKCLKNNAGLFCWMDLRPLLRESTFDSEMSLWRVIINDVKLNVSLGSSFECQEPGWFRVCFANMDDGTVDIALARIRRFVGVEKSGDKSSSMEKKQQWKKNNLRLSFSKRMYDESVLSPLSSPIPPSPLVR

SEQ ID NO: 998 - protein, 749 aa, Thiobacillus denitrificans ATCC 25259
MALDYATCSFLLTYTGEAGSPLLVVYLWVTLGNGFRYGVFYLYIAAAMAITGFLLVLTYSSYWNSHMSIGLAFLLSMIAVPLYSASLLKQLHSAVERERKASLAKSSFLANMSHELRTPLNGVIGVADLLAETKLNKEQKEFAQIIRTSADTLLELIDNVLDISRIEAGRILTSSEDFDLHRVINGTVAMMETQANAKGLVLAAHIAPQTPFQLQGDAPHLRQVLINLIGNAVKFTEHGRVDVYVRPVGQGNPQRLRLEVVDTGIGIPPDAQIRIFDSFTQADASITRRFGGTGLGTTIAKQLVEAMGGEIGLHSREGEGTTFWFELPFALRSSGQPAEERFDAPMRVALLASGDLADRMQAAIRAWDVEAVTLRSAAQLGSQLSASPASEASFGAIVVERSLLPADPVAFLSQLREGPVRSSLPVILIESDARIPPSEDALLLRAGYASVLRSPVNTGLLFNAIHAVTSRELPPNVISLANRFQAQTAQATGLNILVAEDNPVNQRVLRGLLEHAGHKTTLAHDGEEALDLLDSDGASFDLAIIDMHMPELSGPEVVQRWRFLEKGHLPIIMLTADARSEAETACKEAGADAFLTKPVNSRELIDAITRLGVPSPSPVTAPAAKAVRTGELDETVLDDLAELGGAEFVRELLASFEDDSARALRDAEFALVAHEYGQWHHHLHMLKGGASDVGANLLAERCAEAERVKPFELATPLARTRLDAVRTALEEARTALSRYQERRLRAEHS

SEQ ID NO: 999 - protein, 1022 aa, Cryptococcus neoformans var. neoformans JEC21
MPSSANAHDGAARQATVTRKRTNGSSTRDEKQYIGQWRIGRTIGKGSSGRVKIAKHAVTGKYAAIKIVPKGLILNSRMSMSEAGAKADKVLLGIEREIVIMKLIDHPNVLNLYDVWETSSELYLIMEYVPGGELFDYLVKRGRLPVSEALHYFQQIIYAVDYCHRFNICHRDLKPENLLLDKDKNIKVADFGMAAWEAGERMLETSCGSPHYASPEIVAGKAYHGSSSDIWSCGIILFALLTGRLPFDDDNIRSLLQKVKIGIFEMPDEIKDPARDLLRRMLERDPERRITMPEILSHPFFISRPPRPIPGRSLVSPPSLDEVERPVNSVDEIDPDIMGNLKTLWSGVSDEEIIKALMCKDKTWEKTIYHLLIKYRNKHLENYNMEEEEYAEARERRQARKQLQSSSSPARRKGVPAQDQSARLAPLGENETVANTPVKRPQAPTPNKASRKAPPECPTPTKQVSQARSPAGPRPANSRGNSGASNSSQAPAIVLQGATPTKELPPPHTTSSHPRPEMITTPTSPAPLSVPRVEDANLQTFLNQIADQMNRFSVRSSVASQSSTSSSAVLGSDYQACLAFAAGVTPSANPSSSVTESVIEEQGQFEDAADDQTDTEVASIHSGFTASIAPQSPLAGLGLGAPSAAVRPGLHPVAGPNQQRWSYASSAGSSYQGSSVGSYAPVESPQYIHSPLEVQAPVLQAERSAPRPPPRATRPAPPPISRPLPFSPAQQTYSEPTESLLPRDTSYVIIDNSELPSDASLSSWGSKSSGFKAHRGLDGFGMLKKKKLNVEPVPYSYGNLGSSATSPLNSPKRSWFNNLFNFKPATCTLLSRDNVANTRERVRKILLSIGVRTAVTEIDGHKALKCRLDEVRDNGNVTTKGVRFRVEFTRASTSQTYSTLVTLTQEKGAESSFRACFAELKHFMDSQPSAPTTLSLNRPSVEQSRSVNSSNLLPAHSYQQQRYSSTSADTPAGAPTSPLLSAPPIRYTASAPTTPVIESSPRFTSPYLQLPVSPQSLQMPSY

SEQ ID NO: 1000 - protein, 367 aa, Lentinula edodes
MDDRTTAFIVGSSYQPLDIIGEGAYGVVCSAVHIQSQRKVAIKRITPFDHSMFCLRTLREIKLLRHFQHENIIGILDILKPNLGPDGSLDGMTEVYLVQELMETDLHRVIKTQELSDDHCQYFIYQTLRALKALHSADVLHRDLKPSNLLLNANCDLKLCDFGLARSASPLPDHPVDASTFMTEYVATRWYRAPEVMLTFKQYTKAIDKWSLGCVLAEMLSGKPLFPGRDYHHQLSLILDVLGTPTLDDFYAISSSRSREYIRALPFRKKKVFGKPVHEGGVKGFEGKNPLAIDLMEKCLSFNPKRRIDVEGALAHPYLAPYHDPSDEPGAERIDSEFWSFDTFNNGKGLSKEELKVLIYEEVMRGA

SEQ ID NO: 1001 - protein, 725 aa, Xanthomonas oryzae pv. oryzae KACC10331
MSPLNAGVPAHPRLSMRRPASAAYANPSRIRQGRPFPRGAVFDGKGTNFALFSAHATRVEVCLFDEQGNETRVDLPEYTNEIWHGYLPDTKPGQRYGYRVHGPYAPTEGHRFNHNKLLLDPYARELEGDLIWADELYGYTVGHPDGDLSFDERDSAPFMPKCVVVEDIYDWGDDTRLLKPWNEMVIYETHVRGYTMGNPQVPEAVRGTFAGLAQPQVLQYIKDLGITAVELLPVHAYLDDQHLLDKGLRNYWGYNTIGFFALKSRYLASGHRDEFRDMVKAMHKQGLEVILDVVYNHTAEGSELGPTLSFKGIDNASYYRLAEDKRYYINDTGTGNTLNLSNSRVIQFVNDSLRYWAGEMHVDGFRFDLATILGREPSGFDQRGGFLDACNQDPLLSEVKLIAEPWDCGPGGYQVGHFPPGWSEWNDKFRDNAREFWKGEDGKLAEFATRFTGSADLFDRRGRRPWASVNFITAHDGFTLRDLVSYNEKHNIDNGEDNRDGSSNDGSCNYGEEGETDNAEILQIRERQMKNLLATLLLSQGAPMMLSGDERGQTQGGNNNTYCQDNAITWLDWENDPTDGRLTDFVKALTKLRKRYPILSRGRFLNGQYNEEAGVRDLTWLNPGGIEMDDAHWTDASARSVGLLLEGKAQTSGVKELANDDTLLIVINAYHEGVSFTLPSSDEPVHWKLVLSTDEALEVDMMPAAASEFLAPPRSVSVFECKSDQ

SEQ ID NO: 1002 - protein, 634 aa, Gladiolus hybrid cultivar 'Traveler'
MEGCDCIEPQWPADELLVKYQYISDFFIALAYFSIPLELIYFVKKSSFFPYRWVLIQFGAFIVLCGATHLINLWTFTMHSKTLALVMTVAKVSTAVVSCATALMLVHIIPDLLSVKTRELFLKNKAEELDREMGLIRTQEETGRHVRMLTHEIRSTLDRHTILKTTFVELGRTLDLAECALWMPSRTGLNLQLSHTLHNQIPVGSTVSINLPTVNQVFNSNRAVRIPHTSPLARIRPLAGRYVPPEVVAVRVPLLHLSNFQINDWPELSARSYAVMVLILPSDSARKWHVHELELVEVVADQVAVALSHAAILEESMRARDLLMEQNVALDLARREAEMAIRARNDFLAVMNHEMRTPMHAIIALSSLLLETELTPEQRIMVETMLKSSNLLATLINDVLDLSRLEDGSFELEKSSFNLHTVFREVINLIKPIAAVKRLSVSVSLAPDLPLCAMGDEKRLMQTILNVAGNAVKFTKEGHISITASVSRPDSFRDPQVHEFYPVFTDGHFYLCVQIKDTGCGISPQDIPFLFTKFAHTQNGGNKGYSGSGLGLAICKRFISLMEGHIWLESEGLGKGCTATFIVKLGICESQNGHQQQMIPTNRLLLGGADFPGPGALLKEDNKAIPSKLRYLSV

SEQ ID NO: 1003 - protein, 464 aa, Oryza sativa
SNLYIDPEAEVVALSPATLMATNRFVCEICGKGFQRDQNLQLHRRGHNLPWKLKQRGSKEAVRKKVYICPEASCVHHDPSRALGDLTGIKKHFFRKHGEKKWKCDKCSKKYAVHSDWKAHSKICGTREYKCDCGTIFSRRDSFITHRAFCDALTEESAKAIGGIPAAMAAPGHHHHHHQLLFSPPPVMAHHQELAALQEQQQQQHHQDVMQSPHQHQQQQQQRQQLVQQNCGYAVKPEMAPWPTTMPYDHHHPLLQPLCNANAAATAQSSATSAPPTTPQLPAAAAAAHLSATALLQKAAQMGATIGGAGTGAAGAHYAHMASPAGAGAPAGGSATFGLGLSCLNTHQDGGGGGGNGLIPAGMMGHLARTASHGRSGEDVAGAGGGGGDGMTRDFLGLRAFSHRDILLAGFDSSCMGHVNAAAGMAGYEPPPPHHGQPQHQHQQQQQQQQGGSNEPWHGMGSHS

SEQ ID NO: 1004 - protein, 540 aa, Raoultella ornithinolytica
MAAKDVKFGNDARVKMLRGVNVLADAVKVTLGPKGRNVVLDKSFGAPTITKDGVSVAREIELEDKFENMGAQMVKEVASKANDAAGDGTTTATVLAQAIIAEGLKAVAAGMNPMDLKRGIDKAVVAAVEELKTLSVPCSDSKAIAQVGTISANSDETVGKLIAEAMDKVGKEGVITVEDGTGLEDELDVVEGMQFDRGYLSPYFINKPETGAVELESPFILLADKKVSNIREMLPVLEAVAKAGKPLVIIAEDVEGEALATLVVNTMRGIVKVAAVKAPGFGDRRKAMLQDIATLTGGTVISEEIGMELEKATLEDLGQAKRVVINKDTTTIIDGVGEEGAIQGRVAQIRKQIEEATSDYDREKLQERVAKLAGGVAVIKVGAATEVEMKEKKARVDDALHATRAAVEEGVVAGGGVALVRVAAKLAGLTAQNEDQNVGIKVALRAMEAPLRQIVSNAGEEPSVVANNVKAGEGNYGYNAATEEYGNMIDFGILDPTKVTRSALQYAASVAGLMITTECMVTDLPKSDAADLGAAGGMGG

SEQ ID NO: 1005 - protein, 540 aa, Klebsiella oxytoca
MAAKDVKFGNDARVKMLRGVNVLADAVKVTLGPKGRNVVLDKSFGAPTITKDGVSVAREIELEDKFENMGAQMVKEVASKANDAAGDGTTTATVLAQAIIAEGLKAVAAGMNPMDLKRGIDKAVVAAVEELKTLSVPCSDSKAIAQVGTISANSDETVGKLIAEAMDKVGKEGVITVEDGTGLEDELDVVEGMQFDRGYLSPYFINKPETGAVELESPFILLADKKISNIREMLPVLEAVAKAGKPLVIIAEDVEGEALATLVVNTMRGIVKVAAVKAPGFGDRRKAMLQDIATLTGGTVISEEIGMELEKATLEDLGQAKRVVINKDTTTIIDGVGEEAAIQGRVTQIRKQIEEATSDYDREKLQERVAKLAGGVAVIKVGAATEVEMKEKKARVDDALHATRAAVEEGVVAGGGVALVRVAAKLAGLTAQNEDQNVGIKVALRAMEAPLRQIVSNAGEEPSVVANNVKAGEGNYGYNAATEEYGNMIDFGILDPTKVTRSALQYAASVAGLMITTECMVTDLPKSDAPDLGAAGGMGG

SEQ ID NO: 1006 - protein, 540 aa, Raoultella planticola
MAAKDVKFGNDARVKMLRGVNVLADAVKVTLGPKGRNVVLDKSFGAPTITKDGVSVAREIELEDKFENMGAQMVKEVASKANDAAGDGTTTATVLAQSIITEGLKAVAAGMNPMDLKRGIDKAVAAAVEELKTLSVPCSDSKAIAQVGTISANSDETVGKLIAEAMDKVGKEGVITVEDGTGLQDELDVVEGMQFDRGYLSPYFINKPETGAVELESPFILLADKKISNIREMLPVLEAVAKAGKPLLIIAEDVEGEALATLVVNTMRGIVKVAAVKAPGFGDRRKAMLQDIATLTGGTVISEEIGMELEKSTLEDLGQAKRVVINKDTTTIIDGVGEESAIQGRVTQIRQQIEEATSDYDREKLQERVAKLAGGVAVIKVGAATEVEMKEKKARVEDALHATRAAVEEGVVAGGGVALIRVASKIAELKGQNEDQNVGIKVALRAMESPLRQIVLNCGEEPSVVANTVKSGDGNYGYNAATEEYGNMIDMGILDPTKVTRSALQYAASVAGLMITTECMVTDLPKGDAPDLGAAGGMGG

SEQ ID NO: 1007 - protein, 541 aa, Pantoea ananatis
MAAKDVKFGNDARVKMLRGVNVLADAVKVTLGPKGRNVVLDKSFGAPTITKDGVSVAREIELEDKFENMGAQMVKEVASKANDAAGDGTTTATVLAQSIITEGLKAVAAGMNPMDLKRGIDQAVIAAVEELKKLSVPCSDSKAIAQVGTISANSDETVGTLIAQAMEKVGKEGVITVEEGTGLQDELDVVEGMQFDRGYLSPYFINKPETGAVELETPFILLADKKISNIREMLPVLEAVAKAGKPLLIIAEDVEGEALATLVVNTMRGIVKVAAVKAPGFGDRRKAMLQDIAILTGGTVISEEIGMELEKAALEDLGQAKRVVINKDTTTIIDGVGEETTIQGRVTQIRQQIEEATSDYDKEKLQERVAKLAGGVAVLKVGAATEVEMKEKKARVEDALHATRAAVEEGVVAGGGVALVRVAAQLTELRGQNEDQNVGIKVALRAMESPLRQIVSNAGEEPSVVANNVKAGDGNYGYNAQTEEYGNMIDFGILDPTKVTRSALQYAASVAGLMITTECMVTDLPKGDAPDLGAGAGGMGG

SEQ ID NO: 1008 - protein, 653 aa, Magnetococcus sp. MC-1
MCGISGFYQPAASEQELAHNITRMTATLQRRGPDDGGFWLEPSCGLALGHRRLAIQDLSPLGHQPMADASGRYQIVFNGEIYNFLELKQNLERHYGPQPWRGHSDTEVLLALIGHSGLEAALAQCRGMFALALWDRQQRILTLARDRLGEKPLYYGRQGDSLLFASELKALRAHPHWQGGVDRHALTLFMRHSTVPAPYTIHPGIHKLQAGCYQRFQWHPEQGMQDLGMIHYWSMSQVVAHANAHPFDGDETAALQAVEQQLMAIIGRQMVADVPLGAFLSGGIDSSLITAMMQAQSSRPVQSFTIGFAEASHDESAYAQAIARHLGTQHTTLQVTPQDALALVPSLPLIYDEPFSDASQLPTTLLAGLTRQHVTVALSGDGGDELFGGYDRYGESMALWRLRGRVPSPLRRPLARAGRALPSGVWSALLRPVAACLPAKARDNPGDIVHKMMDLLVQPDFAHLYRHMLSHWSDPGNLVVGGHEPPTNLTRGWTQPWRQDPVAQMMYWDTLLYLPDDILVKVDRAAMWSSLECRIPLLDHRLVELVWSMPMHFKRRDGVPKWLLQRLLGKRVPEALFERPKMGFGVPLERWLRGPLKGWAQDLLAPALLQRQGYLNPEPIARIWRQHQQGSHNWHHLLWDLLMWQAWLAEHEG

SEQ ID NO: 1009 - protein, 207 aa, Fusobacterium nucleatum subsp. vincentii ATCC 49256
MKVKCFHLGAYGTNCFLAYDENNIAYFFDCGGRNLKQVYEYIEEHKLNLKCIILTHGHGDHIEGLNDLASHYPEAKVYIGEEDKDFLYNSELSLSDAIFGEVFRFKGELITVKEGDTIGDFKVIDTPGHTIGSKSFYDEKDKILMSGDTLFRRSYGRYDLPTGSLEMLCHSLEKLSKLPDETVVYNGHTDNTTIGEERRFLERVGIL

SEQ ID NO: 1010 - protein, 156 aa, Brassica napus
  misc_feature (138)..(138): Xaa can be any naturally occurring amino acid
MATENHADKNVVFRKLKAKSENKVCFDCSAKNPTWASVTYGVFLCIDCSAVHRNLGVHISFVRSTNLDSWSPEQLRTMMFGGNNRAQVFFKQHGWNDGGRIDAKYTSRAQHGWNDGGRIDAKYTSRAADLYKQTLAKXVAKAMAGRSSFAFICCCY

SEQ ID NO: 1011 - protein, 259 aa, Zea mays
MLNMMTDLSCGPSSKVKEQVAAAPTGSGDRQGQGRGKIEIKRIENTTNRQVTFCKRRNGLLKKAYELSVLCDAEVALVVFSSRGRLYEYANNSVKSTIERYKKANSDSSNSGTVAEVNAQYYQQESSKLRQMIHSLQNANTRNIVGDSIHTMGLRDLKQMEGKLEKAISKIRARKNELLYAEVDYMQKREMDLQTDNMYLTSKIAESNETGQPAMHMMGVPPPTSEYDHMAPFDSRNFLQVSMPQHYSHQLQPTTLQLG

SEQ ID NO: 1012 - protein, 540 aa, Serratia ficaria
  misc_feature (533)..(533): Xaa can be any naturally occurring amino acid
MAAKDVKFGNDARVKMLRGVNVLADAVKVTLGPKGRNVVLDKSFGAPTITKDGVSVAREIELEDKFENMGAQMVKEVASKANDAAGDGTTTATVLAQSIITEGLKAVAAGMNPMDLKRGIDKAVVAAVEELKKLSVPCSDSKAIAQVGTISANSDETVGKLIAEAMEKVGKEGVITVEEGTGLQDELDVVEGMQFDRGYLSPYFINKPETGSVELESPFILLADKKISNIRELLPVLEAVAKAGKPLLIVAEDVEGEALATLVVNTMRGIVKVAAVKAPGFGDRRKAMLQDIATLTAGTVISEEIGLELEKATLEDLGQAKRVVINKDTTIIIDGVGDEATIQGRVTQIRQQIEEATSDYDREKLQERVAKLAGGVAVIKVGAATEVEMKEKKARVEDALHATRAAVEEGVVAGGGVALIRVAGKIAGLKGDNEDQNVGIKVALRAMESPLRQIVINAGEEASVIANNVKAGEGSYGYNAYSEEYGDMIAMGILDPTKVTRSALQYAASVAGLMITTECMVTDLPKADAPDLXGAGGMGG

SEQ ID NO: 1013 - protein, 540 aa, Serratia marcescens
  misc_feature (535)..(535): Xaa can be any naturally occurring amino acid
MAAKDVKFGNDARVKMLRGVNVLADAVKVTLGPKGRNVVLDKSFGAPTITKDGVSVAREIELEDKFENMGAQMVKEVASKANDAAGDGTTTATVLAQSIITEGLKAVAAGMNPMDLKRGIDKAVVAAVEELKKLSVPCSDSKAIAQVGTISANSDETVGKLIAEAMEKVGKEGVITVEEGTGLQDELDVVEGMQFDRGYLSPYFINKPETGSVELESPFILLADKKISNIREMLPVLEAVAKAGKPLLIIAEDVEGEALATLVVNTMRGIVKVAAVKAPGFGDRRKDMLQDIATLTAGTVISEEIGLELEKATLEDLGQAKRVVINKDTTIIIDGVGDEATIQGRVAQIRQQIEEATSDYDREKLQERVAKLAGGVAVIKVGAATEVEMKEKKARVEDALHATRAAVEEGVVAGGGVALIRVAGKIAALKGDNEDQNVGIKVALRAMEAPLRQIVVNAGEEASVIANQVKAGEGSYGYNAYSEEYGDMIAMGILDPTKVTRSALQYAASVAGLMITTECMVTDLPKADAPDLGAXGGMGG

SEQ ID NO: 1014 - protein, 539 aa, Serratia rubidaea
MAAKDVKFGNDARVKMLNGVNILADAVKVTLGPKGRNVVLDKSFGAPTITKDGVSVAREIELEDKFENMGAQMVKEVASKANDAAGDGTTTATVLAQAIVNEGLKAVAAGMNPMDLKRGIDKAVIAAVEELKKLSVPCSDSKAIAQVGTISANSDETVGKLIAEAMEKVGKEGVITVEEGTGLQDELDVVEGMQFDRGYLSPYFINKPETGSVELESPFILLADKKVSNIRELLPVLEAVAKAGKPLLIVAEDVEGEALATLVVNTMRGIVKVAAVKAPGFGDRRKAMLQDIATLTAGTVISEEIGMELEKATLEDLGQAKRVVINKDTTIIIDGIGDEATIQGRVAQIRQQIEEATSDYDREKLQERVAKLAGGVAVIKVGAATEVEMKEKKARVEDALHATRAAVEEGVVAGGGVALIRVASKIAELKGDNEDQNVGIKVALRAMEAPLRQIVINAGEEASVIANSVKAGEGSYGYNAYSEEYGDMIGMGILDPTKVTRSALQYAASVAGLMITTECMVTDLPKEDKADMGAAGMGG

SEQ ID NO: 1015 - protein, 224 aa, Glycine max
EGSDEIFGGYLYFHKAPNKKELHEETCQKIKALHLYDCLRANKSTAAWGVEARVPFLDKEFINVAMSIDPEWKMIRPDLGRIEKWVLRNAFDDDKNPYLPKHILYRQKEQFSDGVGYSWIDGLKDHANKQVTDATMMAANFIYPENTPTTKEGYLYRTIFEKFFPKNSAKATVPGGPSVACSTAKAVEWDASWSKNLDPSGRAALGVHAAAYDGAVDTTKNGPL

SEQ ID NO: 1016 - protein, 592 aa, Thiobacillus denitrificans ATCC 25259
MPFGTRITPEGVRFRLWAPGCERVMLHIEEGAAVGRMMMPSGDGWFELLVDGAGAGTPYRFEVNDGLRVPDPASRFNPDDVHGASVVVDPTAFAWRDTAWKGRPWEEAVVYELHVGTFSPSGTFAGVIERLDYLVDLGVTAIELMPVADFPGVHNWGYDGVLLFAPDSRYGTPDDLKALVQSAHDKGLMVLLDVVYNHFGPEGNYLHVYARKFFSERHHTLWGAAINFDGSGSRTVRDFFIHNALYWLQEYHFDGLRLDAVHAIIDDSARHILTELAERVHAEIGSERAVHLILENDANEAHHLGQGGYTAQWNDDIHHALHVLATGEADGYYGDYADAPLVHLGRCLTEGFAYQGQASAYHEGESRGEPSGHLPLQAFVAFVQNHDQVGNRAFGERLTQLAPESALRAVAAVLLLAPSVPMLFMGEEFGARTPFQFFCDFGGELRDAVTQGRRREFRKFARFADPAAQAAIPDPNRPETFLASRLDWSEAGAGALDQYRGLLKLRRETIVPRLRLIEPGSAAFEVVAGVLRVRWGLHDGASLQLTAHLSQEPLGEVALEGEVIFATSDAAAAGVLGPWSVVWTLAAAETQA

SEQ ID NO: 1017 - protein, 351 aa, Xanthomonas oryzae pv. oryzae KACC10331
MATMAAHLLYRLPVPMSRPSLTRFLIEEQHAGRIDAELRQLITIVSRACKRISIAVSKGALGGVLGDAGTGNVQGEAQKKLDVLSNDILLEANAWGGHLAACASEEMDHSQPVPEQYPSGDFLLLFDPLDGSSNIDVNVSVGTIFSVLRAPKGTEKPGDEHFLQPGTQQVAAGYCIYGPSTMLVLTLGHGTHAFTLEREEGSFLLTQANMRVPDETAEYAINMSNQRHWEPAMQAYVGDLLAGKDGARGKDFNMRWIASMVADVHRILTRGGIFIYPWDKKDPSKPGKLRLMYEANPMSMLVEQAGGAATTGRERILDIQPTQLHQRVPVFLGSKNEVAAATRYHLDADKA

SEQ ID NO: 1018 - protein, 375 aa, Shewanella sp. ANA-3
MRILETIMNKPPIIWLNVILFSLTFLSAVILVPWYGLTHGYGASEWIAFVVLAFASGLSITAGYHRLWSHKAYKAHPAVRFLYALGGALALQNSALHWASDHRVHHKHVDDNDKDPYSANMGFWYSHIGWMLREYQAQRYHDYQNVRDLQNDRIVMWQHKHYLALVILMNIGLPALLGWFTGNIAGMLLMAGLLRLVVVHHCTFFINSLAHVWGSQPYTDKNTARDNGFLAMLTYGEGYHNFHHIFENDYRNGIKWWHYDPTKWLIKGLSWVGLAKDLRTSPQERIESARLQMQLLHAKNKVVHLPNADEVIEKIQQEYELMKEHLLEYYQAKKALLDAKRKQLVDQQLLLQVEELKTRFLTQQKSWKSLTASYS

SEQ ID NO: 1019 - protein, 421 aa, Arabidopsis thaliana
MEKKGSVLMLRYEVGKFLGQGTFAKVYHARHLKTGDSVAIKVIDKERILKVGMTEQIKREISAMRLLRHPNIVELHEVMATKSKIYFVMEHVKGGELFNKVSTGKLREDVARKYFQQLVRAVDFCHSRGVCHRDLKPENLLLDEHGNLKISDFGLSALSDSRRQDGLLHTTCGTPTYCAPEVISRNGYDGFKADVWSCGVILFVLLAGYLPFRDSNLMELYKKIGKAEVKFPNWLAPGAKRLLKRILDPNPNTRVSTEKIMKSSWFRKGLQEEVKESVEEETEVDAEAEGNASAEKEKKRCINLNAFEIISLSTGFDLSGLFEKGEEKEEMRFTSNREASEITEKLVEIGKDLKMKVRKKEHEWRVKMSAEATVVEAEVFEIAPSYHMVVLKKSGGDTAEYKRVMKESIRPALIDFVLAWH

SEQ ID NO: 1020 - protein, 72 aa, Castanea mollissima
VGGVSDVKGHENSLQIDDLARFAVDDHNKKANTLLQFKKVVNAKQQVVSGTIYILTLEVEDGGKKKVYEAKI

SEQ ID NO: 1021 - protein, 342 aa, Ashbya gossypii ATCC 10895
MATVNPQRRDSAEAIDTDIITLARFILESQRSSAKNATGEFNLLLNSLSFAFKFISQTIRRAELVNLIGLSGASNATGDQQKKLDVLGDEIFINAMKASGNVKVLVSEEQEDLIVFPETGGTYAVCCDPIDGSSNLDAGVSVGTIVSIFKLTPDSSGTIKDVLRSGREIVAACYAMYGASTHVMLTTGQGVNGFTLDTSIGEFILTYRDLKMPALRNIYSINEGNMRFWTDGIRRFVEALKDSDKPYSARYIGSMVADVHRTLLYGGLFSYPLDMKNPNGKLCLLYEAFPMAFLVEQAGGKAVNDRGERILDLTPEHIHDKSSIWLGSAGEVDKYLAHIGRA

SEQ ID NO: 1022 - protein, 480 aa, Lactobacillus plantarum WCFS1
MSEFPEGFLWGGATAANQLEGGYQEGGRGLSIADALPGGKDRFKIVSQPDFDWTIDTDKYTYPNHEGIDFYHHYKEDIALFAEMGFKCYRFSIAWSRIFPNGDETQPNEAGLKFYDDVIDECLANNIEPVITISHYELPLNLAKRYGGWKNRYLIEFYETFARTILTRYASKVKYWMTFNEINSAAHFPVMGQGLVPSTGANDKKNVFQAWHNQFVASAKAVKIAHELRDDIQVGCMILYATSYAYDSNPVNQLANLQHNQDFNFFCADVQVRGAYPTYTKRLLAEYNLTFDDLETTDGDLALLQQYPVDYIGFSYYMSSAVETTGSVTDTVAGNLMGGVKNPFLKASDWGWQIDPTGLRIALNELYDRYQKPLFVVENGLGAIDKPDKNFYVEDDYRIDYLKQHIEAMAGAIDDGVDLMGYTPWGCIDLVSASTGEMSKRYGFIYVDLDDQGHGTLARYPKKSFYWYQDVIKHNGLTKK

SEQ ID NO: 1023 - protein, 747 aa, Aspergillus oryzae
MANIVAGGLHKVQEAVQGAASKDKKLVDLAPDTHNVQSSKEPLTTDHGVRISDTDHWLKEVNDNHTGPMMLEDQIAREKIHRFDHERIPERVVHARGTAAFGNFKLHESAEDVSYAGILTDTSRNTPVFLRFSTVQGSKGSADTVRDVRGFAVKFYTDEGNWDLVGNNIPVFFIQDAIKFPDFVHAVKPEPHNEVPQAQTAHNNFWDFVYLHPEATHMFMWAMSDRAIPRSYRMMQGFGVNTFSLINKEGKRHFVKFHFIPHLGVHSLVWDEALKLAGQDPDFHRKDLMEAIDNGAYPKWDFAIQVIPEEKQDDFEFDIFDATKIWPEELVPLRVIGELELNRNVDEFFPQTEQVAFCTSHIVPGIDFSDDPLLQGRNFSYFDTQISRLGINWEEIPINRPVCPVLNHNRDGAKRHRIAQGTVTTWSNRSEAGPPAPVEHGGFASYPAKLNGIKKRGLSPKFREHHNQAQLFYNSLSEHEKVHVKKAFGFELDHCDDPIVYERLAGHRLAEIDLTLAQEVAELVGAPIPDKALRPNHGKRSKHLSQTEFPGKQPTIASRRIAIIIGDGYDPVAFNGLKGAITAVGALPFVIGTKRSPIYADGEDKSSSKGVIADHQYDGQRSTMFDATFIPGGPHVESLKANGQIRYWIIETFGHLKALGATGEAAAFIKEALGSALDVKVATSDNPQPVEWYGVVTAGKIHKPESFKEGIQIVKDAKDFISTFFYQISQHRNYKRELDGLASTVAF

SEQ ID NO: 1024 - protein, 639 aa, Magnaporthe grisea 70-15
MPICLWHGYAPSSAQRLLNSSIYLPKCSLGQFNTMAPRNQKRKAASPAGSHGSDSKKIKTESVEPISTSDPLRRPHTFYKESEENGIVLREFYPHEMSNERARAYNNDEIPRPIEDLYQAMSQTHPIRQKVKVKGAVVHWFKMDLRVADNTALRLASEKAKSAGVPLIALYTVSPKDWEAHLRAPVRVDFTLRSLEVLRQDLAKLDIPLHVETVDDRRAMKQRVLSLMEEWDASHLYANMEYEVDELRREANLVRLLAENGKSMEVVHDTCVVPPGKLQTGTGRQYAVYSPWYRAWLKHLSGDPELLEPMEPPHKNPASAREKFSHLFDGKIPAAPKSKQMNEEEQQRLAAMWPAGEHEARKRLDAFIKRRIDGYAAKRNFPADDGTSSISVHLAAGTLSARTAVHLAHKASGTRKLDGGSQGIQTWISEVAWRDFYKHVLVNWPYVCLTSAGSCPHSMNKPFKPEYSNIAWSYDMEHFAAWCEGRTGFPIVDAAMRQLRGTGWMHNRCRMIVASFLAKDFLIDWRMGERYFMENLVDGDFASNNGGWGFAASVGVDPQPYFRVFNPLLQSEKFDPNGEYIRKWIPELKGIKGKAIHDPYGRGCGVEAKKKGYPKPLVDHKGCRERALKAYKEGISKEI

SEQ ID NO: 1025 - protein, 365 aa, Zea mays
  misc_feature (124)..(124): Xaa can be any naturally occurring amino acid
  misc_feature (355)..(355): Xaa can be any naturally occurring amino acid
MECLTSSTLYGYSSLSFLFPADKMKFGATYEEYLRAERDKFLGQCSHVEYKRLKKVLKKCRVGRSLQADGTNGDEQQEGRDESSNICECNSCTLCDEMFFTEPNKEASEIAGCFRSRVQRLLHXHVPSGLQRCIWRFRQCFIDDQQIMVQEGRMLLNYVTMNAIAIRKILKKYDKIHGSVSGRDFKSKMQTEHIELLQSPWLIELAAFHLNCDDSDADEPRAGEFFKNGFFKNFSCDLSGAQPLLTMTISETLKYEYSLTCPICLDTLFNPYALSCGHLFCKACACGAASVYIFQGVKSAPPEAKCPVCRAVGVFDRAVRMTELELLLKRRDKDYFLQRLREERSVMVKQAKEYXDSQAMLSMGI

SEQ ID NO: 1026 - protein, 427 aa, Arabidopsis thaliana
MDPYKYRPSSAYNAPFYTTNGGAPVSNNISSLTIGERGPVLLEDYHLIEKVANFTRERIPERVVHARGISAKGFFEVTHDISNLTCADFLRAPGVQTPVIVRFSTVVHERASPETMRDIRGFAVKFYTREGNFDLVGNNTPVFFIRDGIQFPDVVHALKPNPKTNIQEYWRILDYMSHLPESLLTWCWMFDDVGIPQDYRHMEGFGVHTYTLIAKSGKVLFVKFHWKPTCGIKNLTDEEAKVVGGANHSHATKDLHDAIASGNYPEWKLFIQTMDPADEDKFDFDPLDVTKIWPEDILPLQPVGRLVLNRTIDNFFNETEQLAFNPGLVVPGIYYSDDKLLQCRIFAYGDTQRHRLGPNYLQLPVNAPKCAHHNNHHEGFMNFMHRDEEINYYPSKFDPVRCAEKVPTPTNSYTGIRTKVRFLPCLL

SEQ ID NO: 1027 - protein, 526 aa, Rhodopirellula baltica SH 1
MRRDFQILVRTAQRVRRDQTKAFMAAGPRTSLTTDWHVMANALVWFRNDLRTIDHEPFLRASTADRCFAVHCIDPRQFETTELGFQRTGPFRARFLIENLTDLRSRLRSLGGELIVRVGRPETVLQHLLPSLAIDAVHFHHEPRTEEADTAESVQQLCDQHGIATHVAYGDTLIHPDELPFEIADTPELFTDFRKEIEKQCEARSPLEEPIRIHGTLPEEVNAGDIPTLESLGLSTPPLDDRCLNQFTGGQNAAQQRMEEYIWNEDRLRVYKETRNGMLHPNDSSKFSPWLAQGCLSPRMIADHVRRYEEERVKNKSTYWMIFELLWRDYFRWISRKHGATLFRAGGLRGVNVDWKSDRELFRRWQDGTTGYPLVDANMRELRTTGYMSNRGRQNVASFLTKNLGIDWRWGARWFESQLVDYDVASNYGNWNYAAGVGNDARGFRFFNITKQSRDYDSQGEYAKHWLPELRDLDVTEIHEPWKMSPERQQEVGATLGKEYPHPIVDLFDSAKENETIYMRAKAASH

SEQ ID NO: 1028 - protein, 547 aa, Escherichia coli
AAKDVKFGNDAGVKMLRGVNVLADAVKVTLGPKGRNVVLDKSFGAPTITKDGVSVAREIELEDKFENMGAQMVKEVASKANDAAGDGTTTATVLAQAIITEGLKAVAAGMNPMDLKRGIDKAVTVAVEELKALSVPCSDSKAIAQVGTISANSDETVGKLIAEAMDKVGKEGVITVEDGTGLQDELDVVEGMQFDRGYLSPYFINKPETGAVELESPFILLADKKISNIREMLPVLEAVAKAGKPLLIIAEDVEGEALATLVVNTMRGIVKVAAVKAPGFGDRRKAMLQDIATLTGGTVISEEIGMELEKATLEDLGQAKRVVINKDTTTIIDGVGEEAAIQGRVAQIRQQIEEATSDYDREKLQERVAKLAGGVAVIKVGAATEVEMKEKKARVEDALHATRAAVEEGVVAGGGVALIRVASKLADLRGQNADQNVGIKVALRAMEAPLRQIVLNCGEEPSVVANTVKGGDGNYGYNAATEEYGNMIDMGILDPTKVTRSALQYAASVAGLMITTECMVTDLPKNDAADLGAAGGMGGMGGMGGMM

SEQ ID NO: 1029 - protein, 582 aa, Bacteroides thetaiotaomicron VPI-5482
MSTRNSSRFTPIIIAISVVAGILIGTFYAKHFAGNRLGIINGSSNKLNALLRIVDDQYVDTVNMTDLVEKAMPQILAELDPHSTYIPAQNLEEVNSELEGSFSGIGIQFTIQNDTIHVNAVIQGGPSEKVGLMAGDRIVNVDDSLFVGKKLNNELAMRTLKGPKGSQVKLGVKRVGEPKLLDFTITRGDIPQNTVDAAYMLNDDIGYVKVSKFGRTSHVELLNALAQLNHKKCKGLIIDLRGNTGGYMEAAIRMVNEFLPEGKLIVYTQGRKYPRAEEFANGTGSCQKMPLVVLIDEGSASASEIFTGAIQDNDRGTVVGRRSFGKGLVQQPIDFSDGSAIRLTIARYYTPSGRCIQRPYESGKDKNYELDIYNRYEHGEFFSRDSIKLNENERYLTSLGRTVYGGGGIMPDVFVPQDTTGVTSYLSSVINRGLTLQFTFQYTDNNRKKLSQYETEEDLLNYLRHQGLVEQFIRFADSKGVKRRNILIQKSYKRLEANIYGNIIYNMLGLEAYLKYFNKSDATVQQGIELLEKGEAFPKAPAETEEEVTKDNKDGKKKRTAQAYGITEDPTRIFDFAEATIS

SEQ ID NO: 1030 - protein, 462 aa, Bacillus clausii KSM-K16
MAHAYSFPKDFWWGSAVSATQIEGAANEGGKGKNIWDHWYELEPNRFFEEVGPSATSDFYHRYQDDIALMKAIGHNSFRFSISWSRLIPGGEGEVNKEAVAFYNNVIDELIANGIEPFVNLFHFDMPFELQEKGGWENREVVELYAQYAAACYDLFGDRVKKWFTFNEPIVPVEGGYLYDFHYPNIVDARRAFQVAYHTVLAHALAVAAFRTRSIEDGKIGIILNLTPSYPRSDHLGDQKAAAIADLFFNRSFLDAVVLGSFPKELVALLDEYGQLPTYEKEDVALINAQRIDLLGVNYYQPRRVKAKEHLPNPASPFMPEWFFDHYDMPGRKMNHYRGWEIYEKGIYDIMVNLKDNYGNIESFVSENGMGVQNEERFMENGQIQDKYRIEFIKGHLKWLHQAIQEGCNVRGYHLWTFMDNWSWTNAYKNRYGFISVDVQTQKRTPKKSAEWIKAVSQQNGF

SEQ ID NO: 1031 - protein, 736 aa, Neurospora crassa
MSNIISQAGQKAKEALTSAPSSKKVDDLKNEFKETDKSARLTTDYGVKQTTADDWLRIVSDDKIGPSLLEDPFARERIMRFDHERIPERVVHARGSGAFGKFKVYESASDLTMAPVLTDTSRETPVFVRFSTVLGSRGSADTVRDVRGFAVKFYTEEGNWDLVGNNIPVFFIQDAIKFPDVIHAGKPEPHNEVPQAQSAHNNFWDFQFNHTEATHMFTWAMSDRAIPRSLRMMQGFGVNTYTLINAQGKRHFVKFHWTPELGVHSLVWDEALKLAGQDPDFHRKDLWEAIENGAYPKWKFGIQAIAEEDEHKFDFDILDATKIWPEDLVPVRYIGEMELNRNPDEFFPQTEQIAFCTSHVVNGIGFSDDPLLQGRNFSYFDTQISRLGVNFQELPINRPVCPVMNFNRDGAMRHTISRGTVNYYPNRFDACPPASLKEGGYLEYAQKVAGIKARARSAKFKEHFSQAQLFYNSMSPIEKQHMINAFGFELDHCEDPVVYGRMVQRLADIDLGLAQTIAEMVGGEAPTTTNHPNHGRKTINLSQTEFPPATPTIKSRRVAIIIADGYDNVAYDAAYAAISANQAIPLVIGPRRSKVTAANGSTVQPHHHLEGFRSTMVDAIFIPGGAKAAETLSKNGRALHWIREAFGHLKAIGATGEAVDLVAKAIALPQVTVSSEAEVHESYGVVTLKKVKPESFTDAVKIAKGAAGFLGEFFYAIAQHRNWDRELDGLHSMIAY

SEQ ID NO: 1032 - protein, 278 aa, Bacillus halodurans C-125
MIQSIQDRVKLANGVEMPWFGLGVYKAAEGEEVIGAVRAALKAGYRSIDTASLYQNEVGVGQAIRESGIPRDEIFVTTKVWNTEQGYDETLAAFERSRKRLGLEVIDLYLIHWPVREKFLDTWRALETLYKERKVRAIGVSNFNIHHLETVMNISDINPMVNQVEFHPFLTQKPLLTFCKAHDIQLEAWRPLTKGEIFTHPVVQALAKKYGKTPAQIVLRWNLEHRVVTIPKSVREERIQENANIFDFHLSPEDVEALDGLNEDRRLGQDPDSFSFDF

SEQ ID NO: 1033 - protein, 280 aa, Leuconostoc mesenteroides subsp. mesenteroides ATCC 8293
MSLNELYELNDGHQLPKIGLGTFQIRGYQGVDQILNAIQIGYRLLDTSTNYDSEGAVGEAIRRSGIPRSQFYVTTKLPGKYHHFDDALKIIEESLLRLGLDYLDLYLIHWPLPKRDNYVEAWQALIEAQRRGLVRSIGVSNFEKEHLDKIISATGVTPAVNQNEIHPYWPQESLVATNQEYGIVTEAWSPLGRGSSELTEPLILKLAEKYDKNAGQIILRWHIQRGILPVAKSTTPQHQRRNLDIFDFTLTETEVSQISDLERKDGRVDDQDPKEYEEFV

SEQ ID NO: 1034 - protein, 131 aa, Glycine max
MSFINPSPSSTSRAIAPSGFATRRPWEEFFALHSFTRPYTLGEASLRVKRNLGHFRVNYAMAVLLVVFLSLLWHPISLIVFLAVFTAWFFLYFFRDGPVVVLRHELDDRLVLAALTAVTVAALVLTGVWLN

SEQ ID NO: 1035 - protein, 384 aa, Brachylophon curtisii
DLEPVNPADVPVTAAGALKSYKLAAKAISRLQSLPSGNISMLCDVLVKEVRDLTGYDRVMVYKFHEDEHGEVVSECRRPDLEAYLGLHYPATDIPQASRFLFMKNKVRMICDCLAPPVKVIQDERLPQPLSLCGSTLRSPHGCHAQYMANMGTIASLVMSVTINEDDDMMDGDQRQMARKLWGLVVCHHTSARFVPFPLRYACEFLIQVFGVQINKEVELAAQVREKHILRIQTLLCDMLLRDAPVAIITQSPNVMDLVKCDGAALYYKKKFWLLGITPTEAQIRDIAEWLLEYHNGNTGLSTDSLMEAGYPGASVLGDAVCGMAAVSITSRDFLFWFRSHTAKEIKWGGAKHDPDDKDDGRKMHPRSSFKAFLEVVKWRSLPW

SEQ ID NO: 1036 - protein, 186 aa, Cicer arietinum
MAASESKESPANNPGLHTTIDEATKGYFMQQTMFRIKDPKVSLDFYSRVLGMSLLKRLDFPEMKFSLYFMGYEDTTEAPSNPVDRTVWTFAQKATIELTHNWGTESDPEFKGYHNGNSDPRGFGHIGITVDDTYKACERFQNLGVEFVKKPDDGKMKGIAFIKDPDGYWIELFDRKTIGNVTEGNA

SEQ ID NO: 1037 - protein, 370 aa, Arabidopsis thaliana
MENGEAKQSVPLLTPYKMGRFNLSHRVVLAPLTRQRSYGNVPHAAIYYSQRTTPGGFLITEATGVSDTAQGYQDTPGIWTKEHVEAWKPIVDAVHAKGGIFFCQIWHVGRVSNSGFQPNGKAPISCSDKPLMPQIRSNGIDEALFTPPRRLGIEEIPGIVNDFRLAARNAMEAGFDGVEIHGANGYLIDQFMKDTVNDRTDEYGGSLQNRCKFPLEIVDAVAKEIGPDRVGIRLSPFADYMESGDTNPGALGLYMAESLNKYGILYCHVIEARMKTMGEVHACPHTLMPMRKAFKGTFISAGGFTREDGNEAVSKGRTDLVAYGRWFLANPDLPKRFQVDAPLNKYDRPTFYTSDPVVGYTDYPFLESTA

SEQ ID NO: 1038 - protein, 389 aa, Triticum aestivum
ALTEENLLFLEAWRAVDRAYYDKSFNGQSWFRYRERALRDDPMNTRQETYAAIKKMLATLDDPFTRLLEPEKFKSLRSGTQGALTGVGLSIGYPLALKGSPAGLSVMSAAPGGPAEKAGIVSGDVILAIDDTSAQDMDIYDAADRLQGPEGSSIDLTILSGADTRHVVLKRERYTLNPVRSRMCEIPGSEDSSKIGYIKLTTFNQNAAGSVKEAIKKLREKNVKAFVLDLRNNSGGLFPEGIEIAKIWMDKGVIVYICDSRGVRDIYEADGASTIAASEPLVVLVNKGTASASEILAGALKDNKRAVVYGEPTYGKGKIQSVFALSDGSGLAVTVARYETPAHTDIDKVGVTPDRPLPASFPTDEDGFCSCLRDPASCNLNAARLFVRS

SEQ ID NO: 1039 - protein, 486 aa, Shewanella sp. MR-4
MSQQYLTSQSGSPIADDQNSLSAGERGPLLLQDWHLIEKLAHFNRERIPERVVHAKGTGVYGTFTLTKDLSEYTIADHFNGVGKQTETFVRFSTVGGEMGSADAERDPRGFGLRFYTARGNHDIVGNNTPTFFLRDGIKFPDFIHTQKRNPLTNLKDPQAMWDFWSLNPEAMHQVTILMSDRGIPANYRQMHGYGSHTFSFWNAKGERFWVKFHFKSQQGVVNLTNEQADKLKGIDPDSSQRDMVVAVTDGNFPRWTVNVQIMPEADANTYHINPFDLTKVWPHGDYPLIEIGVLELNRLPQNYFAEVEQVALAPSNLVPGVGASPDKMLQARLFAYADAQRYRIGANYNQLPVNCPHATKANHHQRAGAMAGTQCPYHGSQTGGDAAANYGPNSTAGALVEPANFAEPPLRLDGEAARYSRYNQDDYTQAGNLYRIFSEAEKARLVETISGSLRQASVEVQQRMLAHFHKADADYGQRIQTALGL

SEQ ID NO: 1040 - protein, 226 aa, Oryza sativa
MGLNEKPLVPPLSPTPVDFRAHQVFPSKHHDFDTSKSRNISGSVAIGSDSEEEYLATSLLMLAHGIRDETKDIRGMGDVKGVGVDTLELVKPSQRAYECSVCGKVYWCYQALGGHMTCHRNLFAQVVAGDELSSDRTMVVKGHKCSICRLEFPSGQALGGHMRVHYVGGVEGGSVKEKNVVKTKVTGALKLVLKDFDLNVPVVATMVGDEAESSHSEAKARMMTLP

SEQ ID NO: 1041 - protein, 473 aa, Nicotiana plumbaginifolia
MCRNKMFSQPNWRHSKLFIDKQSFLVTQNGLAFLPRKFRTILRKTVKHSEIFRNIVPDIFVRSCIGLMLVMALNAAVAKAPSFALTEQNLLFLEAWRTIDRAYIDKTFNGQSWFRYREDALRKEPMNTRQETYAAIKKMIATLDDPFTRFLEPEKFKSLRSGTQNALTGVGLSIGYPTGKTESAPGLVVVSASPGGPADRAGISSGDIILEIDNSSTENMGIYDAAERLQGPEGSGVELTVRRGSETRNLPLIREKVLLNPVKSRICKLPTGGDDAPQIGYIKLSTFNQNASGAVREAIEALRKNNVNAFVLDLRDNSGGLFPEGVEIAKIWLNKGVIVYICDSRGVRDIYDTDGSNVVAASEPLAVLVNKGTASASEILAGALKDNTRAQLFGEPTYGKGKIQSVFQLSDGSGLAVTVARYETPAHNDIDKVGVIPDHPLPASFPKDDESFCNCLLNPASACHLNRVELFSK

SEQ ID NO: 1042 - protein, 457 aa, Staphylococcus epidermidis RP62A
MAIGVILNRVFRLNNNPLFDYIYSNKESINHCYFIIPTEEFEEEAKKKAQYYYGSIQKFMYELQRYDIEPFLMSYDKLIDFCKKQAIDKVVVAGDIMSYHHEEYDILHQRKRFKQANIQVISLRANHYFNPRKTHNKQGEPYKVFTSFYRKWRPYLMIRDEYDYHLEDISKVVVKSQHKIKEDYHSYGISERDVQNRWSEFLSQDIENYKENREYLPEVLTSQLSIYLAYGMIDIIQVFNDLLQNYDKNEQNYETFIRELIFREFYYVLMTNYPETAHVAFKEKYQQLKWSYNEENFKLWKDGNTGFPIIDAAMEELKTTGFMHNRMRMVVSQFLTKDLFIDWIWGESFFKQKLIDYDAASNVHGWQWSASTGTDAVPYFRMFNPIRQSERFDNNARYIKTYIPRLNQVDAKYLHDTHKFEQQIKGQGVEIGKDYPKQMIDHKESRQRVMSEFKALD

SEQ ID NO: 1043 - protein, 373 aa, Drechslerella dactyloides
MASPTPPNSTASPKPQAPPSQVQACRYKTGKTLGSGSYSVVRECVHIHTGRYYAAKIINQKLMAGREHMVRNEIAVLKKVSMGHQNILTLVDYFETMNNLYLVTDLALGGELFDRICRKGSYFESDAADLIRATLSAVAYLHDHGIVHRDLKPENLLFRTPEDNADLLIADFGLSRIMDEERFHVLTTTCGTPGYMAPEIFKKTGHGKPVDIWAIGVITYFLLCGYTPFDRDSNLEEMQAILKADYKFEPAQYWSDISENAKDFIRRCLTIDPKARPTAHAALEHPFICEDQPEREADLLPTVRKNFNARRTLHAAIDTIRAINKLREGGMMDGALSSAPENQKEKQPQNQPATGLWQGTAQAATAKGLWSKS

SEQ ID NO: 1044 - protein, 345 aa, Bacillus cereus G9241
MHSKLFSPYTIKDVTLKNRIVMSPMCMYSAENEDGQVTNFHLVHYGTRAAGQVGLVMIEATAVLPEGRISNKDLGIWDNSLIEGLHKTTTFIHDNGAKAAIQLAHAGRKAELETDALAPSAIPFNETMKMPIEMSKHQIKDTVLAFQQAAVRSKQAGFDVIEIHGAHGYLINEFLSPLSNKRTDEYGGSPENRYRFLREIIDSINEVWNGPLFVRISANDYHPDGLTVQDYVQYTKWMKEQGIDLIDCSSGAVVPARIDVYPGYQVQYAKHIKEHANIATGAVGLITTGAQAEQILNNNEADLIFIGRELLRNPYFPRIAANELGFELKEPYQYERAPGKISTNK

SEQ ID NO: 1045 - protein, 407 aa, Haloarcula marismortui ATCC 43049
MNRSHTVSVRLLTIIGTDSAYAEPAVNYVIRLPGGVTLFDSTTLNELPLDNRVGLAPMTRVSATDDGRATAEMAQYYQRFADGGFSFLITEGTYPDEAHSQGYLNQPGLATDTQAASWQQVTETVHEAGVPIFAQLMHAGAQSQGNPHVAGEQTIAPSAVQPDGQKAEAYGGSGDFPTPKAATVDELADIRDSFVTSAQNAIDAGFDGVEIHGANGYLLHEFLSADFNQRDDEYGGEPANRVRYPREVVAAVDEATPADFVVGIRVSQSTALDEDHRWPEGEDAAAVFFEELSAAGADYIHVTEPDATTPAFGDDGPTLAEAAAEYAADETVIIDNGGLGTPDAAREKIDAGADLVTLATSALANPDWPDKVEAGEELTAFDPAKFLAPSAALSEHEVQTGGASADD

SEQ ID NO: 1046 - protein, 338 aa, Listeria monocytogenes str. 1/2a F6854
MSKLFSEYKLKDVTLKNRIVMSPMCMYSVENKDGIATDFHFAHYVSRAAGGTGLVILEATAVQEVGRISEFDLGLWNDEQVPALKSLVDGLHYHGAKAGIQLAHAGRKAVLPGEIVAPSAIPFDEKSAKPVELTKEAIKEVVADFKRAAYRAKEAGFDVIEIHAAHGYLIHQFLSPITNRREDNYGGPAGNRYKILSDIIKAVKEVWDGPIIVRVSATDYAHGGLQLEDHIPFAKWMKADGVELIDVSTGGLVNVAPPVFPGYQVPFADEIRRGAGIATGALGLITRGEQAEEILCNERADLIIVGRELLRNPYFAKDAAKQLGETIEGPKQYSRAWK

SEQ ID NO: 1047 - protein, 277 aa, Bacillus anthracis str. A2012
MSLTSLKDYTTLHNGVKMPWFGLGVFKVEDGSQVIDSVKAAIKNGYRSIDTAAIYQNEEGVGQAIRESGVSREELFITSKVWNSDQGYETTLQAFETTLEKLGLEYLDLYLVHWPVKGKYTESWKALEKLYKDGRVRAIGVSNFHIHHLQDVFEIAEIKPMVNQVEYHPRLAQEELHAFCKEHNIQLEAWSPLMQGQLLDNPTLQDIAKKYNKSTAQIILRWDLQNEVVTIPKSIKEHRIIENANIFDFELSSDDMKAIQALNEDHRVGPDPDNFNF

SEQ ID NO: 1048 - protein, 404 aa, Glycine max
MDRRVYHHRPAPPAHASPPEYFVLQGNTTYKDDLYLRKRTGMRRWLCCTCQVEESYPSNENEHLKSPRNYGDGNQKGSKVSAPVKPETQKAPPPIEAPALSLDELKEKTDNFGSKALIGEGSYGRVYYATLNNGKAVAVKKLDVSSEPESNNEFLTQVSMVSRLKNGNFVELHGYCVEGNLRVLAYEFATMGSLHDILHGRKGVQGAQPGPTLDWIQRVRIAVDAARGLEYLHEKVQPPIIHRDIRSSNVLIFEDYKAKIADFNLSNQAPDMAARLHSTRVLGTFGYHAPEYAMTGQLTQKSDVYSFGVVLLELLTGRKPVDHTMPRGQQSLVTWATPRLSEDKVKQCVDPKLKGEYPPKGVAKLAAVAALCVQYEAEFRPNMSIVVKALQPLLKSPAPAAPES

SEQ ID NO: 1049 - protein, 374 aa, Pseudomonas fluorescens PfO-1
MNHSSFFTPVTLGRHILKNRIVLPPLTRQRSTQPGNVANELMAEYYQQRAGAGLLVTEGTQIEPRGQGYAWTPGIHTPEQIVGWRKVTEAVHASDGVIFAQLWHVGRVSHTALQPNGDAPVSASAIATDRVSVFIETAPGVGALVPPSAPRALTTDEVQELVQLYIQAARNAMDAGFDGIELHCANGYLVNQFISAHSNLRTDQYGGSLHNRLRFLREVVAGVAKCIGKEKVGVRFAPLFTTTDEARTYLGMVEEDPHTTYIEAIKVLQDVGIAYLSIAEADWDDAPVMPQTFRRAVRDTFGGAIIYAGRYNAESGARLLESGLADLVAFGRPFMANPDLPARIANDWPLNSLNPATVYGGDAEGYVDYPVYGE

SEQ ID NO: 1050 - protein, 532 aa, Hordeum brevisubulatum
MGQCCSRATSPDSVQGGANGYGYSHQPKQAQAPPSYNNAQPPPRAEVRYTPPAMNPPVVPPVVAPSKPMPDTILGKQYEDVRSVYSLGKELGRGQFGVTYLCTEISTGRQYACKSISKRKLVSKADKEDIRREIQIMQHLSGQPNIVEFCGAYEDKGSVHVVMELCAGGELFDRIIAKGHYSERAAATICRGVVNVVNVCHFMGVMHRDLKPENFLLATKDENAVLKATDFGLSVFIEEGKMYRDIVGSGLLCCSEVLRRNYGKEIDVWSAGVILYILLSGVPPFWAETEKGIFDAILQGEIDFESQPWPSISESAKDLVRKMLAQDPKKRISSAQVLRHPWLREGEASDKPIDSAVLSRMKQFRAMNKLKKMALKVIASNLNEEEIKGLKQMFMNMDTDNSGTFTYEELKAGLAKLGSKLSEAEVKQLMDAADVDGNGSIDYVEFITATMHRHKLERDEHLFKAFQYFDKDNSGFITRDELETALIEHEMGDADTIKDIISEVDTDNDGRINYEEFCAMMRGGIQQPIKLK

SEQ ID NO: 1051 - protein, 335 aa, Brassica juncea
MLSKACSLVASSLPRCSSSAAPTIREAAVVAAKRAQENGLGKPLLYGIGTLLVMPLRTLHGVGRMFGAGRFLCNMTSVSSSLQIELVPCLQDNYAYILHDVDTGTVGVVDPSEATPIINALEKRNQNLTYILNTHHHYDHTGGNLELKAKYGAKVIGSAKDRDRIPGIDITLSEGDTWMFAGHQVLVMETPGHTSGHVCYHFPGSGAIFTGDTLFSLSCGKLFEGTPQQMYSSLQKIIALPDETRVYCGHEYTLSNSKFALSIEPGNKDLQEYAANAADLRKRNTPTVPTTIGREKQCNPFLRTSSPEIKNTLSIPDHFDDARVLEVVRRAKDNF

SEQ ID NO: 1052 - protein, 195 aa, Arabidopsis thaliana
  misc_feature (74)..(74): Xaa can be any naturally occurring amino acid
  misc_feature (110)..(110): Xaa can be any naturally occurring amino acid
MSLIPSFFGNNRRINNNIFDPFSLDVWDPFKELQFPSNSSSAMLLGHQQAKEQHLAHGSHSAFGIHSRNCNSRXSLSGETAAITNARVDWKETADAHVFKADLDGMKKVXVKVEIEDDSVLKISGERHVEKEEKQDTWHRVERSSGQFSRKFKLPENVKMDQVKASMENGVLTVTVPKVEEAKKKAQVKSIDISG

SEQ ID NO: 1053 - protein, 1005 aa, Cryptococcus neoformans var. neoformans JEC21
MTSFNPAPAQIQAAQDHTYGSMPTPTYMGMVDTGAQWDYVGRRGSSRSREPSASPQRAATESGIPRTSTHAASASASSSYAPVAGASGQASSAPHEPTIREEATAVVDRSMRAHQQTTGPSNGNGNSQPKKSKVRMVGDWQLNKTLGAGSMGKVKLATNIVTKEKCAVKIIPRYTDANRKEETTRTPEEVEKQRLKDESKEIRTIREAHISLLLHHPYICGMREFISHQNHHYMVFEFIDGGQMLDYIISHGRLRERAARKFARQIGSALNYCHQNSIVHRDLKIENILISKNGNIKLIDFGLSNLYSPSRHLSTFCGSLYFAAPELLNARPYTGPEVDVWSFGIVIYVLVCGKVPFDDQSMPALHAKIKRGVVEYPSWLSAEVKSLLSRMLVTNPAERATLAEVLSHPFMTKGYDGPPDSFLIRRELLRAEEIDMNVVEAMEGFTFGDANTIYRNLHSILTSEDYLHCVATFEAHREKLRTSSPGVSTNDPSDSPKKKRFSGFDLKKRLFKEDKKVEEAPFKEKVRDPTKGYDPLISIYFLAREKIERERVFGPGFFASSQLSLDTFNTSQGYGMAVPNLPPPASTHVMGHDSSRGPDFASEPRPRSDDVPNPVMAHPSADREQSKLADIPSAVHRRQPSLSQPPLPSSMPAAVERSADEGLTKKFSMLGRGPRPPSAGPAGPSRSASTKRESMTASPSMPIQEHRRATTVVHSDKSKQERRVSVGSFTNSVSKASGLARRASQRDRPPATPPDSRWLNAPAEAEEYHQVETSVRPSSTPREPEPDTANEPQSYDDVKPSYLKGIFSVSTTSTKPANVLIRDIAMVLDRIGIKHRPIKGGFECVHMPSIDLASVVNGDEASTSLSNVPSHASGARRKQSLRRKGSKVNMNGISSNGAGSRATSPGPHRVLTGNSSGTVSGGDVAHLSVPSGKNRHHVGTVEEDEVDAWALAQSGGAGSSLIVRFEIFVVKVPVLPLHGIQFRRVGGDGWQYQMLAKAILREMRL

SEQ ID NO: 1054 - protein, 97 aa, Triticum aestivum
  misc_feature (80)..(80): Xaa can be any naturally occurring amino acid
KALHQYDCLRANKATSAWGLEVRVPFLDKEFIDVAMSMDPEWKLYDADLGRIEKWVLRKAFDDEKEPYLPRHILYRQKEXFNDGVGYNWIRRLKRFY

SEQ ID NO: 1055 - protein, 398 aa, Ralstonia solanacearum
MNLIDSFLSFLANGTLNWAWWQILIFTLVVTHMTIASVTIFLHRCQAHRALDLHPAAAHVFRFWLWLTTGMVTKEWAAIHRKHHAKCETEEDPHSPQTRGIRKVLLEGAELYRAEAKNRETIQKFGHGTPNDWIEQNLYSKYTWQGVGLMLILDVLMFGTLGLTVWAVQMLWIPIHAAGIINGLGHYWGYRNFDCEDASTNVFPWGLIIGGEELHNNHHTYATSAKFSIKWYEFDVGWGYIRALEMVGLAKVKKVAPKARFGDVKPVDQNTLEAIIANRYDVMARYAKTVKVAYRQELAKLKDARDVEYRALKPARKWFHRDEAKLGAPQREQLSQIVSDHSALHTFVEMRRDLGALWGRSNATREQLLHQLQEWCKRAEESGIHALQEFAVRLRRYA

SEQ ID NO: 1056 - protein, 641 aa, Rhodococcus erythropolis
MCGLLGLLTSGGTSEDAVSRVDQAMHCLRHRGPDEHGTWNDDHLVFGFNRLAIIDIAHSHQPLRWGPPENPERYALTFNGEIYNYLEIRAELVKDHDAKFFTEGDSEAIVAAFHYWGEDAVRRLRGMFAFAIWDTDTRELFIARDPFGIKPLFIATGAGGTAFGSEKKSLLELTDLIGIGTELDPRAIEHYTVLQYVPEPETLHKEIRRLESGSFARVRPGEEPTFTRYFTPKFPAKPFAPGTEKARYQEIAEALEDSVAKHMRADVTVGSFLSGGIDSTAIAALAMRHNPNLITFTTGFEREGYSEVDVAAESAAAIGAKHVVKVVSPAEFAAAIPEIVWYLDDPVADPALIPLWFIAKEARKHVKVVLSGEGADELFGGYTIYREPLSLKPFEYLPKGLRRAAGKLSERIPDGTRGKSLLNRGSLTLEERYYGNARSFNDAQLRAVLRDFRPEWTHQDVTAPIYAQSRDWDPVARMQHLDLFTWLRGDILVKADKMTMANSLELRVPFLDPEVFDVASRVPLDQKITKDTTKYALRQALEGIVPHHVLHRAKLGFPVPLRHWLRGTELFDWAHLQIEESGTDHIFDKQAVVKMLNDHREGVSDHSRRLWTVLTFMVWHGIFVEKRIVPQIQEPVYPVNI

SEQ ID NO: 1057 - protein, 236 aa, Gossypium hirsutum
MGRGRVELKRIENKINRQVTFAKRRNGLLKKAYELSVLCDAEVALIIFSNRGKLYEFCSSSSMIKILERYQKCNYGAPEPNVSSREAALELSSRQEYLKLKARYDALQRSQRNLLGEDLGPLSSKELESLEKQLDSSLKLIRSTRTQYMLDQLNDLQRKEHLLNEANRTLKQRLVEGYQVNSLQLNPNATEDVGYGRQQVHHQPHGDAFFHPLDCEPTLQIGYQHDPMSVVTAGPV

SEQ ID NO: 1058 - protein, 223 aa, Gossypium hirsutum
MGRGKIEIKRIENTTNRQVTFCKRRNGLLKKAYELSVLCDAEVALIVFSSRGRLYEYSNNNIRSTIDRYKKACSDTSNTNTVTEINAQYYQQESAKLRQQIQMLQNSNRHLMGDSLSSLTVKELKQVENRLERGITRIRSKKHEMLLAEIEFLQKREIELENESVCLRTKIAEIERLQQANMVTGPELNAIQALASRNFFSPNVIEHPSAYSHPSDKKILHLG

SEQ ID NO: 1059 - protein, 483 aa, Buchnera aphidicola str. APS (Acyrthosiphon pisum)
MQKNLIWFRNDLRVYDNTALHQACQNDTDKVISLFISTPKQWHNQSVSKKKISFMYYHLISLQKELLKLNIILYYHESTDFLNSIEYLIFFCKKHKVNNLFYNYEYAINERYRDYLVKKKLSQKGFLVKGFHDNLLFSNRQIRNQKNETYKVFTFFKKKVIQNLHNNIPQCFPVPSKRKSDRDIFLTSISLKNVNLNFNKNFFPVGEKEAINRLKNFCIYKFNDYFLKRDYPFLDATSMLSPYLSAGIISSRYCLKVLLKTKNSLPLNVLLTSPWFDQILWREFYYHLLIGFPKISRSESLVTWEKEIHWINNIKHFNAWKEGNTGFPIIDAGMRQLNELGWMHNRLRMITSSFLVKNLLINWREGEEHFISNLIDGDLALNNGGWQWSASVGCDSVPYIRIFNPLHQSKTFDESGNFIKKFIPELKNVPNHHIHQPHEWSKQKNFKIDYPNPIINYSESRKTSLSLFKQARLKLHKNGLKNS

SEQ ID NO: 1060 - protein, 472 aa, Escherichia coli O157:H7 EDL933
  misc_feature (309)..(309): Xaa can be any naturally occurring amino acid
MTTHLVWFRQDLRLHDNLALAAACRNSSARLLALYIATPRQWAAHNMSPRQAELINAQLNGLQIALAEKGIPLLFREVDDFAASVEIVKQVCAENSVTHLFYNYQYEVNERARDVQVERTLRNVVCEGFDDSVILPPGAVMTGNHEMYKVFTPFKNAWLKRLREGMPECVAAPKVRSSGSIKPAPSITLNYPRQSFDTAHFPVEEKAAIAQLRQFCQNGAGEYEQQRDFPAVEGTSRLSASLATGGLSPRQCLHRLLAEQPQALDGGAGSVWLNELIWREFYRHLMTYYPSLCKHCPFIAWTDRVQWQXNPAHLQAWQEGKTGYPIVDAAMRQLNSTGWMHNRLRMITASFLVKDLLIDWREGERYFMSQLIDGDLAANNGGWQWAASTGTDAAPYFRIFNPTTQGEKFDREGEFIRQWLPELRNVPGKSVHEPWKWAEKAGVKLDYPQPIVEHKEARVQTLAAYEAARKGK

SEQ ID NO: 1061 - protein, 365 aa, Ashbya gossypii ATCC 10895
MPRTITFDIPSHYKLVDLIGEGAYGIVCSAIHKPTGTKVAIKKIQPFTRPMFVTRTLRELKLLKFFHSHENIISVLDIVRPTSYQDFEAVYLVQELMETDLQRIISQPNSFLSDDHIQYFTYQILRALKSLHSAQVIHRDLKPSNLLLNSSCDLKLCDFGLSRCLASSDRSRENMVGFMTEYVATRWYRAPEIMLSFQEYTTAMDIWSCGCILAEMISGKPLFPGRDYHHQLWIILEILGTPSFEDFEQIKSKRAKAYIANLPMRPKIPWNVALSTNDINPLAMDLLDKMLTFNPDKRISAADALKHPYLETYHDAEDEPDYELLNLQDNFWKVDNEARQKTEEEELSMDTLKAMLYEEVMKPLQ

SEQ ID NO: 1062 - protein, 768 aa, Nostoc punctiforme PCC 73102
MEMNLQFPGINLISLKEAPIHISSQIQPHGVLLVLEEPELKILQVSTNTLKVFGIAPENMLHKKLEDLLDPFQIERIKTGLSGENLDFINPTKVWVRKKGDEYVVFDAIFHRNIEGFLILELEPAITQENIPFLSFYHLARASINQLEKTANLRDFCQVIVQEVRKITEFDRVMLYKFDDDGHGSVIAEEKLESLEPYLGLHYPESDIPKPARKLFAANSIRIIPDAYSQPVKLFPVNNPISDRPINLTNSILRSAASCHTEYLHNMGVGASLTISLIKDQKLWGLIACHHQSPKYVSYELRKACEFLGRVIFAEISAREETEDYYHRINLTHLQSILIEYMSQEENFIDGLVKNPQHLLDLASAQGAAVCFAGNCTVVGETPREEDLNFLVQWLKNNVEEEVFYTDSLPQIYPDAESFKNVASGLLAIPIAKRTYVLWFRPEVIQTVNWGGDPNKAFEVSQSEGNVRLCPRKSFELWKETVRLTSLPWKDVEVKAALELRKAIVNIVLRQADELAQLAQDLERSNAELKKFAYVASHDLQEPLNQVVNYVQLLEMRYSEELDEDAQEFISYAVQGVSLMQTLIDDVLAYSKVDMQAIAFQMNDVETALMRGLGNLRQRINETGATITHDPLPTVMADSTQLMQLFQNLIGNAIKFHSDQPPQIHVGAERIEDAWLFSVRDNGIGIDPKFSDRIFVIFQRLHTRDEYTGTGMGLAICKKIVECHRGRIWVESELGQGATFYFTIPVGGRELERRNGRKTQNHLFGRGQ

SEQ ID NO: 1063 - protein, 483 aa, Propionibacterium acnes KPA171202
MPIDPSKPSTNTNGSPAPSDEYSLTVGADGPVVLHDAHLIDTLAHFNRENIPERKPHAKGSGAFGHLEVTADVSEYTKASFLQKGRETPMLARFSTVAGELGSPDTWRDVRGFSLKFYTDEGNFDMVGNNTPVFFMRDPMKFPHFIRSQKRLPNSGLRSPNMMYDYWSLSPESAHQVAYLMGPRGIPLSYRTMNGYSSHTYSWVNAEGKITWVKYHFISDQGVHNMTADRAKAIVGDHPDIHREDLFNHIADGDYPSWTVKVQLMPYDEAKDYRFNPFDITKVWPHKDYPLHTIGKFTLDRNPENFFAQIEQAAFSPSNTVEGTGLSPDRMLLGRVFAYNDAARNRLGVNYEQLPVNRPTTPTNQYTFDGQMAFEHSGSAPTYAPNSYGRDFATGYRTGSEATWEADGELVRSAQTRHAEDDDFGQAHALVHDVFSDAERDELVDTLVDLMTNFDMEEPVIGNALSYWRNIDAGIAEATEGRI

SEQ ID NO: 1064 - protein, 304 aa, Brucella melitensis 16M
MCWHKFARYWDVEIREIPMEPGRLFMGPEQMLEAVDENTIGVVPTFGVTYTGNYEFPEPLQDALDKLQKTKGLDIDIHVDAASGGFLAPFCAPDIPWDFRLPRVKSISASGHKYGLAPLGCGWVVWRDKEALPEELIFNVDYLGGQVGTFAINFSRPAGQVISQYYEFMRLGREGYTKVQQAAYRVAQYIAREIEPLGPYEFICAGEEKGGIPAVCFRIREGEDPGYSLYDLSERLRLTGWQVPAFALSGKASDITVMRVMCRRGFEMDLAALFIRDFKAGIEFFKSHPSPKITPSMGTGFHHT

SEQ ID NO: 1065 - protein, 157 aa, Brassica rapa subsp. pekinensis
SNADKLLTEFIEKQLIDYAKNSKKVVGNSTSLLSPYLHFGEISVRRVFQCARMKQIIWARDKNGQGEESAVLFLRGIGLRDYSRYICFNFPFTHEQSLLSHLRFFPWDADVEKFKAWRQGRTGYPLVDAGMRELWATGWMHNRIRVIVSSFAVKFLL

SEQ ID NO: 1066 - protein, 167 aa, Brucella melitensis 16M
MKITLEVIMTGSNYPARDLIASVFGTEALQEIAASRGFREKEMQANAVYQIIHDELFLDGNARQNLATFCQTWDDDYVHKLMDLSINKNWIDKEEYPQSAAIDLRCVNMVADLWNAPKFADNATGTNTIGSSEACMLGGMAMKWRWRKKMQEMGKPTDKPNFVCGPV

SEQ ID NO: 1067 - protein, 378 aa, Burkholderia fungorum LB400
MQDGRTTLSKFLIDTLDRQPCSTETARNAGLSALLIDVAAAIKSISAMLTKGALGGNYGSAQSINTHGEEQKKLDVATNEIFVQQCEWDGLLAAMVSEEMESVYAIPPGYPRGDYLLAFDPLDGSSNIDINGVVGSIFSVLRNGEGNGNANEKNGSDPRGTVGESAFLRPGCEQVAAGYAVYGPSTMLVLSVGNGTHGFTLEREIGNFVLTHSNIRIPEDTVEFAINASNERFWEPPVRRYVQECKDGRSGCRASDFNMRWIASMVAEVHRILMRGGVFMYPRDSKTPAMEGRLRLLYEANPMSFLVEQAGGLSITGRERILDVVPRALHGRVPVILGSKHEVERIGRYHGEYDRGEDQPFTSPLFSRRSLFLPGFTA

SEQ ID NO: 1068 - protein, 263 aa, Azoarcus sp. EbN1
MNDQHSKIGSIEIIPLPAFRDNYLWLLRCGQLAAVVDPGDAAVVEDGLAAQGLDLCAILLTHHHADHVGGVTELIASRDIPVFGPAAADIQGVNNPVAEGDEVSLDRLGIRFRVLEVPGHTASHIAYLAPGLLFPGDTLFSAGCGRLLGGTAAQLHASLRRLADLPGDTAVYCTHEYTLANLAFARVADPGNPERDEWLVECEARRDAGRPTLPTTIARERRVNPFLRTGEPAVMGVIADRTGVRPRDSLECFAALRAWKDVF

SEQ ID NO: 1069 - protein, 339 aa, Glycine max
MDERYETLKELGSGNFGVARLAKDKETGELVAIKYIERGKKIDANVQREIVNHRSLRHPNIIRFKEVFLTPTHLAIVLEYAAGGELFERICNAGRLSEDEARFFFQQLISGVSYCHSMQICHRDLKLENTLLDGNPAPRLKICDFGFSKSALLHSQPKSTVGTPAYIAPEVLSRKEYDGKVADVWSCGVTLYVMLVGAYPFEDPEDPKNFRKSIGRIMSVQYAIPDYVRVSKECRHLISRIFVANPAKRINISEIKQHLWFRKNLPREIIEAERRGYEETQKDQPSQSVEEIMQIIQEARTKIHTGEQAGTGTSDVVRGDEANEEVDINDHFAKYLTLD

SEQ ID NO: 1070 - protein, 559 aa, Glycine max
  misc_feature (227)..(227): Xaa can be any naturally occurring amino acid
  misc_feature (528)..(528): Xaa can be any naturally occurring amino acid
IGAKNSSADTNAVIPCWCPVELLHTPITDERRIECGEIVTGDDDGHTGILFLVIHTRKLHIGGVISNVHEGGIHHLVVDSVLGGSTKTTSSCIKIVDEESTHLSLLDQVCGFTVSLPDQFCWLSCISTFQLSSTHHDGVDSHLGKDKLTLERFSLSLASPDTKNERNLDVGQGHEVLGNVNNMDGFYIAPAFMDKLVVHITKNFMTLPNIKACHYKHINSLHKLNSXTFAKLGDTFIFFSSIFYQVPLILGIWGGKGQGKSFQCELVFAKMGINPIMMSAGELESGNAGEPAKLIRQRYREAADMIKKGKMCALFINDLDAGAGRLGGTTQYTVNNQMVNATLMNIADNPTNVQLPGMYNKEENPRVPIIVTGNDFSTLYAPLIRDGRMEKFYWAPTREDRIGVCTGIFRTDGIPEQDIVKLVDTFPGQSIDFFGALRARVYDDEVRKWISGVGVDSVGKKLVNSKDGPPTFEQPKMTLEKLLLYGNMLVQEQENVKRVQLADKYLNEAALGNANEDAIQRGTFFQSXLEAKQTWQVNISVREGCCTNPSARSCDGTCV

SEQ ID NO: 1071 - protein, 638 aa, Lactobacillus acidophilus NCFM
MVTIVEVKQHIKKFAAGNELYLQEVLGCHYENDIYTFRVWAPNAQKVWLVGDFNDWDKSLEMSQTLDGVWEIKTSLPKEGQLYKFLVKQADGREVMKIDPMAFELEPRPGSAAVIVKLPNKKWLDGAWMGRNKRSNHFARPINIYEVHASSWKRHTDGSLYTLKDLQKELIPYVKEQGFNYIEFLPLTAHPLDASWGYQTIGYYALERTYGTPRELQDFVEACHKENIGVLADWVPGHFCINDDALAYYDGTPCYEFSEKWRAENKGWGALNFDLGKPEVQSFLLSSALFWLEFYHLDGLRVDAVSNMIYRDYDRSDGEWKTDKFGGNRNLEGIEFLQKLNRTIKGKHPECLMIAEESSAQVKITGRIEDGGLGFDFKWNMGWMNDILRFYEMDPLFRKFNFNLATFSFMYRMSENFILPLSHDEVVHGKRSLMNKMFGDRDKQFAQLRNLLTLQMTYPGKKLLFMGSEFGQYLEWRYNDGLDWAELKDELNAKMKHFDQDLNSFYLNEPALWQLEQREDSVQIIDADNKDESVLSFIRQGKTRHDFLIVILNFTPVDRKKITIGVPYAGKYCEVFNSARKEYGGSWNQEKQNLKTQNNSFKNFNYQVQLDIPGFSAVILKPVDVHIKRRINRKTKTK

SEQ ID NO: 1072 - protein, 156 aa, Triticum aestivum
  misc_feature (68)..(68): Xaa can be any naturally occurring amino acid
MSLIRRGDVFDPFSLDLWDPFDGFPFGSGSGSIFPRTTSSDTAAFAGARIDWKEMPEAHVFKADVPGXLKKEEVKVEVDDGNVLQISGERNKEQEQKTGTWHRVERSSGKFLRRFRLPDNVKSEEIKAAMENGVLTVTVPKAEAKKPDVKPVQITG

SEQ ID NO: 1073 - protein, 485 aa, Arabidopsis thaliana
MSGVVRSSPGSSQPPPPPPHHPPSSPVPVTSTPVIPPIRRHLAFASTKPPFHPSDDYHRFNPSSLSNNNDRSFVHGCGVVDREEDAVVVRSPSRKRKATMDMVVAPSNNGFTSSGFTNIPSSPCQTPRKGGRVNIKSKAKGNKSTPQTPISTNAGSPITLTPSGSCRYDSSLGLLTKKFVNLIKQAKDGMLDLNKAAETLEVQKRRIYDITNVLEGIDLIEKPFKNRILWKGVDACPGDEDADVSVLQLQAEIENLALEEQALGNQIRQTEERLRDLSENEKNQKWLFVTEEDIKSLPGFQNQTLIAVKAPHGTTLEVPDPDEAADHPQRRYRIILRSTMGPIDVYLVSEFEGKFEDTNGSGAAPPACLPIASSSGSTGHHDIEALTVDNPETAIVSHDHPHPQPGDTSDLNYLQEQVGGMLKITPSDVENDESDYWLLSNAEISMTDIWKTDSGIDWDYGIADVSTPPPGMGEIAPTAVDSTPR

SEQ ID NO: 1074 - protein, 536 aa, Xylella fastidiosa 9a5c
MKQNMRIKTGIKKALILMLSVVLVSLVAIAAIAAHRFYIRLPQSRLFYAWKKMDEVYYDRTFAGFDWPAVLATYKKQLPRFDSDGQKTSPIINDMLSLLEVSHLQHFPAFMVSEEKKKTAVLANYFPELRDISGMVMVMDMLPRISRVLSLETWSPLYTHGVRVGDRILLETLDTDISDKNKPVRLYCYHINTAGVKKEFEFDLPAPPLGTQQTAVPAGDHVLHITRFDQGEIQALKHVSEDRNSSITQLHYISLGAVTTALHLPKNKVIDVVKDSEADKAGVEIGSIIGNGTNIKAGPENIGGKKVIKTNSRYEVVLPDGRKVTFSINKIIPKLNDFEGIRSAQLIGQTLVIAFNEMSDENTQWALQQIKNTPATAIVLDLRSNTGGSGIAGEKLLAGFLPSGTRIATEIRGKKTNVINVPSGYTPTDKPMAVLISLLSSSGAELAARTLQFHHRARIYGAQSSGQLLASRFYKLTDGTYMQIADTNLLDPAGKPLEWYGVMPDVKKWKALSDVRAGRDPVLECALTDLSGGQCH

SEQ ID NO: 1075 - protein, 510 aa, Pseudomonas syringae pv. syringae B728a
MPLLNWSRHMVCLTAAGLITVPTVYAADTLTRDNGAVVGDNQNSQTAGAQGPVLLQDVQLLQKLQRFDRERIPERVVHARGTGVKGEFTASADISDLSKATVFKSGEKTPVFVRFSSVVHGNHSPETLRDPHGFATKFYTADGNWDLVGNNFPTFFIRDAIKFPDMVHAFKPDPRTNLDNDSRRFDFFSHVPEATRTLTLLYSNEGTPAGYRFMDGNGVHAYKLVNAKGEVHYVKFHWKSLQGLKNLDPKEVAQVQSKDYSHLTNDLVGAIKKGDFPKWDLYVQVLKPEELAKFDFDPLDATKIWPDVPEKKIGQMVLNKNVDNFFQETEQVAMAPANLVPGIEPSEDRLLQGRVFSYADTQMYRLGANGLSLPVNQPKVAVNNGNQDGALNTGHTTSGVNYEPSRLEPRPADDKARYSQLPLSGTTQQAKITREQNFKQAGDLYRSYSAKEKTDLVQSFGESLADTDTESKNIMLSYLYKADPDYGTRVAEVAKGDLSKVKSLAASLKD

SEQ ID NO: 1076 - protein, 442 aa, Magnaporthe grisea 70-15
MSAEKKTLSKPAAGVPYYTPAQEPPAGTPLQQQDAIPTLFKPLKIRGVELSNRFGVSPMCTYSADDGHLTDFHLVHLGQFALHGTALTIVEATSVTPNGRISPEDSGLWQDSQIAPLRRIVDYVHSQGQKIAIQLAHAGRKASTKAPWHDSFTPSGEYKPREGLQVVGPEYGGWPDDVWAPSAIPFSEDFPNPKEMTVEEIEGLVTSFVDAAKRAIEAGVDIIEIHGAHGYLITEFLSPLSNKRTDKYGGSFENRTRVLIDIIKAVRAVIPEEMPLFVRISATEWMEYAGEPSWDLEQSTQLAKLLPDLGVDLLDVSSGGNSVAQKIELTPYYQIDLAAKIREAVGDRLLIGAVGNINTADIARDVVDEQGAEKVAEAKQTHDTIEVVSESHGGKTKADLVLIARQFLREPEFVLRTAHNLGVNVQWPHQYHRAVWRKGARI

SEQ ID NO: 1077 - protein, 140 aa, Arabidopsis thaliana
  misc_feature (11)..(11): Xaa can be any naturally occurring amino acid
  misc_feature (18)..(18): Xaa can be any naturally occurring amino acid
  misc_feature (50)..(50): Xaa can be any naturally occurring amino acid
  misc_feature (66)..(66): Xaa can be any naturally occurring amino acid
  misc_feature (85)..(85): Xaa can be any naturally occurring amino acid
  misc_feature (122)..(122): Xaa can be any naturally occurring amino acid
  misc_feature (126)..(126): Xaa can be any naturally occurring amino acid
  misc_feature (131)..(131): Xaa can be any naturally occurring amino acid
PTHAFVLLDTXTITQFCXLPINDGDWEKLPFYRVLHTTYILYPMALAVAXYSMGGFPFILRVMVLXLVWVYHLTWIVNSTCYVWXNQVWYTGDLFNNNWGVAALAFWEGWPNNHHAFEFLSXHGLXWWQLXDMTWFVFKS

SEQ ID NO: 1078 - protein, 680 aa, Shigella flexneri 2a str. 301
MFFRLTALAGLLAIAGQTFAVEDITRADQIPVLKEETQHATVSERVTSRFTRSHYRQFDLDQAFSAKIFDRYLNLLDYSHNVLLASDVEQFAKKKTELGDELRSGKLDVFYDLYNLAQKRRFERYQYALSVLEKPMDFTGNDTYNLDRSKAPWPKNEAELNAQWDSKVKFDELSLKLTGKTDKEIRETLTRRYKFAIRRLAQTNSEDVFSLAMTAFAREIDPHTNYLSRRNTEQFNTEMSLSLEGIGAVLQMDDDYTVINSMVAGGPAAKSKAISVGAKIVGVGQTGKPMVDVIGWRLDDVVALIKGPKGSKVRLEILPAGKGTKTRTVTLTRERIRLEDRAVKMSVKTVGKEKVGVLDIPGFYVGLTDDVKVQLQKLEKQNVSSVIIDLRSNGGGALTEAVSLSGLFIPAGPIVQVRDNNGKVREDSDTDGQVFYKGPLVVLVDRFSASASEIFAAAMQDYGRALVVGEPTFGKGTVQQYRSLNRIYDQMLRPEWPALGSVQYTIQKFYRVNGGSTQRKGVTPDIIMPTGNEETETGEKFEDNALPWDSIDAATYVKSGDLTAFEPELLKEHNARIAKDPEFQNIMKDIARFNAMKDKRNIVSLNYAVREKENNEDDATRLARLNERFKREGKPELKKLDDLSKDYQEPDPYLDETVNIALDLAKLEKARPAEQPAPVK

SEQ ID NO: 1079 - protein, 434 aa, Aspergillus niger
MLPKDLQWGFAKAAYQIEGAVDQDGRGPSIWDTFCAQPGKIADGSSGVTACDSYNRTAEDIALLKSLGAKSYRFSISSRIPEGGRGDAVNQAGIDHYVKFVDDLLDAGITPFITLFHWDLLHQRYGGLLNRTEFPLDFENYARVMFRALPKVRNWNEPLCSAIPGYGSGSFAPGRQSTSEPWTVGHNILVAHGRAVKAYRDDFKPASGDGQIGIVLNGDFTYPWDAADPADKERLEFFTAWFADPIYLGDYPASMRKQLGDRLPTFTPEERALVHGSNDFYGMNHYTSNYIRHRSSPASADDTVGNVDVLFTNKQGNCIGPETQSPWLRPCAAGFRDFLVWTSKRYGSPPIYVTENGTSIKGESDLPNEKILEDDFRVKYYNEYIRAMVTAVELDGVNVRFGVTYVDYENGQKRFPKKSAKSLKPLFDELIAAA

SEQ ID NO: 1080 - protein, 645 aa, Bacillus cereus ATCC 10987
MNVINCEEVKRDEFHTEKYYESYNIFGAHIVTEDEMRGVRFTVWAPHAKAMSVVGDFNEWDYEQHKMLQVTEEGIWSLFIPHIEEKEIYKYAIETMAGDVIFKADPYAVYAEVRPNTASVVFDIKGYEWNDKNWSRKKKKKSVYKEAMTVYELHFGSWKKKEDGTLYSYREMAEELIPYVVEHQFTHIEIMPLVEHPYDRSWGYQGTGYYAATSRFGTPHDLMHFVDECHKYGIGVILDWVPGHFCKDAHGLYLFDGTPTYEYKDKDVQENPVWGTVNFDLGKREVRNFLISNALFWMRYFHIDGFRVDAVANMLYWNKEGQEQSNEHAVSFLRELNEAVFAEDEDFLMTAEDSTAWPLVTAPTYEGGLGFNYKWNMGWMNDVLKYMECAPEYRKYIHEKMTFSLLYAYSENFILPLSHDEVVHGKKSLLNKMPGDYWDKFAQLRLLYGYFFTHPGKKLLFMGGEFGQFDEWKDLEDLDWNLHDFEMHRYMHDYFKELIALYKRSKPLWQLDHSPEGFQWIDANNNEQSIFSFIRQGDKQEDALVVVCNFTKATYENYKVGVPDFEYYNEVLNSDAEQYGGSGQVNKKRLKAIQEPFHNQAAHVEITIPPFGVSILRPVKTRKGSKKQDGSKTKVRSNVTSRGKR

SEQ ID NO: 1081 - protein, 414 aa, Arabidopsis thaliana
SESRSPRVRVDSVFHTLASGDVLLIIRGKGMVDSVFQAPMGTGTHHAVLSSYEYVSQGLRQYNLDNMMDGFYIAPAFMDKLVVHITKNFLTLPNIKVPLILGIWGGKGQGKSFQCELVMAKMGINPIMMSAGELESGNAGEPAKLIRQRYREAADLIKKGKMCCLFINDLDAGAGRMGGTTQYTVHNQMVNATLMNIADNPTNVQLPGMYNKEENARVPIICTGNDFSTLYAPLIRDGRMEKFYWAPTREDRIGVCKGIFRTDKIKDEDIVTLVDQFPGQSIDFFGALRARVYDDEVRKFVESLGVEKIGKRLVNSREGPPVFEQPEMTYEKLMEYGNMLVMEQENVKRVQLAETYLSQAALGDANADAIGRGTFYGKGAQQVNLPVPERCTDPVAENFDPTARSDDGTCVYNF

SEQ ID NO: 1082 - protein, 354 aa, Pseudomonas fluorescens PfO-1
MQMGALQLTNRIVMAPVTRSRMAEDGVPNELHATYYAQRASAGLIIAEATNISAQGRGYAMTPGIWSDAQGAGWKKVTDAVHAAGGRIVSQLWHVGRFSSVELQPDRAAPVAPSAIKAEGSTYTENGFVEVSMPRALETSEIPGIIEQYKRAAENARRAGFDGVEVHSANSYLLDQFLRDSTNQRTDRYGGTIENRARLTLEVTEAVISIWGSDRVGIRLSPVTPDAGNTPPDSNVMATYGYLIQQLNRLNLAYLHFVEGATATSRTVPDGVDLDALSAQFEGPFIGNNNYDLEMALERRAQGRIDAVAFGRLFISNPDLVERLRRGTELTIAPRESYYGGGAKGYTDWPTADH

SEQ ID NO: 1083 - protein, 484 aa, Glycine max
MGLMAANQTQLLSKMAIGDGHGEASPYFDGWKAYDENPFHPKENPNGVIQMGLAENQLTSDLVEDWILNNPEASICTPEGINDFRAIANFQDYHGLPEFRNAVAKFMGRTRGNRVTFDPDRIALGGGATGAHEVTTFCLADPGDAFLVPIPYYPGFDRDLRWRTGIKLVPVMCDSSNNFKLTKQALEDAYEKAKEDNIRVKGMLITNPSNPLGTVMDRNTLRTVVSFINEKRIHLVSDEIYSATVFSRPSFISIAEILEEDTDIECDRNLVHIVYSLSKDMGFPGFRVGIIYSYNDAVVNCARKMSSFGLVSTQTQHLLASMLNDDEFVERFLEESAKRLAQRHRVFTSGLAKVGIKCLQSNAGLFVWMDLRQLLKKPTLDSEMELWRVIIHEVKINVSPGSSFHCTEPGWFRVCYANMDDMAVQIALQRIRTFVLQNKEVMVPNKKHCWHSNLRLSLKTRRFDDIMMSPHSPIPQSPLVKATI

SEQ ID NO: 1084 - protein, 249 aa, Chrysanthemum x morifolium
MGRGRVELKRIENKINRQVTFAKRRNGLLKKAYELSVLCDAEVALIIFSNRGKLYEFCSSSSMLKTLERYQKCNYGAPETNVSAREALELSSQQEYLKLKARYEALQRSQRNLLGEDLGPLNCKELESLERQLDTSLKQIRSARTQFMLDTLTDLQKKEHALNDANRTLKQRLMEGHQVTSLHWNPHVQQEMGYDQQHEPQHQNGEAFFHPLDCGPTLQMGYPSDSLTAEAAASVAGPSCSNYMPGWYQ

SEQ ID NO: 1085 - protein, 1028 aa, Methanosarcina acetivorans C2A
MNVSRKILVIIYIIFALLTSVVIFASQNILDSSFSGLEEKEAIENVESVHNVIDFQIIQLDETSSALVSREDVRAFMVSENPKDLGGTLLTDLFTLSGCDFVFFVNSSGTMIYSQVSDSKNASDASSDLIITEIDQKINEGDLLCRERLSPLSGILLLENGPVIVSCRPVSAALDNSKMIGTIVLGKKLDSDFVDSIQKITGNPVLLYGPDNAPPEFEHVFSENGSENFTQLVDVEGDRLAGYFIHRDINGNPTIMVRTTADRNIYEEGRKSLRYIVLFLLFSGLMVGAGCKFLLDREVVSRLVAIDSFVDRVGKDEDFSAHCIMEGDDELSRLTEGINRMLDRLRLNSDKVKAQEHEKKVILNSLSELVIFMDLELKIVWANRASLDYAGLKLENIVGHSYEKLSPISDAVSGRALAQKALESGNEETGEVVTPDGKIWTIRMNLIKDEDGKVTGFLQTGLDITAHRRSEEKLLQAKLEAEAASCTKSEFLANMSHELRTPLNSIIGFSDILIERVFGELNEKQLKYVNNISGSGKHLLGLINDILDLSKVEAGKMDLHYSEFTVDSVFEEVKSTLFPLAQAKSLEINFVVGPDFGDIQADRSRLIQILYNLVSNAIKFTPEGGRVSVYCKKSGSRALFSVTDTGIGISSEDQKKLFQPFTQIDSSSARQYCGTGLGLALVKKIVNLHKGDIWVESELEKGSTFMFTIPLTKPPESPKADTKGIEDVMLEFEMSKAAAFSAKECEEALKEELELPEILLPENREAQSLVLVVDDDINSNELISVVLREAGYSTASLHNGKDVLEVAKKLKPDVITLDVLLPDTSGWNVLKQLKSDLDTTSIPVLIISVTDNNELGVALGATYSFTKPVRRVELLDSLREITGKFSFDEPKVLIIDDDENAVELLSSMIESEGFEIVKAYSGQAGLDKLFSEQQPDILILDLLMPEISGFEIISRLRDGEQTKDIPLIVCTAGEFTEKNIEKLNGELKGHLISIMKKGTFGRKELINRIKQLAMLKRREDERNSYCRR

SEQ ID NO: 1086 - protein, 246 aa, Chrysanthemum x morifolium
MGKGRLELKRIENKINRQVTFAKRRNGLLKKAYELSVLCDAEVALIIFSTRGKLYEFSSTSSMLKTLERYEKSSFGPPEQRRPAKEDLQEQSSYQEYMRLKERYDALKQLERNYYGEEIDNLSTNELESLERQLHCSLKQIRTIRTQSLVDRLYEQQKMEHHLYESNKTLRLKFEEESQAEALQWEAHARANGMVYGHPQHQLSQTTHDAFYHPTGCETTLQIGYQTDMSAVTSTSMNHQMQGWPA

SEQ ID NO: 1087 - protein, 465 aa, Oceanobacillus iheyensis HTE831
MTEQNYQFPAGFWWGSATSATQIEGAANQYGKGQNIWDHWYNIQPERFYNQVGPEHTSDFYHRYKEDIALMKEFGHNSFRLSISWSRLIPDGVGEVNEEAVSFYHNVIDELIANDIEPFVNLFHFDMPLPLQEIGGWENREVIEMYRQYAKKAFELFGDKVKKWFTFNEPIVPVEGGYLYNFHYPNVVDAKRAIQVAYHTIIAHATAVQTFKELNIENGKIGIILNLTPSYPRSENTADQKAAHIADLFFNRSFLDPAVLGEYPEDLINLLKEHNHLPQTEDGDAGLIKENTIDILGVNYYQPRRVKAKDNLPNPYSPFMPDWFFDSYEMPGRRMNEYRGWEIYEKGVYDIMINLKENYHNIESFISENGMGVQGEEHFIENGQIQDDYRITFIKDHLKWLHRAIDEGCNAKGYHLWTTMDNWSWSNAYKNRYGFFSVNIDTMERTPKKSAYWFKQISEQNGFHA

SEQ ID NO: 1088 - protein, 265 aa, Chrysanthemum x morifolium
MANSDAFELDFSCIDRSMSFPDESADMSPQRKLGKGKIEIKRIENTTNRQVTFCKRRNGLLKKAYELSVLCDAEVALIVFSSRGRLYEYANNSVRGTIDRYKKACLDPPSSGSVSEANAQYYQEESGKLRSQIANLQNQNRQFYRNIMGESLTDMPMKDLKNLETKLEKAITRIRSKKNELLFAEIEYMQKRELELHNNNQFLRAKIAENERSAQQQHMSLMPGSSDYELVTPHQPFDGRNYLQSNEMQPSNDYSCQDQTPLQLV

SEQ ID NO: 1089 - protein, 806 aa, Oryza sativa
MALLVCFQDSKDMTVMPSLRHRAVAKKPKWIIILVSLDWLPSVTRRERTDEEIISSVVLRDILAMPMPVSKNPKIALMFLTPGTLPFEKLWEKFLQGQEGRYSIYVHASREKPVHTSSLFVGRDIHSDAVVWGKISMVDAEKRLLANALADVDNQFFVLLSDSFRDPGPHGNGRYSPEMLPEIEEKDFRKGAQMVDPGGIANWSVTHVDWSEGKWHPRSYRAADVTYDLLKNITAVDENFHVTSDDKITWTAHTTTQQGLPYRRRKDWLPNSLNKSMREGYWLGTGPRASHVAPLTSLHVAPLPTLPSTFPSLPPRLANQPPISKMLHFLSSSSPLNPQFLLLPRQSARLRVLLSIPVSAMSSSSSSSSRGALAAAAVPSLSADEAGAAADEAFLRYTSPSMRRSGGGGVAIVWFRNDLRVLDNEAVVRAWAASDAVLPVYCVDPRISAGSTHYFGFPKTGALRAQFLIECLEDLKRNLTKQGLDLLIRHGKPEDILPSIAKAVTAHTVYAHKETCSEELLVEHLVRKGLEQVVIPQGGASNQKKPRNPKLQLIWGATLYHVDDLPFSVNNLPDAVESKSSVRNCSKLPPSLGPPPGSGLDEIGEKGMHFVGGESAALGRVHEYFWKKDQLKVYKETRNGMLGPDYSTKFSPWLASGSLSPRYICEEVKRYEKQRIANDSTYWYPLIDANMKELLATGFMSNRGRQIVCSFLVRDMGIDWRMGAEWFETCLLDYDPASNYGVGNDPREDRYFSIPKQAKTYDPDGEYVAYWLPELRSIAKERRNFPGASYIKQNFSFRGVEDGVAK

SEQ ID NO: 1090 - protein, 550 aa, Dechloromonas aromatica RCB
MAAKEVKFGDSARARMVEGINILADAVKVTLGPKGRNVVLERSFGGPTVTKDGVSVAKEIELKDKFANMGAQMVKEVASKTSDIAGDGTTTATVLAQSIVREGMKFVAAGMNPMDLKRGIDKAVVATIAELQAFSKPCTTTKEIAQVGSISANSDSDIGEIIANAMEKVGKEGVITVEDGKSLANELDVVEGMQFDRGYLSPYFINNGDKQQALLENPFVLLFDKKISNIRDLLPILEQVAKAGRPLLIIAEDVDGEALATLVVNNIRGILKTVAVKAPGFGDRRKAMLEDIAILTGGTVIAEETGLTLEKAVLKDLGQAKRIEVAKENTTIIDGAGEAAAIEARVKQIRIQIEEATSDYDKEKLQERVAKLAGGVAVIKVGAATEVEMKEKKARVEDALHATRAAVEEGIVAGGGVALIRARAAVGKLKGDNHDQDAGIKIVLRAMEQPLREIVANAGDEPSVVVDKVQRGKGNYGYNASTGEYGDMVEMGVLDPTKVTRTALQNAASVAGLMLTTECMVAELAEDKPAGGMPDMGGMGGMGGMGGMGM

SEQ ID NO: 1091 - protein, 451 aa, Oryza sativa
MVEQKGNILMKRYEIGKLLGQGSFAKVYHGRNIKNSQSVAIKVIDKEKILKCELMDQIRREISVMNLVRHPCIVQLYEVMATKTKIYFILEYVKGGELFNKVRRGRLKEEVARKYFQQLISAIDFCHSRGVYHRDLKPENLLLDENRNLKISDFGLSALAECKRQDGLLHTTCGTPAYVAPEVINRKGYDGAKADVWACGVILYVLLAGYLPFQDKNVINMYKKICKAEFKWPSWFSSDIRKLLRRILDPNPATRISVSEIMEDPWFRVGLNSDLLNKTIPTDKVDKVVHVDMDSTFGNLSNNINEGKQEAENLTSLNAFDIISLSSGFDLSAMFEDENSKEESKFTSTNTATTITKKLEDVAKNLRLKFLKKNGGLLKMEGSKPGRKGVMSINAEIFQITPDFHLVEFTKINGDTLEYQKVKQEMRPALKDIVWAWQGEQPQPQSLNEQS

SEQ ID NO: 1092 - protein, 1417 aa, Pseudomonas aeruginosa UCBPP-PA14
MNVQQSKFRLSRWAGATLALGLLLSGLGAWGLALVNEQQARMALEREAELLAEAVIRRVELYQYGLRGVRGALLTAGEAHIDRELFRRYSLTRDIDREFPGARGFGFIRRVAAADEAGFLRQARADGQPEFRIQQLTPHDGERYVIQYIEPVARNGQALGLDIASEANRREAARAALETGQVRLTGPITLVQASGLRQQSFLILMPIYRSGITPPPGPQRELEGFGWSYAPLLTGEVLAGLPIDNAAIHLELSDVTGDGAAVPFFVNGAAAPAQRLFGHMLRREIYGRHWQMAFSALPLFVQRLHQPSPRILFLAGSLVSLLLAALVNASALGRQRRHREAATQARLAAIVGNSADGIIGVGLDGVISDWNRGAEALFGYREEQAVGRRVVDLLVPPSKENEELDILARIARKEQVVSFDTVRRHQDGHLLDVAVTVSPILGPDGGVVGASKTVRDISAKKAAEARIRELNTGLEHQIAERTAELRRLNVLLGSVLQAASEVSIITLDRDGIISGFNLGAERMLGYRADEVVGKASPTLLHSERELLARGQELGEEGFRVLVARAEQEGAETREWTYLRKDGSPLSVTLSVTVLRDEAGAINGYLGIAVDVTEWRNAEREMAAARDQLQMAADVARLGIWRWNLADDSLQWNERMCELYGQPLALRDGGLVYEHWRSRLHPEDLERTEASLRAAVEGRGNYDVIFRVVLPDGGIRFIQAGAQVERDADGNPLQVTGINIDITSDQQLQARLREAKEQADAASAAKSSFLANMSHEIRTPMNAVLGMLQLARQTDLNERQRDYLDKASSAATSLLGLLNDILDYSKIEAGKLVLEMLPFELEPLMQDLAVVLSGNQGDKDVEVIFDIDPELPSAVVGDRLRLQQILINLAGNALKFTARGHVLVSLRRLAHDAHLVRLRVLVADTGIGISAEQQQRIFEGFTQAEASTSRRFGGTGLGLFICKRLVDLMGGELRVESAPGSGSRFWFDLDLDVAHDQPLRAACPGAGEPLRLLVADDNLVAGELLERTVGALGWRADCVGSGSEAVARVQAAMAEGRRYDVVLMDWRMPDLDGLSAAQLIRQLQGDLPPPMVIMITAYGREVLADARDHSAPPFVDFLTKPVTPKQLADSVLHALHGEQGAPANPPPRPVERTQRLRGVRLLVVEDNALNRQVAAELLSSEGARVALADGGLAGVQQVLEASVPFDAVLMDMQMPDIDGLEATRRIRADGRFAGLPILAMTANASLADREACLAAGMNDHVAKPIDKERLVLCLLGHLGRSGDRGAPATTADAGELVEARGDIVGRFGGSLELIVQVLRRFVPDMQDLFAQLERQLGEGDVQGSAATLHTIKGSASTVGASALAGRASELEQALRRADPRRGMEILAGIRLDELRTLCDACLLRLQAMFGDVQAESAS

SEQ ID NO: 1093 - protein, 547 aa, Bordetella parapertussis 12822
MAAKQVLFADEARVRIVRGVNVLANAVKTTLGPKGRNVVLERSFGAPTVTKDGVSVAKEIELKDKFENIGAQLVKDVASKTSDNAGDGTTTATVLAQAVVQEGLKYVAAGFNPIDLKRGIDKAVAAAVEELKKLSKPVTTSKEIAQVGSISANSDASIGQIIADAMDKVGKEGVITVEDGKSLENELDVVEGMQFDRGYLSPYFINSPEKQVAALDDPYVLIYDKKVSNIRDLLPVLEQVAKSSRPLLIIAEDVEGEALATLVVNNIRGILKTTAVKAPGFGDRRKAMLEDIAILTGGTVISEETGMSLEKATLQDLGQAKRIEVAKENTTIIDGAGDGKSIEARVKQIRAQIEEATSDYDREKLQERVAKLAGGVAVIRVGAATEVEMKEKKARVEDALHATRAAVEEGVVPGGGVALLRAKQAITGLKGDTADQNAGIKLILRAVEEPLRTIVTNAGDEASVVVNTVLNGKGNYGYNAATGEYGDLVEQGVLDPTKVTRTALQNAASVASLLLTAEAAVVELMEDKPAAAPAMPGGMGGMGGMDF

SEQ ID NO: 1094 - protein, 593 aa, Candida glabrata CBS138
MLHKHTDKQRLPVNIVDHHHIDPCLQDFKLLSKELQDIASNSEKLKALGSKENKESHLLSMKYVIPKEGVPADQAYDMIHNELTLDGNTHLNLASFVNTSTTHEVRKLISENLTKNLADNDEYPQLIELTQRCISMLSGLWNANPEEEPIGCATTGSSEAIMLGGLAMKKMWEKKMKAAGRTDTSKPNIIMSSACQVALEKFARYFDVECRLVPVSRKSHHMLDPNLLWDFVDENTIGCFVIMGTTYTGHLENVAEVGDVLTAIEKQHPEWANKDIPIHVDGASGGFIVPFAFSREQLKAYGVPNWGFDHPRVVSINTSGHKFGLTTPGLGWVLWRDESHLAPELRFRLKYLGGVEETFGLNFSRPGFQVVHQYYNFMNLGYDGYRDTFKRSLFVARVFAHQILRSPIFNDYFEVVSSIHESIDGDKVPDAANDYWENPEKYKPGVPLIAFKFSDKFQKEYPEVPQALLSHMLRTRGWIIPNYPLPHSTDGSDKCEVLRVVFRNEMSLDLAQLLLSDIQAVLRKLQGSYSGLKTISHESDSDKRRDYVYKMLLALASPDADIGEDEDEETKEKKASKKEEIKQRLKRNYRGTC

SEQ ID NO: 1095 - protein, 727 aa, Acinetobacter sp. ADP1
MKLQVIACAVAVATGGFFFSHAINEALAATDTVSVTQSIQPTKEQALVSRQLATLVDRQHYLNMRLDATTSNRILDMYLDSLDPDHSILLASEVAEYKKKYGPTFGAALKAGDLSGPFAIHAQYRARLKAFYEYVLGELKKPQNLKQSNVYVDTDREKAPYFKTVAEQQDYWRKMLVSQLINLTISKEEDLAKQKALKDNPALANGQDLASAEDLTPVQTLTKRYTRQLERINRVKSDDVLDKTLNAMMATYDPHSNYYPPIDAMELNRQTTLQLEGIGVSIRPERGNEDYTKIETIVEGGPASKSGQIKSGDRIIGVAQDGDKMVDVIGWPSSEIVGLIRGKRGTKVTIKLLGPGAQMSQARTVTLVRDVIQEDDAGVRSRTVEITRDGKKHVFGVIEIPSFYLNYRARRAGTEYRSVSEDTNNALKALSAKNVEGIIIDLRNNPGGSLEEVARMLGQVIKSGPVVQIRDGNGNVSVFEDNDGGAQTYAGPLAVLINLASASASEIYSAAIQDYERGVVIGSTTTGKGTAQVQLDSLAYGQATLTQRKFYRVTGGSTQNKGVIPDVKLVDIYDEEFGERKAKNALKWDTIPTAPFKREGSIQPYVTKLSQLSLQRVDKDPQFTYLETRKSIAQETKDQKRVVLDIDQRKAEILSLEKQTLDAENKRRLATGLKPYANWESYQASLDALSESRAKMKATQRPALPEEEAFVTEAGNVLLDYSKLQGH

SEQ ID NO: 1096 - protein, 509 aa, Zea mays
MDGSSKGSGHSEALRNYNLGRTLGIGTFGKVKIAEHKLTGHRVAIKIINCRQMRNMEMEEKAKREFKILKLFIHPHIIRLYEVIYTPTDIYVVMEYCKYGELFDYIVEKGRLQEDEARRIFQQIISGVEYCHRNMVVHRDLKPENLLLDSKYNVKLADFGLSNVMHDGHFLKTSCGSPNYAAPEVISGKLYAGPEVDVWSCGVILYALLCGTLPFDDENIPNLFKKIKGGIYTLPSHLSALARDLIPRMLVVEPMKRITIREIREHQWFQIRLPRYLAVPPPDTTQQAKMIDEDTLRDVVNMGFNKNHVCESLCSRLQNEATVAYYLLLDNRFRATSGYLGADYQESMDRNLNQLASSESSSSGTRNYVPGSSDPHSSGLRPYYPVERKWALGLQSRAHPREIMVEVLKALQELNVRWKKNGHYNVKCRWCPGFPEVNDTLDASNSFLGDSTIMDNDDANGRLPTVIKFEFQLYKTKDDKYLLDMQRVTGPQLLFLDFCAAFLTKLRVL

SEQ ID NO: 1097 - protein, 354 aa, Triticum aestivum
  misc_feature (267)..(267): Xaa can be any naturally occurring amino acid
LATTAPPRTPRSHLLFSSIRFLSLSLSLSVLCAEYFSCFLVLQIAAHERLGGCACACKAAVRCHPALSSEGKASIRGVVGELLAAAGKDKGLVSLGVGDASAHACFRRGGEFAADAVACAARSGDFDCYAPSYGFPAARRAVADHLSLSAGTHHRIRESDVFMTVGGTGAITAITMVLGGSPGANILLPRPGFAPYEVACELVGAEPRFYDLLPRQGWEADLAGVRAMADGATAAIVVINPNNPCGVVYSTQHLLQIAETAKELGIXVIADEVYAHMVFGASKFVPMASYAHIAPVITIGAISKRFMLPGWVSVGLASCDPWDISALLPLRMLLNVTSRTSLHHFRQQVPDSFG

SEQ ID NO: 1098 - protein, 1362 aa, Ustilago maydis 521
MNPSYTERRASAHPTMSSSAHHASSTPSAASIDPTTSHAISSGIPITSPAALSYFAAHPRRQQVHFGNYLLLQTLGEGEFGKVKLGVHKEWGEEVAVKLIKRDKVANDAAPLHLDDSAQKDPAKMSKVEREIQVLKDVRHPNIVRLYEVIESDRYIGIVLEYASGGELFDHILAHKYLKEEHACRLFAQLISGVSYLHHKKIVHRDLKLENLLLDRNRNVIITDFGFANNFEHKRNDLMATSCGSPCYAAPELVVQDGLYAGSAVDVWSCGVILYAMLAGYLPFDDDPANPDGDNINLLYKYILATPLSFPEYITAQPRDLLSKMLVPDPTRRATLEQVMQHSWLRHYRELFKFSVDDLERAAMEQQTKKRQMYRQQMMYQQQLQEQQRRQQMERSQSVRHNVSHLPVGTAYTANTAVSAVSAANVAHRQTLPISATVPDRLYEPIGSASRGADHSVTPQRAPTASSHQPPVAPTASADAAIAPLPRASTHNNVAAAADAAAAVAAAPSPVDPVTALGNARGEPRTRLDDAVPTIAAAYETEPRQLAAQKVQRHTIQLEYGGDERPRKESAPGSRQASQTQRNASASSTSSKLAEIERTKTAADKPAANANAIVPPSVLQSTSVQVPATSVVVPESEKANISKAGAPDMMRSVSASAASRVSVPPPIMEQTQPSVSAHRSTQPTSSSRVRAPSSASRNNADSGSTGHATRIPTSASQRVVSTSSAASEPVGFPSSATERTIPSADADAAAGRISASRRASNGAEITEPSHRSPSATRHATADNAPVTSASASARHRKGMSTDKFFLSRLLGSNSANQPNGAGVAGDKVSANGSDAAGDKTKRDSMNRPAPERAPSSSSTGKNGRRKAMSLVVGHASGEASSAAADRNRALKAGMPHSATRATFGTQVSGKADDSVSSAQKQRKGSASLASQTTSTSRAAQSSTRPQPLQPSLQQQQQQQDKAFNDGSTIASSSTAGPSSNAAKKVMDWFRKKSLSRGTFNEQPPLGLFERSPTSSYMHGSASQTPSVIVTSAPNGTSRHAEAPSGGSSVPSSRSTSGTHSENSEATEMTQLTNLSDASHQEGDGLKSSASTVQQQATPKASLSAVSNVSDASAAGSLVSTRSQQQQRPQPRVATATSASTTPARFNEARLRYHLGAVDQSALTSRSPIEVLKEVQRVLYEMGIDVRTEKDEDFKLECVRRKRAKTLMSATHGFGMSIRSSVFPPTQADVERSSRMSHRDSLTPSASSPGGGSLRSFLKRSSLQPGATSPKMGSSTLPSSATVTSNLGGAVHDENQPPPLYGDASVDGGQEIRFSVEVTRIKNLTGLYSLDIRRMKGNLWAYKFVYQALLDRCQLGSSTAAVG

SEQ ID NO: 1099 - protein, 429 aa, Methylobacillus flagellatus
MQEISKSSKLSNVCYDIRGPVLDRARQMEEDGHRIIKLNIGNPAPFGFAAPEEILQDVIRNMDSASGYTDSKGLFAARKAIMHYTQQKNIQGVTIDDIIIGNGVSELIVMAMQALLNNGDQVLVPMPDYPLWTAAVNLAGGTARHYVCDEQTGWLPDLRDIENKITANTRGIVIINPNNPTGALYPRETLEGIIEIARHHGLVIFADEIYDKVLFDGNTHTSIASLADDVLFVTFNGLSKNYRTCGYRAGWLVISGEKRHAGDYIEGLNMLASMRLSRQCARAVGDPDRAGRYQSIDDLVAPTGRLCKQRDLAYKMLTDIPGVSCVKPKAGLYLFPRLDPKIYPIQDDQQFILDLLLEEKVLLVQGTGFNWRAPDHFRVVFLPNVDDLTEAFTRIARFLENYRKQHSTITIVEAKPRKRAQTTSQSASA

SEQ ID NO: 1100 - protein, 484 aa, Lactobacillus plantarum WCFS1
MTEKLTTETGQPWANNEHSQTAGARGPVLMQDYNLLEKLAHFDRERIPERVVHAKGAGAKGFFELENDMGEYTKADLFNGVGKKTPVILRFSQVAGEKGYPDTVRDVRGFALKFYTQQGNYDLVGNNTPVFFVNDPLKFPDFIHSQKRDPKTNRRTQNMQWDFWAHSPESLHQVTYLMGDRGLPASYRTMNGYGSHTFKWVNQNGEQFWVKYHFISDQGVKNMTAQAAEKAMSQDLDYLQDDLYDAIQEKNYPSWTMYVQILPYEEGLNYKWDIFDVTKVISHKDYPLIKVGKLTLNENPTNNFTDIEEAAMSPANFVPGIEPSPDKLLQGRLFSYKDAQRYRLGANFEDLPVNKPVVPVHNYERDGYMKINNQGAEVNYEPNALHGPEEVPDAAFSPDSVRGETRAQPYRYQVDYTTQAGDLYRLMSEPEQERLINTIKDALGQVTLPGVKELEIKQFYEADKNYGTRVANALGMNIADIISD

SEQ ID NO: 1101 - protein, 164 aa, Zea mays
MDAVMFGLETPLMAALQHLLDVPDGDAGAGGDSDNKTGGGATRTYVRDARAMAATPADVKELPGAYAFVVDMPGLGTGDIRVQVEDERVLVVSGERRREEREDDAKYLRMERRMGKFMRKFVLPDNADVDKVAAVCRDGVLTVTVEKLPPPEPKKPKTIEVKVA

SEQ ID NO: 1102 - protein, 772 aa, Ralstonia solanacearum
MKIVCLGGGPAGLYFGLLMKLQDPSNDVVVIERNRPYDTFGWGVVFSDATMGNLREADPVSGATIGDAFNRWDDVEVHFKGEAVRSGGHGFIGIGRKKLLNILQARCEEVGVQLVFEQYVEDDQAIARKYGADLVLASDGLNSLVRKRYAETFRPDIDTRKCRFVWLGTKKVFDAFNFIFVPTEHGWFQAHAYRFEDGTSTFIVETPEATWKAAGIDQMSQEEGIAYCEKLFAPYLDGHPLISNASHLRGSAIWIQFPRVICERWVHWNEIDGKHVPVVLMGDAAHTAHFSIGSGTKLALEDAIELARTLKNVDGPLEAALQHYEAVRSVEVLKIQNAARNSTEWFENVARYAGLAPEQFAYSLLTRSQRISHENLRLRDPKWLEDYERWLAQRAGVPAADGGRPCPPLLTPYTVRGITLKNRVVVSPTLLYSSQDGVPGAFHLVHLGSRALGGAGLLLTEMTAVAPEARMTPGCPGLWNDEQAAAWKRVTDFVHGHGDTRIGVQLGHAGRRGSTRVGWDTPDQPLAEGNWPLVSASALPYLPGRSQLPREASLDDLARIREQFVEATRRAAAAGFDWLELQAGHGFLLSSFISPLTNQRTDAYGGALENRLRFPLEVLAAVRAAWPAHLPISVRISCTDWAPGGTTVDEAVEIARRLHLGGADLVDVSSGEVTPDQKPVYGRLYQTPFADRIRNEARVPTIAVGAISDADQVNGIVASGRADLCALSRAHLADAAWVLRESARLGWHDVEWPPAYRFGKEPLERSFARGRA

SEQ ID NO: 1103 - protein, 166 aa, Zea mays
MDAVMFGLETPLMAALQHLLDVPDGDAGAGGDSDNKTGSGGSATRTYVRDARAMAATPADVKELPGAYAFVVDMPGLGTGDIRVQVEDERVLVVSGERRREEREDDAKYLRMERRMGKFMRKFVLPDNADVDKVAAVCRDGVLTVTVEKLPPPEPKKPKTIEVKVA

SEQ ID NO: 1104 - protein, 606 aa, Delphinium 'MagicFountains dark blue'
MDSCACIDTQWPADELLVKYQYISDFFIALAYFSIPLELIYFVQKSAFFPYRWVLMQFGAFIVLCGATHLINLWTFSMHSKTVAMVMTIAKISTAVVSCATALMLVHIIPDLLSVKTRELFLKNKAEELDREMGLIRTQEETGRHVRMLTHEIRSTLDRHTILKTTLVELGRTLGLEECALWMPSRTGMNLQLSHTLRHQIPVGSTVSTNLPIVTQVFNSNQAIKIPHTCPLARIGPTAGRYVPPEVVAVRVPLLHLSNFQINDWPELSAKSYAVMVLMLPTDSARKWHDHELDLIEVVADQVAVALSHAAILEESMRARDMLMEQNIALDMARREAEMAIRARNDFLAVMNHEMRTPMKAVIALSSLLLEIELTPEQRVMIETVLKNSNLLAALINDVLELSRLEDGSLELDIRTFSLHGIFREVLNMIKPITAVKKLSLTLMLSPDLPVVAVGDEKRLVQIMLNVVGNAVKFTKEGYVSVIASVAKAESLRDWQAPEIFMVSSDSHFHLCVQVKDSGCGISPQEIPHLFTKFTQLRSGQNRSNDGAGLGLALCKRFLNLMEGHIWVNSDGTDKGCTVTIIVKLGICEGQPEPSNLQVVSRPRLS

SEQ ID NO: 1105 - protein, 477 aa, Pseudomonas fluorescens PfO-1
MNKLTTAAGAPVVDNNNVQTAGPRGPMLLQDVWLLEKLAHFDREVIPERRMHAKGSGAFGTFTVTHDITRFTKARLFSSVGKTTDVFVRFSTVAGERGAADAERDIRGFAIKFYTEQGNWDLVGNNTPVFFLRDPLKFPDLNHAVKRDPRTNMRSARNNWDFWTLLPEALHQVTIVMSDRGLPRTYRHMHGFGSHTFSFISPANERFWVKFTWKTQQGIENLTDQQAATLIGDDRESAQRDLYNAIEEGHFPQWKLYVQVMPELDAETYPINPFDLTKVWPHADYPLIEVGVLELNRNPDNYFADVEQAAFNPANVVPGISFSPDKMLQARLFSYGDAQRYRVGVNHHQIPVNAPRCPVNSYHRDGQMRTDANAGSTIGYEPNSYGQWAEQPDFSEPPLALKGSAGHWNHREDDDYFSQPGALFRAMSTAQQQVLFENTARSIHGASAQTRQRHIDNCTRADPAYGAGVAQAIEALG

SEQ ID NO: 1106 - protein, 530 aa, Cryptococcus neoformans var. neoformans B-3501A
MSSVCRISNCLSPRALSTAIRPKVTFRATPPSCRRRTFLSRRRTSFWAPSYPESKPLASTLQVPFTPPPPTDNGDDHLSEETRPEVIVAEPRDKKNRYLNSLMEKAGELSLKCSILDAEGNWGAEGQKYTKLELCREYDLDPRDLRKLDSLSPSLVPVILTRKTCILISMLHFRALIKPDSVIVFDSSHAHKDVTRRFKYHLERNIKAGLGIKVGGADEEKCDEIVLSYEHRALESILVVTANALEEEMAFSRHIVQQLLADLEDHIDRENLKKLLHYSKKIAAFQSRARYVKSAIDELLDSDEDLSAMYLTSRAQGRPRALHDHEQLELLLESFVKQVEEIVSEVDTTVVNMQSTQEIAELMLDSGRNALLALDIKISIATLGIGSGALLAGLFGMNLTTQLEETPYAFAVISSTAFLVTVLITAYGLRTLRRVRRVALSGRNPAVLSSVLGSASWDSSVAQFSQGFDPALVDMRTEMAKRAIWERLWWGSKRKEVEEGEKWRKAYTYASAKKEQEKRKWARLPGGQTR

SEQ ID NO: 1107 - protein, 729 aa, Triticum aestivum
MTGGTAEKLQSSEPTQGIVETITDGVTKGVKELVVGEKPRVVPKPGDGQKIYEIDPTLKDFRSHLDYRYREYKRIRAAIDQHEGGLEAFSRGYEKLGFTRSAEGITYREWAPGAHSAALVGDFNNWNPNADAMTRDDYGVWEIFLPNNADGSSAIPHGSRVKIRMDTPSGVKDSISAWIKFSVQAPGEIPFNGIYYDPPEEEKYVFQHPQPKRPESLRIYESHIGMSSPEPKINSYANFRDEVLPRIKRLGYNAVQIMAIQEHSYYASFGYHVTNFFAPSSRFGTPEDLKSLIDRAHELGLLVLMDIVHSHSSNNTLDGLNGFDGTDTHYFHGGPRGHHWMWDSRLFNYGSWEVLRFLLSNARWWLEEYNFDGFRFDGVTSMMYTHHGLQMTFTGNYGEYFGFATDVDAVVYLMLVNDLIHGLYPDAVSIGEDVSGMPTFCIPVPDGGVGFDYRLHMAVADKWIELLKQSDESWKMGDIVHTLTNKRWLEKCVTYAESHDQALVGDKTIAFWLMDKDMYDFMALDRPSTPRIDRGIALHKMIRLVTMGLGGESYLNFMGNEFGHPEWIDFPRGPQTLPTGKVLPGNNNNYDKCRRRFDLGDAEFLRYRGMQEFDQAMQHLEEKYGFMTSEHQYVSRKHEEDKVIIFERGDLVFVFNFHWSNSFFDYRVGCSKPGKYKVALDSDDALFGGFSRLDHDVDYFTTEHPHDNRPRSFSVYTPSRTAVVYALTE

SEQ ID NO: 1108 - protein, 563 aa, Candida glabrata CBS138
MGRRKRSPSNNNHNQNFEVPKLGADANTINGEQSQSDETAEPVDPDDSSKLPPNISIRNSTTSTTSTTRTTRTTRTTATYYDKDADKAAKLDIDISVARAFAATPFPRTSGRPAQNSNSSFSSSSSSSSSSTPSFSSSSPLSYLSPSSSVTTANVQPSTGATPQYLKPSSAPCGVLSMSSLMRKHTSASYNVSQTTATGTTHYAKTVSKSRLSSSLATENPATRSTLLNTPPPHLLLKRYPSDNSSSDILDVDLVIEKLLKMGTQPNGTAPTTTKSKRDFPFRSWEIQLICSHAREIFLEEPSLLRLQAPIKVVGDVHGQFNDLLRILKLSGAPPDTNYLFLGDYVDRGKQSLETILLLLCYKLKYRNNFFMLRGNHESANVTKIYGFYDECKRRMGSKSWRFFVDVFNTLPIAATIQDRIFCVHGGVSPELKELNQINQIMRPTDIPDQGLLTDLLWSDPDPQIQDWSLNDRGVSYTFSKRNVYDICSRFKFDLIIRGHMVVEDGYEFFAKKKLVTVFSAPNYCGEFQNWGAVMSVTTGLMCSFELLKPHSLKNKKTRKTRR

SEQ ID NO: 1109 - protein, 702 aa, Xanthomonas campestris pv. phaseoli
MAKSPSKSAQVPALAPVSATVDGARGTGDELHQKAGGTHPQLTTNQGIPVGDNQNSLRATPRGPTLLEDFILREKITHFDHERIPERIVHARGSAAHGYFELTKSLSQYTTAKIFTEVGEKTPLFTRFSTVAGGAGSVDTPRDVRGFAVKFYTKEGNWDLVGNNIPVFFIQDAMKFPDLIHAVKMEPDRGFPQAASAHDTFWDFISLTPESMHMVMWAMSDRTIPRSLRMIEGFGIHSFRFLNDKGESTFVKFHWRPKLGLQSTIWDEAVKIAGADQDFHRRDLFEAIQNGDFPEWELGVQLFTEAQAATFPFDHLDSTKVIPEELVPLQIVGRMVLDRWPDNFFAETEQVAYCPANIVPGIDFSNDPLLQGRLFSYLDTQLSRLGGPNFHQIPVNAPKCPFANNQRDGHMQMGVPKGRVAYEPSSLQADAPREALRGFPSHATPAEEGAKGRVRAESFADHYSQARLFFRSQTAPEQAHIASALVFELSKVETAHVREAIVGHLRHIDQELAQRVADGMGMTALPPAPPAAVAPIDMPLSPALQVIGKMKDTLKGRTVGILIHDGSDAAAIKAVRKAAEAAGATVKIVAPKLGGAKLSDGKQLAADGQLAGTPSVVFDAVAVLLSSEAAKLLTRESAALNFVSFAWAHLKAIAFDEGAQVLLKAGNVGKDAGVVPAADTKAFITAAKTRQWAREPKVRMLA

SEQ ID NO: 1110 - protein, 110 aa, Glycine max
  misc_feature (93)..(93): Xaa can be any naturally occurring amino acid
MPPKPLDYGSINENVKKSQYAVRGELYLRASELQKEGKKIIFTNVGNPHALGQKPLSFPRQVVALCQAPFLLDDPNVGLLFPADAIARAKHYXSLTSGGLRAYSDSRRLP

SEQ ID NO: 1111 - protein, 156 aa, Thermus thermophilus HB8
MAMTLVRRDARPMELTPFRTWSPFTLVDEVNRLFEEAFSDLVRPAAAYVAPADLYETDEALILEMAVPGMTPEDLEVSLEGNKLTIRGQVKPVADERVRRYYLQEMAHGSFVRTFTLPVEVDASGVKAEFRNGILRLTLPKVAEARARRIPIEVVQ

SEQ ID NO: 1112 - protein, 207 aa, Thermus thermophilus HB8
MRVFPVTLGPLQENAYLVETGEGPVLIDPGDEPEKLLALFQTTGLIPLAILLTHAHFDHVGAVAPLVEALDLPVYLHPLDLPLYEGADLAARAWGLAIPKPPLPVRPLEEGMRLFGFQVLHLPGHSPGHVAFYDPEGAQVFSGDLLFRGSVGRYDLPGADPKALFASLKRLLSLPPETRVHPGHGPGTTLGLEARTNPFLTGLEWEA

SEQ ID NO: 1113 - protein, 368 aa, Pseudotsuga menziesii
IQPFGCMVAVNDKTFEVIAYSENAPDMLQVSAHAVPSVEDQQILCIGSDARTLFTPSSTMALQKAAKFGDLNLLNPILVHSKSSGKPFYAILHRIDVALVMDFEPIKPSDVSTSAMGALQSYKLAAKAISRLQSIPSGNIGLLCDMIAQEVHELMGYDRVMAYKFHDDDHGEVISEIRRSDLEPYLGLHYPATDIPQASRFLFMRNRVRMICDCCAPPVIVIQDKRLPRDLSFCGSTLRAPHGCHAQYMANMGSIASLVMAVVVTEKEEDADSEGQIQQKGRRLWGLVVCHHTSPRYVPFPLRYACEFLMQVFGIHLNKEVELAIQMKEKRILRTQTLLCDMLLRDAPLGIVSQKPNIMDLVKSDGAA

SEQ ID NO: 1114 - protein, 544 aa, Ralstonia pickettii
MAAKDVIFGDAARAKMVEGVNILANAVKVTLGPKGRNVVLERSFGGPTVTKDGVSVAKEIELKDKLQNMGAQMVKEVASKTSDNAGDGTTTATVLAQSIVREGMKYVAAGMNPMDLKRGIDKAVTAAVEELKKVSKPTTTSKEIAQVGAISANSDTSIGERIAEAMDKVGKEGVITVEDGKSLADELEVVEGMQFDRGYLSPYFINNPEKQVVQLDSPFVLLFDKKVSNIRDLLPVLEQVAKAGRPLLIIAEDVEGEALATLVVNNIRGILKTAAVKAPGFGDRRNGMLEDIAILTGGTVIAEEIGLTLEKATLNDLGQAKRIEIGKENTIIIDGAGDAGAIEGRVKQIRAQIEEATSDYDREKLQERVAKLAGGVAVIKVGAATEVEMKEKKARVEDALHATRAAVEEGIVPGGGVALLRARAAISALTGENADQNAGIKIVLRAMEEPLRQIVLNAGEEASVVVAKVIEGKGNYGYNAASGEYGDLVEMGVLDPTKVTRTALQNAASVASLMLTTDCAVAESPKEESAPAMPGGMGGMEGMM

SEQ ID NO: 1115 - protein, 167 aa, Listeria monocytogenes
ARGAGAHGKFVTKKSMKKYTIAKFLQEEGTETEVFARFSTVIHGQHSPETLRDPRGFSVKFYTEEGNYDFVGNNLPVFFIRDAIKFPDVIHSLKPDPRTNIQDGNRYWDFFSLTPEATTMIMYLFSDEGTPASYREIRGSSVHAFKWINEEGKTVYVKLRWIPKAGI

SEQ ID NO: 1116 - protein, 449 aa, Zea mays
MSASVGRTRVGRYELGRTLGEGTFAKVKFARNVETGENVAIKILDKEKVLKHKMIAQIKREISTMKLIRHPNVIRMYEVMASKTKIYIVMELVTGGELFDKIASRGRLKEDDARKYFQQLINAVDYCHSRGVYHRDLKPENLLLDASGTLKVSDFGLSALSQQVREDGLLHTTCGTPNYVAPEVINNKGYDGAKADLWSCGVILFVLMAGYLPFEDSNLMSLYKKIFKADFSCPSWFSTSAKKLIKKILDPNANNRITIAELINNEWFKKGYQPPRFETADVNLDDVNSIFDESGEPAQLVVERREERPSVMNAFELISTSQGLNLGTLFEKQTGSVKRETRFASRLPANEILSKIEAAAGPMGFNVQKRNYKLKLQGENPGRKGQLAIATEVFEVTPSLYMVELRKSNGDTLEFHKFYHNISNGLKDVMWKPESGIVEGDEARQRRSP

SEQ ID NO: 1117 - protein, 518 aa, Zea mays
MAAITPPTQSEPSPQTGRPASSAAAAAKRGGGGAGAAGGPLMGKYELGRLLGHGTFAKVYHARHVDTGDNVAIKVLDKEKAVKSGLVPHIKREIAVLRRVRHPNIVHLFEVMATKTKIYFVMELVRGGELFSRVSKGRLREDTARRYFQQLVSAVGFCHARGVFHRDLKPENLLVDEQGNLKVSDFGLSAVAEQFRPDGLLHTFCGTAAYVAPEVLGRRGYDGAKADVWSCGVILFVLMAGYLPFHDKNIMAMYKKIYKGEFRCARWFSKDLTSLLMRILHTNPNTRITLPEIMESRWFKKGFKPVKFYIEDDQLHNVIDDEDGLLDMGPAGPVPPPLPPPPPPLPPPKVDGDESGSDSDSSISSCPASMLSDESQRPRGSLPRPASLNAFDIISFSRGFNLSGLFEEKGDEVRFISAEPMSDIITKLEDIAKLKSFKLRRKDWRICLEGTREGVKGPLTIGAEIFELTPPLVMVEVKKKAGDNEEYENFCDKELKPGMQHLVHHMVRAPSMLLTDAK

SEQ ID NO: 1118 - protein, 753 aa, Shigella flexneri 2a str. 301
MSQHNEKNPHQHQSPLHDSSEAKPGMDSLAPEDGSHRPAAEPTPPGAQPTAPGSLKAPDTRNEKLNSLEDVRKGSENYALTTNQGVRIADDQNSLRAGNRGPTLLEDFILREKITHFDHERIPERIVHARGSAAHGYFQPYKSLSDITKADFLSDPNKITPVFVRFSTVQGGAGSADTVRDIRGFATKFYTEEGIFDLVGNNTPIFFIQDAHKFPDFVHAVKPEPHWAIPQGQSAHDTFWDYVSLQPETLHNVMWAMSDRGIPRSYRTMEGFGIHTFRLINAEGKATFVRFHWKPLAGKASLVWDEAQKLTGRDPDFHRRELWEAIEAGDFPEYELGFQLIPEEDEFKFDFDLLDPTKLIPEELVPVQRVGKMVLNRNPDNFFAENEQAAFHPGHIVPGLDFTNDPLLQGRLFSYTDTQISRLGGPNFHEIPINRPTCPYHNFQRDGMHRMGIDTNPANYEPNSINDNWPRETPPGPKRGGFESYQERVEGNKVRERSPSFGEYYSHPRLFWLSQTPFEQRHIVDGFSFELSKVVRPYIRERVVDQLAHIDLTLAQAVAKNLGIELTDDQLNITPPPDVNGLKKDPSLSLYAIPDGDVKGRVVAILLNDEVRSADLLAILKAMKAKGVHAKLLYSRMGEVTADDGTVLPIAATFAGAPSLTVDAVIVPCGNIADIADNGDANYYLMEAYKHLKPIALAGDARKFKATIKVADQGEEGIVEADSTDGSFMDELLTLMAEHRVWSRIPKIDKIPA

SEQ ID NO: 1119 - protein, 547 aa, Ralstonia pickettii
MAAKDVVFGDAARAKMVEGVNILANAVKVTLGPKGRNVVLERSFGGPTVTKDGVSVAKEIELKDKLQNMGAQMVKEVASKTSDNAGDGTTTATVLAQSIVREGMKYVAAGMNPMDLKRGIDKAVTAAVEELKKVSKPTTTSKEIAQVGAISANSDTSIGERIAEAMDKVGKEGVITVEDGKSLADELEVVEGMQFDRGYLSPYFINNPEKQVVQLDSPFVLLFDKKVSNIRDLLPVLEQVAKAGRPLLIIAEDVEGEALATLVVNNIRGILKTAAVKAPGFGDRRKAMLEDIAILTGGTVIAEEIGLTLEKAGLNDLGQAKRIEIGKENTIIIDGAGDAGAIEGRVKQIRAQIEEATSDYDREKLQERVAKLAGGVAVIKVGAATEVEMKEKKARVEDALHATRAAVEEGIVPGGGVALLRARAAISALTGENADQNAGIKIVLRAMEEPLRQIVLNAGEEASVVVAKVIEGKGNYGYNAASGEYGDLVEMGVLDPTKVTRTALQNAASVASLMLTTDCAVAESPKDESAPAMPGGMGGMGGMEGMM

SEQ ID NO: 1120 - protein, 471 aa, Parachlamydia sp. UWE25
MTNPSIVWFRQDFRLEDNPALNAATQKGGPVIPVFNWVFNPEKEWQLGGASQWWLYYSLISLKNDLSELGLSLIIRKEDPLKSLLEIAHETGADTVYWNRRYEPMLIQDDAKIKTELQKQGIKAHSFNGNLLFEPWTIANKQGKPFQVFTPFWNQCLKLNDPEVPLPVPHSLKKFVGQLQTESIDSLNLLPKIKWDKGLKEVWSPGAKSAKALLKKGLTGVIDQYLDIRDLPDHDGTSLLSPYLHFGEISPRMIWQAVKENSTSKGAEGYLRQIGWREFAHHLLYHFPETPQKPLRSQFNSFSWKNDKQNLKAWQKGQTGYPIIDAGMRQLWKIGWMHNRVRLIVGSFLVKDLMIHWIEGAKWFWDTLVDADLANNTMGWQWIAGCGADAAPYFRIFNPITQGEKFDPEGNYVKKWVPELINLPKEWLHQPWEAPEEILRQSGIELGINYPKPIVNHAKAREEALQAYSRL

SEQ ID NO: 1121 - protein, 485 aa, Oceanobacillus iheyensis HTE831
MTKGNNDEQNNSRNYSQGFGSQGLHGYPGNASDKSHANPAAFNWNIDLPAEIHSQTVGKRGPILKQDNIEHETLQTFIHEKITERPVHVKGWGAFGYFETLYSMSDYTTLSFLQIPGTQVPVFVRFSLAVSTKGTPDTSRNVRGFATKFYSEDGIFDLICNHIPVFSVRDTIRFPEAIKAFLPSPVNNLIDPTRYWNFVARAPESLLFTLLVYSNLGTVKSLRHLPGHSVNTYVWKNAEGKRYFIKYTWAPIAGEEYIRNEEAVKLAGENPDIAGQDLHDAIERGEPVEYGLYIQIMDPKDAASLPYDPLDDTKLWDQQQFPFKPVGVMKLNKNPDNYMEQVEKAAFSPTNLLEGVELSDDKMLQGRANIYSDSQRYRIGPDFRNVPVNNQSNWWPGDLVTSGDGRFVEGELQRSDIEKQDDFTQPGLFYESLSEEDKEDLITNMAEGLSVVSNDVFNTVHGYIQEASRDLANRLNKTVILKRKK

SEQ ID NO: 1122 - protein, 443 aa, Oryza sativa (japonica cultivar-group)
MAEQRGNMLMKKYEMGKLLGQGTFAKVYHARNTETSESVAIKMIDKEKVLKGGLMDQIKREISVMKLVRHPNIVQLYEVMATKTKIYFVLEHVKGGELFNKVQRGRLKEDAARKYFQQLICAVDFCHSRGVYHRDLKPENLLLDENSNLKVSDFGLSALADCKRQDGLLHTTCGTPAYVAPEVINRRGYDGAKADIWSCGVILFVLLAGYLPFHDKNLMDMYKKIGKAEFKCPSWFNTDVRRLLLRILDPNPSTRISMDKIMENPWFRKGLDAKLLRYNLQPKDAIPVDMSTDFDSFNSAPTLEKKPSNLNAFDIISLSTGLDLSGMFEESDKKESKFTSTSTASTIISKIEDIAKGLRLKLTKKDGGLLKMEGSKPGRKGVMGIDAEIFEVTPNFHLVELKKTNGDTLEYRKVLNQEMRPALKDIVWAWQGEQPKQQQQPTC

SEQ ID NO: 1123 - protein, 485 aa, Glycine max
  misc_feature (39)..(39): Xaa can be any naturally occurring amino acid
MGNSFGCSASGERLVSAARDGDLVEAKMLLNCNPCLAKXVALLLENGADVNSRNYCGQTALMQACRYGHWEVAQTLLLFRCNVIRADYLSGRTALHFAAVHGHVRCIRLVVADFVPSAPYQAIHAGTAVDRGGGSNCSALSKFVNKTADGGITALHMAALNGYFDCVQLLLDLNANVNAVTYNYGTSMDLIGAGSTPLHYAACGGNLKCCQILVAHGASRLALNCNGWLPLDIARMWGRHWLEQLLAPSSDATMPTFSHSNYLSLPLMSVLNIAREYGLQSSTASSDEIDFCAVCLERPCSVAAEGCGHELCVRCALYLCSTNNVSSEMVGPPGSIPCPLCRHGVVSFVKLPGSQAKENKLHVSLGLCTPCMLHPRDLDKPSLSHTPEVGRNRVASVPSEILCPVTCSPFPSMAIPLCTCNDGPCPSFEPREVETQDGLPHHSQASTVDQDKIEGPRLDKTTCSSMFWGRRSCSREHQCNSEINA

SEQ ID NO: 1124 - protein, 356 aa, Oryza sativa (japonica cultivar-group)
MDQIKREISVMKLVRHPNIVQLYEVMATKTKIYFVLEHVKGGELFNKVQRGRLKEDAARKYFQQLICAVDFCHSRGVYHRDLKPENLLLDENSNLKVSDFGLSALADCKRQDGLLHTTCGTPAYVAPEVINRRGYDGAKADIWSCGVILFVLLAGYLPFHDKNLMDMYKKIGKAEFKCPSWFNTDVRRLLLRILDPNPSTRISMDKIMENPWFRKGLDAKLLRYNLQPKDAIPVDMSTDFDSFNSAPTLEKKPSNLNAFDIISLSTGLDLSGMFEESDKKESKFTSTSTASTIISKIEDIAKGLRLKLTKKDGGLLKMEGSKPGRKGVMGIDAEIFEVTPNFHLVELKKHLNTVRS

SEQ ID NO: 1125 - protein, 231 aa, Zea mays
KINRQVTFAKRRNGLLKKAYELSVLCDAEVALIIFSNRGKLYEFCSGQSITKTLERYEKNSYGGPDTAVQNKENELVQSSRNEYLKLKARVDNLQRTQRNLLGEDLGSLGVKELDQLEKQIDSSLSHIRSTRTQHMLDQLTDLQRREQMMCEANKCLRRKLEETSNQVHGQVWEHGANLLLGYERHSSPQQAPSHVGNGLFFHPLEAAAEPTLQIGFAPEHMNNFMPAWLP

SEQ ID NO: 1126 - protein, 401 aa, Bacillus cereus ATCC 10987
MNRSTKFTVKNRFYKAAMSETMATKNNNPTEELVTLYGRWAQGGAGLLMTGNVMIDREALGEPGNVVIEDERDLDILKRWAKSGTQNGTQLWMQINHPGKQSPKTLSKNPVAPSAIPLTGDIKDFFNKPRELTSGEIWQLIKRFGNAARIAKKAGFTGVQIHAAHGYLINQFLSPHHNQRQDEWGGDLDGRMKFLIETYYEIRKQVGEEFPIGLKLNSADFQRGGFTEEESMKVLKKMDDLGMDLIEISGGNYENPKMFDGVRESTKKREAYFLDYAQKARTLVQAVLIVTGGFRSEEGMNEAIESGAVDMVGVGKLFALNPDFPNQIIHGNYHTVTIKPIRTGLKRLDKKISSMLELTWYERQFKLMGKGKEPNPNYSVWKTVFQMISENGMNAFQKRRA

SEQ ID NO: 1127 - protein, 318 aa, Arabidopsis thaliana
MTLGCKQAIELAVDILAKPKANVLLPSPGFPWDLVRSIYKNLEVRHYNFLPEKNFEIDFDSVRALVDENTFAIFIINPHNPNGNTYSEAHLKQLAELAKELKIMVVSDEVFRWTLFGSNPFVPMGKFSSIVPVVTLGSISKGWKVPGWRTGWLTLHDLDGVFRNTKVLQAAQDFLQINNNPPTVIQAAIPDILEKTPQEFFDKRQSFLKDKVEFGYSKLKYIPSLTCYMKPEACTFLWTELDLSSFVDIEDDQDFCNKLAKEENLVVLPGIAFSQKNWLRHSIDMETPVLEDALERLKSFCDRHSNKKAPLKDVNGVK

SEQ ID NO: 1128 - protein, 417 aa, Zea mays
MGFTKRSPQHPASPAGGEVGAQTAGKVTPVPAAPESAPVAVVPRPPDVAPFLTKVYDMVSDPATDAVISWSAGGGSFVIWDSHAFERDLLPRHFKHNHFTSFIRQLNTYGFHKVDPDRWEWANEGFVKGQKHLLKTIKRKKKSSQDVPSDLQSVPVKTAPGTENIEIGKYGGLEKEVETLKRDKALLMQQLVDLRQYQQSSSAEVQNLIQRLRVMEQNQQQMMALLAIVVQNPDFLNQLVQQQRRSNWWNDDGNRKRRFQALEHGPVDDQETSGGGAQIIQYRPPVPETSNQPIPANEAFYSTPAQPASSPALEMPMDVEMTSNNVDTFDSTGNDFTDTSALCEWDDMDIFGDELEHILQQPEQDFQVDPPLTVEDYGYDHPRLEQDCQMEAQQNCKNPQYVACVLKQRESHASDVH

SEQ ID NO: 1129 - protein, 167 aa, Listeria monocytogenes
ARGAGAHGKFVTKKSMKKYTMAKFLQEEGTETEVFARFSTVIHGQHSPETLRDPRGFSVKFYTEEGNYDFVGNNLPVFFIRDAIKFPDVIHSLKPDPRTNIQDGNRYWDFFSLTPEATTMIMYLFSDEGTPASYREIRGSSVHAFKWINEEGKTVYVKLRWVPKAGI

SEQ ID NO: 1130 - protein, 364 aa, Cupriavidus necator
MPEVQRMTLTQFLIEERRRYPDASGGFNGLILNVAMACKEIARAVAFGALGGLHGKASTQAGEEGAVNVQGEIQQKLDVLSNTTFLRVNEWGGYLAGMASEEMEAPYQIPENYPRGKYLLVFDPLDGSSNIDVNVSVGSIFSVLRAPEGADTVTEQDFLQPGSAQVAAGYALYGPTTMLVLTVGNGVNGFTLDPNLGEFFLTHPHLRVPPDTQEFAINASNSRFWEAPVQRYIGECMAGKSGPRGKDFNMRWIASMVAEAHRILMRGGVFMYPRDTKDPAKPGRLRLLYEANPIAFLMEQAGGRASTGRQTLMSVAPGALHQRIGVIFGSRNEVERIEGYHTNQTDPDLPSPLFNERSLFRASA

SEQ ID NO: 1131 - protein, 379 aa, Neurospora crassa
MAATAAESRLFQPLKLTPKITLGHRLAMAPLTRFRSDDEHVPIVPLMTTYYSQRASVPGTLLVTEATFISPAAGGYDNVPGIYNAAQIAAWKKITDAVHAKGSFIFCQLWSLGRAANPEVLAKEGGLKLKSSSAVPMEEGAPVPEEMTVAEIKERVAEYAAAAKNAVEAGFDGVEIHGANGYLIDQFLQDTCNQRTDEYGGSIENRSRFAHEVVKAVVEAVGAEKTGIRLSPYSTFQGMKMKKDLIPQFEDVIRKINGFGLAYLHLTQSRVAGNMDVQPEEDEENLAFAAKLWDGPLLIAGGLTPETAKHLVDREFPEKDVVATFGRHFISTPDLPFRIKEGIELNPYDRDTFYKAKSPDGYIDQPFSKEFEKVYGAQA

SEQ ID NO: 1132 - protein, 379 aa, Catharanthus roseus
MAKQVDNGQEEQQQNPQNPLLTPYKLGKFQLSHRIVLAPLTRQRSYGNVPQPHAVLYYSQRTSKGGLLISEAAGVSNTAQGYPMTPGIWTKEQVEAWKPIVDAVHAKGGVFFCQIGHVGRVSNYSYQPNGQAPISSTDKGLTPLYRANGIGYVEHTPPRRLTTDELPGIVNDFRAALNAIEAGFDGVEIHGAHGYLIDQFLKDQVNDSTDEYGGSLENRCRFALEIVEAVSNAIGADRVGIRLSPFAGYMESGDSNPEALGLYMAEALNKYGILYCHMVNPRMKTLGENCEVPHSLLPMRKAFRGTFMAAGGYDREDGIKALAENRADLVVYGRLFLANPDLPKRFELNAPLNKYNRETFYIPDPVLGYTDYPFLEATE

SEQ ID NO: 1133 - protein, 167 aa, Listeria monocytogenes
ARGAGAHGKFVTKKSMKKYTMAKFLQEEGTETEVFARFSTVIHGQHSPETLRDPRGFSVKFYTEEGNYDFVGNNLPVFFIRDAIKFPDVIHSLKPDPRTNIQDGNRYWDFFSLTPEATTMITYLFSDEGTPASYREIRGSSVHAFKWINEAGKTVYVKLRWVPKAGI

SEQ ID NO: 1134 - protein, 138 aa, Brassica napus
  misc_feature (42)..(42): Xaa can be any naturally occurring amino acid
TTQAAVLMNGQNAKTNFPVIKSNGSVSPDVNSPLSALYNANXEKNCKAQPPYLTCLRLDNNSSHIGFWQKRAGSSSSQNWVKLVELGDGVNTSAGDTGTNKLKKGNADVEEEDQMSMQMFEELLNWTCPVFASISGFS

SEQ ID NO: 1135 - protein, 209 aa, Triticum aestivum
  misc_feature (92)..(92): Xaa can be any naturally occurring amino acid
MEVQARHGVLPTGRQQHLHGHGQSHHQPPAGEDEWWEYFPCPFCYIEVEVPFLCDHLQEEHCFDMRNAVCPICADNLGADTTGHFRERHSQXLKMRKSSSSRAGAAGSDKEAYEEDDSYFEESSYIMGQPVPDDHSPDPLLSQFICTVAPPVVDPEPSKAEEEDHAAPSSDDQRLNQVVMDDASKKDLEERLRRVEFVKQMLMTTIAWD

SEQ ID NO: 1136 - protein, 708 aa, Rhodopirellula baltica SH 1
MSFRQILPVALLAVGCIGSTLIQLPATAQERTVERAAPEQAAPPQPSPQDKVIAKLIAQLMPSNHVSGKDLNDEISRRALDLFLESFDPMKLYFLQSDVDEFNRYSEVVDDQVRLGDLSLAYYIYGRFTQRVDERVAVVMELLDGDFDFTRDEQIIIDRDATQFARDADEARDRWRRQIKLALLDLRNEKTDDSESDEPEMSKDEIMADAKDQLRRRYARYARRWKQTSSDDLLELFLSSVTNGYDPHSTYMSPATLEDFAISMRLNLDGIGASLGEKDGTTVVRQVIPGGAADSHGKLKPDDVIVAVGQDAEGPMVDIVEMPLKEVVKLIRGRAGSVVRLAVRPGGTGNEEIFKIVRARIELEDSAARGEVIDHEMPGQGKVKLGYINLPSFYMDMEAARRNETDYRSSTRDVERILRDFKSQNVGGVVLDLTRNGGGSLTEAISLTGLFIDRGPVVQVKNSDGSVQQYSDDQSGTVWDGPLVVVTSKLSASASEIFAGAIKDYHRGIVVGDPATHGKGTVQTLMDIGQSLFRNNNANYGALKVTLQQFYLPDGESTQLKGVEADLVLPSMTSKLPVAEGDLEYALEFDKVPLAKHSLYAMTPDSLLNSLRINSANRVQQDKEFSELMRRIELYVREKDQKSISLNEEEFLRRRAERKAQTEAEEEELDEVLNNDEIFRDTYYNKEVMNVAHEYVTGLRSQNLAVAK

SEQ ID NO: 1137 - protein, 471 aa, Chromobacterium violaceum ATCC 12472
MSKRYRTALVWLRRDLRLDDHAAFYHALKHSEAVLPVFVFDASILAALPRDDRRVDFIWQSAAALKAELNQLGGDLLIRHGLPQHEIPRLAAELGAEAVFCNRDYEPAARARDAEVAQRLAEQGVAFRDSKDQVIFETDEVLTGAGKPFSVFTPYKNAWLKKLTPFHLQAYPVRRYLDALMPREPQSMPSLADIGFLPSDLASLPVKAGAAGAEALFADFAGRIERYKAQRDFPGVKGVSYLSVHLRFGTLSIRRLAAYAWHDGGEGAMTWLSELIWRDFYQQVLWHRPDAAKHAFKPEYDALPFPNDPEWFDAWREGRTGYPLVDAAMRQLNRSGYMHNRLRMVAASFLVKDLLIDWRWGEQYFAEKLLDFDLAANNGGWQWAASTGCDAQPYFRIFNPVSQSEKFDPDGRFIRRYVPELAALPDKLIHAPWQAKPEQLMSAGVRLGRDYPHPIVDHAVQRELALALFKR

SEQ ID NO: 1138 - protein, 622 aa, Streptococcus agalactiae A909
MSNKDELYTFGIGENFHLQNYLGVHSENGSFCFRVWAPNAENVQVIGDFTDWRNRPLQMNKNQAGVWEANSLDAREGDLYKYLVTRKGGQVVEKIDPMAVYMERRPGTASVIKVLRNKKWEDGLWMGRRKRLGFQKRPINIYEVHAGSWKKDDFGHPMTFSQLKDYLIPYLVEMNYTHVEFMPLMAHPLDMSWGYQLMGYFAFEHTYGTPEEFQDFVEACHKNNIGVLVDWVPGHFIQNDDALAYFDGTATYEYQNHDRAHNYRWGALNFDLGKNQVQSFLISSALFWIEHYHIDGIRVDAVSNMLYLDYDEGPWEANQFGDNRNLEGYHFLRKLNKVIKERHPNVMMIAEESTASTPITKDLESGGLGFDFKWNMGWMNDILRFYEEDPLYRQYDFNLVTFSFMYIFNENFVLAFSHDEVVHGKKSMMHKMWGDRYNQFAGLRNLYAYQMCHPGKKLLFMGSEFGQFLEWKYNDQLEWENLNDDMNQKMQRYTKQLNQFYKDHKCLWRIDDSFDGLEIIDADNKSETVLSFIRKDDKGDLLLCVFNMTPVERPNFTIGVPQAGIYEEVLNTEMEEFGGVWKNHNPVTKTQVATWKDYDHTLSFTLPALGASVWRIKRRLRK

SEQ ID NO: 1139 - protein, 613 aa, Clostridium thermocellum ATCC 27405
MCGIAGWINLKSDLTNQKEILNSMIDRLTPRGPDASGSWISPNALIAHKRLIVVDPEGGIQPMVRRQGENTYVITYNGELYNTADLRNELESRGHEFLTSSDTEVLLVSYIEWGAKCVEHLNGIYAFGIWDEGKKRLFLGRDRFGVKPLFYAQRGDSLIFGSELKALLANPLVEPKLDAEGLAEIFALGPARTPGHGIFKDVYELKPAHSMIFDINGIQIRKYWSLESYPHTDSEKATISKVRDFVLDAITRQLVADVPVCTFLSGGLDSSAITAVASKTFASQGKGQLNTFSVDYVDNDIYFKPSMFQPNSDEPWIKKMSESFNTCHHYVKFDTPQLVDALIDAVKARDLPGMADIDSSLFLFCREVKKFSVVALSGECADEIFGGYPWFHNEKMLFADTFPWSVSVHERTKILSPEILNLIKPEEYIQRRYRETLSEVPHLKGENRIEARRREIFYLNINWFMATLLDRKDRMSMASGLEVRVPFCDHRLVQYVWNIPWELKMYNKREKGLLRQALKGILPDDIIERKKSPYPKTHNPSYKKAVSKWLLEILNDSSSPLHQLIDVKVVRSMAEGNSDNTDPWFGQLMAQPQMLAYLIQVDFWLRDNHISIV

SEQ ID NO: 1140 - protein, 126 aa, Beta vulgaris
KFYTREGNFDLVGNNFPVFFIRDGMKFPDMVHSLKPNPKSHIQENWRVMDFFSHHPESLHMFTFLFDDIGVPANYRHMEGSGVNTYTLINKAGKVHCVKFHWKPTCGVKSLLEDEAIKVGGANHSH

SEQ ID NO: 1141 - protein, 470 aa, Arabidopsis thaliana
MKQLSRKVTSNAHGQDSSYFLGWEEYEKNPYDEIKNPNGIIQMGLAENQLCFDLIETWLAKNPDAAGLKKDGQSIFKELALFQDYHGLPEFKKALAEFMEEIRGNRVTFDPSKIVLAAGSTSANETLMFCLAEPGDAFLLPTPYYPGFDRDLKWRTGAEIVPIHCSSSNGFQITESALQQAYQQAQKLDLKVKGVLVTNPSNPLGTMLTRRELNLLVDFITSKNIHLISDEIYSGTVFGFEQFVSVMDVLKDKNLENSEVSKRVHIVYSLSKDLGLPGFRVGAIYSNDEMVVSAATKMSSFGLVSSQTQYLLSALLSDKKFTSTYLDENQKRLKIRQKKLVSGLEAAGITCLKSNAGLFCWVDMRHLLDTNTFEAELELWKKIVYDVKLNISPGSSCHCTEPGWFRVCFANMSEDTLDLAMKRLKEYVESTDSRRVISKSSHDRIKSLRKRTVSNWVFRVSWTDRVPDER

SEQ ID NO: 1142 - protein, 129 aa, Triticum aestivum
MAAASLRKGNARLPPEVNRALFVRNLPFNISSEEMYDIFGKYGAIRQIRLGNAKDTRGTAYVVYEDIYDAKNAVDHLSGFNVANRYLIVLYSQLNRMSKKTDIKKKEDEITRLQEKYGVGSKTPSANDA

SEQ ID NO: 1143 - protein, 474 aa, Erwinia carotovora subsp. atroseptica SCRI1043
MKYRHLKRFPEGFLWGAATSAYQVEGAWNEDGKGPSVIDARTSYPEGTTDFKVASDHYHRYKEDVALFADIGFKTYRFSIAWSRIIPDGSGEVNPAGIEFYHNLIDELLHYGIEPIVTMYHFDLPQALQEKGGWYNRETVDAFERFANVLFDEYGNKVKYWLTINEQNMMILHGSALGTLDPTLENPKQNLYQQNHNMLVAQAKAMNALHEKVPGAKIGPAPNIALIYPASAKPEDVMAAFNYNAIRNWLYLDMAVYGRYNTAAWRYMEEKGYTPEILPGDMDILASAKPDFIAFNYYTSQTVEASKGDGSDEIARGGDQHLKSGEEGVHRGASNPWLQKNAFGWEIDPIGFRNTLRELHDRYHLPLIITENGLGAFDTLDENGEVQDDYRIDYLQRHIEQIQLAITDGVDVFGYTPWSALDLISTHQGCAKRYGFIYVNREEFDLKDLRRIRKKSAYWYADVIKNNGLDSSEA

SEQ ID NO: 1144 - protein, 353 aa, Burkholderia vietnamiensis G4
MPTLFDPVTLGELTLPNRIVMAPLTRARAGTTRVPNELMARYYAERASAGLIISEATSVTPQGVGYADTPGIWSDEQVEGWKRVTQAVHAAGGRIVLQLWHVGRISDPMFLDGDLPVAPSAIAAGGHVSLVRPERPFVTPRALELDEIPGIVAAYRKGAENAKKAGFDGVEIHGANGYLLDQFLQDSTNRRTDAYGGPIENRARLLLEVVDAAIDVWGAGRVGVHLAPRGDAHTMGDSDPAATFGYVARELGRRKIAFIFTRESYTGDQLSPRLKEAFGGPLIANEQFTPDSARQALADGSADAIAWGKLFIANPDLPRRLELGAPLNKPVPETFYAQGETGYTDYPALDDAA

SEQ ID NO: 1145 - protein, 160 aa, Aspergillus niger
VAIKKMTPFDHSMFCLRTLREMKLLRYFNHENIISILDTQRPRNYESFNEVYLIQELMETDMHRVIRTQDLSDDHCQYFIYQTLRALKAMHSANVLHRDLKPSNLLLNANCDLKVCDFGLARSAASTDDNSGFMTEYVATRWYRAPEIMLTFKEYTKAID

SEQ ID NO: 1146 - protein, 167 aa, Listeria monocytogenes
ARGAGAHGKFVTKKSMKKYTMAKFLQEEGTETEVFARFSTVIHGQHSPETLRDPRGFSVKFYTEEGNYDFVGNNLPVFFIRDAIKFPDVIHSLKPDPRTNIQDGNRYWDFFSLTPEATTMIMYLFSDEGTPASYREIRGSSVHAFKWINEEGKTVYVKLRWIPKAGI

SEQ ID NO: 1147 - protein, 468 aa, Listeria monocytogenes str. 4b F2365
MKLFPFIMLLFAFVFVTALVTTIVMSLGDDKQVKVSIPERKEFTKLYDVYDEITSKYYKDTKSTTMIDGAINGMVNSLDDPYSTFMSKKESSEFNDTISASFEGIGAEIQEKDGAIVIVSPIKNSPAEKAGLRPQDIITQVDGKSVKGDTATEATQKIRGEKGTKVTLTIQRSNEDKPFDVTITRDEIPIETVYKEMGSDKIAHVTISTFSETTYDELEKALKSLEKDGMKGLVLDLRGNPGGLLDQAVSISSLFVPDGKIVVQEQDKDGDKSAIKADSSSHGDYKVKVPTTMLIDGGSASASEILAAAAKESGGIKLVGTKSFGKGTVQTATTLSDDSTLKLTVAKWLTPNSEWIHEKGITPDVVVNMPDYATMTIPSSTKVYKNGDFGDDVKTIETLLKALDYNVGKVDGLYDTDTEYAVQRFQAANKLDVTGIMTGVTTDKLVELTQKHLKETDPQLQKAKALVK

SEQ ID NO: 1148 - protein, 413 aa, Bacillus anthracis str. A2012
  misc_feature (378)..(411): Xaa can be any naturally occurring amino acid
MTLLSKSKYGAIVVRIFLGGRNMTSSNKKSASIYEGTNVNAWGSFENVAETKLFNSIQIGSWPLRNRIAMAPMTRCFADNETGAVGADVVEYYRKRAADGVGLIITEGIVISPRAKGNPGVPGIYTQEQIDSWKPVTEAVHKEGGTIIAQIWHVGRMSHHEIIGGQMPQAPSAIAAEGNVPRFRKPFDTPEAMTLEEIQEVIGQYAQAAKNAIEAGFDGVEIHGAHGYLIDQFTYEFVNKRTDKYGGDLKQRLTFMKEVTEAVIEAIGADKTLLRFSAFKGDNPTYMWENPELAIETFVNMFKEVGLTMIHPSTMSYTQVIADGKNFHQLVRKYWDGAIVGVGNLNPKEAEEALQEGTIDVAAFGRPLIANPDGIIEXXXXXXXXXXXXXXXXXXXXXXXXXXXXXXXXXXIS

SEQ ID NO: 1149 - protein, 482 aa, Zea mays
MAPSVAVENLNPKVLKCEYAVRGEIVIHAQRLQQQLQTQPGSLPFDEILFCNIGNPQSLGQQPVTFFREVLALCDHPCLLEKEETKSLFSADAISRAKQILATIPGRATGAYSHSQGIKGLRDAIAAGITSRDGFPANADDIFITDGASPGVHMMMQLLIRNEKDGILCPIPQYPLYSASIALHGGALVPYYLDEKTGWGLEISDLKKQLEDARSKGIDVRALVVINPGNPTGQVLAEDNQYDIVKFCKNEGLVLLADEVYQENIYVDNKKFNSFKKIARSMGYGEDDLPLVSFQSVSKGYYGECGKRGGYMEITGFSAPVREQIYKVASVNLCSNITGQILASLVMNPPKVGDESYASYKAEKDGILQSLARRAKALEDAFNTLEGFSCNKAEGAMYLFPQIHLPHKAIEAAKAAKKAPDAFYALRLLESTGIVVVPGSGFGQVPGTWHVRCTILPQEDKIPAVITRFKAFHEAFMAEYRD

SEQ ID NO: 1150 - protein, 279 aa, Streptococcus pyogenes M1 GAS
MVTTVKMTSGYEIPVLGFGTYQAADGEEAYQSTLAAIKAGYRHIDTAAIYKNEESVGRAIKDSGVLREDLFITTKLWNDAHSYEGAKDALAASLDRLGLDYVDLYLIHWPNPKALRNTWKEANAQAWQYMEEAVEAGLIKSIGVSNFMVHHLEALQETAKITPAINQIRLAPGCYQKEVVDYCKANEILLEAWSPLGQGEIFDNETMQQLANKYDKTVAQVALAWSLAEGFIPLPKSVHDERIKENMAIFDVSLTQEDKKTIRYLSGMSAIPNPDTTSF

SEQ ID NO: 1151 - protein, 167 aa, Listeria monocytogenes
ARGAGAHGKFVTKKSMKKYTMAKFLQEEGTETEVFARFSTVIHGQHSPETLRDPRGFSVKFYTEEGNYDFVGNNLPVFFIRDAIKFPDVIHSLKPDPRTNIQDGNRYWDFFSLTPEATTMIMYLFSDEGTPASYREVRGSSVHAFKWINEEGKTVYVKLRWVPKAGI

SEQ ID NO: 1152 - protein, 689 aa, Haemophilus influenzae R2846
MSKNVICYAWLSVCLSSAIPAFAVQPTLKPSDISIPAISEESQLATKRATTRLTQSHYRKIKLDDDFSEKIFDRYIKNLDFSHNTFLQSDIDELRQKYGTKLDEQLSQGDLSAAFDIYDVMMKRRYERYTYALSLLDKEPDLNGQDQIEIDREKAAAPQTEADANKLWDARVKNDIINLKLKDKKWSEIKAKLTKRYNLAIRRLTQTKADDIVQIYLNAFAREIDPHTSYLSPRTAKSFNESINLSLEGIGTTLQSEDDEISIKSLVPGAPAERSKKLHPGDKIIGVGQATGDIEDVVGWRLEDLVEKIKGKKGTKVRLEIEPAKGGKSRIITLVRDKVRIEDQAAKLTFEKVSGKNIAVIKIPSFYIGLTEDVKKLLVKLENQKAEALIVDLRENGGGALTEAVALSGLFIADGPVVQVRDAYQRIRVHEDDDATQQYKGLLFVMINRYSASASEIFAAAMQDYRRGIIIGQNTFGKGTVQQSRSLNFIYDLDQSPLGVLQYTIQKFYRINGGSTQLKGVAADINFPEIIDSKEYGEDKEDNALAWDKIPSASYMEVGNIDYIDNAVNILNEKHLARIAKDPEFVALNEELKVRNERRDRKFLSLNYKMRKAENDKDDARRLKDLNERFKREGKKALKDIDDLPKDYEVPDFFLKEAEKIAADFVIFNSDQKINQANGLSEAKTESKK

SEQ ID NO: 1153 - protein, 210 aa, Arabidopsis thaliana
  misc_feature (73)..(73): Xaa can be any naturally occurring amino acid
  misc_feature (75)..(75): Xaa can be any naturally occurring amino acid
  misc_feature (77)..(77): Xaa can be any naturally occurring amino acid
  misc_feature (85)..(85): Xaa can be any naturally occurring amino acid
  misc_feature (93)..(93): Xaa can be any naturally occurring amino acid
MLAPSDPRARGYWGECGQLGGYFEMTNLPPRVVEERDGVASIALSPNVSAQIFLSQSDYFPLLMGLMVNPPKXGXFXYGQFAREXKGVLESLXRKARLMPDGFTSCKNVVCNFTEGAMYSFPQKRLPTGALQAAKQAGKVPDVFYCLKLLEATGISPVPGSGFGQKEGVFHLRTTILPAEDKMPEIMYSFKKFNDEFMTQYDNNFGYSKM

SEQ ID NO: 1154 - protein, 394 aa, Oryza sativa
MRMEGGGGGGHGHHGGGGGGHGHHGGIGGGEAQIKGTLTHGGRYVQYNVYGNLFEVSSKYVPPIRPVGRGACGIICAVVNAQTRQEVAIKKIGNAFDNQIDAKRTLREIKLLRHMDHDNVISIKDIIRPPRRENFNDVYIVYELMDTDLHHLLRSNQPLTDDHCQYFLYQVLRGLKYVHSANVLHRDLRPSNLLLNAKCDLKIGDFGLARTTNETDFMMEYVVTRWYRAPELLLNCSEYTAAIDIWSVGCILGEIVTREPLFPGKDYVHQLRLITELIGSPDDSSLGFLRSDNARRYVRSLPQYPKQQFRARFPTMSSGAMDLLERMLVFDPSKRITVDEALCHPYLASLHEIYDEPVCPAPFSFDFEQPSLTEEDIKEIIWREALKFNPEPIH

SEQ ID NO: 1155 - protein, 220 aa, Triticum aestivum
MAQQQSLIYSFVARGTVILAEFTDFKGNFTSVAAQCLQKLPSSNNKFTYTCDGHTFSYLVEDGFTYCVVAVDSAGRQIPMAFLERVKEDFSKRYGGGKAATAQANSFNKEFGSKLKEHMQYCMDHPDEISKLAKVKAQVSEVKGVMMENIEKVLDRGEKIELLVDKTENLRSQAQDFRTTGTQMRRKMWLQNMKIKLIVLAIIVALILIIVLSVCHGFKC

SEQ ID NO: 1156 - protein, 270 aa, Trichodesmium erythraeum IMS101
MTISTSKTLSLDWSIIGFMAFLHIGALFALFPSNFSWTAVGLALLLHWVTGGLGITLGFHRMLTHRSFKTPKWLEYFFIFCGTLACEGGVCDWVGLHRIHHQHSDNEQDPHDSHRGFWWSHMGWMLHKLPMKSEISRYTKDIANDPVYKFLQANFILIQFAFGILLFFIGGWSFVVWGIFVRIVAVFHCTWLVNSATHKFGYRTYDSGDSSTNCWWVAVLTYGEGWHNNHHAFQYSARHGLKWWEIDTTWMMIQLLQAFGLATNVKLATK

SEQ ID NO: 1157 - protein, 193 aa, Triticum aestivum
  misc_feature (8)..(8): Xaa can be any naturally occurring amino acid
MEGMVKRXRGVTFSTNVSPQIENRILYAARGLFNKFIPDVHIFTDHRAGLSGGLSAGYGVSVVAETTTGCLISADATVSYPNVDEMSEQSKKPELMSPEDLGEQVASMLLEEVAQGGVVDSTHQGLLFMLCALCPPDVSKVRVGQLTPHAIESLRNIKEFLDVKFIIKPDPNSNTVTLKCVGAGVKNLARKIS

SEQ ID NO: 1158 - protein, 449 aa, Rickettsia akari str. Hartford
MLLRLIITLFFIINSICTFAEAEKETENKISNQEAYKQFQDVFERIEKDYVQVPDRQKMIDEAINGMLSSLDPHSSYYTDEDLEDIFTFTKGEFGGIGVEIMYDSGAIKIISPIDDLPAFKAGLKGGDYIVGVNDELVSTLGPNKAIKEMRGMPGTKVKLLIIKEEEAKPQELELTREIVKIKPIKAHLEKNNIAYIRITTFNESTISELKAVVKKLKTESKDNLKGIILDLRNNAGGILDQAIAVSDYFIDSGVIVTTKGRTTSSNSETKANEFSLKAPKVPMIVLINGNSASASEIVAGALQDHKRAIILGTRSFGKGSVQALTQINSRAAVKLTISKYYTPSGRSIQAEGIEPDILIEPAKVEYPEVKKIDKRFSESSLKNYLKNDNEKNKDSKKETKAKNNKQEENELSELYKKDYQFARAYDVITGLILNKKLAAKEQVKQEDK

SEQ ID NO: 1159 - protein, 609 aa, Bacillus cereus ATCC 14579
MCMCGITGWVDWKEDLSNQHVILKKMANSIEHRGPDAEGFWFSPHAAFAHRRLIVIDPEGGTQPKTFRAGDYTYALTYNGEIYNFRELKEQLQKCGHAFETHSDTEVLLHAYLEWKEDCVQHLNGIFAFALWDDQKQQLFLARDHLGVKPLFYTERNDSIIFGSEIKALLAHPSVPAEIDADGINEIFGLGLFRTPGCGVFKHIQEVRAGHSITFTRHKKVVTKYWNLESKFHTDSIEDTSSHILSILQDTVKRQLIADVPLVCMLSGGLDSSGITALAGKEFAAENKTLHTYSVDFVNSAKDFELTFARTGLDAPWVKRVSEHVGTAHHDIIVNAEELANHLFVPLHAKDLPSAGEMETSLYLLFCEMKKDATVALSGESADEVFGGYPWFHQEELLYVDKFPWLTNWKNTSPLLLNEVSNQCNLENYIDTRFQEAILEVPTLEGESKKSAKQRQMFYLFLTRFLPFLLDRKDRMSMAVGFEVRVPFCDYRLVEYLWNVPFNIKSIDNIEKGILRRALQPALPDDVRNRRKSAYPTSQDPHYLQTIRNLTLDMCSHKNNPIFSLINHSILLSIADQSNKEINNFEARSAMEYMLQVNEWLKTYHIHIA

SEQ ID NO: 1160 - protein, 493 aa, Cucumis sativus
MGFQQTHETNQVLLSKIAISDGHGEDSPYFDGWKAYDNDPFHPENNPSGVIQMGLAENQLSPDLLVDWIKKHPKASICTDEGLLNFKDIANFQDYHGLPEFRNAIASFMGKARGGRVKFDPSRIVMGGGATGASEAVIFCLADPGDAFLIPSPYYAAFDRDLQWRTRAQIIPVHCNSSNNFQITREALEVAYKKAEESNIKVKGLIITNPSNPLGTIYDRDTLKSLVNFVNDNNIHLVCDEIYCATVFKSPSFISIAEIIEEMDHCKKELIHILSSLSKDMELPGFRVGILYSYNDTVVSIARKMSSFGLVSSQTQHLLAAMLSDDEFVDNFLVENSKRLAKRHARFTKELEKMGITCLNGNAGLFVWMDLRKLLKDQSFESEMELWRVIINEVKLNVSPGSSFRVTEPGWFRVCFANMDDNTVDVALGRIHSFVGKIDKKENNTIPMPPKKKPRENKLRLSFSFSGRRYEEGNVLKSPHMMSPHSPLVRAKT

SEQ ID NO: 1161 - protein, 541 aa, Nocardia farcinica
MAKTIAYDEEARCGLERGLNSLADAVKVTLGPKGRNVVLEKKWGAPTITNDGVSIAKEIELEDPYEKIGAELVKEVAKKTDDVAGDGTTTATVLAQALVREGLRNVAAGANPLGLKRSIEKAVEAVTAKLLDTAKEVETKEQIAATAGISAGDASIGELIAEAMDKVGKEGVITVEESNTFGLQLELTEGMRFDKGYISGYFVTDPERQEAVLEDPYILLVGSKVSTVKDLLPLLEKVIQAGKPLLIIAEDVEGEALSTLVVNKIRGTFKSVAVKAPGFGDRRKAQLADIAILTGGEVISEEVGLSLETAGIELLGQARKVVVTKDETTIVEGAGDAERIKGRVAQIRTEIENSDSDYDREKLQERLAKLAGGVAVIKAGAATVVELKERKHRIEDAVRNAKAAVEEGIVAGGGVALLQAAPALDELKLTGDEATGANIVRVALSAPLKQIAFNAGLEPGVVAEKVSKLEAGHGLNADSGEYEDLLAAGVADPVKVTRSALQNAASIAALFLTTRAVVADKPEKAAAPAGDPTGGMGGMDF

SEQ ID NO: 1162 - protein, 489 aa, Cucumis sativus
MVLVSSNDNGNAKKVLSKLAKGNGHGEDSSYFDGWKAYDSDPFHPIINPRGVIQMGLAENQLSFEFVEKWMKNNPRASICSVEGIDEFKDIAIFQDYHGLPEFRNAVANFMGKVRGNRVKFDPDRVVMSGGATGAHETMAFCLADPGEAFLVPVPYYPGFDRDLRWRTGVEIVPVICESSNNFKLTREALETAYEEAQKSNIKIKGLLITNPSNPLGTVYDRQTLETAVSFINEKNIHLVCDEIYAATVFAEPGFISISEVIDNSDIECDRNLVHVVYSLSKDMGFPGFRVGIIYSYNDAVVACARKMSSFGLVSSQTQYLIASMLLDDVFVDNFLAGSAEKLAARHRNFTKGLAQVGIGYLKGSGGLFLWMDLRHLLKEKTLEAEMALWKVIINEVKLNVSPGSSFHCSEPGWFRVCFANMDDNTMDISITRIRNFVLQNKEVTTKVKKQKFCWRQSSLELRLSSRRLEDIMSPHSPLPQSPMHRATT

SEQ ID NO: 1163 - protein, 205 aa, Magnaporthe grisea
MSSRKKVLLKVIILGDSGVGKTSLMNQYVNKKFSASYKATIGADFLTREVLVDDRQVTMQLWDTAGQERIQSLGVAFYRGADCCVLVFDVNNSKSFDALDSWRDEFLIQASPRDPDNFPFVVLGNKIDVEESKRVISTKRAMTFCQSKGGIPYFETSAKEAINVEQAFEVIARNALAQEESEEFSGDFQDPINIHIDNDRDGCAC

SEQ ID NO: 1164 - protein, 481 aa, Cucumis sativus
MKMLSTKATCNSHGQDSSYFLGWEAYEKNPFDETSNPNGIIQMGLAENQLSFDLLESWLTKNPDAASFKRDGKSIFRELALFQDYHGLPAFKKALVEFMAEIRGNKVTFEANNIVLTAGATSANETLMFCLAEAGDAFLLPTPYYPGFDRDLKWRTGVEIVPIHCTSSNGFQVTQPALEQAYQEAQARNLRVKGVLVTNPSNPLGTTMTRNELDLVFDFITSKGIHLISDEIYSGTVFGSPGFVSAMEVLKERSNEDEEVWKRVHIVYSLSKDLGLPGFRVGAIYSNDEMVVAAATKMSSFGLVSSQTHYLLSAMLSDKKFTRTYISENQKRLKQRQKMLVSGLEKAGIKCLESSAGLFCWVDMRHLLESDTFECELKLWKKIVYEVGLNISPGSSCHCTEPGWFRVCFANMSQSTLKLAIRRLKSFVQELRSVSTPNVSTTTTNIHDSKFSKNIKKNIFTKWVFRQSVQDQANRKLHYER

SEQ ID NO: 1165 - protein, 278 aa, Oryza sativa
MAAAEFLSPEAAAAAGVGPVRQQQHPGEAAWRAVVGWLGFLLQILLQIVRGTPSSWAHLLSFLGLRHPLLSAAPPQPSPSPSPSVAFVRLPSEAPADASSTGPPPPLRRLTVVLDLDETLVCAYESSSLPAALRAEAVEAGLHCFDMECISAEKARYAKPLVDRIDAHNRFCHRLYRPSTVTTEYREHVKDLSCLSKDFHRIVLVDNNPYSFLLQPLNGIPCLTFSAGQPVDDQLMGVIFPLLKHLSLQNDVRPALYETFHMPEWFQRHGIPQIDQAA

SEQ ID NO: 1166 - protein, 221 aa, Prunus dulcis
MGRGKIEIKRIENTTNRQVTFCKRRNGLLKKAYELSILCDAEVALIVFSSRGRLYEYSNNNIRNTIEGYKKACSDSSGSTSITEINAQYYQQESAKLRQQIQMLQNSNRHLMGDALSTLSVKELKQLENRLERGINRIRSKKHEMLLAEIEYLQKKEIELENENVCLRTKISEVERLQQANMVGPELNAIQALASRNFFSQNMMEGGATYPQQDKKILHLG

SEQ ID NO: 1167 - protein, 460 aa, Glycine max
MEQKGGVLMQRYELGRLLGQGTFAKVYHARNIITGMSVAIKIIDKEKILKVGMIDQIKREISVMRLIRHPHVVELYEVMASKTKIYFVMEHAKGGELFNKVVKGRLKVDVARKYFQQLISAVDYCHSRGVCHRDLKPENLLLDENENLKVSDFGLSALAESKCQDGLLHTTCGTPAYVAPEVINRKGYDGIKADIWSCGVILYVLLAGHLPFQDTNLMEMYRKIGRGEFKFPKWFAPDVRRFLSRILDPNPKARISMAKIMESSWFKKGLEKPAITVTENEELAPLDADGIFEACENDGPIAEPKQEQAKPCNLNAFDIISFSTGFDLSGLFEDTFLKKETRFMSKKPASIIVLKLEEICKRLCLKVKKKDGGLLKLEGSKEGRKGTLGVDAEIFEITPHFHMVELRKSNGDTMEYQKLFKQDIRPALKDIVWTWQGEKPQQEQEQHEVVQEEHQPSHTA

SEQ ID NO: 1168 - protein, 481 aa, Arabidopsis thaliana
MESVPESVPSPNSNTPSIPPPVNSVPPFLSKTYDMVDDPLTNEVVSWSSGNNSFVVWSAPEFSKVLLPKYFKHNNFSSFVRQLNTYGFRKVDPDRWEFANEGFLRGRKQLLKSIVRRKPSHVQQNQQQTQVQSSSVGACVEVGKFGIEEEVERLKRDKNVLMQELVRLRQQQQATENQLQNVGQKVQVMEQRQQQMMSFLAKAVQSPGFLNQLVQQNNNDGNRQIPGSNKKRRLPVDEQENRGDNVANGLNRQIVRYQPSINEAAQNMLRQFLNTSTSPRYESVSNNPDSFLLGDVPSSTSVDNGNPSSRVSGVTLAEFSPNTVQSATNQVPEASLAHHPQAGLVQPNIGQSPAQGAAPADSWSPEFDLVGCETDSGECFDPIMAVLDESEGDAISPEGEGKMNELLEGVPKLPGIQDPFWEQFFSVELPAIADTDDILSGSVENNDLVLEQEPNEWTRNEQQMKYLTEQMGLLSSEAQRK

SEQ ID NO: 1169 - protein, 613 aa, Fusobacterium nucleatum subsp. vincentii ATCC 49256
MILMSGQVEQYLFHRGEYRQAYEYLGAHPTRSSTIFRIWAPSAKSVAVVGDFNDWIAREEDYCRKLNNVGLWEVEIKKVKKGFLYKYQIETSWGEKILKSDPYAFYSELRPHTASIVNGKPKFRWGDKKWLSNREIGYARPINIYEVHLGSWKKKEDGTYYNYQEIAELLVKYMLEMNYTHIEIMPIIDYPFDGSWGYQGTGYYSVTSRYGTPEDFMYFINYFHKNNLGVILDWVPGHFCKDSHGLYRFDGSACYEYEDSSLGENEWGSANFNVTRNEVRSFLLSNLYFWTKEFHIDGIRMDAVSNMLYYRDGLSENKHSVEFLQYINQSLHEEYPDVMLIAEDSSAWPLVTKYQEDGGLGFDFKWNMGWMNDTLKYMEQDPFFRKSHHGKLTFSFMYAFSENFILPLSHDEIVHGKNSILNKMPGYYENKLAHVKNLYSYQMAHPGKKLNFMGNEFVQGLEWRYYEQLEWQLLKDNKGSQDIQKYVKALNQMYLEEEALWHDGQDGFEWIEHENINENMLIFLRKTLDMQDFIIAVFNFSGKDHEKYPLGVPLEDGEYEVILDSNEKRFGGSYQGRKRKYKAIKKSWNYREQYIEIKIAKNSAIFLKYKKEK

SEQ ID NO: 1170 - protein, 728 aa, Salmonella enterica subsp. enterica serovar Typhi Ty2
MSSRIDRDVINALIAGHFADPFSVLGMHQTQAGLEVRALLPDATDVWVIEPKTGRKVGKLECLDARGFFCGVLPRRKNFFRYQLAVTWHGQQNLIDDPYRFGPLIQEMDAWLLSEGTHLRPYETLGAHADTMDGVTGTRFSVWAPNARRVSVVGQFNYWDGRRHPMRLRKESGIWELFIPGAHNGQLYKFELLDANGNLRIKADPYAFEAQMRPETASMICGLPEKVTPSEERQKANQFDAPISIYEVHLGSWRRHTDNNFWLSYRELADQLVPYAKWMGFTHLELLPVNEHPFDGSWGYQPTGLYAPTRRFGTRDDFRYFINAAHAAGLNVILDWVPGHFPSDEFSLAEFDGTHLYEHSDPREGYHQDWNTLIYNYGRREVSNYLVGNALYWMERFGIDALRVDAVASMIYRDYSRKEGEWIPNEFGGRENLEAIEFLRNTNRIIGEQVPGAVSMAEESTDFSGVTRPPETGGLGFWYKWNLGWMHDTLDYMKLDPVYRQYHHDKLTFGMLYNHTENFVLPLSHDEVVHGKKSILDRMPGDAWQKFANLRAYYGWMWAFPGKKLLFMGNEFAQGREWNHDASLDWHLLEGGDNWHHGVQRLVRDLNHTYRHHKALHELDFDAYGFEWLVVDDNERSVLIFVRRDKAGNEIIVASNFTPVPRHDYRFGINQPGRWREILNTDSMHYHGSNTGNGGVVHSDEIESHGRQHSLNLTLPPLATIWLMREGE

SEQ ID NO: 1171 - protein, 327 aa, Schizosaccharomyces pombe
MSNPDVDLDSIIDRLLEVRGSRPGRQVQLSEDEIRFLCNKAREIFISQPILLELEAPLKICGDIHGQYYDLLRLFEYGGFPPEANYLFLGDYVDRGKQSLEVICLLLAYKIKYPENFFILRGNHECASINRIYGFYDECKRRYNIKLWKTFTDCFNCLPIAAIIDEKIFTMHGGLSPDLNSMDQIQRIMRPTDVPDTGLLCDLLWSDPDKDLTGWGDNDRGVSFTFGPDVVSRFLHKHDMDLVCRAHQVVEDGYEFFSKRQLVTLFSAPNYCGEFDNAGAMMSVDESLLCSFQILKPAEKKQRYGYQGSSQNWHMTPPRKNKTGNSK

SEQ ID NO: 1172 - protein, 1129 aa, Avena sativa
MSSSRPASSSSSRNRQSSQARVLAQTTLDAELNAEYEESGDSFDYSKLVEAQRDGPPVQQGRSEKVIAYLQHIQKGKLIQTFGCLLALDEKSFNVIAFSENAPEMLTTVSHAVPSVDDPPRLGIGTNVRSLFSDQGATALHKALGFADVSLLNPILVQCKTSGKPFYAIVHRATGCLVVDFEPVKPTEFPATAAGALQSYKLAAKAISKIQSLPGGSMEVLCNTVVKEVFDLTGYDRVMAYKFHEDDHGEVFSEITKPGLEPYLGLHYPATDIPQAARLLFMKNKVRMICDCRARSIKVIEAEALPFDISLCGSALRAPHSCHLQYMENMNSIASLVMAVVVNENEEDDEAESEQPAQQQKKKKLWGLLVCHHESPRYVPFPLRYACEFLAQVFAVHVNREFELEKQLREKNILKMQTMLSDMLFREASPLTIVSGTPNIMDLVKCDGAALLYGGKVWRLRNAPTESQIHDIAFWLSDVHRDSTGLSTDSLHDAGYPGAAALGDMICGMAVAKINSKDILFWFRSHTAAEIRWGGAKNDPSDMDDSRRMHPRLSFKAFLEVVKMKSLPWSDYEMDAIHSLQLILRGTLNDASKPKREASLDNQIGDLKLDGLAELQAVTSEMVRLMETATVPILAVDGNGLVNGWNQKAAELTGLRVDDAIGRHILTLVEDSSVPVVQRMLYLALQGKEEKEVRFEVKTHGPKRDDGPVILVVNACASRDLHDHVVGVCFVAQDMTVHKLVMDKFTRVEGDYKAIIHNPNPLIPPIFGADEFGWCSEWNAAMTKLTGWNRDEVLDKMLLGEVFDSSNASCPLKNRDAFVSLCVLINSALAGEETEKAPFGFFDRSGKYIECLLSANRKENEGGLITGVFCFIHVASHELQHALQVQQASEQTSLKRLKAFSYMRHAINNPLSGMLYSRKALKNTDLNEEQMKQIHVGDNCHHQINKILADLDQDSITEKSSCLDLEMAEFLLQDVVVAAVSQVLITCQGKGIRISCNLPERFMKQSVYGDGVRLQQILSDFLFISVKFSPVGGSVEISSKLTKNSIGENLHLIDLELRIKHQGLGVPAELMAQMFEEDNKEQSEEGLSLLVSRNLLRLMNGDVRHLREAGVSTFIITAELASAPTAMGQ

SEQ ID NO: 1173 - protein, 145 aa, Brassica napus
DEERPYLPKHILYRQKEQFSDGVGYSWIDGLKAHAAENVNDKMMSNAAFIFPHNTPLTKEAYYYRMIFERFFPQNSARLTVPGGATVACSTAKAVEWDASWSNNMDPSGRAAIGVHLSAYDGSKVALPLPPHKAIDDIPMMMGQE

SEQ ID NO: 1174 - protein, 526 aa, Oryza sativa
  misc_feature (267)..(267): Xaa can be any naturally occurring amino acid
  misc_feature (348)..(348): Xaa can be any naturally occurring amino acid
  misc_feature (437)..(437): Xaa can be any naturally occurring amino acid
  misc_feature (455)..(455): Xaa can be any naturally occurring amino acid
  misc_feature (463)..(463): Xaa can be any naturally occurring amino acid
MTKPGGSVAQYCSYKDTATFLLLPPAYCLSLSLYLISCSASSSSSLPQPRSPPTHRARRRRDGRWLRRRPVPKSRAIASRRLAGLRHRSPESVVVFELVPRGAVAAWSEGPVPPRAEGRGPSPPPRATALPCAVPLVVLEPLRRRRPPGLLLLVLLVIDAPIGTASWSLKPSSGLSPIGRRHLFRILSIRIPAAVAVWRNICFARFSCVSISFYYFPERERERERERERERERERVPSISLLRQRARGNSFSPPCRGMEWDKAKASXGEAVDDRGGGEGGLGYVKVMTDEQMEVLRKQISIYATICEQLVEMHRARDAQQDSIAGMRLGNLYCDPLMVPGGHKITSKXQAWTPTPMQLQILENIFDQGNGTPSKQKIKDITAELSQHGQISETNVCGSPGCRNRHEERKQAALPNNNAESEAEADEESPTDKKPKSXRPLHQNIAMRDHNSERIXEMHHFDTXEHEQIRRMMYASNDSSSRSSGSLGQMSFYDNVMSNPRIDHFLGKVESPGSFPHMRSGESFDMY

SEQ ID NO: 1175 - protein, 1129 aa, Avena sativa
MSSSRPASSSSSRNRQSSRARVLAQTTLDAELNAEYEESGDSFDYSKLVEAQRDGPPVQQGRSEKVIAYLQHIQKGKLIQTFGCMLALDEKSFNVIAFSENAPEMLTTVSHAVPSVDDPPRLGIGTNVRSLFSDQGATALHKALGFADVSLLNPILVQCKTSGKPFYAIVHRATGCLVVDFEPVKPTEFPATAAGALQSYKLAAKAISKIQSLPGGSMEVLCNTVVKEVFDLTGYDRVMAYKFHEDDHGEVFAEITKPGLEPYLGLHYPATDIPQAARFLFMKNKVRMICDCRARSIKVIEAEALPFDISLCGSALRAPHSCHLQYMENMNSIASLVMAVVVNENEEDDEAESEQPAQQQQKKKLWGLLVCHHESPRYVPFPLRYACEFLAQVFAVHVNREFELEKQLREKSILKMQTMLSDMLFREASPLTIVSGAPNIMDLVKCDGAALLYGGKVWRLRNAPTESQIHDIAFWLSDVHRDSTGLSTDSLHDAGYPGASALGDMICGMAVAKINSKDIIFWFRSHTAAEIRWGGAKHDSSDMDDSRRMHPRLSFKAFLEVVKMKSLPWTDYEMDAIHSLQLILRGTLNDASKPKREASLDNQIGDLKLDGLAELQAVTSEMVRLMETATVPILAVDGNGLVNGWNQKAAELTGLRVDDAIGRHILTLVEESSVPVVQRMLYLALQGKEEKEVRFEVKTHGPRRDDGPVILVVNACASRDLHDHVVGVCFVAQDMTVHKLVMDKFTRVEGDYKAIIHNPNPLIPPIFGADEFGWCSEWNAAMTKLTGWNRDEVLDKMLLGEVFDSSNASCPLKNKNAFVSLCVLINSALAGEETEKAPFGFFDRSGKYIECLLSANRKENEGGLITGVFCFIHVASHELQHALQVQQASEQTSLKRLKAFSYMRHAINNPLSGMLYSRKALKNTDLNEEQMKQIHVGDNCHHQINKILADLDQDSISEKSSCLDLEMAEFVFQDVVVAAVSQVLITCQGKGIRISCNLPERFMKQSVYGDGVRLQQILSDFLFISVKFSPVGGSVEISSKLTKNSIGENLHLIDLELRIKHQGLGVPAELMEQMFEEDNKEQSDEGLGLLVSRKLLRLMNGDVRHLREAGVSTFILTAELASAPTAIGQ

SEQ ID NO: 1176 - protein, 471 aa, Diospyros kaki
MKLLSRKAACNTHGQDSSYFLGWQEYEKNPYDESHNPTGIIQMGLAENQLSFDLLESWLASNPDAAGFKRDGQSIFRELALFQDYHGLPDFKKALVEFMSEIRGNKVSFDPKKLVLTAGATSANETLMFCLADPGEAFLLPTPYYPGFDRDLKWRTGVEIVPIKCTSSNGFRITESALEEAYQAAGKRNLKVKGVLVTNPSNPLGTTLSRHELNLLLSFVTEKGIHLISDEIYSGTVFSSPGFLSVMEILMDKKYSMNTEVWKRVHIVYSLSKDLGLPGFRVGAIYSNDDVVVEAATKMSSFGLVSSQTQYLLSAMLSDKKFRKNYISENQKRLRHRQEMLISGLESAGIRCLKSNAGLFCWVDMRHLLSSETFDAEMELWKKIVYDVGLNISPGSSCHCDEPGWFRVCFANMSAATLNLAIQRIKLFVQSTAAGSKQNQSYHQSLNNSRRKSLTKWVFRLSFDGREPDER

SEQ ID NO: 1177 - protein, 495 aa, Avena sativa
MSSSRPASSSSSRNRQSSQARVLAQTTLDAELNAEYEESGDSFDYSKLVEAQRDGPPVQQGRSEKVIAYLQHIQKGKLIQTFGCLLALDEKSFNVIAFSENAPEMLTTVSHAVPSVDDPPRLGIGTNVRSLFSDQGATALHKALGFADVSLLNPILVQCKTSGKPFYAIVHRATGCLVVDFEPVKPTEFPATAAGALQSYKLAAKAISKIQSLPGGSMEMLCNTVVKEVFDLTGYDRVMAYKFHEDDHGEVFSEITKPGLEPYLGLHYPATDIPQAARFLFMKNKVRMICDCRARSIKVIEAEALPFDISLCGSALRAPHSCHLQYMENMNSIASLVMAVVVNENEEDDEAESEQPAQQQKKKKLWGLLVCHHESPRYVPFPLRYACEFLAQVFAVHVNREFELEKQLREKNILKMQTMLSDMLFREASPLTIVSGNPNIMDLVKCDGAALLYGGKVWRLRNAPTESQIHDIAFWLSDVHRDSTGLSTDSLHDAG

SEQ ID NO: 1178 - protein, 280 aa, Arabidopsis thaliana
  misc_feature (223)..(223): Xaa can be any naturally occurring amino acid
  misc_feature (237)..(237): Xaa can be any naturally occurring amino acid
MFGLAKNANVVSRVRSSVTAQLKEELKRKTERSMASNGVTNCNANANVWRFKGNGATSDAAAVTLRKLAFGMFKNCTMNSGKTILFPTPGEPSAHSNFRTCPEAEEAVAAAARSGMANSYAPSPGVFKARRAVAEYLNGELPTKLKAEDVYITGGCNQAIEIVIDSLAGNPSANILLSRPGYPHYDARAVYSGLEIRIYDLLPESDWEIILDGLEAAADENTXVAMVIINPNIPCGXNVYTYDHSHRVAEMATKLGLMIISDQVFDHVVYGDKPLFPWGS

SEQ ID NO: 1179 - protein, 488 aa, Diospyros kaki
MMNTTGSGNHHHRLLSKIATNDEHGENSLYFHGWKAYDDNPFHLTQNPNGVIQMGLAENQLSFDLIEDWMKKNQRASICTTEGVHMFKEIANFQDYHGLPEFRNAVAKFMGKVRGGRAEFDPKRIVMGGGATGANELLMFCLADPGDAFLVPSPYYPAFDRDLRWRTGVKLLPVECKSSDSFRITREALEEAYEKASESNIRVKGLIIGNPSNPLGTIMDRNTLKSLVSFVNDKNIHFVCDEIYAATVFKQPEFISVSEIIQEMDCNLDLIHVVYSLSKDMGMPGFRVGIVYSYNDEVVTCARKMSSFGLVSSQTQHLLASMLSDDEFVERFIGESSRRLENRHRTFTEGLKEVEIKCLEGNAGLFCWMDLRPLLKEATFEAETELWKVIINQVKLNVSPGSSFHCSEPGWFRVCFANMDDETVQVALQRIRTFVDEKKGAGKAAPEKKKKQWQRNLRLSFSSGRIYEDGCLSPHVLSPHSPMLRAQT

SEQ ID NO: 1180 - protein, 371 aa, Arabidopsis thaliana
MASLLTKPKPVFLCSPSLSPRTLNTATPSLNFTRISFTHHQKLAPFKPPSLVVAFSEKGLKRDVTTAAAATEGDYRRIMLSDVLVKKKEKVVWWEREWKAMDFGAVAVVLSMHLLSLLAPFQFNWRAVSVAFGLYIVTGLLGITLSFHRNLSHKAFKLPKWLEYLFAYCGAQALQGNPIDWVSTHRYHHQFCDSDRDPHSPLDGFWFSHMNWMFDTNTITQRCGEPNNVGVLEKQPFYRFLRTTYILHPLALAVALYAMGGFPFIVWGMGVRIVWVYHITWLVNSACHVWGKQAWNTGDLSKNNWWVAALAFGEGWHNNHHAFEFSARHGLEWWQLDMTWYVVKFLQAIGLATDVKLPSEAQKQRMAFTSD

SEQ ID NO: 1181 - protein, 737 aa, Clostridium thermocellum ATCC 27405
MNTTANIDEVYKVINAEHHDPFSVLGMHRLESENAMVVRAYLPNAKEIEVVELSKNNTYPMEKIDERGFFEVVIKDRNDFFKYNLRATDYVGNTFTFYDPYCFMPVISDYDLYLFNEGNHHKIYEKLGTHRMTIDGVEGTLFAVWAPCAKRVSVVGNFNQWDGRRHQMRVRGSSGVWELFIPGVGEGELYKYEIKTPHNEIYIKADPYAFYSELRPNTASIVYDIEGYEWHDADWMRERDSSNSFDKPISIYEVHLGSWKRVSNDENGFYSYRELADMLVEYVKYMGYTHIELLPIAEHPFDGSWGYQVTGYYAATSRYGQPKDFMYFVDKCHQNGIGVIIDWVPAHFPKDGHGLARFDGTALYEHYDPKQGEHPDWGTHIFNYGRNEVKNFLIANAMFWFDKYHIDGLRVDAVASMLYLDYGKKDGEWIPNRWGGKENVDAIEFMRQLNSTVFQYFPGVMMIAEESTAWALVTKPPYTGGLGFSYKWNMGWMNDFLRYMSMDSVYRKYHQNLITFSLMYAFSENFILVLSHDEVVHGKCSMINKMPGDYWQKFAGLRASYGYLYGHPGKKLLFMGGEFAQFIEWNYKQSLDWFLLDYDMHKKMQDYVRDLNKLYRSEKALYEVDFHYDGFEWIDCNDTEHSIISFMRKGKDWHNSLIFVCNFTPVPHEDYRIGSPFNTTYDEIFNSDWEKYGGSNVGNFEPIKAEEISMHNKPYSMRLRIPPLATIVLKPRFDRKD

SEQ ID NO: 1182 - protein, 544 aa, Sinorhizobium meliloti 1021
MSAKQIVFSTDARDRLLRGVELLNNAVKVTLGPKGRNVVIDKSYGAPRITKDGVSVAKEIELEDKFENMGAQMVRAVASKTNDLAGDGTTTATVLAASIFREGAKLVSVGMNPMDLKRGIDLGVAAVLAEIKARATKVISSSEIAQVGTIAANGDAGVGEMIARAMEKVGNEGVITVEEARTADTELDVVEGMQFDRGYLSPYFVTNAEKMRVELEDPYILIHEKKLGSLQAMLPILEAAVQSGKPLLIISEDVEGEVLATLVVNRLRGGLKIAAVKTPGFGDRRKAMLEDIAVLTAGQMISEDLGIKLENVTLDMLGRARRVLIEKDTTTIIDGSGDKASIQARVSQIKAQIEETASDYDKEKLQERLAKLAGGVAVIRVGGATELEVKEKKDRIDDALNATRAAVEEGIVPGGGVALLRAKSALVGLTDDNADVTAGISIVRRALEAPIRQIADNAGVEGSIVVGKLVDGRDHNQGFDAQTETYVDMIKAGIVDPAKVVRTALRDAGSIASLLITAEAMIADIPERGSPQSTGNGAVDSMGY

SEQ ID NO: 1183 - protein, 513 aa, Oryza sativa (japonica cultivar-group)
MVLSHGVSGSDESVHSTFASRYVRTSLPRHARSPLSRAPLAPIDSVIDWEFRMPEQSIPKEAAYQIINDELMLDGNPRLNLASFVTTWMEPECDKLIQASVNKNYVDMDEYPVTTELQNRCVNMIAHLFNAPLGDSETAVGVGTVGSSEAIMLAGLAFKRRWQNKMKAAGKPCDKPNIVTGANVQVCWEKFARYFEVELKEVKLSDGYYVMDPAKAVDMVDENTICVAAILGSTLNGEFEDVKLLNDLLTKKNAETGWDTPIHVDAASGGFIAPFLYPELEWDFRLPLVKSINVSGHKYGLVYAGIGWCIWRSKEDLPEELIFHINYLGADQPTFTLNFSKGSSQVIAQYYQLIRLGFEGYKNIMENCQENAMVLKQGLEKTGRFNIVSKDNGVPLVAFSLKDSARHNEFEISDFLRRFGWIVPAYTMPPDAQHVTVLRVVIREDFSRTLAERLVLDVEKVLHELDALPARVVANGGDAAAASASEREMEKQREVISLWKRAVLAKKKTNGVC

SEQ ID NO: 1184 - protein, 545 aa, Sodalis glossinidius
MAAKDVKFGNDARVKMLRGVNVLADAVKVTLGPKGRNVVLDKSFGAPVITKDGVSVAREIELEDKFENMGAQMVKEVASKANDAAGDGTTTATVLAQSIVNEGLKAVAAGMNPMDLKRGIDKAVIAAVEELKKLSVPCSDSKAIAQVGTISANADETVGTLIAEAMAKVGKEGVITVEEGSGLQDELDVVEGMQFDRGYLSPYFVNKPETGAVELESPFILLADKKISNIREMLPVLEAVAKAGKPLLIIAEDVEGEALATLVVNTMRGIVKIAAVKAPGFGDRRKAMLQDIAILTAGTVISEEIGLELEKATLEDMGQAKRVVITKDTTTIIDGEGDKALIDSRVTQINQQRDEATSDYDREKLQERVAKLAGGVAVIKVGAATEVEMKEKKARVEDALHATRAAVEEGVVAGGGVALIRVANRIAELRGDNEDQNVGIKVARRAMEAPLRQIVANAGEEPSVIANKVKAGEGNTGYNAATEEYGNMIDMGILDPTKVTRSALQYAASIAGLMITTECMVTDLPKEDKPDLGGAGGMGGMGGMM

SEQ ID NO: 1185 - protein, 157 aa, Rhodopirellula baltica SH 1
MTQVSDNELLFQSLCIGAIELPHRIVMAPLTRARSTDRVPNELMEEYYYQRSSAALIISGATAISEQGYGWHGAPGIYTAEQVEGWKRISDAVHASGGRIFLQLWHMGRVSHPDYQSGQLTVGPSPIAATGEAHTPHWQEAACRSSGHEYIGNCKRH

SEQ ID NO: 1186 - protein, 739 aa, Mangifera indica
MESCNCIEPQWPADELLMKYQYISDFFIALAYFSIPLELIYFVKKSAVFPYRWVLVQFGAFIVLCGATHLINLWTFSMHSRTVAIVMTTAKVFTAAVSCATALMLVHIIPDLLSVKTRELFLKNKAAELDREMGLIRTHEETGRHVRMLTHEIRSTLDRHTILKTTLVELGRTLALEECALWMPTQTGLELQLSYTLHQQNPVGYTVPIQLPVISQVFTSNHAVKISPNCPVARLRPLAGKYMPGEVVAVRVPLLHLLNFQINDWPELSTKRYALMVLMLPSDSARQWHVHELELVEVVADQVAVALSHAAILEESMRARDLLVVQNIALDRARREAETAICARNDFLSVMNHEMRTPMHAIIALSSLLQETELTPEQRLMVETILKSGNLLATLINDVLDLSRLEDGSLQLQLGTFNLHAVFKEVLNLIKPIASVKKLLVALNLAPDLPEYAVGDEKRFMQTLLNVVGNAVKFTKEGNILITAFVAKSESFLDSRTPEFFPVPSDNHFYLRVQVKDSGSGISPQDIPKLFTKFAQNQSIATRNSHGSGLGLAICKRFVNLMEGHIWIESEGLGKGCTAVFVVKLGIPESSNESKLSFMPKMSGPQTNFTGLKVLVLDDNGVSRSVTKGLLVHPGCDVMTVGSSEECLHVVSQEHKVVFMDVGIPGIDGYEVAVHIHQKFTRRHERPLIVALTGNTDKITKENCMSVGMDGVILKPISLEKMRSVLLGLLEHRVLFEAI

SEQ ID NO: 1187 - protein, 246 aa, Prunus dulcis
MGRGRVELKRIENKINRQVTFAKRRNGLLKKAYELSILCDAEVALIIFSNRGKLYEFCSSSSSILKTLERYQKCSYGQVEVNKPAKELEQSSYREYLKLKGRFESLQRTQRNLLGEDLGPLNTKELEQLERQLESSLKQVRSTKTQYMLDQLSDLQNKEQMLIEANRDLSLKLDDISSRNQIRQSWEGGNQGGMAYGSQHAQSQGFFQPLDCNPTLQIGYSNVGSEQMSATTHAQQVNGFIPGWML

SEQ ID NO: 1188 - protein, 441 aa, Cryptococcus neoformans var. neoformans
MDNTPRHLFQTPNNVYILQQPWQFVKELGQGAYGCVSSARNSSTGETCAVKKVTNVFQKKILTKRCLRELRLLHHFRGHKNITCLYDMDIVFDPPGSGQFREVYLYEELMEADLHAIIRSGQPLSDAHFQSFLYQTLCGLKYIHSANVLHRDLKPGNLLVNADCELKICDFGLARGFQPGAVQTDQGQAGFMTEYVATRWYRAPEIMLSFANYTSSIDMWSVGCILAELLGGKPIFKGEDYVDQLNKILNLLGTPTEDTLRRVGSPRAQDYIRSLPIKPRVKFGTLYPNASPLALDLLSKLLTFDPAKRYGCEEALEHPYLAVWHDPADEPLCEVPFDFSFEEEDSVSGMRDLILEEVRSFRYLVRQQTMPPVRKDSHELPPAPPAPQHPGAGVGPAFHEKRTAKAIWRNILGLHWRNSWRGRNYHRIIFVESVTVIGKHR

SEQ ID NO: 1189 - protein, 470 aa, Staphylococcus epidermidis ATCC 12228
MTKKLPDDFIFGGATAAYQAEGATQTDGKGRVAWDTYLEENYWYTAEPASDFYNRYPVDLELSERFGVNGIRISIAWSRIFPKGYGEVNQKGVEYYHNLFKECHKRHVEPFVTLHHFDTPEVLHKDGDFLNRKTIDYFVDYAEFCFKEFPEVKYWTTFNEIGPIGDGQYLVGKFPPGIKYDFEKVFQSHHNMMVAHARAVKLFKDENYKGEIGVVHALPTKYPYDPSNPEDVRAAELEDIIHNKFILDATYLGKYSRETMEGVQHILSVNGGQLEISDEDYKILDEAKDLNDFLGINYYMSDWMRGFEGESEITHNATGDKGGSKYQLKGVGQREFDVDVPRTDWDWMIYPQGLYDQIMRVVKDYPNYHKIYITENGLGYKDVFDEKEKTVHDDARIDYIKQHLSVIADAIADGANVKGYFLWSLMDVFSWSNGYEKRYGLFYVDFETQERFPKKSAYWYKELAESKEIK

SEQ ID NO: 1190 - protein, 450 aa, Bartonella sp. NVH1
IAGDGTTTATVLGQAIVQEGVKAVAAGMNPMDLKRGIDAAVEEVVANLFKKAKKIQTSAEIAQVGTISANGAEEIGKMIADAMEKVGNEGVITVEEAKTAETELEVVEGMQFDRGYLSPYFVTNAEKMVADIDDPYILIHEKKLSNLQSLLPVLEAVVQSGKPLLIIAEDVEGEALATLVVNKLRGGLKIAAVKAPGFGDRRKAMLEDIAILTSGQVISEDVGIKLENVTLDMLGRAKKVNISKENTTIIDGAGQKAEINARVNQIKAQIEETTSDYDREKLQERLAKLAGGVAVIRVGGATEVEVKEKKDRVDDALNATRAAVEEGIVAGGGTALLRAANALTVKGNNPDQEAGINIVRRALQAPARQIATNAGEEAAIIVGKVLENNADTFGYNTATGEFGDLIALGIVDPVKVVRSALQNAASIASLLITTDAMVASKKDTPMPPMP

SEQ ID NO: 1191 - protein, 364 aa, Chromobacterium violaceum ATCC 12472
MNADKLLTPLTMGAVALSNRVVMAPLTRLRNIEPGDVPGPLAKEYYRQRASAGLIVAEGTHISPTAKGYAGAPGIYSEEQVRAWSEVTGAVHQDGGKIALQLWHTGRISHRSLQPNGDAPVGPSAIQADSRTNIRAADGSLVREQCDTPRALEIEEIEDIIEDYRRAADNARRAGFDMVEIHGAHGYLIDQFLSPAANVRTDQYGGSVENRARFLLEVVDAVVAEWDADHVGIRISPLGIFNGVSNTDQLDMALYLAEQLAKRKLAFLHISEPDWAGGPTLDDGFRAELRQRYPGVIIGAGGYSAEKAETLLKKGFIDAAAFGRSYIANPDLVERLKQNAPLNPPKPDTFYGGGAEGYTDYPTL

SEQ ID NO: 1192 - protein, 319 aa, Acetabularia peniculus
MDESTVDDVIERLLEVRNNRPGKQVQLTESEIRLLCLTSKEILSEQPNLLELEAPIKICGDIHGQYTDLLRLFEYGGFPPEANYLFLGDYVDRGKQSLETICLLLAFKIKYPENFFILRGNHECASINRIYGFYDECKRRYNIRLWKTFTDCFNCLPVAAIVDEKILCMHGGLSPELKTLEQIRRIPRPTDVPDTGLLCDLLWADPDKDVQGWGENDRGVSYTFGPDTVTEFLQRHDLDLVCRAHQVVEDGYEFFAKRQLVTLFSAPNYCGEFDNAGALMSVDDTLMCSFQILKPSEKKGKFMQGGNSLAGAGRGTPRR

SEQ ID NO: 1193 - protein, 121 aa, Oryza sativa
AKPLVDRIHAHNRFCRRLYRPSTVTTEYREHVKDLSCLSKDFHRIVLVDNNPYSFLLQPLNGIPCLTFSAGQPVDDQLMGVIFPLLKHLSLQNDVRPALYETFHMPEWFQRHGIPQIDQAA

SEQ ID NO: 1194 - protein, 436 aa, Bartonella weissi
IAGDGTTTATVLGQAIVQEGIKAVAAGMNPMDLKRGIDSAVAEVVESLFKKAKKIQTSAEIAQVGTISANGASEIGKIIADAMEKVGNEGVITVEEAKTAETELEVVEGMQFDRGYLSPYFVTNAEKMVADLDDPYILIHEKKLSNLQSLLPVLEAVVQSGKPLLIIAEDVEGEALATLVVNKLRGGLKIFCAVKAPGFGDRRKAMLEDIAILTSGQVISEDVGIKLENVTLDMLGRAKKVHISKENTTIVDGSGQKAQISARVSQIKAQIEETTSDYDREKLQERLAKLAGGVAVIRVGGATEVEVKEKKDRVDDALNATRAAVEEGIVAGGGTALLRAANALTVKGNNADQEAGINIVRRALQAPARQIATNAGEEAAIIVGKVLENSSDTFGYNTATGQFGDLISLGIVDPVKVVRSALQNAASIASLLITTE

SEQ ID NO: 1195 - protein, 319 aa, Acetabularia peniculus
MEESAVDDVIERLLEVRNNRPGKQVNLAEGEIRQLCLTAKDVFMSQPNLLELEAPIKICGDIHGQYTDLLRLFEYGGFPPEANYLFLGDYVDRGKQSLETICLLLAFKVKYPKNFFLLRGNHECASINRIYGFYDVCKRRYNIRLWKTFTDCFNCLPACALVDEKIICMHGGLSPELKSLDAIRHIPRPTDVPDTGLLCDLLWSDPDKDVAGWGENDRGVSYTFGPDTVTGFLQKHDLDLICRAHQVVEDGYEFFAKRQLVTLFSAPNYCGEFDNAGALMSVDDTLMCSFQILKPSEKKGKLLYGSGALAGPGRGTPRR

SEQ ID NO: 1196 - protein, 274 aa, Cryptococcus neoformans var. neoformans JEC21
MLTPSARISAPRFSRQLSTSLISKMKVLPYKARSDNWMYLIIDSSNEAAVVDPYDANKISGAVKEQRANVTSLITTHHHADHSGGNSKFLSLHPNLKVYAGSTQSPGTNTVVKDGDTFTLGQDITVKCLHTPCHTQDSICFFLEDKKTGQRGVFTGDTLFLAGCGRFFEGTPEEMHAALTKLSNLPEDTIVYNGHEYTKGSAKFGLTIEPDNQHLKELLKKAENDSCTTGKSTIGDEKNWNVFMRLDTPQAKQATGKTEAVEIMGRLREMKNAM

SEQ ID NO: 1197 - protein, 1081 aa, Candida albicans
MNPTKKPRLSPMQPSVFEILNDPELYSQHCHSLRETLLDHFNHQATLIDTYEHELEKSKNANKAFQQALSEIGTVVISVAMGDLSKKVEIHTVENDPEILKVKITINTMMDQLQTFANEVTKVATEVANGELGGQAKNDGSVGIWRSLTDNVNIMALNLTNQVREIADVTRAVAKGDLSRKINVHAQGEILQLQRTINTMVDQLRTFAFEVSKVARDVGVLGILGGQALIENVEGIWEELTDNVNAMALNLTTQVRNIANVTTAVAKGDLSKKVTADCKGEILDLKLTINQMVDRLQNFALAVTTLSREVGTLGIWGGQANVQDVEGAWKQVTENVNLMATNLTNQVRSIATVTTAVAHGDLSQKIDVHAQGEILQLKNTINKMVDSLQLFASEVSKVAQDVGINGKLGIQAQVSDVDGLWKEITSNVNTMASNLTSQVRAFAQITAAATDGDFTRFITVEASGEMDALKTKINQMVFNLRESLQRNTAAREAAELANSAKSEFLANMSHEIRTPLNGIIGMTQLSLDTELTQYQREMLSIVHNLANSLLTIIDDILDISKIEANRMTVEQIDFSLRGTVFGALKTLAVKAIEKNLDLTYQCDSSFPDNLIGDSFRLRQVILNLAGNAIKFTKEGKVSVSVKKSDKMVLDSKLLLEVCVSDTGIGIEKDKLGLIFDTFCQADGSTTRKFGGTGLGLSISKQLIHLMGGEIWVTSEYGSGSNFYFTVCVSPSNIRYTRQTEQLLPFSSHYVLFVSTEHTQEELDVLRDGIIELGLIPIIVRNIEDATLTEPVKYDIIMIDSIEIAKKLRLLSEVKYIPLVLVHHSIPQLNMRVCIDLGISSYANTPCSITDLASAIIPALESRSISQNSDESVRYKILLAEDNLVNQKLAVRILEKQGHSVEVVENGLEAYEAIKRNKYDVVLMDVQMPVMGGFEATEKIRQWEKKSNPIDSLTFRTPIIALTAHAMLGDREKSLAKGMDDYVSKPLKPKLLMQTINKCIHNINQLKELSRNSRGSDFAKKMTRNTPGSTTRQGSDEGSVEDMIGDTPRQGSVEGGGTSSRPVQRRSATEGSITTISEQIDR

SEQ ID NO: 1198 - protein, 1298 aa, Neurospora crassa
MTDGPTLAAIAALVKSLAVDPATTQTSGLRPSTHVRLPGPYTREKGDLERELSALVVRIEQLETAAIAASPPAMPDTPNAPTDALFSNGTLSPSSETPDARYPAPLPRNGFIDEALEGLREHVDDQSKLLDSQRQELAGVNAQLIEQKQLQEKALAIIEQERVATLERELWKHQKANEAFQKALREIGEIVTAVARGDLSKKVRMNSVEMDPEITTFKRTINTMMDQLQVFSSEVSRVAREVGTEGILGGQAQIEGVDGTWKELTDNVNVMAQNLTDQVREIASVTTAVAHGDLTKKIERPAKGEILQLQQTINTMVDQLRTFASEVTRVARDVGTEGILGGQADVEGVQGMWNELTVNVNAMANNLTTQVRDIIKVTTAVAKGDLTQKVQAECRGEIFELKKTINSMVDQLQQFAREVTKIAREVGTEGRLGGQATVHDVQGTWRDLTENVNGMAMNLTTQVREIAKVTTAVAKGDLTKKIGVEVQGEILDLKNTINTMVDRLGTFAFEVSKVAREVGTDGTLGGQAQVDNVEGKWKDLTENVNTMASNLTSQVRGISTVTQAIANGDMSRKIEVEAKGEILILKETINNMVDRLSIFCNEVQRVAKDVGVDGIMGGQADVAGLKGRWKEITTDVNTMANNLTAQVRAFGDITNAATDGDFTKLVEVEASGEMDELKKKINQMVYNLRDSIQRNTQAREAAELANKTKSEFLANMSHEIRTPMNGIIGMTQLTLDTDLTQYQREMLNIVNSLANSLLTIIDDILDLSKIEARRMVIEEIPYTLRGTVFNALKTLAVKANEKFLDLTYRVDHSVPDHVVGDSFRLRQIILNLVGNAIKFTEHGEVSLTIQKASSVQCSTEEYAIEFVVSDTGIGIPADKLDLIFDTFQQADGSMTRKFGGTGLGLSISKRLVNLMGGDVWVKSEYGKGSKFFFTCVVRLANDDISLIAKQLNPYKSHQVLFIDKGRTGHGPEIAKMLHGLGLVPIVVDSERNPALEKARAAGQAPYDVIIVDSIEDARRLRSVDDFKYLPIVLLAPVVHVSLKSCLDLGITSYMTTPCQLIDLGNGMVPALENRATPSLADNTKSFEILLAEDNTVNQRLAVKILEKYHHVVTVVGNGEEAVEAVKRKKFDVILMDVQMPIMGGFEATAKIREYERSLGSQRTPIIALTAHAMMGDREKCIQAQMDEYLSKPLQQNHLIQTILKCATLGGQLLEKNRERELTRAADAVTGGRRDNGMYSASQAAQHAALRPPLATRGLTAADSLVSGLESPSIVTADKEDPLSRARASLSEPNIHKAS

SEQ ID NO: 1199 - protein, 554 aa, Vibrio parahaemolyticus RIMD 2210633
MCSVFGILDIKSDAAALRPIALEMSKKLRHRGPDWSGIYSSERAILAHERLAIVGLNSGAQPLYSPDKKLILAVNGEIYNHKEIRARYEGKYEFQTDSDCEVILALYQDMGADLLEELNGIFAFVLYDEEKDEYLVGRDHIGIIPLYQGYDEHGNYYVASEMKALVPVCKTVSEFPPGSHYSSKDAEPQRYYIRDWNEYAAVQGNSTSKEELTEALEAAVKRQLMTDVPYGVLLSGGLDSSITSAVAKRYAAMRIEDDEKSEAWWPQLHSFAVGLEGAPDLKAAREVAEKIGTVHHEMTYTIQEGLDAIRDVIYHIETYDVTTIRASTPMFLMGRKIKAMGIKMVLSGEGADEIFGGYLYFHKAPNAKEFHEETVRKLLALNMFDCARANKSLAAWGVEGRVPFLDKEFIDVAMRLNPADKMCGNGKMEKHILRECFEHYLPDSIAWRQKEQFSDGVGYSWIDTLKAVAEEKVTDQQMETAQYRFPYNTPTTKEGYVYREIFEELFPLPSAAECVPGGPSVACSSAKAIEWDESFKNCVDPSGRAVQTVHNDAY

SEQ ID NO: 1200 - protein, 224 aa, Cycas edentata
MGRGKIEIKRIENTTNRQVTFCKRRNGLLKKAYELSVLCDAEVALIVFSSRGRLYEFANNSVKRTIERYKKTCADNTQGGAISESNSQYWQQEAGKLRQQIDILQNANRHLMGDALTSLSVKELKQLEIRLERGLSRVRSKKNEMLLEEIEIMQRREHILLAENQFLRTKIAEYESNQNTNVLIPGPEFDALPAFDSRNFLHANLIEAAAHHYTQQDQAALQLG

SEQ ID NO: 1201 - protein, 296 aa, Escherichia coli
MSYYHHHHHHLESTSLYKKAGLANPTVIKLQDGNVMPQLGLGVWQASNEEVITAIQKALEVGYRSIDTAAAYKNEEGVGKALKNASVNREELFITTKLWNDDHKRPREALLDSLKKLQLDYIDLYLMHWPVPAIDHYVEAWKGMIELQKEGLIKSIGVCNFQIHHLQRLIDETGVTPVINQIELHPLMQQRQLHAWNATHKIQTESWSPLAQGGKGVFDQKVIRDLADKYGKTPAQIVIRWHLDSGLVVIPKSVTPSRIAENFDVWDFRLDKDELGEIAKLDQGKRLGPDPDQFGG

SEQ ID NO: 1202 - protein, 671 aa, Gibberella zeae PH-1
MCGISAFITHPGHSRSPVLNGDAKQVVEELETSLDLIAHRGPDARGRWFSDNHHVGLGHVRLSIIDLSPSGNQPFHDEQGGIHAVVNGELYDYERYKAQLADEFKFVGNSDCEIVIALYKHYGLSFISHLRGEFAFVLWDENRQQLIAARDRYGIKSLYYTVHQNKLLVATEIKSFLAFGLEPEWCVRSLRDQSWRVDSTTFFEGVYKVRPGHYLICRPNEREEQHPYWDLEYPDKFAKDLRSEDEITEGVRERLLEAVRIRLKADVPVAVYLSGGIDSSSVAGMVSHLIKQGTKLGNETSLLPSSMKCYTVQFDEGSGADESAIARRTADFLGVDIHLVKMDEEALVSRFEDTTWYSEVPLPDLNGMGRLALAEAVHAQGIKAVITGEGSDEHFGGYDAFRADSLSEPDHSWPAMMTDTERQEAHALASKEAQYGIFGDFTPKVPISTKRMFYSNHVASSIARVGSLPFSDWTKVYGNSIPETTMIEGFDGRVRDNILKRWHPVHTAQYMFVKTFMPHFILRYNGDNIDMVHQVESRCPFLDHHLTEYVNNVPPSLKMRYNAKDKSWREKHILREAVKPFVTDEVYNMSKKAYMGPRKFWPGGPLHKKISELVTKANVENLGFVDWQATQDAMDGAFNKQEGLALRRIITVAQFVVLGQRFGVKRASGRR

SEQ ID NO: 1203 - protein, 383 aa, Triticum aestivum
HLYDPISLVRDDKIKNELLGLGISMQSFNGDLLYEPWQVYDENGLAFTTFNMYWEKCMKLHIEISSSLAPWRLVPVSGIENICSSSIDDLGLESSKDEESSNALLSRAWSPGWRNAEKTLEDFVSHGLLDYSKDGMKVAGTTTSLLSPYLHHGEVSVRKVYQLVRMQQIKWENEGKSGAGESVNLFLLSIGLREYSRYLCFNFPFTHERSLLGNLKHYPWRADEDRFKSWRQGMTGYPLVDAGMRELWATGWTHNRIRVIVSSFAVKFLQIPWTWGMKYFWDVLLDADIESDILGWQYISGSLPDGHELGRLDNPEVQGQKYDPDGEYVRTWIPELARMPGEWIHHPWDAPSSILEVAGVELGFNYPMPIVELHTARECLDDV

SEQ ID NO: 1204 - protein, 512 aa, Arabidopsis thaliana
MCGILAVLGCSDDSQAKRVRVLELSRRLRHRGPDWSGLYQNGDNYLAHQRLAVIDPASGDQPLFNEDKTIVVTVNGEIYNHEELRKRLKNHKFRTGSDCEVIAHLYEEYGVDFVDMLDGIFSFVLLDTRDNSFMVARDAIGVTSLYIGWGLDGSVWISSEMKGLNDDCEHFETFPPGHFYSSKLGGFKQWYNPPWFNESVPSTPYEPLAIRRAFENAVIKRLMTDVPFGVLLSGGLDSSLVASITARHLAGTKAAKQWGPQLHSFCVGLEGSPDLKAGKEVAEYLGTVHHEFHFSVQDGIDAIEDVIYHVETYDVTTIRASTPMFLMSRKIKSLGVKMVLSGEGADEIFGGYLYFHKAPNKKEFHQETCRKIKALHKYDCLRANKSTSAFGLEARVPFLDKDFINTAMSLDPESKMIKPEEGRIEKWVLRRAFDDEERPYLPKHILYRQKEQFSDGVGYSWIDGLKDHAAQNVNDKMMSNAGHIFPHNTPNTKEAYYYRMIFERFFPQVRVL

SEQ ID NO: 1205 - protein, 584 aa, Phaseolus vulgaris
MCGILAVLGCSDHSRAKRVRVLELSRRLKHRGPDWSGLHQHGDCFLAHQRLAIVDPASGDQPLFNEDKSVIVTVNGEIYNHEELRKQLPGHKFRTGSDCDVIAHLYEEHGEGFVDMLDGIFSFVLLDTRDNSFIVARDAIGVTSLYIGWGLDGSVWISSEMKGLNDDCEHFECFPPGHLYSSKDRGFRRWYNPPWFSEAIPSAPYDPLVLRRAFEQAVIKRLMTGVPFGVLLSGGLDSSLVASITSRYLANTKAAEQWGSKLHSFCVGLEGSPDLKAAKEVADYLGTVHHEFHFTVQDGIDAIEDVIYHVETYDVTTIRASTPMFLMSRKIKSLGVKWVISGEGSDEIFGGYLYFHKAPNKEEFHRETCRKIKALHQYDCLRANKSTFAWGLEARVPFLDKEFINAAMNIDPEHKMIKRDEGRIEKWILRRAFDDEDQPYLPKHILYRQKEQFSDGVGYSWIDGLKAHAAKHVTDKMMLNAGNIYPHNTPVTKEAYYYRMIFERFFPQNSARLTVPGGASVACSTAKAVEWDAAWSNNLDPSGRAALGVHISAYENQNNLANKGVEIEKIIPMDAAPLGVAIQS

SEQ ID NO: 1206 - protein, 211 aa, Aquifex aeolicus VF5
MIIKVIPVGPIAVNCSVVADEKSGEAIIIDPGAEAEKILEAVKDFKVVGIVATHGHIDHVGQVGKLKELFDVPFYMNPLDKFLINDEIWSGFASYIGAVPCPEPDVEISEGDVIRVGDVEFKVLHTPGHTPGLCCLYEEKRRVLIAGDLLFKGSVGRWDLPGGNLVELKKSVKRVLTELPQDTLVICGHYDETTIGQERAFNPFAGELLNG

SEQ ID NO: 1207 - protein, 95 aa, Fagopyrum tataricum subsp. potanini
GRLYEYANHSVKATIDRYKKACSDSAGVTSVAEANAQYYQQEAAKLRNQIRTLQNNSRNLSRHMMGEGLSSLSMKDLKNLETRLEKGISGIRAKK

SEQ ID NO: 1208 - protein, 141 aa, Brassica napus
  misc_feature (136)..(136): Xaa can be any naturally occurring amino acid
MEEKKEESKNKNVKKANLLDHNSIKHILDESVSDIVTSRGYKEDVRLSNLKLFLGAIIIVVALVAQFYNKKFPENRDYLIGCIALYVVLNGVLQLILYTKEKNAILFTYPPEGSFTSTGLVVSSKLPRFSDEYTLXIDSAD

SEQ ID NO: 1209 - protein, 492 aa, Arabidopsis thaliana
MDPYKYRPSSAYNAPFYTTNGGAPVSNNISSLTIGERGPVLLEDYHLIEKVANFTRERIPERVVHARGISAKGFFEVTHDISNLTCADFLRAPGVQTPVIVRFSTVVHGRASPETMRDIRGFAVKFYTREGNFDLVGNNTPVFFIRDGIQFPDVVHALKPNRKTNIQEYWRILDYMSHLPESLLTWCWMFDDVGIPQDYRHMEGFGVHTYTLIAKSGKVLFVKFHWKPTCGIKNLTDEEAKVVGGANHSHATKDLHDAIASGNYPEWKLFIQTMDPADEDKFDFDPLDVTKIWPEDILPLQPVGRLVLNRTIDNFFNETEQLAFNPGLVVPGIYYSDDKLLQCRIFAYGDTQRHRLGPNYLQLPVNAPKCAHHNNHHEGFMNFMHRDEEINYYPSKFDPVRCAEKVPTPTNSYTGIRTKCVIKKENNFKQAGDRYRSWAPDRQDRFVKRWVEILSEARLTHEIRGIWTSYWLKADRSLGQKLASRLNVRPSM

SEQ ID NO: 1210 - protein, 95 aa, Fagopyrum homotropicum
GRLYEYANHSVKATIDRYKKACSDSAGVTSVAEANAQYYQQEAAKLRNQIRTLQNNSRNLSRHMMGEGLSNLSMKDLKNLETRLEKGISRIRAKK

SEQ ID NO: 1211 - protein, 349 aa, Thermus thermophilus HB27
MGLLFTPLELRGLRLKNRLAMSPMCQYSATEGGEVTDWHLLHYPTRALGGVGLVIVEATAVLPEGRISPFDLGIWSEDHLPGLRELARRIREAGAVPGIQLAHAGRKAGTARPWEGGRPLGWKVVGPSPLPFAEGYPVPEALDEAGMARVLEAFVEGAKRALRAGFLVVELHMAHGYLLSSFLSPLANRREDAYGGSRENRMRFPLEVARAVREAIPPELLLFVRVSATDWAEGGWGLEDTLAFAERLKALGVDLLDLSSGGVVPGVRVPVAPGFQVPFADAVRKRVGMPTGAVGLLTTPEQAETVLQAGSADLVLLGRVLLRDPYFPLKAAKALGAEAPVPPQYQRAF

SEQ ID NO: 1212 - protein, 493 aa, Zea mays
VRRSGSSSSLATAMDPYKHARRAPSTPVLDHNSAPRVEQRQLLTVGARGPILLEDLVVEKLANFDRERIPERVVHRCGASAKGFFEVTHDITTDVADSAGRTAGMQAVIAVSLNCVALALRYHDGSPETLGPRVASVYTGGNWTVETLPSLIRDGIKSGHVHALKPNPRTHIQDNWRILDFFSHHPESLHMFSFLFDDSGIPADVRPHGGSGVHTYTLVSRAGTVTYVKFHWRPTCGVRSLMDDEAVAVGAQPQPRTKDLTDAIAAGNFPEWTLYIQTMDPEMEDRLQHLDPLDVTKTWPEDVPLEPVGRLVLNRNIDNFFAENEQLAFSPGLIVPGIYYSDDKLLQTRIFSYSDTQRHRLGPNYLLLPANAPKCAHHNNHYDGSMNFMHRTEEVDYFPSRYDAVRNAPRYPIPTAHIAGRREKTVISKENNFKQPGERYRAMDPARQERFITNGSTLEIPGYRARIRNHGHSCFLCEIVIRSQFHTTYEPEA

SEQ ID NO: 1213 - protein, 251 aa, Arabidopsis thaliana
MVNATVARNIAGICGNVISLFLFLSPIPTFITIYKKKKVEEYKADPYLATVLNCALWVFYGLPMVQPDSLLVITINGTGLAIELVYLAIFFFFSPTSRKVKVGLWLIGEMVFVGIVATCTLLLFHTHNQRSSFVGIFCVIFVSLMYIAPLTIMSKVIKTKSVKYMPFSLSLANFLNGVVWVIYALIKFDLFILIGNGLGTVSGAVQLILYACYYKTTPKDDEDEEDEENLSKVNSQLQLSGNSGQAKRVSA

SEQ ID NO: 1214 - protein, 189 aa, Zea mays
MAITHDDYVSLCLMALAAAGGGGHAAAASARTTTTMTTQECELRFRCSVCGKAFASHQALGGHKASHRKPPPPLAQAPSSSSSVTTNTSSAGGSGAGQGRHRCSVCHRGFATGQALGGHKRCHYWDGLSVSLTASAASGSASSLRGFDLNLVPAAGAARWREEEEVQSPLPVKKRRLSSGPSTELSLTI

SEQ ID NO: 1215 - protein, 383 aa, Nicotiana sylvestris
RGSPESLRDIRGFAVKFYTREGNFDLVGNNVPVFFNRDAKSFPDTIRALKPNPKSHIQEYWRILDFFSFLPESLHTFAWFFDDVCLPTDYRHMEGYGVHAYQLINKAGKAHYVKFHWKPTCGVKCMSEEEAIRVGGTNHSHATKDLYDSIAAGNYPEWKLFIQIMDTEDVDKFDFDPLDVTKTWPEDILPLMPVGRLVLNRNIDNFFAENEQLAFNPGHIVPGLYYSEDKLLQTRIFAYADTQRHRIGPNYMQLPVNAPKCAHHNNHRDGAMNFMHRDEEVDYLPSRFDPCRHAEQYPIPSRVLTGRREMCVIEKENNFKQAGERYRSWEPDRQDRYVSKWVEHLSDPRVTYEIRSIWISYLSQADKSCGQKVASRLTLKPTM

SEQ ID NO: 1216 - protein, 451 aa, Cryptococcus neoformans var. neoformans B-3501A
MTSLNFKVAPAVQATEAPPIPKAQAWGCQYVPSPSAPLLDLSQGVPRAAPHPNVLAALSKVASDPQAARYGPILGEPGLRQALAEEIKVQYHVSGQGVTFEDVAITTGCNMAFLSLLMTLCPPGKSSVLLPLPAYFNHTMSLSLQDVKPVYVLCEPDNMFKASLPSARSYLASLRKGNGDRREPRMIVLVSPSNPTGTVYTNEEIKQWYDLAREYKVALVLDETYRDFVEGESGQRGLPHRLFEEPDWRSTLVSLGSFSKGYRIPGHRLGSIIASPELLQHITTICDCMQICPPRPPQIALTPLLPSLRPDLFAASSQLSHRRHLFETTVNAIPGWEVISSGGFFAYVQFPEDYIYASSILGLKRKKLGSEDVARVLALRCGVVTLPGSFFMPPLADDEQWDDILNGETLRQDKWLRFAVANVEDDVILSLGPRLKLMNKIMGVDNEGVAS

SEQ ID NO: 1217 - protein, 260 aa, Prochlorococcus marinus str. MIT 9313
MEATSTAATSDKQRSSIHALPVLQDNIIWIWIKGNQAVVVDPAIAEPVKTWLRTRKLSLAAVLQTHHHADHIGGTLELLRDWPNAAVVAAAEDRDRIPFQTISVRDRDKVSLLNSSVEVLAVAGHTRAHIAYYLPTNKEDLEDPAVFCGDTLFGAGCGRLFEGTAEDMFKALQRLSCLPAKTRVYCAHEYTEANLRWASALHPEDVAISERLADVSSRRQRGALSLPSSISEEQRTNLFVRAQSSKELAELRHHKDQWRN

SEQ ID NO: 1218 - protein, 453 aa, Zea mays
MEKKPTILMNRYELGRTLGQGTFAKVYHGRNLASGESVAIKVIDKEKVMRVGMIDQIKREISVMRLVRHPNVVQLHEVMASKSKIYFAMEYVRGGELFARVARGRLKEDAARRYFHQLVGAVDFCHSRGVYHRDLKPENLLVDEHGNLKVSDFGLSALRECQKQDGLLHTTCGTPAYVAPEIINKKGYDGAKADIWSCGVILFVLLAGYLPFHDANLVEMYRKISRADVKYPQWFSPELRRLMPKLLEPNPNNRITIEKLVEHPWFKKGYRPAVMLAQPHGSSSLKDVQVAFSNADHKDSSSKVEQPADSSLKPASLNAFDIISHSRGFDLSSLFEVDQEQKASNSRFMTQKPASAIVSKLEQIAETERFMVKKQDGLVKLQGSKQGRKGQLAIDAEIFEVTPAFHVVEVKKSAGDTLEYEMFCSKGLRPSLSDICWSSRSEENMAPSVVQPS

SEQ ID NO: 1219 - protein, 673 aa, Chromobacterium violaceum ATCC 12472
MSAYPHLLAPLDLGFTTLKNRVLMGSMHTGLEESPGGFEKMAAFYAERARGGVALIVTGGVGPNAEGCVAEGAAQLSDAHEVPKHKLVTDAVHREGGKIALQILHSGRYSFQEKCVSASPLLAPINFYTPRELSDADVWQTIADFANCAKLAQQAGYDGVEVMGSEGYLINQFIARATNKRTDDWGGSFENRIRFAIETVKAVRAAVGGDFIIIYRLSMLDLVQDGSSWDEVVHLAREIEKAGATLINTGIGWHEARVPTIATMVPRGGFAWVTKKLMGQVKIPLITTNRINTPEVAEDILAGGCADMVSMARPFLADPDFVNKAAAGRGDEINTCIGCNQACLDHIFQGKLTSCLVNPRACRETELNYEKTAVPKKLAVVGAGPAGLAFATVAAERGHSVTLFDAAAEIGGQFNVAKQIPGKEEFHETLRYFKRRIETTGVELKLGARVAADDLSGFDEVVLATGIAPRTPSIPGIGHPKVLSYLDVLKHKKPVGGKVAIIGAGGIGFDTAEYLCHEGRSTSLDAEAFMREWGVDMTGDSAGGLAPQGPQPHPSPREVYLLQRKTSKVGEGLGKTTGWIHRESLKMKRVKMLSGVSYDLIDDAGLHITVKGERQVLPVDNVVICAGQDPLRELQGPLEAAGKPVHLIGGADVAAELDAKRAIDQGSRLAAAI

SEQ ID NO: 1220 - protein, 634 aa, Zea mays
MDGCDCIEPLWPTDDLLVKYQYISDFFIALAYFSIPLELIYFVKKSSFFPYRWVLIQFGAFIVLCGATHLINLWTFTTHTKTVAMVMTIAKISTAVVSCATALMLVHIIPDLLSVKTRELFLKNKAEELDREMGLIRTQEETGRHVRMLTHEIRSTLDRHTILKTTLVELGRTLGLEECALWMPSRSGSSLQLSHTLRHQITVGSSVPMNLPVVNQVFSSNRAIIIPHTSSLARVRPLAGRYVPPEVAAVRVPLLHLSNFQINDWPELSAKSFAIMVLMLPSDSARKLHVHELELVEVVADQVAVALSHAAILEESMRARDLLMEQNVALDLARREAEMAIRARNDFLAVMNHEMRTPMNAIIALSSLLLETELTPEQRLMVETVLKSSNLLATLINDVLDLSKLEDGSLELEIKAFNLHAVFKEVMGFIKPIASIKRLSVSVMLAPDLPLCAIGDEKRLMQTILNISGNAVKFTKEGHITLVASIVKADSLREFRTPEFHPTASDEHFYLKVQVKDTGCGVSPQDLPHVFTKFAHPQSGGNRGFNGSGLGLAICKRFVSLMGGHIWIDSEGTGRGCTATFVIKLGVCDNTNTYQKQLVPLIWPSSADSNLSAPKVLPDGRGSVSLKSRYQRSV

SEQ ID NO: 1221 - protein, 274 aa, Listeria monocytogenes str. 1/2a F6854
MNLKDTVKLANGVEMPRLGFGVWKVQDGDEAVNSVKWAIEAGYISIDTAAAYKNEEGVGQAIKESGIKREDLFVTTKLWNAEQGYESTLAAFDESLRKLELDYVDLYLIHWPVKGKFKDTWRAFEKLYKDKRVRAIGVCNFHEHHLKELMEDAEIAPMVNQIELHPQLTQEPLRKFCAENNIVVEAWSPLGNGKLLSNPEIKAIADAHGKSVAQVILRWDLQIGVVTIPKSVHQERIIQNADIFDFELSEEEVAKISGLNKDERTGPDPDNFNF

SEQ ID NO: 1222 - protein, 716 aa, Rhodopseudomonas palustris CGA009
MTVQLSDEAYAVVEGRHADPFRYLGAHPEDGGTMVRVLLPDAVAVEVIGDNGDVAPLDQAHPAGLFVGPLPGASPRYTLRARFGDTTVELQDPYRFPPILSDFDLYLLGEGTDQRLYDKLGAHPMELEGVAGVGFVVLAPNARRVSVVGDFNFWNPLRHQMRVRGSGYWELFVPGARAGDHYKFDLAGPNGEQLPQKADPLAFAAELRPKTASIVVDATTLPRPRPAPENINALSAPMSIYEVHLGSWRRKEGDQWLTYRELAEQLPAYVRDMGFTHVEFLPVSEHPFDGSWGYQPTGLYAPTSRFGSPEDFCALVDACHAAGIGVILDWVPGHFPDDPHGLGNFDGTALYEHANPMQGRHLDWGTLIYNYGRTEVVNFLTANALFWLERYGIDGLRVDAVASMLYLDYSRPAGGWIPNKFGGRENIEAIDFIRRFNTEVYGKFPHSTTAAEESTAWPQVSRPIEFGGLGFGYKWNMGWMHDTLNYISKDPIHRKYHHGQILFGLHYAFSENFILPLSHDEVVHGKRSILGRMPGDEWQRFANLRAYYAFMFGHPGKKLLFMGSEFGQEREWSHDRSLDWHLLEYPKYSGIQALLRDLNKLYRSLPALHQLDCDPFGFEWLITEDANRNLFAWMRKGNDTRARCLVIVNFSPNVYQDYRVRVPFPGRWREVFNSDSAGYGGTNVGNGGEVRTLEGLVPELSLTIPPLAAIFLTPED

SEQ ID NO: 1223 - protein, 542 aa, Streptococcus mutans UA159
MAKDIKFSADARSSMVRGVDILADTVKVTLGPKGRNVVLEKSFGSPLITNDGVTIAKEIELEDHFENMGAKLVSEVASKTNDIAGDGTTTATVLTQAIVREGLKNVTAGANPIGIRRGIETAVATAVDELKAIAQPVSGKEAIAQVAAVSSRSEKVGEYVSEAMEKVGNDGVITIEESRGMETELDVVEGMQFDRGYLSQYMVTDNEKMVADLENPYLLITDKKISNIQDVLPLLEEVLKTNRPLLIIADDVDGEALPTLVLNKIRGTFNVVAVKAPGFGDRRKAMLEDIAVLTGGTVITEDLGLELKDTTIDALGQAARVTVDKDSTVIVEGSGGKEAVANRVNLIKSQIETATSDFDREKLQERLAKLSGGVAVIKVGAATETELKEMKLRIEDALNATRAAVEEGIVAGGGTALINVIEKVAALDLTDDAATGRNLVLRALEEPVRQIAKNAGYEGSVIIDKLKNSSAGTGFNAANGEWVDMIDAGIIDPVKVTRSALQNAASVASLILTTEAVVADHPAPEAPAAAPAMDPSMMGGMM

SEQ ID NO: 1224 - protein, 268 aa, Arabidopsis thaliana
MMEWDNQLQPNNHHSSNLQGIDVNGGSGAGGGMYVKVMTDEQYETLRKQIAIYGTICERLVEMHKTLTAQQDLAGGRMGGLYADPMMSSLGHKMTARQRWTPTPVQLQILERIFDQGTGTPSKQKIKDITEELSQHGQIAEQNVYNWFQNRRARSKRKQHGGGSSGNNNGESEVETEVEALNEKRVVRPESLLGLPDGNSNNNGLGTTTATTTAPRPEDLCFQSPEISSDLHLLDVLSNPRDEHLVGKMGLAESYNLYDHVEDYGMSG

SEQ ID NO: 1225 - protein, 331 aa, Ustilago maydis 521
MADNTTLEVDLDNVIDRLLEVRGSRPGKPVHLEEYEIKYLCLKARDIFINQPILLELEAPIKICGDIHGQYYDLLRLFEYGGFPPEANYLFLGDYVDRGKQSLETICLLLAYKIKYPENFFILRGNHECASINRIYGFYDECKRRFNIKLWKTFTDCFNCLPIAAIIDEKIFTMHGGLSPDLQSMEQIRRVMRPTDVPDTGLLCDLLWSDPDKDISGWSENDRGVSFTFGPDVVSRFLQKHDMDLICRAHQVVEDGYEFFAKRQLVTLFSAPNYCGEFDNAGAMMSVDETLLCSFQILKPAEKKQKYAYGGINMGRPVTPPRKQKKKSDGK

SEQ ID NO: 1226 - protein, 588 aa, Rhodopseudomonas palustris CGA009
MTLRSFGPRLTGNGVEFRIWAPNAKRVDVVLDRPHPMRRDAMGWYTTHIDGIGAGARYRFLIDGSLDVPDPASLFQPEDLAGPSEVIDHAAYQWRAKEWHGRPWAETVLLETHVGTFTPEGSFRAMIDKLDHLVDTGITALELMPLADFPGTRNWGYDGVLWYAPDSAYGRPEDLKALIDEAHLRGLMVFLDVVYNHFGPEGNYLGQYAPGFFSDSHTPWGNGINYYVEQVRAFAIENALYWLDDYRFDGLRLDAVHAIPDQGEIPMLDELSREVGRLAAETGRYVHLVLENDDNTAAVLDPVTHPPRGQYRAQWNDDYHHAWHVALTGETHGYYSDYANAPLAHLARALGSGFVFQGEPSEHRGGQPRGEPSGDLVPLAFINFLQNHDQIGNRALGDRLESLVKPQAIEAALAVTLLAPTVPMLFMGEEWGSQAPFPFFCDFQGDLAEAVRAGRRKEFAGAYKEYGDEVPDPLSKDAFDSAVLDWHERDQGRGAARLALVKRLLAIRHREIVPRLDSSRFGDARITGDGLLKAFWRLTDGATLELVANLSDDERDGGAPPAAGTILWGGDWNRIIPPWAVSWRLEHP

SEQ ID NO: 1227 - protein, 456 aa, Arabidopsis thaliana
MCGILAVLGCSDDSQAKRVRVLELSRRLRHRGPDWSGLYQNGDNYLAHQRLAVIDPASGDQPLFNEDKTIVVTVNGEIYNHEELRKRLKNHKFRTGSDCEVIAHLYEEYGVDFVDMLDGIFSFVLLDTRDNSFMVARDAIGVTSLYIGWGLDGSVWISSEMKGLNDDCEHFETFPPGHFYSSKLGGFKQWYNPPWFNESVPSTPYEPLAIRRAFENAVIKRLMTDVPFGVLLSGGLDSSLVASITARHLAGTKAAKQWGPQLHSFCVGLEGSPDLKAGKEVAEYLGTVHHEFHFSVQDGIDAIEDVIYHVETYDVTTIRASTPMFLMSRKIKSLGVKMVLSGEGADEIFGGYLYFHKAPNKKEFHQETCRKIKALHKYDCLRANKSTSAFGLEARVPFLDKDFINTAMSLDPESKMVTTKLTSQTQYLPSQVNVEQIFYMGFSRSSQRKEGSRNGF

SEQ ID NO: 1228 - protein, 342 aa, Zea mays
MKFGATYEEYLRAERDKFLGQCSHVEYKRLKKVLKKCRVGRSLQADGTNGDEQQEGRDESSNICECNSCTLCDEMFFTELNKEASEIAGCFRSRVQRLLHLHVPSGLQRCIWRFRQCFIDDQQIMVQEGRMLLNYVTMNAIAIRKILKKYDKIHGSVSGRDFKSKMQTEHIELLQSPWLIELAAFHLNCDDSDADEPRAGEFFKNGFFKNFSCDLSGAQPLLTMTISETLKYEYSLTCPICLDTLFNPYALSCGHLFCKACACGAASVYIFQGVKSAPPEAKCPVCRAVGVFDRAVRMTELELLLKRRDKDYFLQRLREERSVMVKQAKEYWDSQAMLSMGI

SEQ ID NO: 1229 - protein, 469 aa, Clostridium acetobutylicum ATCC 824
MRHSKLKDFPKDFLWSASTSAYQVEGAWNEDGKGMSVQDAKTSLPEGTSDFKVASDHYHHFEEDIAFLGEMGLKAYRFSISWTRIIPDGDGKINTKGVQFYHKLIDACLSYNIEPIVTMYHFDLPFELEKKGGWNNRTTIDAFLKFSKILFEQYGSKVKYFLTINEQNMMILHGAAIGTSKGSGINIWKELYQQNHNMLVAQAKAMELCHKLCPNSKIGPAPNIASIYPASSKPEDYLAAQNFTAIRNWLYLDMAVFGRYNSTAWSYLEEIDAVPKIEEGDMEILRNAKPDFIAFNYYNTATVKANNDAKKVQDSSGDQQLAVFEAGVFEGVQNPNLEKTEFGWEIDPVGFRITLREVYDRYNLPIIVTENGLGAFDKLEDGTVHDDYRIEYYKKHLHEIKEAITDGVKVFGYSPWSAIDLVSTHQGVTKRYGFIYVNRDEFDLKDLKRYKKDSFYWYKKVIEENGNNL

SEQ ID NO: 1230 - protein, 634 aa, Passiflora edulis
MDSCDCIDTQWGHEGILVKYQYISDVLIAFAYFSIPIELVYFVQKSAFFPYRWVLMQFGAFIVLCGATHFINLWTFSTHSKAVAVVMAIAKVSCAVVSCATALMLFHIIPDILSVKTRELFLKNKAEELDREMGLILTQEETGRHVRMLTHEIRSTLDRHIILKTTLVELGRTLGLEECAIWMPSRTGSTLQLSHTLNYQAQIGSPVSINIPEVNQVFNSARATRISYTCPLARIRPLVGGYLLPEVVAVRVPLLHLSNFQIKDWPDLSAKSYAVMVLILPTNSARTWRDHELELVEVVADQVAVALSHAAILEESMRARDQLMEQNVALNMARREAEMAVHARTDFLAVMKHEMRTPMHAIIALSSLLLETELMPEQRAMIEIVLKSSNLLATLTNDVLDLSRLEDGSLGLDLAVFNLHEVFREVINLIKPIASVKRLTLTQIMTPDLPSFAVGDEKRLMQTILNVVGNGVKFTKEGSVSVIVSVANPDSLREWRLPDVYPISSDGHFYLQVQVKDSGCGILPQDIPLLFTKFFHPRSESNRGTDGAGLGLAISKRFVSLMGGHMWIDSEGLDKGTVATFIVKLGHCTDRDDSSAHHAASRGRANNESLMEGHKLPFRDNGFVSSYSRYQISV

SEQ ID NO: 1231 - protein, 95 aa, Fagopyrum esculentum subsp. ancestrale
GRLYEYANHSVKATIDRYKKACSDSAGVTSVAEANAQYYQQEAAKLRNQIRTLQNNSGNLSRHMMGEGLSNLSMKDLKNLETRLEKGISRIRAKK

SEQ ID NO: 1232 - protein, 268 aa, Arabidopsis thaliana
MEVTSQSTLPPGFRFHPTDEELIVYYLRNQTMSKPCPVSIIPEVDIYKFDPWQLPEKTEFGENEWYFFSPRERKYPNGVRPNRAAVSGYWKATGTDKAIHSGSSNVGVKKALVFYKGRPPKGIKTDWIMHEYRLHDSRKASTKRSGSMRLDEWVLCRIYKKRGASKLLNEQEGFMDEVLMEDETKVVINEAERRNDEEIMMMTSMKLPRTCSLAHLLEMDYMGPVSHIDNFSQFDHLHQPDSESSWFGDLQFNQDEILNHHRQAMFKF

SEQ ID NO: 1233 - protein, 546 aa, Helicobacter pylori
MAKEIKFSDSARNLLFEGVRQLHDAVKVTMGPRGRNVLIQKSYGAPSITKDGVSVAKEIELSCPVANMGAQLVKEVASKTADAAGDGTTTATVLAYSIFKEGLRNITAGANPIEVKRGMDKAAEAIINELKKASKKVGGKEEITQVATISANSDHNIGKLIADAMEKVGKDGVITVEEAKGIEDELDVVEGMQFDRGYLSPYFVTNAEKMTAQLDNAYILLTDKKISSMKDILPLLEKTMKEGKPLLIIAEDIEGEALTTLVVNKLRGVLNIAAVKAPGFGDRRKEMLKDIAILTGGQVISEELGLSLENAEVEFLGKAGRIVIDKDNTTIVDGKGHSDDVKDRVAQIKTQIASTTSDYDKEKLQERLAKLSGGVAVIKVGAASEVEMKEKKDRVDDALSATKAAVEEGIVIGGGAALIRAAQKVHLNLHDDEKVGYEIIMRAIKAPLAQIAINAGYDGGVVVNEVEKHEGHFGFNASNGKYVDMFKEGIIDPLKVERIALQNAVSVSSLLLTTEATVHEIKEEKATPAMPDMGGMGGMGGMGGMM

SEQ ID NO: 1234 - protein, 585 aa, Saccharomyces cerevisiae
MLHRHGSKQKNFENIAGKVVHDLAGLQLLSNDVQKSAVQSGHQGSNNMRDTSSQGMANKYSVPKKGLPADLSYQLIHNELTLDGNPHLNLASFVNTFTTDQARKLIDENLTKNLADNDEYPQLIELTQRCISMLAQLWHANPDEEPIGCATTGSSEAIMLGGLAMKKRWEHRMKNAGKDASKPNIIMSSACQVALEKFTRYFEVECRLVPVSHRSHHMLDPESLWDYVDENTIGCFVILGTTYTGHLENVEKVADVLSQIEAKHPDWSNTDIPIHADGASGGFIIPFGFEKEHMKAYGMERWGFNHPRVVSMNTSGHKFGLTTPGLGWVLWRDESLLADELRFKLKYLGGVEETFGLNFSRPGFQVVHQYFNFVSLGHSGYRTQFQNSLFVARAFSFELLNSSKLPGCFEIVSSIHESIENDSAPKSVKDYWEHPQAYKPGVPLVAFKLSKKFHEEYPEVPQAILSSLLRGRGWIIPNYPLPKATDGSDEKEVLRVVFRSEMKLDLAQLLIVDIESILTKLIHSYEKVCHHIELASEQTPERKSSFIYEMLLALASPQDDIPTPDEIEKKNKLKETTTRNYRGTC

SEQ ID NO: 1235 - protein, 354 aa, Ashbya gossypii ATCC 10895
MVYKQLYMRGTPPDLSRCITGQDIAMVMNVRTIKLNNGADMPLVGLGCWKIPNEVAAEQVYEAIKLGYRLLDGAEDYANEREVGQGIRRAIDEGLVRREELFVVSKLWNNYHRPEDVGKALQRTLSDLGLDYLDLFYIHFPLAFKFVPLEERYPAGLYTGAADEQAGRLAQEPVPLIETYRALEQLVDEGRIRAIGLSNFQGCLVQDLLRGCRIRPAALQIEHHPYLTQERLVQYAKSEGLAVVGYSSLGPQSFLELGNTAAQNAAPLLQHEVVCRIAERHTATPAEVLLRWATQRDIAVIPKSSRKERLATNLRVDEALTLADDELRELSSLNCGLRFNDPWDWSAQPLPTFI

SEQ ID NO: 1236 - protein, 519 aa, Arabidopsis thaliana
MGNSFGCSASGERLVSAARDGDFVEAKMLLDCNPCLAKYSTFGGLNSPLHFAAAKGHNEIVGLLLENGADVNSRNYCGQTALMQACRYGHWEVVQTLLLFRCNVTRADYLAGRTALHFAAVNGHARCIRLVLADFLPSDKLNSLPETGVVTAKNKSEQSALSKFVNKAADGGITALHMAALNGLFDCVQLLLDLEANVSADSFYTAPKMTILFFVNVAGAGSTPLHYAACGGNLKCCQILLARGARKMTLNCNGWLPIDIARMWSRHWLEPLLSPNSDVVIPAFPHSNYLSLPLLSILNIAREFGLQSATIGDEVDICAVCLERTCTVAAEGCEHQLCVRCALYLCSSSNVPSVTVGPPGSIPCPLCRHGITAFKRLPSSLTREMKLPMSLGFCAPCMLHTGDTTDQSSPTCPPTEQRSSKTRAASVSSDIFCPVTCSPFPSVNIPMCTCNEGTCPNFETHGTERHSEEHVESSPSRTTTEQEKIEEGQRLGKTTTCSSMFWGRRSCSRENQCNSEINA

SEQ ID NO: 1237 - protein, 434 aa, Prochlorococcus marinus str. NATL2A
MLKSFLKISLLIAICPSPSFSFQANSSTLITNNPKEIIDQVWQIIYRDFLDYSGKYKAEDWIKLRKEILSTKYFDNDEAYIAIKDMLTELDDPYTRFLDPKEFNEMRIDTTGELMGVGIQISLDEVTNQIVVVSPIEGTPAFLAGIKPKDIIVSIDGKPIDGLSIDRTVKLIRGKKGTKVELGIIREEELLNISLIRDRIEINVVDSRINNTVSGAKIGYVRLKQFNAKSPKEMSLSINKLEKQKPFGYVLDLRSNPGGLLEASIEIARQWINTGIIVSTKTKDGITDIRKAKSRALTNRPVVVLIDEGSASASEILSGAIKDNKRGILVGKKTFGKGLVQSVRSLSDGSGLTVTVAKYLTPSGKDINKNGIAPDIRADLLLNEKNKLTNADLGTLKDSQYVAAENILIKKFKIESKKNSYNPLKSNLGYALKN

SEQ ID NO: 1238 - protein, 412 aa, Pseudomonas syringae pv. tomato str. DC3000
MLIATFFFTSHFSRAKQPMWYNGLLDLSVWQVIAVTLAMTHVTIVGVTVYLHRYSAHRSLELNAGLKHFFRFWLWLTTAQNTREWTAIHRKHHAKCETVDDPHSPVVKGLSTVLRKGAELYREEAQNQDTLRIYGKNCPEDWIERNLYSRYKMLGIVLMAVIDLALFGAIGITVWAIQMMWIPFWAAGVVNGLGHAVGYRNFECRDAATNLVPWGIVIGGEELHNNHHTYPNSAKLSVKPWEFDMGWAWIKLFSFLRLAKVQRVAPIAHRVEGKGHIDMDTAMAILNNRFQIMAQYRKLVIAPLVTQELAKADESVRHQFRRAKRLLSRETSLLDDKHHLRIQTMLEHSHALKVIYEKRLALQQIWVKTSSNGHDMLSAMKEWIHEAEASGIQSLREFADQLKTYSLRPVHA

SEQ ID NO: 1239 - protein, 254 aa, Arabidopsis thaliana
MQIELVPCLKDNYAYILHDEDTGTVGVVDPSEAEPIIDSLKRSGRNLTYILNTHHHYDHTGGNLELKDRYGAKVIGSAMDKDRIPGIDMALKDGDKWMFAGHEVHVMDTPGHTKGHISLYFPGSRAIFTGDTMFSLSCGKLFEGTPKQMLASLQKITSLPDDTSIYCGHEYTLSNSKFALSLEPNNEVLQSYAAHVAELRSKKLPTIPTTVKMEKACNPFLRSSNTDIRRALRIPEAADEAEALGIIRKAKDDF

SEQ ID NO: 1240 - protein, 456 aa, Triticum aestivum
FIRHHRTATEEGGMAAAGGGPRRTTRVGPYELGKTVGEGSFAKVKIAKDTRNAATCAIKVLDRNHVLRHKMVEQIKREIATMKLIRHPNVVQLHEVMASKSKIYMVLEFVEGGELFDKIVNSGKLGEDEARRYFHQLINAVDYCHSRGVYHRDLKPENLLLDSYGALKVSDFGLSAFSPQTKEDGLLHTACGTPNYVAPEVLADKGYDGMAADVWSCGIILFVLMAGYLPFDDPNLMTLYKLIARANVSCPPWFSTGARNLIKRILDPNPHTRITIAQILEDEWFKKDYKPPQSEHNEDVSLEDVDAAFDSSEEHLVAERREKPESMNAFALISRSEGFNLGNLFEKEMMGMVKRETSFASQRTPQEIMSKIEEACGPLGFNVRKQNYKMKLKGDKTGRKGHLSVATEVFEVAPTLHMVELRKTGGDTLEFHSFYKNFSSELKDIVWKTESNTIAK

SEQ ID NO: 1241 - protein, 763 aa, Nostoc punctiforme PCC 73102
MSMTTIAPEQVNSIVWNQHNDPFEILGSHPIEQDGKTVWAVRAYLPNASAVWVVLPEQRKEYPMQTVHHPHFFECTIETAELANYQLRIKEGEHERVTYDPYAFRSPNLTDFDLHLFSEGNHHRIYEKLGAHPTEIGGVKGVYFAVWAPNARNVSLLGDFNLWDGRKHQMRKGPTGVWELFIPEIGMGEHYKYEIKNFEGHIYEKSDPYGFQQEPRPKTASIVTDLDAYTWNDESWMEKRRHTDPLTQPVSVYEVHLGSWLHASSAEPAKLPNGETEPVVVVSELKPGARFLTYRELADRLIPYVKELGYTHIEMLPIAEHPFDGSWGYQVTGYYAPTSRFGSPEDFMYFVDKCHQNDIGVIVDWVPGHFPKDGHGLAFFDGSHLYEHADPRKGEHKGWGTLVFNYGRHEVSNFLAANALFWFDKYHIDGIRVDAVASMLYNDYCREPGEWLPNQYGGRENLEAADFLRQVNHIIFSYFPGILSIAEESTSWPMVSWPTYTGGLGFNLKWNMGWMHDMLDYFSMDPWFRQFHQNNITFSMWYNHSENFMLALSHDEVVHGKSNIIGKMPGDTWQKLANIRCLFTYMFAHPGKKTMFMSMEFGQWSEWNAWADLEWHLLQHEPHQQLKTFFQGLNHLYRSEPVLYTQDFAEPGFEWIDCSDNRHSVVSFIRRDKDSDDFAIVVCNFTPQPHSHYRIGVPQKGFYTELFNSDARQYGGSNMGNLGGKWTDDWSLHSRPYSLDLCLPPLGVLILKLDKKKTAEVIG

SEQ ID NO: 1242 - protein, 289 aa, Triticum aestivum
  misc_feature (273)..(273): Xaa can be any naturally occurring amino acid
  misc_feature (283)..(283): Xaa can be any naturally occurring amino acid
NKFVQKSRLVPVRNSRDIVDPRVRELGRSRAGGTFAKVKFARNVETGENVAIKILDKDKVLKHKMIAQIKREISTMKLIRHPNVIRMYEVMASRTKIYIVMELVTGGELFDKIASRGRLKEDDARKYFQQLINAVDYCHSRGVYHRDLKPENLLLDANGTLKVSDFGLSALSQQVREDGLLHTTCGTPNYVAPEVINNKGYDGAKADLWSCGVILFVLMAGYLPFEDSNLMALYKKIYKADFSCPSWFSTSAKKLIKKILDPIPNTRITIAEXINNEWVKKGXQPPRFE

SEQ ID NO: 1243 - protein, 460 aa, Gibberella zeae PH-1
MKLLQLAALVASISPFASAADANAWKSRNIYFALTDRVARSDSDSGGNACSNLGNYCGGTFKGLEAKLDYIKGMGFDAIWITPVVENTDGGYHGYWAKDLYEVNAKYGTKDDLKSLVKTAHSKNIYVMADVVANHMGKGIQDHRPEPLNQQSSYHSPCAIDYNNQNSIEQCEIADLPDLNTGSETVKKVLNDWISWLVTEYSFDGIRIDTVKHVEKSFWPDFQKAAGVYAIGEVWDGSPDYLAGYSKVMPGLLNYAIYYPMNRFYQQKGDPSAVVDMYNEISQKFDDPTVLGTFIDNHDNPRWLSQKNDKALLKNALAYVILSRGIPIVYYGTEQGYAGGNDPANREDLWRSSFKTDSDLYQTISKLGKARSAVGGLAGNDQKFLKSNDSALIWSRANNDLIVVTMNRGQGFSGQYCFNTGANNKTWERVLGQGTVKSDGSGQLCVSYTNGEPEVLVAAN

SEQ ID NO: 1244 - protein, 294 aa, Arabidopsis thaliana
  misc_feature (50)..(50): Xaa can be any naturally occurring amino acid
  misc_feature (83)..(83): Xaa can be any naturally occurring amino acid
MEKTLVGGCGGENEEVILGKELDFLGREQVSNIRRDSFVEPLGSILLQLXEAFWVFPWLVFINGICITLSYHRNLSHRSFDLXPKWLEYLFAYGGVLAFQGDPIEWVSNHRYHHKHCETQRDPHSPTQGFWFSHMAWIFDTSSILENCGGEENVDDLVRQPFYRFLQRTVLLHMMAYSFLFYFCGGMPLLVWGIGITIAVRLHLTFLVNSVCHIWGTRAWNTSDFSKNNWWVAILTLGEGWHNNHHAFEFSARHGLEWWQLDITWCLIRFLEAIGLATNVKLPTETQMKGKALV

SEQ ID NO: 1245 - protein, 480 aa, Listeria monocytogenes str. 4b H7858
MKELLTFPKDFWWGSAWSAEQAEGRGDTGKAKTVWEHWFETEPNRFYEGVGSEITTDHFNRYKEDVQWMKKTGQNSFRISISWARMFPNDGVGEVNPKAIAFYRDLLTEMNENGIKPFANLYHFDMPVALQDAGGWESREVVDAYVHFADTCFKEFGDLVYHWFTFNEPLGPILGGYLEDFHYPNQIDFKRGAQAGFNTILAHALAIKAFKKLNLSSKIGVILNLSPTYPRSQNEYDLEAAEICDAFYTRSFLDPMVKGTFPEKLVEIMREYDQMPEYTEEDLTIIKENTAQILGLNYYEPRRVKARLTAINEKSPFLPDWFFEPHNMPGKRMNIYRGWEIYERGIYDLCIDIRDNYGNIESFISENGMGVANEERFLNEEGQIQDDYRIQFVKDHLAYVHQAIAEGCDIKGYHLWTFIDCWSWINAYKNRYGLVSLDVETGKRTMKKSGEFYKKMSDMNGFEYDTSKLVGTKREETTNG

SEQ ID NO: 1246 - protein, 402 aa, Phaseolus acutifolius
MDEALGSSCSLPPFLAKTYEMVDDLSTNSIVSWSVSSKSFIVWNPPEFARDLLPRFFKHNNFSSFIRQLNTYGFKKIDPEQWEFANDDFVRGQPHLMKNIHRRKPVHSHSLQNLQAQGPLGDSERQGFTDGIEKLKRDKERLLVELQKFQHEWQTYEIQIHCSNDRLEKLEQKQHKMVSSISHVLQKPVLAVNILPLTETMDRKRRLPRSGHYYDESSIEDAIETSQMLPRENAENTTVLTLNVERLDQLESSVAFWEAIAHDIGDNFAQIQSNMDFDESTSCADSPSISCAQLDVDVRPKSSGIDMNSEPTAAAVPDPLASKDQPAGITVAATGVNDVFWEQFLTEDPGASETQEVQSERKDCDGRKNEGKPNDHSKFWWNIRNANNLSEPMGHVGQAEKT

SEQ ID NO: 1247 - protein, 95 aa, Fagopyrum rubifolium
GRLYEYANQSVKATIDRYKKACSDSAGVTSVAEANAQYYQQEAAKLRNQIRTLQNNSRNLSRHMMGEGLSSLSMKDLKNLETRLEKGISRIRAKK

SEQ ID NO: 1248 - protein, 95 aa, Fagopyrum statice
GRLYEYANHSVKATIDRYKKACSDSAGVTSVAEANAQYYQQEAAKLRSQIRTLQNNSRNLSRHMMGEGLSSLSMKDLKNLETRLEKGISRIRAKK

SEQ ID NO: 1249 - protein, 354 aa, Trichodesmium erythraeum IMS101
MVNTQAREDLHIRLEETQLLDRDCTTLSRHVLQQLHFSPDAQDISSLMNRIGLAGKLIARRLTRAGLLEDTLGFTGTVNVQGESVKKMDIYANDVFISVFKQSGLVCRLASEEMEKPYYIPENCPIGRYTLLYDPLDGSSNLDTNLNVGSIFSVRQQEGNDENGLAQDLLQNGHKQIAAGYILYGPSTMLVYSIGQGVHAFTLDPSLGEFILVNENIKIPEHGPVYSVNEGNFWQWDDSMRDYIRYVHRHEGYTARYGGALVGDFHRILYQGGVFLYPGTVKKPEGKLRLLYESAPMGYLVEQAGGRASTGTEEILDVVADQLHQRTPLIIGSKEDVALVESFIKEQKRISNQG

SEQ ID NO: 1250 - protein, 820 aa, Leptospira interrogans serovar Lai str. 56601
MRFLLLYIIFLFHYSLMAESLSPVSGKISQLQKDSSLSFFVYYFSSDSDENFRERIFAKDSSLSFQNIPAEVFSLGFTSNTVWFYIPLKNDTEKDYRGEFEIFNSYLEEVDIFYRYGSKDSIHEILAGTSRVYEKSFPALNFYLRPGEEIQIVCKIKSGTPMRIPIVLESEENFNFTKLFRAILFGLTLGFGIAMGLYNFSLYMFFRTRSYLYYFIMILFSTVYLASWDGLISPLFKPNYGRYYLPFILVLFYTSALFLFLFSMEFLYPEKKERYVKIIIFLYVVVNLLLIPLSIFYPTHLNRISYYLGLVNNLIIVYFCIVRIRGGFKSAKNFLIIHLVFPVAGILTNLSTFGAISIDYLSLHLLKLAFISQSVLFSVMLVQRIKELEFRLKDGLQSEIHKNIVLLKKEIQQRRETEWELIQAKEVAEKASKVKSNFLANMSHEIRTPMNGVLGMVQLLGTTKLNDEQKEYVEVLSVSAKSLLQIINDILDFSKIEAGKVILEREVFSIRSVLDEIHDLLYPLAKQKEINFRLEGKLEIQEYVYGDPLRLRQILWNLAGNGIKFTSRGEVVLKVTQKNISKSSVSIEFTVMDSGIGIPLEKQKQVFEAFSQNDTSTARKFGGSGLGLSITKQLVELQGGVLKLESKDGEGSKFTFTIDYDIPSALEIEKILEAEKTKDLEKSFQDVVAKSTRILVAEDNETNCLLIERALKKLGYDPTVVHNGREVIERMQLEAFDIILMDIHMPEVDGIEATKWIRSKNQNSEFPIIIALTADAIESSKEKYISKGMNDCLTKPLDLPILKSTLDLWSNRVDVSHWKL

SEQ ID NO: 1251 - protein, 302 aa, Gonyaulax polyedra
MEALDLDRIIVQLLEVRGCRPGKLVQLTEGEICALCIRSRDIFMDQPILLELECPLKVCGDVHGQYSDLLRLFECGGLPPEANYLFLGDYVDRGKQSLETICLLLAYKVKYPENFFLLRGNHECASINRIYGFYDECKRRYSIRLWKTFTDCFNCLPVSAVIDDKILCMHGGLSPELSNLEQIKRVVRPTDVPDTGLLCDLLWSDPEKEISGWGENDRGVSFTFGPDVVQRFLRQHGLDLVCRAHQVVEDGYEFFARRALVTIFSAPNYCGEFDNAGAIMTVDESFCCAFQILRPLTRMGVP

SEQ ID NO: 1252 - protein, 311 aa, Zea mays
MAATEVYSPTTAAAAQQQRGKAASQAWRAVVGWIGFFLQVLLQILRGTPSCAQLLSFVGFRYPLLSGPAASEPLPEVAFMPLHSEIPADAAPAPKPASEPLGRLTVVLDLDETLVSAYESSSLPAIVRTQAVEAGLHCFDMECISSDKDVEGKQKVNHVTVFERPGLHEFLRKTSEFADLILFTAGLEGYARPLVDRIDVHNRFRIRLYRPSTVTTEYREHVKDLTRVSKDFGRIVIVDNNPFSFILQPLNGIPCVPFSAGQHSDDQLMTVIFPLLKHLSLQKDVRPVLRERFHMPEWFQNHGIPQISQAV

SEQ ID NO: 1253 - protein, 210 aa, Zea mays
  misc_feature (58)..(58): Xaa can be any naturally occurring amino acid
AINGGATSRWRCVEACYNYGFLPADRGRHQPPPAPHATLPHAAEDAGELWEYFPCPFXICNHLQEEHCFDTRNAVCPICANNLGKDMAAHFRLQHTHLLKRRKPYRPSSCPAAATSPATYQVNSYYEEAEPQQHYSRPYKDPAPDPLLSQFICSVDAIPGDANAQKDDQRLKLNNKGATASDDDASSKLGLEERLQRIDFLTEILMSPIL

SEQ ID NO: 1254 - protein, 279 aa, Thermosynechococcus vulcanus
MTSSLELQPQTSRLNWGFVFFLGAVHILAAVALFFFSWSALAVTIFLHWLFGSIGICLGYHRLLSHRSFQVPQWLEYVIAVVGALAMQGGPIFWVAGHRLHHAHTEDEIKDPYSARRGFWWSHMLWLVYPQSQFFNAEEYARFAPDLTRDPFYRWLDRYFLLLQLPLALLLYGLGGWSWLLWGMFMRAVFLWHSTWLINSATHKWGYRRFETEDNSRNLWWAALLTYGEGWHNNHHAYPHVAKAGWYWWEVDPTWWVIRTLQGLGLAAKVQLPPPKALS

SEQ ID NO: 1255 - protein, 525 aa, Buchnera aphidicola
NEARIKMLRGVNVLADAVKVTLGPKGRNVVLDKSFGAPSITKDGVSVAREIELEDKFENMGAQMVKEVASKANDAAGDGTTTATLLAQSIVNEGLKAVAAGMNPMDLKRGIDKAVISAVEELKNLSVPCSDSKAITQVGTISANADEKVGALIAEAMEKVGNDGVITVEEGTGLQNELEVVKGMQFDRGYLSPYFINKPETGIVELENPYILMADKKISNVREMLPILESVAKSGKPLLIISEDLEGEALATLVVNSMRGIVKVAAVKAPGFGDRRKAMLQDISILTGGSVISEELAMDLEKSTLEDLGQAKRVVINKDTTTIIGGSGEKHTIQSRISQIRQEIQEATSDYDKEKLNERLAKLSGGVAVLKVGAAPEVEMKEKKARVEDALHATRAAVEEGVVAGGGVALVRVAGKISNLRGQNEDQNVGIRVALRAMEAPLRQIVSNSGEEPSVVTNNVKDGKGNYGYNAATDEYGDMIDFGILDPTKVTRSALQYAASVAGLMITTECMVTDLPKEEKSSDSS

SEQ ID NO: 1256 - protein, 115 aa, Brassica napus
EISKYDHICEDISQNIEVQEQLLRQIQAQNEEFATVFSLEDYKASREKCYIQIQAAISKYREIKENVNEGLKFYVTLQDAITNVKQQCSDFVMTRSIQCREMIEDVQRQMSGLSF

SEQ ID NO: 1257 - protein, 567 aa, Vibrio cholerae
  misc_feature (520)..(520): Xaa can be any naturally occurring amino acid
  misc_feature (522)..(522): Xaa can be any naturally occurring amino acid
MISKNMRSHLKLSFKSIFSIKFIVISHLVKRVIYPYILAGQKRAFDFFILRNVGQNGRSHWRATMHMSKSFLIISMGFVAVSVQAQTLTRDNGAPVGDNQNSITAGEHGSVLLQDVHLIQKLQRFARERIPERVVHARGTGAHGEFVASGDFSDLTLSAPFTSKGKITPVFVRFSTVIHSKGSPETLRDPRGFATKFYTEQGNWDLVGNNLPVFFIRDSIKFPDMVHSLKPSPVTNLQDPNRFFDFFSHEPGSTHMLTWVYTNLGTPASYRTMDGFGVHAYKWINQKGDVNYVKFHWKSLQGIESLRPDEVVKVQGQDFNHLTNDLYTQINAGNHPKWDLYVQVLTPEQLSKLDYNGLDATKVWLDVPEKKVGTMTLNKVPDNFFLETEQSAFAPSNLIPGIEPSEDRLLQGRLFAYADTQLYRLGANLFQLPINRPLVEVNSHNQEGASNSAQTASDINYQPSRKLELKEDPQFKAVQTQLVGSVQQKAISNPRNFYQAGVLYRSLNEQDKQDLITNLXGXLNKVTDKEIKATMVSHFYRADKDYGTRLARATNTDLKQVAKLAAM

SEQ ID NO: 1258 - protein, 525 aa, Buchnera aphidicola
NEARVKMLRGVNVLADAVKVTLGPKGRNVVLDKSFGAPSITKDGVSVAREIELEDKFENMGAQMVKEVASKANDAAGDGTTTATLLAQAIVNEGLKAVAAGMNPMDLKRGIDKAVIAAVEELKRLSVPCSDSKAITQVGTISANADEKVGMLIADAMEKVGKDGVITVEEGTGLQDELEVVKGMQFDRGYLSPYFINKADTGIVELDNPYILMADKKISNVRELLPILEAVAKSGKPLLIISEDLEGEALATLVVNSIRGIVKVAAVKAPGFGDRRKAMLQDISILTAGSVISEELAMELEKATLEDLGQAKRVVISKDTTTIIGGIGEKFNIQNRISQIRQQIQEATSDYDKEKLNERLAKLSGGVAVLKVGAAPEVEMKEKKARVEDALHATRAAVEEGVVPGGGVALVRVAAKISSLLGQNEDQNVGIRVALRAMEAPLRQIVSNSGEEPSVVTNNVKDGKGNYGYNAATDEYGDMIQFGILDPTKVTRSALQYASSVAGLMITTECMVTDLPKEEKSDLSS

SEQ ID NO: 1259 - protein, 525 aa, Buchnera aphidicola
NEARVKMLRGVNVLADAVKVTLGPKGRNVVLDKSFGAPSITKDGVSVAREIELEDKFENMGAQMVKEVASKANDAAGDGTTTATLLAQAIVNEGLKAVAAGMNPMDLKRGIDKAVIAAVEELKCLSVPCSDSRAITQVGTISANADEKVGMLIADAMEKVGKDGVITVEEGTGLQDELEVVKGMQFDRGYLSPYFINKTETGIVELDNPYILMADKKISNVRELLPILESVAKSGKPLLIISEDLEGEALATLVVNSIRGIVKVAAVKAPGFGDRRKAMLQDISILTAGSVISEELAMELEKSTLEDLGQAKRVVISKDPTTIIGGIGQKFDIQNRISQIRQQINEATSDYDKEKLNERLAKLSGGVAVLKVGAAPEVEMKEKKARVEDALHATRAAVEEGVVPGGGVALVRVAAKISNLLGQNEDQNVGIRVALRAMEAPLRQIVSNSGEEPSVVTNNVKDGKGNYGYNAATDEYGDMIRFGILDPTKVTRSALQYASSVAGLMITTECMVTDLPKEEKSDLSN

SEQ ID NO: 1260 - protein, 628 aa, Bordetella bronchiseptica
MCGVLGAWWRHHDEHEDARFAAGLRKLAHRGPDDRGSEHFAAPHGRLSLGHTRLAVIDLSAAGHQPMHADADRLAVVFNGEIYNYRELRSELRQIGASFRGDSDTEVLLAAWQHWGVAALRRFKGMFAFALYDRRQQTLTLARDAFGIKPMYYHAAPERLLFGSELPAVQALLPHPPRLNWQRAYDYLAYGQYDQPPDTFIAGIRQLPAGHLLTLDLRTGQAGEPMAWDDPASQECRPIGFQEAAEELRARFLDNVRLHLRSDVPIGAALSGGIDSSAIVCAMRWLEPDLPIQTFSFISDDTHRSEERWVDLVNQHCGATGHKIHIAPHELLDDLDDLIRVQGEPVGSTSIYAQYRVFKLAREHGVVVTLDGQGADELLGGYGGYPTERLASLLETGRLGAAARLLRQQGRGAPARLLQAAALAAGGRHLANLRHATGRQHAPAWLDAQVLRDQGVTMREPAHAWAAATPLRGRRLVNELAHALYHRGLGALLRHGDRNSMRFSVESRVPFLTQDLAEFALSLPERYLVSDSGQTKHIFRKAMRGIVPDSILDRDDKIGFATPEQQWMQATAPQMRQWLVDAADIPFLRNAEVTAQFDAMIAGATPFSWQAWRWVNFQRWMQHATVLP

SEQ ID NO: 1261 - protein, 241 aa, Sinapis alba
MGRGRVQLKRIENKINRQVTFSKRRSGLLKKAHEISVLCDAEVALVIFSSKGKLFEYSTDSCMEKILERYDRYLYSDKQLVGRDISQSENWVLEHAKLKARVEVLEKNKRNFMGEDLDSLSLKELQSLEHQLHAAIKSIRSRKNQAMFESISALQKKDKVLQDHNNALLKKIKEREKNTVHQEVQLIQCSNNSSILQPQYCLTSSRDGFVGRVEGENEGASSLAEPNSLLPAWMLRPTTNE

SEQ ID NO: 1262 - protein, 121 aa, Arabidopsis thaliana
  misc_feature (71)..(71): Xaa can be any naturally occurring amino acid
  misc_feature (99)..(99): Xaa can be any naturally occurring amino acid
  misc_feature (114)..(114): Xaa can be any naturally occurring amino acid
GQLAATPADVIEHPNAYAFVVDMPGIKGDEIKVQVENDNVLVVSGERQRENKENEGVKYVRMERRMGKFNXRKFQLPENADFGQDLLLFCHDGVLKGYXVQKLPSLPEPKKPKXNSKFKLP

SEQ ID NO: 1263 - protein, 617 aa, Desulfitobacterium hafniense DCB-2
MCSILGLVNFKRKISPQEIQCLSTMGKTLIHRGPDQNGLEYGEHFAFQHNRLAIIDIEKGRQPMTATHQGYDYTIVYNGELYNTADLRQELLEHGVKFKTYCDTEVVLYAYIIWGEQCSSKLNGIYAFVIYDSKEKKTYLSRDRFGVKPFFYTFVEGALLFASEIKALLKHPQVKPRLDYQGLWQLLYMMPVKEEGTAIFKDIFELPTASHAFYSLAPGASEAELKIAKYWTMEAYENQDSEAAIVATTRDLLVDAIERQLVSDVPLCTFLSGGLDSSIITAVAAQKYQAEGRQLATYSFEHEGNKDHFKQTLFQPQSDDEFAVYLAQHLHTQHQILTAKKEHLVDYLDEAVRYRDYPGMADIDSSLLFYCRQVKEHHTVALSGECSDEVFGGYPWFYRPEMLTRGFFPWIHEPHARISLFKPELVRPQEGFAYTSEIYRRSVEACPLLPDESETMQNSRIASWLSINYFMTSLLERKDRMSMASGLEVRVPFSDHRLVQYVYNVPWEIKFKDGVEKALLRAAMQDYLPPKILYRKKSPFPKTHDPHYEELVFHLFRKRLDSGSGMLAELLQKDVLNRLISPGNNTWFGQLMGLPQLLAWLVQLDYWFEAYQVQLVG

SEQ ID NO: 1264 - protein, 527 aa, Lycopersicon peruvianum
MEPNSSGSGKAAVGDGGGGGAPMLQPAPAPAPMPSANAPPPFLVKTYDMVDDPSTDKIVSWSPTNNSFVVWDPPEFAKDLLPKYFKHNNFSSFVRQLNTYGFRKVDPDRWEFANEGFLRGQKHLLKSISRRKPAHGHAQQQQQPHGHAQQQMQPPGHSASVGACVEVGKFGLEEEVERLKRDKNVLMQELVRLRQQQQSTDNQLQGMVQRLQGMELRQQQMMSFLAKAVNSPGFLAQFVQQQNESNKRIAEGSKKRRIKQDIESQDPSVTPADGQIVKYQPGINEAAKAMLRELSKLDSSPRLENFSNSPESFLIGDGSPQSNASSGRVSGVTLQEVPPTSGKPLLNTASAIAGQSLLPATSEMQSSHLGTCSEIINNQLSNIIPLVGGEDLHPGSLSASDMIMPELSQLQGILPENNTDVIGCDSFMDTIAVEGKMGLDIGSLSPGADIDWQSGLLDEIQEFPSVGDPFWEKFLQSPSSPDAAMDDDISNTSETKPQINGWDKTQNMEHLTEQMGATNIKQQKHMI

SEQ ID NO: 1265 - protein, 236 aa, Photobacterium profundum SS9
MPISTNTYQEWYQFRKRGRMSLQFEIVPVTPFQQNCSIVWCDETKEAAIVDPGGDIHLLKAKVQQLGLNVTQLLLTHGHLDHVGGTAPLAAELDVPIIGPHKDDAFWLEGLPRQSEMFGFPLTEAFAPTQWLSEGDEITIGNQKLQVIHTPGHTPGHVILFNDDAKVAFVGDVLFKGGVGRTDFDQGDYQTLIDSIKGKLWPLGNDVTFVPGHGPLSTFGHERVSNPFVADEMPLY

SEQ ID NO: 1266 - protein, 248 aa, Lycopersicon esculentum
MDFQSDLTREISPQRKLGRGKIEIKRIENTTNRQVTFCKRRNGLLKKAYELSVLCDAEVALVVFSNRGRLYEYANNSVKATIERYKKACSDSSNTGSVSEANAQYYQQEASKLRAQIGNLMNQNRNMMGEALAGMKLKELKNLEQRIEKGISKIRSKKNELLFAEIEYMQKREVDLHNNNQYLRAKIAETERAQHQHQQMNLMPGSSSNYHELVPPPQQFDTRNYLQVNGLQTNNHYPRQDQPPIQLV

SEQ ID NO: 1267 - protein, 238 aa, Oryza sativa (indica cultivar-group)
ENTMNRQVTFFKRRNGLLKKAHEISVLCDADVALIVFSTKGKLYEFSSHSSMEGILERYQRYSFDERAVLEPNTEDQENWGDEYGILKSKLDALQKSQRQLLGEQLDTLTTKELQQLEHQLEYSLKHIRSKKNQLLFESISELQKKEKSLKNQNNVLQKLMETEKEKNNAIINTNREEQNGATPSTSSPTPVTAPDPIPTTNNSQSQPRGSGESEAQPSPAQAGNSKLPPWMLRTSHT

SEQ ID NO: 1268 - protein, 514 aa, Oryza sativa (japonica cultivar-group)
MMLKDLAEIQQQQLLAAAEENMSNLTSASGDQASVSSHPAPPPAKKKRSLPGNPDPEAEVIALSPRTLMATNRYVCEICGKGFQRDQNLQLHRRGHNLPWKLKQRNPKEVVRKKVYVCPEAGCVHHDPARALGDLTGIKKHFSRKHGEKKWKCDKCSKRYAVHSDWKAHSKVCGTREYRCDCGTLFSRRLSWPPPPPPPWPSSEVLMIGLRCGCRRDSFITHRAFCDALAEESARAVTAAAAVAGQQQHGGGMLFSQVADVLDHQAAMAMGGHGLMQELCLKREQQQQQQQFAPSWLTAQQQQQQLEAMAGAGNPAAMYGSARLDQEFIGSSTPESGGAQQAGLSFGFSSTSSAPPHPAASSAHMSATALLQKAAQMGATLSRPSSHAHMAAAAAASTHNSSSSAATTNAPPPPPTSNVSSTCVGAGGYGLAFEASHFIAADESSRGARSDRDTGNGVAGAGNDGLTRDFLGLRAFSHGNIMSMAGFDPCMSTTSASSAAPYDHHHHSNKPWHS

SEQ ID NO: 1269 - protein, 193 aa, Arabidopsis thaliana
MEEKKTESATKNVKKVNLLDHIAIKHLLDESVSDIVTSRGYKEDVRLSNVKFLLGGIIIVVALVAQFYNKKFPENRDFLICCIGLYVVLTAVMQLILYIKEKNAILFTYPLEGSFTSTGLVVSSKLPRFSDQYTLTIDSADPQSISAGKSVQFTKSVTQWLTKDGVLVEGLFWKDVEALVKEYTEAGEPKKKR

SEQ ID NO: 1270 - protein, 248 aa, Nicotiana tabacum
MDFQSDLTREISPQRKLGRGKIEIKRIENTTNRQVTFCKRRNGLLKKAYELSVLCDAEVALIVFSSRGRLYEYANNSVKATIERYKKACSDSSNTGSISEANAQYYQQEASKLRAQIGNLQNQNRNMLGESLAALSLRDLKNLEQKIEKGISKIRSKKNELLFAEIEYMQKREIDLHNNNQYLRAKIAETERAQQQQQQQQMNLMPGSSSYELVPPPHQFDTRNYLQVNGLQTNNHYTRQDQPSLQLV

SEQ ID NO: 1271 - protein, 464 aa, Listeria monocytogenes str. 4b F2365
MTYKFPENFWWGSAASGPQTEGAANVDGRKPSIWDHWYKIEPGRFFNDVGPTNTSNFYYQYKEDIALMKQTGHNSFRTSIQWSRLIPDGIGEVNPKAVDFYNRVIDEMLANDVEPFMNLYHFDMPMSMQEKGGFESREVVDAYATFAKTCFELFGDRVKHWFTFNEPIVPVEAGYLYDMHYPNVVDFKRATQVAYHTTLAHALAVKEFHALEIPEGQIGIILNLTPSYPRSQNPADLKAAHIADLIFNRSFLDPVTKGEFPADLVEIIREHDALPEYTEEDLAIIKNNIIDILGVNYYQPRRVKAKEYAAHPDAPFMPEHLFDNYEMPYRKMNPYRGWEIFERAIYDIAINLRDNYDNIPFFISENGMGVEGESRYRNADGMIEDTYRIDFIKSHLKWLHKAIEEGSNCHGYHLWTFMDCWSWANAYKNRYGLVEVDLDNNFKRTIKASGHWYKELSENNGFED

SEQ ID NO: 1272 - protein, 310 aa, Ashbya gossypii ATCC 10895
MVRVMQKEDCHFRRLSDGTQIPSVGLGVYQVSEQTVQDLVYEALEVGYRLFDSAQAYHNEDGVARGIAAWLKHAPGRRREDVYFTTKINTQNHGYEATKKSLEKSLHAAGPLGYIDLVLVHAPMSDRTRRLGTWQALEEAVVEGQVRSIGVSNYGQQHLSELLGWEGLKIRPVVNQVEINPWLCRQELVQYCRENNIAVQAFSPLMRGKRLDDPILQKVAHQYDKGVAQILVRWSIQMGFIVLPKAAKKERLAPNFDIWDFELSAETMSELTHSDDYFVTVPGGIPRLMKAEVISTITDLQHETLVDMEA

SEQ ID NO: 1273 - protein, 95 aa, Fagopyrum sp. C97106
GRLYEYANHSVKATIDRYKKACSDSAGVTSVAEANAQYYQQEAAKLRNQIRTLQNNSRNLSRHMMGEGLSSLSMKDLKNLEARLEKGISRIRAKK

SEQ ID NO: 1274 - protein, 95 aa, Fagopyrum sp. C97107
GRLYEYANHSVKATIDRYKKACSDSAGVTSVAEANAQYYQQEAAKLRNQIRTLQNNSRNLSRHMMGEGLSSLSMKDLKNLETRLEKGISRIRAKK

SEQ ID NO: 1275 - protein, 491 aa, Nicotiana tabacum
MVLSKTSSESDVSVHSTFASRYVRTSLPRFEMAENSIPKEAAFQIINDELMLDGNPRLNLASFVTTWMEPECDKLMMDSINKNYVDMDEYPVTTELQNRCVNMIARLFNAPLEEKETAVGVGTVGSSEAIMLAGLAFKRNWQNKRKAEGKPYNKPNIVTGANVQVCWEKFANYFEVELKEVKLREGYYVMDPVQAVEMVDENTICVAAILGSTLNGEFEDVKLLNDLLIEKNKQTGWNTPIHVDAASGGFIAPFLYPELEWDFRLPLVKSINVSGHKYGLVYAGIGWVIWRTKQDLPEELIFHINYLGADQPTFTLNFSKGSSQVIAQYYQLIRLGYEGYRNVMENCRENAIVLREGLEKTGRFNIVSKDEGVPLVAFSLKDNSRHNEFEVSETLRRFGWIVPAYTMPADAQHVTVLRVVIREDFSRTLAERLVLDIVKVLHELDTLPARLSAKLEEVKLVKNGKKFELEVQREVTNYWKKFVLARKAPVC

SEQ ID NO: 1276 - protein, 371 aa, Brucella melitensis 16M
MASLFDPITIGDLKLANRIVMAPLTRNRSPHAVPNDLNVIYYEQRASAGLIITEATPISQQGQGYADVPGLYSAEQLAGWRRVSDAVHNAGGKIVAQMWHVGRISHNSLQPNGEKPVAPSAITAKSKTYLVHPDGAGEFVPTSEPRALEKSELPGIVADYARAAKDAVETAGFDGVEIHSANGYLIDQFLRGGSNQRTDEYGGSIENRARFLFEVVDAVTKAIGAGKVGIRLSPVTPANDASDPDPQPLFDYVIGKLAACGLAYIHIIEGATGGPRDFQQGPQPFDYARFKQVYRDAGGKAAWMVNNGYDRKMAEEEVEAGRADLVAFGKPFIANPDLVRRLKENAPLNELDQKHMYGGGAKGYTDYPVLA

SEQ ID NO: 1277 - protein, 1123 aa, Stellaria longipes
MASPAQSQSSTNSGRSKHSARIIAQTIQDAKLHAEFEESSNEFDYSSSVRGSTSGVNQLPQSDKVTSSYLLQIQKGKFIQPFGCLLALDDKTFRVIAFSENAPEMLTMVSHAVPSVGDLPVIGIGTDIRTIFTDPSASALQKALGFTDVSLLNPILVHCKNSGKPFYAIVHRVTRSLVIDFEPVKPYEVPMTAAGALQSYKLAAKAITRLQSLPSGNMDRLVDTMVQEVFELTGYDRVMAYKFHDDDHGEVVSEVTKPNLDSYLGLHYPATDIPQAARFLFMKNKVRLICDCRAKNVRVVQDEKLSVDLTLCGSTLRAPHGCHAQYMENMNSIGSLVMAVVVNDEDDEDGGSAPAQPHKRKRLWGLVVCHHTSPRFVPFPLRYACEFLAQVFAIHVNKELELESQFLEKKILRTQTLLCDMLMRDAPLGIVTQNPNVMDLVKCDGAALLYNNKIWKLGISPTDYQLRDIAGWLSRDHTDSTGLSTDSLHDAGYPGARSLGDTVCGMAAVRITLNNMLFWFRSHTAAEVKWGGAKHETGEKDDGSKMHPRTSFKAFLEVVKRRSVPWKDYEMDAIHSLQLILRNAFKDVEASDLNTSVIHSKISDLQINGLRELEAVTSEMVRLIETATVPILAVDADGLVNGWNTKIFELTGVPVAEAVGKHIASLAEESSIDNVKRMLQLALQGEEKKNVQFEIKRHQSNPDSSPISLVVNACASKDVNGNVVGVCLITQDITGQKTVMDKFTRIEGDYKAIIQSPNPLIPPIFGTDEFGWCSEWNPAMAKLTGWSREEVIDKMLLGEVFGTQKSCCRLKNQEAFVNFGIILNGAMSGQNTDKLPIEFFTRFGKYIECLLCVNKKLDGDGAVTGVFCFLQLASHDLQHALHIQRLAEQAATKRAKALAYMKRQIKNPLSGIMFSGKILDGTEMGEDQRQVLQTSIRCQGQLNKILDDSDLDSIIDGYCELEMVEFTVQDILVASTCQVMAKSNEKGIQIANDSTTEHGLKETLYGDSLRLQQILADFLWISVNFTPAGGNVGIKVRLTKDKIGESIQHANLEFRISHTGGGISEELLSQMFENQGEVSEEGISLLVSRKIVKLMNGDVQYLRSAGSSTFIISVELAIAGNSL

SEQ ID NO: 1278 - protein, 178 aa, Brassica napus
VDPRVRNNPGGLVKVGLDVAQLWLDGDETLVYTIDREGVTSPINMIDGHAVTHDPLVVLVNEGSASASEILAGALHDNGRAVLVGRRTYGKGKIQSVTELDDGSALFVTVAKYLSPSLHEIDQVGITPDVQCTTDKIDSLTGEILMKMNSSVPLLEADSCVMVAEHELETKQSSGAAS

SEQ ID NO: 1279 - protein, 1122 aa, Stellaria longipes
MASPAQSQSSTNSGRSKHSARIIAQTIQDAKLHAEFEESSNEFDYSSSVRGSTSGVNQLPKSDKVTSSYLLQIQKGKFIQLFGCLLALDDKTFRVIAFSENAPEMLTMVSHAVPSVGDLPVIGIGTNIRTIFTGPSASALQKALGFTDVSLLNPILVHCKNSGKPFYAIVHRVTRSLVIDFEPVKPYEVPMTAAGALQSYKLAAKAITRLQSLPSGNMDRLVDTMVQEVFELTGYDRVMAYKFHDDDHGEVVSEVTKPNLDSYLGLHYPATDIPQAARFLFMKNKVRLICDCRAKNVRVVQDEKLSVDLTLCGSTLRAPHGCHAQYMENMNSIGSLVMAVVVNDEDDEDGGSAPAQPHKRKRLWGLVVCHHTSPRFVPFPLRYACEFLAQVFAIHVNKELELENQFLEKKILRTQTLLCDMLMRDAPLGIVTQNPNVMDLVKCDGAALLYNNKIWKLGITPTDYQLRDIAGWLSRDHTDSTGLSTDSLHDAGYPGARSLGDTVCGMAAVRITPNDMLFWFRSHTAAEVKWGGAKHETGEKDDGSKMHPRTSFKAFLEVVKRRSVPWKDYEMDAIHSLQLILRNAFKDVEASDLNTSVIHSKISDLQINGLRELEAVTSEMVRLIETATVPILAVDADGLVNGWNTKISELTGVPVAEAVGKHIASLAEESSIDNVKRMLQLALQGEEKKNVQFEIKRHQSNPDSGPISLVVNACASKDVNGNVVGVCLIAQDITGQKTVMDKFTRIEGDYKAIIQSPNPLIPPIFGTDEFGWCSEWNPAMAKLTGWSREEVIDKMLLGEVFGTHKSCCRLKNQEAFVNFGIILNGAMSGQNTDKLPIEFFTRFGKYIECLLCVNKKLDGDGAVTGVFCFLQLASHDLQHALHIQRLAEQAATKRAKALAYMKRQIKNPLSGIMFSGKILDGTEMGEDQRQVLQTSIRCQGQLNKILDDSDLDSIIDGYCELEMVEFTVQDILVASISQVMAKSSEKGIQMSNNCTEHGFKETLYGDSLRLQQILADFLSISVNFTSPGGHIGVTVRLTKDKIGESVQLANLEFRIMHTGGGISEELLSEMFESRGNASEDGISLLISRKLVKLMNGDIQYLRSAGTCTFIIYVELAVADNSS

SEQ ID NO: 1280 - protein, 671 aa, Thermobifida fusca YX
MRSTPNQQENSVPTGDGTRFPHLFSPFQIGPMRLRNRVMAPPHSSAIGNLWGTDEKEVERTFAYWRSRVSGDGPAWVGGVTGRVRNILIPGFEPHGYGAETTGYFRQPFYVERIGRFVEEMHALGAVVTTQLTLLGGVPHAPSPRRSSTLYNHRPHVLSTHEIAEFVEEYRFSASQARKAGLDGIELHLNHDDLLEWFLSPLTNQRTDAYGGSLENRARFAVEVLTAVREEIGSDMALGVRFNLREEEPGGYTLADGIEIAQYLESTGLLDFLHAVIGSPWGDPSYIQPYFYQPAQWADLAGQLRRSVSLPVIYTGRINSVEVAEKVLADGNADVVGMARAFIADGDILRKAREGRLADIRPCVGGNECITRRYVDKLPFGCAVNPHTSNEIDGPWKQAANPRRILVVGGGPAGMELAALTAESGHTVELWEATDKLGGQLRTILNAPFQEQMARYLEWQERRLEKAGVTVRRNTRATADTVAEAGFDVVAVATGARPRRPAEIEGVDQDYFVYDIRDVLLGNVAVGQEVLVVAQDDHLPPLIVADYLSDRGHDVTIVYPTAGPAPMLGRYILGGMLARLTSRGVQFRFMEDVIGIEEERIRIRHTYSHQESELGAFDSVVLACGGDADSSLYEELRGRVPELHILGDAFAPTRLVAVTRQAYALAKELQK

SEQ ID NO: 1281 - protein, 504 aa, Glomerella cingulata
MGSDEKSPSTYRYDETPTYTTSNGAPVANPQHWQRPGPSGPLLLQDFHLIDLLAHFDRERIPERVVHAKGAGAYGEFEVTHDISDIASIDMLKEVGKKTKAVVRFSTVGGEKGSADSARDPRGFASKFYTDEGNWDWVYNNTPIFFIRDPSLFPVFIHTQKRHPRTNLKDATMMWDYWSTHQECVHQLMHLFSDRGTPYSYRHMNGYSGHTHKWTKPDGSFVYVQIHLKTDQGNKTFTNEEAAKLASENPDWHTQDLFESIQRGEHPSWTVYVQTLTPEQAEAFRWNVFDLTKVWPQSEVPLRPFGRLTLNRNPDNYFAEIEQVAFSPSHLVPGVEPSADPVLQSRLFSYPDTHRHRLGVNYQQIPVNRPLNAFNPHQRDGAMSVDGNYGANPNYPSSFRPLNYKPVKAAGAHKQWAGKVVEDLFGPVTAQDYEQAAGLWAVLGRQDGQQRNFVLNVSGALAGARADVRARVYDMFSKVDAGLGAAIETETEAVAKPADVRSKL

SEQ ID NO: 1282 - protein, 461 aa, Burkholderia fungorum LB400
MTFLKSPPPTPEDVADEYAATISGSSLPKYRIPEASSDRRAVFDLVRDELFMDGNSRQNVATFCTTYADDEVRHLMDLSIDKNMIDKDEYPQTAEIEMRCVHMLADLWHASKAWKTTGCSTTGSSEACMLGGLALKWQWKKRREAQGKPTDKPNFVCGPVQVCWAKFARYFDVEMRQVPLRGEATGLTPEDLAEYCDENTIGVVATLGITFTCVYEPVKALAGALDALQANVGLDIPIHVDAASGGFVAPFIQPDLEWDFSVPRVKSINASGHKYGLAPLGVGWVVWRSTQDLPDELIFRVDYLGGDMPTFALNFSRPAGQIIAQYYMLLRLGREGYRRIQQECADTAQALADGLAKIDQLEMIYDGRGALPAVCYKLKHPETAGFTLFDLSDQVRMRGWQIASYELPAGREDTIVQRVLIRRGVTRDMAAMLLEDIRHAIGHLTKNPVLHSSAGPTFHHN

SEQ ID NO: 1283 - protein, 492 aa, Zea mays
MLVQHRPSSAFNAPYWTTNSGAPVWNNDSSLTVGARGPILLEDYHLVEKLANFDRERIPERVVHARGASAKGFFEVTHDITHLTCADFLRAPGVQTPVIVRFSTVIHERGSPETLRDPRGFAVKFYTREGNWDLVGNNFPVFFIRDGIKFPDMVHALKPNPRTHIQDNWRILDFFSHHPESLHMFSFLFDDVGIPADYRHMDGSGVHTYTLVSRAGTVTYVKFHWRPTCGVRSLMDDEAVAVGGANHSHATKDLTDAIAAGNFPEWTLYIQTMDPEMEDRLDDLDPLDVTKTWPEDAFPLQPVGRLVLNRNIDNFFAENEQLAFCPGLIVPGIYYSDDKLLQTRIFSYSDTQRHRLGPNYLLLPANAPKCAHHNNHYDGSMNFMHRHEEVDYFPSRYDAVRNAPRYPIPTAHIAGRREKTVISKENNFKQPGERYRAMDPARQERFITRWVDALSDPRLTHEIRTIWLSNWSQADRSLGQKLASRLSAKPSM

SEQ ID NO: 1284 - protein, 153 aa, Chorispora bungeana
MNSVSAFSEMFGSDYEPQGGDYCPTLATSCPKEPAGRKKFRETRHPIYRGVRQRNSGKWVSEVREPNKKTRIWLGTFRTAEMAARAHDVAALALRGRSACLNFADSAWRLRIPESTCAKDIQKAAAEAALAFQDETCDTTTTNHGLDMEGRCG

SEQ ID NO: 1285 - protein, 142 aa, uncultured bacterium 582
MGLKYLHTMVRVKNLETSLAFYTLLGLKETRRKESENGRFTLIFMAPDGQEDRPIELTYNWDGDDGLPNDSRHFGHLAFGVDNIYETCAHLQANGVTINRPPRDGHMAFIRSPDNISIELLQNGPPLEGAEPWLSMGNTGHW

SEQ ID NO: 1286 - protein, 457 aa, Staphylococcus aureus subsp. aureus MW2
MAIAVLLNRMFRMEHNPLFEYIYQQKEDIDACYFIIPEEDMSSASDLKAQFYRGTLQRFYQSLHAEKLTPYVMSYDDIISFCKENNISEVVTAGDIMSYHLEEYDILHQRSLFNEARIAVTLIRGNHYFKASKTMNQQGEPYKVFTSFYKKWRPYLRHRDVYHYDLKSFEDFVIASPDDLVFDDIAFGSSQIIEQNKWQHFLDQDIQNYESGRDYLPEVLTSQLSVALAYGLLDIIEIFNDLLARYDEDEANYEAFIRELIFREFYYVLMTQYPETSYQAFKPKYRQIKWSQNEADFNAWCEGQTGFPIIDAAIMELTQTGFMHNRMRMVVSQFLTKDLFIDWTWGEKFFRKHLIDYDAASNIHGWQWSASTGTDAVPYFRMFNPIRQSERFDAKALYIKTYLPIFNQIDAKYLHDTQRNESNLFEQGIELGSHYPRQIVDHQEKRTQVLATFKALD

SEQ ID NO: 1287 - protein, 482 aa, Geobacillus kaustophilus HTA426
MKKSTTAALMAISMLIGAGGTYAGLQLADRPMEGSLSTIVSNEPSKSTNDSEEMKKIRQAYELIKNRYVEKVDEEKLTEGAIQGMINTLHDPYSVYMDAETTEQFNESLDSSFEGIGAEVSMIDGKVTIVAPIKNSPAEKAGLKPNDQILRVNGESLEGLDLYEAVLKIRGKKGTTVELDILRPGVKNVMKVKVVRDEIPIQTVYDSIKTYNGKKAGYLQITSFSENTAADFKKKLAKLEAEHIDGLIIDVRGNPGGYLQSVEEILKQLIPKGKPYVQIEERDGDRQKFYSDLTAKKPYPIVVLIDKGSASASEILAGAMKEAGGYKLVGETTFGKGTVQQAIPMGDGSNIKLTLYKWLTPDGHWIHKKGIKPDVAVVQPDYFHVAPLHVEKPLRYDMNDEQIANAQKMLKGLGFNPGRTDGYFSKETEQAVQAFQKANQLPVTGRIDEATADALQTKIMEAVRDPNHDVQLKKALGVLFPS

SEQ ID NO: 1288 - protein, 544 aa, Bartonella bacilliformis
MAAKEVKFGRDARERLLRGVDILADAVKVTLGPKGRNVVIDKSFGAPRITKDGVSVAKEIELENKFENMGAQMLREVASKTNDIAGDGTTTATVLGQAIVQEGVKAVAASMNPMDLKRGIDAAVEAVVADLFKKAKKIQTSEEIAQVATISANGAEDIGKMIADAMEKVGNEGVITVEEAKTAETELEVVEGMQFDRGYLSPYFVTNSEKMMVDLDDPYILIHEKKLSNLQSLLPVLEAVVQSGKPLLIIAEDVEGEALATLVVNKLRGGLKIAAVKAPGFGDRRKAMLEDIAVLTSGQVISEDVGIKLENVTLEMLGRAKKVHVSKETTTIVDGAGQKSEINARVSQIKAQIEETTSDYDREKLQERLAKLAGGVAVIRVGGSTEVEVKEKKDRVDDALNATRAAVEEGIVPGGGTALLRAAKALSIKGKNPDQEAGIGIIRRALQAPARQIAHNAGEEAAVIVGKVLENCSDTFGYNTATAQFGDLISFGIVDPVKVVRSALQNAASIASLLITTEAMVAEVPKKEAAAPAMPGGGMGGMDF

SEQ ID NO: 1289 - protein, 687 aa, Sinorhizobium meliloti
MAKKPSAPNNTKPATIHDQKATRGNGGELHQIAEGDTPVLTTAQGGPVADDQNSLRAGERGPTLIEDFHFREKIFHFDHERIPERVVHARGYGVHGFFETYESLAAYTRADLCQHPGERTPAFVRFSTVAGSKGSFDLARHVRGFAVKIYTKEGNWDLVGNNIPVFFIQDAIKFPDVIHSVKPEPHREFPQAQSAHDNFWDFISLTPESMHMIMWVMSDRGIPRSFRFMEGFGVHTFRFVNAKDESTFVKFHWKPKLGLQSLVWNEAVKINGRDPDFHRRDMWQAIQSGNFPEWDLHVQLFDQDFADKFDFDILDPTKVIPEEVLPTKPVGRLVLDRMPENFFAETEQVAFMTQNVPPGIDFSDDPLLQGRNFSYLDTQLKRLGSPNFTHLPINAPKCPFQHFQQDGHMAMRNPVGRVNYQPNSWSEGPKLRIRAESFADHYSQARQFFISQTPPEQRHIADALTFELSKVETPVIRERMVAHLLNIDETLGKKVGHALGLETMPKPADAAVATRQDLDPSPALSIIQRGPKRFEGRKLGILATDGADGALLDALIGAVENEKAAFELIAPKVGGFTASDGKRIAAHQMLDGGPSVLYDAVVLLPSAEAVADLIDVATARDFVADAFAHCKYIGYAGAAVPLLERAGIAELLDEGTIELTDAASAAAFLTEIGKLRVWGREPSVKLK

SEQ ID NO: 1290 - protein, 163 aa, Zea mays
MSLIRRGSAFDPFSLDLWDPFQGLFPFGSGSSSSSSLFPSFGGTTTSSETAAFAGARVDWKETPEAHVFKTDVPGLKKEEVKVELEDGNVLQISGERCKEQEEKTDTWHRVERSSGKFLRRFRLTENARTEQISASMENGVLTVTVPKEEAKKADVKSIQISG

SEQ ID NO: 1291 - protein, 306 aa, Cryptococcus neoformans var. neoformans JEC21
MLGRVGGAKEDETWTKTVSMRMFLPLLLEDGGGRRPPRRSGARKVNDVAFANGVPIYTSRRTRSKKYLMVIPSSHCATATQPLSHTTMSLIHALIARGTTVLAEHATGTAELKPAAQITILSKIPPNNSKLTYVWQDRLIHYVSSNGVIYLVMADDSVGRRMPFAFLADLERRFTAQYESDDIVSAGAHSLEEFEPELAKLMHQYTSSPPADPLRQAQSDLNNVKDIMVQNIDSILQRGERLDLLVDKTDTLAGQAYAFRRGARSVRRQQWWKNMRIMALSGVVGLLLLYLFIAQFCGASLGHCRS

SEQ ID NO: 1292 - protein, 263 aa, Oryza sativa (japonica cultivar-group)
MLHVVYRVGDLDKTIKFYTECLGMKLLRKRDIPEERYTNAFLGYGPEDSHFVVELTYNYGVESYDIGTAFGHFGIAVEDVAKTVDLIKAKGGTVTREPGPVKGGKSVIAFIEDPDGYKFELIERGPTPEPLCQVMLRVGDLDHAINFYEKAFGMELLRKRDNPQYKYTIAMMGYGPEDKNAVLELTYNYGVKEYDKGNAYAQIAISTDDVYKTAEVIRQNGGQITREPGPLPGINTKITACTDPDGWKTVFVDNVDFLKELEE

SEQ ID NO: 1293 - protein, 152 aa, Picea glauca
MAMDPSLITVQHLLGVPDDLEKLLNAPTHSYMRDTKAMASTPVDVKEYPNSYVFIIDMPGLKSNDIKVQVEDENVLNISGERKRNEKDEEGEVKYIRMERRVGKFMRKFTLPADCNLEAISAACQDGVLTVTVPKLPPPEPKKPKTIEVKIG

SEQ ID NO: 1294 - protein, 314 aa, Arabidopsis thaliana
MAEEIRFFELNTGAKIPSVGLGTWQADPGLVGNAVDAAVKIGYRHIDCAQIYGNEKEIGLVLKKLFDGGVVKREEMFITSKLWCTYHDPQEVPEALNRTLQDLQLDYVDLYLIHWPVSLKKGSTGFKPENILPTDIPSTWKAMESLFDSGKARAIGVSNFSSKKLADLLVVARVPPAVNQVECHPSWQQNVLRDFCKSKGVHLSGYSPLGSPGTTWLTSDVLKNPILGGVAEKLGKTPAQVALRWGLQMGQSVLPKSTHEDRIKQNFDVFNWSIPEDMLSKFSEIGQGRLVRGMSFVHETSPYKSLEELWDGEI

SEQ ID NO: 1295 - protein, 281 aa, Lactococcus lactis subsp. lactis Il1403
MQRKLTLNDGNVIPQFGLGLYQLPEGTETQNIVKTALELGYRHLDTSHAYQNETSVGQAIQDSEISNSEIWITSKLWPSDYEQAPEAIERMLKRLKVKQIDLLLLHQQVGNYRKAWIALENAVKEGKVKSIGISNFDGERLVDLFNFADIKPSVIQVETHPYHQQVELQEFLKPYGTKIESWYPLGHGDKNLLEEKIFKKMAKKYNKTVAQIILRWHIQEGIIVFPRSTQKEHLAENINIFDFELSCSEIKEIRKLNKKQPYFTMTYEEQEKNFLSWKLED

SEQ ID NO: 1296 - protein, 572 aa, Magnaporthe grisea 70-15
MVLSRHVNPDDIVQHLHNSSLKEQDGDNDTRTQAAISHLTPYSSRYASNVSLPKYKLPKEGAEADTVYSMIRDELDLDGKPNLNLASFVGTYLEDNAQKLMVENIAKNLSDADEYPAMISMQQRCVSILAHLWNVQKGEKAIGSATTGSSEAIQLGGLAMKRRWQEARRAAGKDDSKPNIIMGANAQVALEKFARYFDVEARILPVSEKSRYRLDADMVRDNIDENTIGIFIILGSTYTGHYEPIEEISEILDKYQAETGHDIPIHVDGASGAFIAPFTHAQAGGPKWDFSLPRVKSINTSGHKYGLVTAGVGWIVWRDESFLPKHLIFELHYLGGTEESYTLNFSRPGAQVITQYFNLVHLGFSGYRAIMENCLANARLLSKSLEATGWYTCVSDIHRRVETAGSNGSNGKQKEPEVTPEHAKETSADYVAGLPVVAFCFSDEFRRQFPHVKQETVSVLLRARQWIIPNYALPPNEEKTEILRVVVRESMSLDLLDRLLSDICEVTQKLMDEDELDLNVLQGSRHKGPCTKADVSKEGRAQAKKERDDRHKKHQATGRTGRMETGVHRSTC

SEQ ID NO: 1297 - protein, 551 aa, Magnetococcus sp. MC-1
MAAKEVKFGEAARAKMLNGVNILANAVKVTLGPKGRNVVLDKSWGAPRMTKDGVSVAKEIELEDKFENMGAQMVREVSSKTADVAGDGTTTATVLAQAIIREGMKAVAAGMNPMDLKRGIDLAVEAVVVGLKGISREVANSQEIAQVGAISANSDKVVGDMIAEAMDKVGKEGVITVEEAKGLETTLDVVEGMQFDRGYLSPYFVTNADKMLVQMENPLILLVEKKISNLQQILQILEGAVQSSRPLMIIAEDVEGEALATLVVNKLRGGLKVCAVKAPGFGDRRKAMMEDIATLTGGVLVSEDVGVKLENVTMDMLGMAKSIVVTKEDTTIIDGAGDHEAIKARVNQIRAQIEETSSDYDREKLQERLAKLAGGVAVIKVGGATEVEVKERKDRVDDALHATRAAVEEGIVPGGGVALLRAREASLTNLQGANHDQQVGINIVTRALEEPLRIIASNAGAEGSVVVNRVVETKETNFGFNAATGVYEDLVASGVIDPAKVVRHALQAAASVAGLMITTEAMVAELPKDEPAMPGGDMGGMGGMGGMGGMM

SEQ ID NO: 1298 - protein, 531 aa, Burkholderia fungorum LB400
MVEGVNILANAVKVTLGPKGRNVVLERSFGGPTVTKDGVSVAKEIELKDKLQNMGAQMVKEVASKTSDNAGDGTTTATVLAQSIVREGMKYVASGMNPMDLKRGIDKAVFAAIEELRKISKPCTTNKEIAQVGAISANSDSSIGDRIAEAMDKVGKEGVITVEDGKSLQDELDVVEGMQFDRGYLSPYFINNPDKQVAVLENPFVLLHDKKVSNIRDLLPILEQVAKAGRPLLIIAEDVEGEALATLVVNNIRGILKTVAVKAPGFGDRRKAMLEDIAILTGGQVIAEETGLTLEKATLAELGQAKRIEVAKENTTIIDGAGEAANIEARVKQVRTQIEEATSDYDREKLQERVAKLAGGVAVIKVGAATEVEMKEKKARVEDALHATRAAVEEGIVAGGGVALIRARTAIAGLKGANADQDAGIKIVLRAMEEPLRQIVTNGGEEASVVVAAVAAGTGNYGYNAATGEYVDLVDAGVVDPTKVTRTALQNAASVAGLLLTTDAAVCELPKEDAPMAGGMPGGMGGMGMDM

SEQ ID NO: 1299 - protein, 349 aa, Nostoc sp. PCC 7120
MAKASESLDLSVNESTDKALDRDCTTLSRHVLQQLQSFSADAQDLSALMNRIALAGKLVARRLSRAGLMEGVLGFTGEVNVQGESVKKMDVYANDVFISVFKQSGLVCRLASEEMDEPYYIPENCPIGRYTLLYDPIDGSSNTDTNLSLGSIFSIRQQEGDDSDGQAKDLLTNGRKQIAAGYILYGPSTMLVYTMGTGVHSFTLDPSLGEFILSEENIRIPDHGAVYSVNEGNFWQWEESMREYIRYVHRTEGYTARYSGAMVSDIHRILVQGGVFLYPGTIQNPEGKLRLLYESAPLAFLIQQAGGRATTGLVDILDVVPKKLHQRTPLIIGSKEDVAKVESFIQNGH

SEQ ID NO: 1300 - protein, 169 aa, Triticum aestivum
SLYQNSSEELSAVHASDYDHFHANPQNSSHEKFISSHSNSVHALDQLRTIKNKASSSSQFVKKMMASLPYTCQSQSPSPYFDLSIFRYDEKLFSAIDRHRHCTEHPIKFISVRQPNVVKFKIKPGSDSGASDSRGKRISSFLFHPFFPLALSIQQTNMQPTVVNVHFRR

SEQ ID NO: 1301 - protein, 404 aa, Haemophilus influenzae 86-028NP
MRLFPKSDKLEHVCYDIRGPVHKEALRLEEEGNKILKLNIGNPAPFGFEAPDEILVDVLRNLPSAQGYCDSKGLYSARKAIVQYYQSKGILGATVNDVYIGNGVSELITMAMQALLNDGDEVLVPMPDYPLWTAAVTLSGGKAVHYLCDEEANWFPAIDDIKAKVNAKTKAIVIINPNNPTGAVYSKELLQEIVEIARQNNLIIFADEIYDKILYDGAVHHHIAALAPDLLTVTLNGLSKAYRVAGFRQGWMILNGPKHNAKGYIEGLDMLASMRLCANVPMQHAIQTALGGYQSINEFILPGGRLLEQRNKAYDLITQIPGITCVKPMGAMYMFPKIDVKKFNIRSDEKMVLDLLRQEKVLLVHGKGFNWHSPDHFRVVTLPYVNQLEEAITKLARFLSDYRQ

SEQ ID NO: 1302 - protein, 151 aa, Picea glauca
MAMDPLLNTVQQLLVVPDDLERILHAPTRSYMRDTEATASTPVDVKEYPNSYVFIVDMPGLKSNDIKVQVEDENILNISGERKRNEKEEGEVKYIRMERRVGKFMRKFSLPADCNLEAISAACQDGVLTVTVPKLPPPEPKKPKTIAVQIG

SEQ ID NO: 1303 - protein, 317 aa, Arabidopsis thaliana
MANIIFLDQPVGSGFSYSRTPLVDKISDTGEVKRIYEFLQKWLSKHQQFFSNPFYVGGDSYSGMIVPPLVQEIGKGNYQINLQGYILGNPITDTESEQNYQIPYAHGMALISDELYKSMERICKGNYVKVDSLNTKCYKLIKDYQKCIHKLNKYHILLPDCDITSPDCFLYRYTLITFWANNKSVREALQVNKGSIGKWVQCNYKNISYNYDIKSSVAYHMKNSIDGYRSLIYNGDHDMMVPFLATQAWIRSLNYSITDDWKPWMINDQIAGYTRSYSNKMTFATIKASLLGSGHTAEYKPKETSIMFKRWISAQPL

SEQ ID NO: 1304 - protein, 467 aa, Listeria monocytogenes str. 4b F2365
MTSVMWFRRDLRVNDNKALYHACKENDLLLLFQVNPAQFITGSPSHQAFFASVAHFKQEIDKTAHLQIMFGEPIECFQQLKDSLPSWDKVYFNRDETGYGAKRDEAAQAFFDEQKIEVQAFHDSYLHSAEEVKKSPTEYYKIFTPYYKKWREEIKETPFKVTLKHENIRKESLFLKYEEQFAEMTSDLPILDIGERAANTRLANFIKHDVADYDKARDFPELDKTSHLSRYLRTGEISIRTIWQSLQETEATEGRATFEKELCWRDFYNMIYVSFPNQKNEPIQENYRFIEWENNREYFKAWQEGKTGFPLVDAAMRQLKETGWMHNRLRMITASFLTKDLLIDWRFGEKYFQQMLIDYDPASNIGGWQWAASTGTDAVPYFRIFNPTTQSQKFDSTGKFIRKYVKELANLPDKYIHQPEKMSETEQKEHGLLLGKDYPFPIVDHKERRKLAIARYEFSKEHSRGNI

SEQ ID NO: 1305 - protein, 618 aa, Desulfovibrio desulfuricans G20
MCGIFGIISQLVPPSKRELETSCELLAHRGPDGYGYFIKGPVGFAHRRLSIIDIAQGSQPMSTQEGELTITYNGEIYNFRHIKASLVAKGYSFQTNSDTEVILAAYKEWGTECVQHLRGMFAFAIADHIRQTVFLARDPFGIKPLVYRESSLGFAFSSELPALVRLKKWPSVTVSPKAVSLFFRHQYIPAPYTIYNETQKLPPAHAMLVDFNGCIQQKWRYWTPAFHPSVTYSLQDAIKDAHNSVTESIDAHTLSDVPIGVFLSGGIDSTLVAARLAQRHSRSIPAFTIGYKESDFSELPYAQHAADKLGLKLYAQTLDEKALKFAPEILSHYGEPFGDSSVIPTWHVCKLASEHVPVCLSGDGADELFGGYQKYQIWSESTPWRQLQLAGSAIAKRKLRTAWWMLRRASRSFCDDKAFWLDHVQYYPPQGIRQLTHPDMHPYANAFAPAFDEPFLNIDKLGRFEYAQRMDLLSYLPDCLLAKVDLASMAHGLEVRPALLDKYVFQLAATLPTDVKLHPQKGGKVVLKELLLRQGFSEEFVYRPKQGFALPLRHWFISGQPANNMLCELVSSYKRELSEHLTVSDIERMLTAHSPACDYSGPLWLAFAFTCWVANTSK

SEQ ID NO: 1306 - protein, 749 aa, Ajellomyces capsulatus
MTSKVEEGLQRVKELVENMQPGEQKVADLARDTTDVNGCLPFTTDHGVKVSNTDFWLRLASENQTGPLLLEDQIAREKIHRFDHERIPERVVHARGTGAFGHFKLFESAADVTSAGVLTDTSRTTPVFVRFSTVQGSKGSFDTVRDVRGFATKFYTEEGNWDLVGNNIPVFFIQDAVKFPDFVHAVKPEPHNEVPQGQTAHNNFWDFVYMHPEATHMFMWAMSDRAIPRSYRMMQGFGVNTFVLVNKQGKRHFVKFHWMPELGVHSLVPDESFKLGGQDPDFHRKDLMEAIDNKVYPKWKFGIQVLPEEKEHDFDFDILDPTKIWPESLIPVRYIGEMELNRNVDEFFPQTEQVAFCTAHIVPGIEFSGDPLLQGRNFSYFDTQITRLGVNWEELPINRPVCPVMNHNRDGAMRHKITQGTVNYWPNRFEACPPTKPEDGGFVTYPQKVEQSIKARMLSSKFREHINQAQLFYNSLSEYEKLHVNNAFCFELDHCDDPIVYNRLVSRISEIDHALAQAVAVKVGAPTPPRPGRDNPGQTTINLSQKYINDRQLSSPTIKGRRIAILIGDGYDSVAFGTVIAAVSAMGALPFIIGTKRQPIFADDEDRNHSKGVTPNHNYTSQRSTCFDATFIPGGSHIKELSQLGLIQHWVAEQFGHCKAIGATGEAINLIVQALSNLPDLEVASASSGHPVDWYGVVTSSKLHEPHSLTEGIKLFPEASDFLGKLFYQISQHRNYEREMAGLTDKVPF

SEQ ID NO: 1307 - protein, 444 aa, Thermotoga neapolitana
MKKFPEGFLWGVATASYQIEGSPLADGAGMSIWHTFSHTPGNVKNGDTGDVACDHYNRWKEDIEIIEKIGAKAYRFSISWPRILPEGTGKVNQKGLDFYNRIIDTLLEKNITPFITIYHWDLPFSLQLKGGWANRDIADWFAEYSRVLFENFGDRVKHWITLNEPWVVAIVGHLYGVHAPGMKDIYVAFHTVHNLLRAHAKSVKVFRETVKDGKIGIVFNNGYFEPASEREEDIRAARFMHQFNNYPLFLNPIYRGEYPDLVLEFAREYLPRNYEDDMEEIKQEIDFVGLNYYSGHMVKYDPNSPARVSFVERNLPKTAMGWEIVPEGIYWILKGVKEEYNPQEVYITENGAAFDDVVSEGGKVHDQNRIDYLRAHIEQVWRAIQDGVPLKGYFVWSLLDNFEWAEGYSKRFGIVYVDYNTQKRIIKDSGYWYSNGIKNNGLTD

SEQ ID NO: 1308 - protein, 728 aa, Ajellomyces capsulatus
MRSLKLILASASVVSATCPYMSGEMPNSQNGPLDRRHDTLSDPTDQFLSKFYIDDEQSVLTTDVGGPIEDQHSLKAGNRGPTLLEDFIFRQKIQHFDHERVPERAVHARGAGAHGVFTSYNNWSNITAASFLNAAGKQTPVFVRFSTVAGSRGSVDSARDIHGFATRLYTDEGNFDIVGNNVPVFFIQDAIQFPDLIHAVKPQPDSEIPQAATAHDTAWDFFSQQPSSLHALFWAMSGHGIPRSMRHVDGWGVHTFRLVTDEGNSTLVKFRWKTLQGRAGLVWEEAQALGGKNPDFHRQDLWDAIESGRYPEWELGFQLVNEADQSKFDFDLLDPTKIIPEELVPFTPIGKMVLNRNPKNYFAETEQIMFQPGHVVRGIDFTDDPLLQGRLYSYLDTQLNRHGGPNFEQLPINRPRIPFHNNNRDGAGQMFIPLNTAAYTPNSMSNGFPQQANRTHNRGFFTAPGRMVNGPLVRELSPSFNDVWSQPRLFYNSLTVFEKQFLVNAMRFENSHVRSETVRKNVIIQLNRVDNDLARRVALAIGVEPPSPDPTFYHNKTTVPIGTFGTNLLRLDGLKIALLTRDDGSFTIAEQLRAAFNSANNKVDIVLVGSSLDPQRGVNMTYSGADGSIFDAVIVVGGLLTSASTQYPRGRPLRIITDAYAYGKPVGAVGDGSNEALRDVLMAAGGDASNGLDQPGVYISNDVSEAYVRSVLDGLTAYRFLNRFPLDR

SEQ ID NO: 1309 - protein, 449 aa, Rickettsia rickettsii
MLLRLIITLFFIINSICAFAEGEKETENKISNQEAYKQFQEIFERIEKAYVQVPDRQKMIDEAINGMLNSLDPHSSYYTDEDLEDIFTFTKGEFGGIGVEIMYDSGAIKIISPIDDLPAFKAGLKGGDYIVGVNDELVSTLGPNKAIKEMRGTPGTKVKLLIIKEEEAKPQELELTREIVKIKPIKAHLEKNNIAYIRITTFNESTISELKAAVKKLKTEGKDDLKGIILDLRNNAGGILDQAIAVSDYFIDSGVIVTTKGRTKSSNSEIKANEFSLKAPKVPMIVLINGNSASASEIVAGALQDHKRAIILGTKSFGKGSVQALTQINSRAAVKLTISKYYTPSGRSIQAEGIEPDILIEPAKVEYPEVKKIDKRFSESSLKNYLKNDNEKNKDSQKATKAKNNKQEENELSELYKKDYQFARAYDVITGLIINKKLETNERVKQEDK

SEQ ID NO: 1310 - protein, 217 aa, Candida albicans SC5314
MSSSSRKKTLLKVIILGDSGVGKTSLMQQFVNSKFSHQYKATIGADFLTKEITVDNNKSVTLQIWDTAGQERFQSLGVAFYRGADCCVLCFDVTNEKSLNNLTSWKDEFLVQSNVSNPQDFPFIIIGNKIDVDDSKKIPSLSKKLNNITNNQMGGLNYPVFETSAKDGVNVEAAFEVIAKMALQQEELNASNGNDVNDDYNDAINIHLDSEASACGC

SEQ ID NO: 1311 - protein, 477 aa, Enterococcus faecalis V583
MKNKRTVPFYQYIISLLCVAFLAGGSSYIYFDHRVKKMSQEGAITNADLSKVQDLYNEISTNYVGEVDKNELVEGALKGMSEAIGDPYSTYLNESAANDLNESLSGDFEGIGATMTMKDGEPVVAEAPVADSPAEKAGIKEGDIIEKVDGTATKGMKLAEVVSKVRGKKGTSVELTIQREGETKNISIKRGKIPVKTVTGELDKNDAQIGSIKITSFGKKTYQELKETITNLRDKGAKSFVIDVRQNPGGLLDQAERMASMFLKNGETIVQFEDKKGRTMKEVASKELDGGFKVKEPVAVIIDGNSASASEIFAAALHESANVPLIGTKTFGKGTVQTVKDLNDQTEIKLTVLKWLTPKGEWINEKGIEPTIKADYPEYAYLKLIPRDKTLKEGDQSEDIQNLNAILAVLAYPVDENNANYTAETKAAVSDLQQKNGLPVTGEIDNETATKIEATLGKLILENDAAYDTAVKEIQKN

SEQ ID NO: 1312 - protein, 138 aa, Magnaporthe grisea 70-15
MSDNEFGANDDLSLPKATVQKIVSEILPQSDGITYSKEARDLLIECCVEFITLISSEANEISDKEAKKTIACDHITKALEVLGFSEYVPAVLEAAAEHKEVQKGREKKANKFEQSGLSLEELERIQAEEFAKAASRHH

SEQ ID NO: 1313 - protein, 283 aa, Solibacter usitatus Ellin6076
MEIEFAPVVKREGINWITVTAFAVFHLGAVAALFFFSWPAFFAAVFLYWASLSLGIGMGYHRLLTHRSYQVPKWLEHSLAVCGALALEGGPIFWVATHRVHHQFSDKHGDPHTPRDGKWWSHITWMMVGDVTHCDSVACAKYAPDMAADPFYVWLSNYHWIPLTVVGIALLAIGGLPFLLWGVFFRVTLGLHATWMVNSLTHLWGARRFDTRDDSRNNWFVAALSFGEGWHNNHHAHPTSARHGLAWYEVDISWMTIRLLQALGFAKGVKVAKIGPVRERKVA

SEQ ID NO: 1314 - protein, 589 aa, Saccharomyces cerevisiae
MSGVSNKTVSINGWYGMPIHLLREEGDFAQFMILTINELKIAIHGYLRNTPWYNMLKDYLFVIFCYKLISNFFYLLKVYGPVRLAVRTYEHSSRRLFRWLLDSPFLRGTVEKEVTKVKQSIEDELIRSDSQLMNFPQLPSNGIPQDDVIEELNKLNDLIPHTQWKEGKVSGAVYHGGDDLIHLQTIAYEKYCVANQLHPDVFPAVRKMESEVVSMVLRMFNAPSDTGCGTTTSGGTESLLLACLSAKMYALHHRGITEPEIIAPVTAHAGFDKAAYYFGMKLRHVELDPTTYQVDLGKVKKFINKNTILLVGSAPNFPHGIADDIEGLGKIAQKYKLPLHVDSCLGSFIVSFMEKAGYKNLPLLDFRVPGVTSISCDTHKYGFAPKGSSVIMYRNSDLRMHQYYVNPAWTGGLYGSPTLAGSRPGAIVVGCWATMVNMGENGYIESCQEIVGAAMKFKKYIQENIPDLNIMGNPRYSVISFSSKTLNIHELSDRLSKKGWHFNALQKPVALHMAFTRLSAHVVDEICDILRTTVQELKSESNSKPSPDGTSALYGVAGSVKTAGVADKLIVGFLDALYKLGPGEDTATK

SEQ ID NO: 1315 - protein, 444 aa, Saccharophagus degradans 2-40
MNRLTLPPSSRLRSKEFTFGVATSSYQIEGGIDSRLPCNWDTFCEQPNTIIDNTNGAIACDHINRWQDDIELIANLGVDAYRFSIAWGRVINLDGSLNNEGVTFYKNILTKLREKNLKAYITLYHWDLPQHLEDAGGWLNRDTAYKFRDYVNLITQALDDDVFCYTTLNEPFCSAYLGYEIGVHAPGIKDLASGRKAAHHLLLAHGLAMQVLRKNCPNSLSGIVLNMSPCYAGSNAQADIDAAKRADDLLFQWYAQPLLTGCYPDAINSLPDNAKPPICEGDMALISQPLDYLGLNYYTRAVFFADGNGGFTEQVPEGVELTDMGWEVYPQGLTDLLIDLNQRYTLPPLLITENGAAMVDELVNGEVNDIARINYFQTHLQAVHNAIEQGVDVRGYFAWSLMDNFEWALGYSKRFGITYVDYQTQKRTLKASGHAFAEFVSSRS

SEQ ID NO: 1316 - protein, 389 aa, Mannheimia succiniciproducens MBEL55E
MNKKFERLFETVTFPNGATISSRFAMGPMVIVGSESNGEIGADDLAYWQRRNDAGSLLITGATAVSDYSDAYGNGLKLHKDELLDGWKQLAAVMKAKGNRAVVQLFHAGYRAAFTYKDKGVAYSASSKEYGFLDYPVTGMTEAQIEDTLNEFAAAAKRAIDAGFDGIEIHGANRYLIHQFFSAVSNVRDDQWGGSLENRARFALEVVKRIQEVIKQYAKADFILGYRISPEEIHREGNGFTFDEALYLIDEVAKLGVDYFNVSQSGVRGFAAEPKAGAYMGQAISKVIKTRLVGRALLLASGDLTSPDKILEAVTEYADITSNATMVLLDPDTKNKIQSGREDEVSLAVDETTIDDLKLPKAFYKIAPMIVTSQFVPQHTKDLIYKEPK

SEQ ID NO: 1317 - protein, 673 aa, Bdellovibrio bacteriovorus HD100
MSSFSKGVRGFIIAGSLAVSSLASAQLKEGLECRYLTVIEQGFLANHVKYSNRDTDLQNRVIEQYLKRLDPSKIYLTQGDVDAIRKSAGNVFDKTKNRDCSFLDAAQKIVLERVKDRSEFAKKYLGKDFKFESSTEFTFDPEKKTWPKDSADANEYLKKYIQFQIGNYMATDMKMDEAKKNVIKNYERAVKRTADTTQDDLFSGYLDSFARALDPHSSFFSRDVLEDFEIQMRLSLEGIGATLSSQDGFTVVEQLVPGGAAAKSGLIEPQDKIVAVGQEKGAMENVIDMDLKDVVKKIRGNKGTKVRLTILRKSGEGKKRFDVTLTREKVNLEDEAASIIYQDREINGQKKKIGVINFPSFYADSRRGGRSSAADMKKLIKEANEKKVDGLVLDLSNNGGGSLEDAVKIAGLFFQTGNVVKQSSKNEGRAESALRDTDPMVDWSGPLVVLTSRISASASEIVSGTLQDYKRAVVVGGDHTYGKGSVQSVLPIPNNLGAIKVTVGMFFVPGGKSTQHRGVDADIVLPGPFSADDIGEKYMDYSLPPKTIESFLSPDAYVKEGPGAWKEIKPEWLKSLRERSGERVAKNDEFKKIVEELNKAKARGKVIRVSEVLKDKNEKEKKDKAKKTASKAKKNEEYLKRPDIMEAENVLLDLIQLEDGKSLVPQQKQANAK

SEQ ID NO: 1318 - protein, 497 aa, Lactobacillus johnsonii NCC 533
MYHKQLDEFPTDFLWGASSAAYQIEGGAKEDGKGLSIWDKYAHQAGNTFKGTNGDVAVDHYHRYKEDVELMAKQGLKAYRFSVSWSRILPAGEGKVNQAGINFYRDLINELRKNKIEPILTIYHWDLPLALQEKYGGWESRKTIEAFVNYAKILFSEFGEKVKYWITINEQNVFTSMGYRWGTHPPKKQNIKTMFQANHYINLANALAITEFHKMVPAGKIGPSFGYGPVYPKTNSPEDVLAALNADDFNNNWWLDVYCRGKYPFFIRKQLENLNLMLEITKKDKAILENDAAHPDFLGINYYHGGTVQENRLQKPATNDKEKQFNKVDPYLMQPKGDQAKNPEVPMFNGVENDYVNKTNWGWEIDPTGLRIALRQVYEKYQLPIMITENGLGAKDIVENGKINDQYRIDYLADHVLAMKEAISDGVDLIGYCAWSFTDLLSWLNGYSKRYGFVYIDQNDEQKGTLKRIPKKSYTWYKSIIATNGNDLSLLKHGEQK

SEQ ID NO: 1319 - protein, 281 aa, Mannheimia succiniciproducens MBEL55E
MSRTYQQITQSRSFQMAKFRYLTEPFQIKNLQLKNRVVMPPMCMYVAKEDGIANNWHFVHYVSRAVGGVGLIIVEMTNVADNARISPDCLGLWNDEQAQALKKIVDECHAQGAKIAVQIGHAGRKALGWDDVVAPSAIICDESVTSDKSRWSYKMPRALTTEEAEQVVLQFQSAVRRAVAIGFDAVEIHAAHGYLIHQFYSPKMNIRTDKYGQDKCLFGIEVIQAAKAVMPAEMPLLVRISAQEYSDNGFPAEYGVSVAKRFAEAGADVLHVSGGGDGNFI

SEQ ID NO: 1320 - protein, 222 aa, Glycine max
MGRGKIEIKRIENTTNRQVTFCKRRNGLLKKAYELSVLCDAEVSLIVFSSRGRLYEYSNNNIRSTIERYKKACSDHSSASTTTEINAQYYQQESAKLRQQIQMLQNSNRHLMGDALSTLTVKELKQLENRLERGITRIRSKKHEMLLAEIEYFQKREIELENENLCLRTKITDVERIQQVNMVSGPELNVIQALASRNFFNPNMLDGGTVYPQTDKKILHLG

SEQ ID NO: 1321 - protein, 217 aa, Ophioglossum pedunculosum
RSGLLKKAYELSVLCDAEVALIIFSGTGKLFEFASSSMKKILERYRKYGGGLHDNSIATRDAEYWRNEVMRMKEHIACLEESQRHLLGENLVSLSVKNLQKLEHQLEIGANRIRTRKTQILLEQIQELQKKEHFLHGENNILKTKLEQLSTRQVPSLGTLIYTSTVTTTSTTSAGAGVEDNAGGHDSMNAMQKMTLHSNFQPATSAQNTLQLGYYPD

SEQ ID NO: 1322 - protein, 268 aa, Ustilago maydis 521
MKIHPVAVREDNYAYILQSSVDGRAVFVDVFDVEAVSGAAEKLGIPNENVVGLLTTHHHFDHSGGNEAFAHAYPGRPIYGGSDKIPALTKLVHDADRISELLGGVSIECVATPCHTQDHICYHVTDTTTAQSGVFTGDTLFISGCGRFFEGHPQQMLSAMDRLSSLPDHTLVYCGHEYTKSNVAFSAAILPPSEHPITKLINDLKTTHSTTGMYTIADERNHNPFMRCRDQLVKDKLAHLVGHDVHDEVEVMRLLRELKNGGHVKANI

SEQ ID NO: 1323 - protein, 666 aa, Bacillus caldolyticus
MIAANPTDLEVYLFHEGRLYQSYELFGAHVIRGGGAVGTRFCVWAPHAREVRLVGSFNDWNGTNSPLTKVNDEGVWTIVVPENLEGHLYKYEIITPDGRVLLKADPYAFYSELRPHTASIVYDLKGYEWNDSPWQRKKRRKRIYDQPMVIYELHFGSWKKKPDGRFYTYREMADELIPYVLERGFTHIELLPLVEHPLDRSWGYQGTGYYSVTSRYGTPHDFMYFVDRCHQAGLGVIIDWVPGHFCKDAHGLYMFDGAPTYEYANEKDRENYVWGTANFDLGKPEVRSFLISNALFWLEYYHVDGFRVDAVANMLYWPNNDRLYENPYAVEFLRQLNEAVFAYDPNVWMIAEDSTDWPRVTAPTYDGGLGFNYKWNMGWMNDMLKYMETPPHERKYAHNQVSFSLLYAYSENFILPFSHDEVVHGKKSLLNKMPGSYEEKFAQLRLLYGYMMAHPGKKLLFMGSEFAQFDEWKFAEELDWVLFDFELHRKMDEYVKQLIACYKRYKPFYELDHDPRGFEWIDVHNAEQSIFSFIRRGKKEGDVLVIVCNFTNQAYDDYKVSVPLLAPYREVLNSDAAEFGGSGHVNGKRLPAFSEPFHGKPYHVRMTIPPFGISILRPVQKRGERKQNEEEVHRHVIGRRARKPASLADEKHRETSRAVWGEVPDH

SEQ ID NO: 1324 - protein, 448 aa, Arabidopsis thaliana
  misc_feature (107)..(107): Xaa can be any naturally occurring amino acid
  misc_feature (224)..(224): Xaa can be any naturally occurring amino acid
  misc_feature (382)..(382): Xaa can be any naturally occurring amino acid
MSQHMNLLLPSFETDKEEYDERKTTDHGGIGGSVWRFKGNKAAKEAASVSMKGTLARLFDCCSKDVKKTILPLGHGDPSVYPCFQTSVDAEEAVVESLRSGAANSYXPGVGILPARRAVANYLNRDLPHKIHSDDIFMTVGCCQGIETMIHALAGPKANILLPTLIYPLYNSHAIHSLVEIRKYNLLPDLDWEIDLQGVEAMADENTIAVVIMNPHNPCGNVYXYEHLKKVAEVARKLGIMVISDEVYNQTIYGENKFVPMGIFSSITPVVTLGSISKGWLVPGWRIGWIAMNDPKNVFKTTRVVESIKEHLDISPDPSTILQFALPNILEKTKKEFFEKNNSILSQNVDFAFDALKDIPCLTCPKKPESCTYLVLRKLDLXVLEDITNDFDFCMKLAQEENLVFLPGEVLGLKNWVRFSIGVERSMLEDAFMRLKGFFARHTKTQLT

SEQ ID NO: 1325 - protein, 450 aa, Salmonella typhimurium
MPTHLVWFRRDLRLQDNLAAAACRDASARVLALYISTPQWQAHDMAPRQAAFISAQLALQTALAEKGIPLLFHEVAFNASIETVKNVCRQHDVSHFYNYQYEFNERQRDRAVEKLPSVICEGFDDSVILAPGAMTGNHEMYKVFTPFKNAWLRLKEDIPPCVPAPKIRVSGLSTPLTPVSLNYPQQEFDALFPVEENAVIAQLRQFCAQADEYALRRDFPAVDGTSRLASLATGGLSPRQCLHRLLAQPQALDGGPGSVWLNELIWEFYRHLMTWYPALCKHQPFRWTKRVAWQENPHYFQAWQGETGYPIVDAAMRQLNATGMHNRLRMITASFLVKDLLIWRLGERYFMSQLIDGDLAANGGWQWAASTGTDAAPYFRFNPTTQGERFDRDGEFIRQLPALRDIPGKAIHEPWRWAKAGVVLDYPRPIVEHKQARATLSAYEAARKGA

SEQ ID NO: 1326 - protein, 536 aa, Deinococcus radiodurans
MSDENNKGVGTAVQGVGGPRDGRTAPGEQGTTLTTRQGHPVHDNQNSRTVGSRGPMTLENYQFIEKLSHFDRERIPERVVHARGVGAHGVFRATGKVGDEPVSKYTRAKLFQEDGKETPVFVRFSTVGHGTHSPETLRDPRGFAVKFYTEDANWDFVVNNLKIFFIRDALKFPDLIHSQKPSPTTNIQSQERIFDFFAGSPEATHMITLLYSPWGIPASYRFMQGSGVNTYKWVNDQGEGVLVKYHWEPVQGVRNLTQMQADEVQATNFNHATQDLRDAIERGDFPQWDLFVKIMEDGEHPELDFDPLDDTKIWPREQFPWRHVGQMTLNRNPENVFAETEQAAFGTGVLVDGLDFSDDKMLQGRTFSYSDTQRYRVGPNYLQLPINAPKKHVATNQRDGQMAYRVDTFEGQDQRVNYEPSLLSGPKEAPRRAPEHTPRVEGNLVRAAIERPNPFGQAGMQYRNFADWERDELVSNLSGALAGVDKRIQDKMLEYFTAADADYGQRVREGIQAKEAEMKGQKQEAPVYGTEASSLY

SEQ ID NO: 1327 - protein, 427 aa, Ralstonia eutropha JMP134
MFAAADAAVFASADIAVKPIQKSNKLNNVCYDIRGPVLEKAKQMEEEGHKIIKLNIGNLAVFGFDAPEEIQQDMMRNLPNSAGYSDSKGIFAARKAIMHYTQQKNIQGVGLEDIYVGNGASELIVMAVNALLNSGDEVLVPAPDYPLWTAAVSLSGGTPVHYICDESNEWMPDPADIRARITPHTKAIVIINPNNPTGALYSDELLLEIVAIAREHGLIIFADEIYDKVLYDGNVHTSIASLSTDVLTVTFNGLSKNYRSCGYRAGWMVVSGDKRPALDYIEGLNMLSSMRLCANVPGQWAIQTALGGYQSINDLVAEGGRLRRQRDLAYELITAIPGVSCVKPKAALYLFPKLDLSMYPVQDDQEFIYELLQESKVLLVQGSGFNWDKPDHFRIVFLPHEEDLREAINRIARFLEAYRKRHGKVAA

SEQ ID NO: 1328 - protein, 656 aa, Polaromonas sp. JS666
MCGLAGYFSGQWPADGEQASARLKAMTDAIAHRGPDSDGYWLDAATCMALGHRRLAILELSAAGAQPMHAASGRYVIAYNGEIYNHLDLRADLQKSGQSPAWRGHSDTETLLAGFDAWGIQGAVERTVGMFAFAVWDRQERMLTLGRDRLGEKPLYYGWQGSGSSAVFLFGSELKALRAHPAFGAQINRDALCLYMRHNNVGGSHSIYQGIHKLPPGTLLTVSRQTPEPVIRPYWSGAEVARCGVAQPFGGTSGEAVDALEALLKDAVRQQMMADVPLGAFLSGGVDSSAVVALMQTQSLRPVKTFSIGFHEAAYNEAEHAKAVAQHLGTEHTELYVTPEQAMAVIPRLPTLYDEPFADSSQIPTFLVSQLARQHVTVSLSGDAGDELFGGYNRYQLTASLWRKLSAAPLPLRRAAAWGLTRFSPQSLNSLAALMPASARWAHMGDKLHKGAGVMAGRTVEDLYLGMVSDWHDPAAVVIGGREPATLLRGRRPDLPGLTDVERMMALDMLSYLPDDILTKVDRAAMGVSLETRVPFLDHRVVEFAWRLPLHYKLRQEGGRYTTKWALRQVLYRHVPQALIDRPKMGFGVPIDRWLRGPLRDWAEDLLSETRLKREGYFKPAPIRQKWAEHLGGQRNWAPHLWTALMFQAWLQANHA

SEQ ID NO: 1329 - protein, 158 aa, Lycopersicon esculentum
MDLRLLGIDNTPLFHTLHHMMEAAGEDSDKSVNAPSRNYVRDAKAMAATPADVKEYPNSYVFVVDMPGLKSGDIKVQVEEDNVLLISGERKREEEKEGAKFIRMERRVGKFMRKFSLPENANTDAISAVCQDGVLTVTVQKLPPPEPKKPKTIEVKVA

SEQ ID NO: 1330 - protein, 119 aa, Phaseolus vulgaris
NIDNFFTEDEQLAFCPAIVVPGVYYSDDKMLQTRIFSYADSQRHRLGPNYLQLPANAPKCAHHNNHHEGFMNFMHRDEEVNYFPSRYDSVRHAESFPIPPAICSGRREKCGIEKENNIK

SEQ ID NO: 1331 - protein, 1353 aa, Thermosynechococcus elongatus BP-1
MPAAPLPANEPERQRALEQYQVLDTPPEPIFDEITNLAAAICETPIALISLVDRQRQWFKSKVGIDACETPRNVAFCAHVILQDQLVIVPDARLDPRFADNPFVTGPPYIRFYAGMPLVTPQGYGIGTLCVVDYQPRQLNPVQQQTLRTLARQVINELEIRHHLEVTQQQLAYIQQMSSLQEAVFNSSNHAIIATRTDGIITLMNRAAQQWLGYPASELVGKATPERFHDPQEMERYAQILSAQLGEPIPAGFETLVARARRGLADEQEWTFVRRDGSCFPVSLSVTPMHDRQGQLIGFLESAVDITDKKQIEAALRLRERAIIASTNGIVITDYRQPDNPVIYVNPAFERMTGYRATEVIGKNCRFLQGSDRHQPGATAIRNAIKKGQSCRVVLRNYRKNGQLFWNELAISPIYNEFGEITHYIGIQSDVTERQRAQLFLQQQVKRTLLLNRITEEIRQQIEREHICRTAVQQVGVTLNVSRCLLFVYQENAPTPMELVAEYCGPGVPSVNECDLDLTQMRAPFLASVFASDEVFSCDDVQNDDRLAPLHAYCEALRVKSALIVRTAYRNQANGLLILHQCDRQRRWTDAIQSLLKSVAAQVGIGLAQVQLLEQETRQRQQLQQQMQRALLLNQITEQIRQSLDTETVFATTVTQIGQAFGVNRCLIHRYDPGPPPHIPDVAEYLQPGYASMRGISIPVENNPHALAVLSGDTAVVSNDVTQDPLLANAMHLCHQFQIQSMLAIRTSYKGVPNGIIGLHQCDRQRQWTPEEIELLEAVAAQVGIAIAQAELLRHEQQQRQLLAQQNQELEQARLQAELANRAKSEFLATMSHEIRTPMNAVLGFTNLLLDTPLNEQQRDFLQTLHQAGEALLTIINDILDFSKIESGKLVLEQQPFDVRECVEDVLSLLASKAQEKELELLYTCTPETPAQIKGDVTRLRQILVNLVGNGIKFTHEGQVAVHVGVLKREGKDFLQFQVQDTGIGIPRDRLDRLFKPFSQVDASTTREYGGTGLGLVISKRLCELMGGDMSVESTEGQGTTFTFTILAEGQKPYVPPKVHPALEGKRVLVIDDNAASRENLCTLLHNWGMVPIGYSDPRLVLEAAPPWDLAVIDLNMPQMTGLQLAERLQSEPNFNQQPMILLTPLSWLETASRKELITAHVPKPIRPLTLRQTLIRTLSSESATQPALTKTGIDLNLGNRFPLRILLAEDNAVNQKVALHILKRMGYRADVAANGLEVLEALQQRPYDVILMDVQMPKMDGLETTERICAQWPPSQRPWIIAMTANALAGDRERCFAAGMDDYISKPIKIEALAAALNRCRCLNPKSTYPQLCDQINIDSDQGHQSATESMT

SEQ ID NO: 1332 - protein, 212 aa, Arabidopsis thaliana
KALHKYDCLRANKSTSAFGLEARVPFLDKDFINTAMSLDPESKMIKPEEGRIEKWVLRRAFDDEERPYLPKHILYRQKEQFSDGVGYSWIDGLKDHAAQNVNDKMMSNAGHIFPHNTPNTKEAYYYRMIFERFFPQNSARLTVPGGATVACSTAKAVEWDASWSNNMDPSGRAAIGVHLSAYDGKNVALTIPPLKAIDNMPMMMGQGVVIQS

SEQ ID NO: 1333 - protein, 581 aa, Hordeum vulgare
MCGILAVLGCGDESQGKRVHVLELSRRLKHRGPDWSGLHQVADNYLCHQRLAIIDPASGDQPLYNEDKSVAVAVNGEIYNHEELRERLSGHRFRTGSDCEVIAHLYEEHGESFIDMLDGVFSFVLLDARDHSFIAARDAIGVTSLYIGWGIDGSVWISSEMKGLNDDCEHFEIFPPGNLYSSKEKCFKRWYNPPWFSEVIPSVPYDPLRLRSAFEKAVIKRLMTDVPFGVLLSGGLDSSLVAAVAARHFAGTKAAKRWGTRLHSFCVGLEGSPDLKAAKEVADHLGTVHHEFNFTVQVRIDAIEDVIYHIETYDVTTIRASTLMFQMSRKIKALGVKMVISGEGADEIFGGYLYFHKAPNKEEFHQETCRKIKALHQYDCLRANKATSAWGLEVRVPFLDKEFIDEAMSIDPEWKMIRPDLGRIEKWILRKAFDDEEKPFLPKHILYRQKEQFSDGVGYSWIDGLKDHAASNVSDKMMSNAKFIYPHNTPTTKEAYYYRMIFERYFPQSSAILTVPGGPSVACSTAKAIEWDAQWSGNLDPSGRAALGVHLSAYEQDTIAVGGSNKPGPMETVVNGVAIES

SEQ ID NO: 1334 - protein, 409 aa, Xylella fastidiosa Ann-1
HSAVRGLLSDLDPHSTYFDKEDADAFDEQTSGVYDGIGVELQEQSDNTLKVIAPIDDTPAARAGLRPGDLIVAINGKPLANVDAMKPLRGAPGSQVTLTIVRDKNGKPFDMTIKRETIHIASVRSRMLEPGYGYIRISVFQADTGNDFHKHLGQLKQQAGGKLRGLLLDLRSNPGGLLTAAVQVADALLDKGNIVSTRGRISASDTRFDATQGDLLDGLPLVVLVDAGSASASEVLVGALSDNHRARVIGSCTFGKGSVQTLLPLDNGDSVKLTTARYYTPSGRSIQARGIVPDLLLKPDGVGAADLSGSGIDRSEAGLPGHLRGTDEGGPGCTSSDPLPGDTPIMTALLELKQPGSAVQAKKAIPVKVVSDVKSATKSPLSVFGKDRAVKRVPVVSPTSEQVDGQPSK

SEQ ID NO: 1335 - protein, 542 aa, Mesorhizobium sp. BNC1
MAAKDVKFHSDARERMLRGVDVLANAVKVTLGPKGRNVVIDKSFGAPRITKDGVTVAKEIELEDKFENMGAQMVREVASKTNDAAGDGTTTATVLTQAIVKEGAKAVASGMNPMDLKRGIDKAVEAIVEELKKNARKVTKNDEIAQVGTISANGDQEIGRFLAQAMEKVGNEGVITVEEAKTAETELEVVEGMQFDRGYLSPYFITNQEKMRVELDEPYLLIHEKKLASLQPLLPVLEAVVQSGKPLLIIAEDVEGEALATLVVNKLRGGLKVAAVKAPGFGDRRKAMLQDIAILTGGTAISEDLGIKLENVTLEMLGRAKKVVIEKENTTIVDGAGSKDEIQGRVNQIKAQIEETTSDYDREKLQERLAKLAGGVAVIRVGGATEVEVKERKDRVDDAMHATRAAVEEGLLPGGGVALLRAAKALDNVTGENEDQKVGISIVRRAIEAPIRQIAENAGAEGSIIVGRVREKPDFGYGWNAQTGEYGDLYQMGVIDPVKVVRAALQDAASVAGLLITTEAMVADRPKKETAPAMPAGAGMDF

SEQ ID NO: 1336 - protein, 272 aa, Zea mays
  misc_feature (192)..(192): Xaa can be any naturally occurring amino acid
MPSHQPTAGMMAVDPDYVKQPSSMASTSEPNRNPKYDPKKPHITDTPITKSNWYKHVNWLNVTFIIGIPLAGCIAAFWTPLKWQTALWAVIYYFWTGLGITAGYHRLWAHKSYNASLPLSVFLALVGGGAVEGSIRWWSRDHRAHHRYTDTNKDPYSVRKGLLYSHLGWMVMKQNPKRIGRTDITDLNEDPXVVVWQHKNYIKVVIFMGLIFPSAVAGLLWNDWKGGFIYAGILRIFFVQQATFCVNSLAHWLGDQPFDDRNSPRGHVITAL

SEQ ID NO: 1337 - protein, 462 aa, Brassica napus
MDPYKYRPASSYNSPFFTTNSGAPVWNNNSSMTVGPRGPILLEDYHLVEKLANFDRERIPERVVHARGASAKGFFEVTHDISNLTCADFLRAPGVQTPVIVRFSTVIHERGSPETLRDPRGFAVKFYTREGNFDLVGNNFPVFFIRDGMKFPDMVHALKPNPKSHIQENWRVLDFFSHHPESLNMFTFLFDDIGIPQDYRHMEGSGVNTYMLINKSGKAHYVKFHWKPSCGPTRPCLLDEEAIKVGGSNHSHATKDLYDSIAAGNYPEWHLFVQVMDPAHEDKFDFDPLDVTKIWPEDVLPLQPVGRLVLNKNIDNFFNENEQIAFCPAIVVPGVHYSDDKLLQTRIFSYADSQRHRLGPNYLQLPVNAPKCAHHNNHHEGFMNFMHRDEEVNYFPSRLNPVRHADKYPTTPVFCSGNREKCMIEKENNFQQPGERYRSWDADRQERFVKRFVEALAEPRVT

SEQ ID NO: 1338 - protein, 391 aa, Acalypha californica
REFTSDSADVPITAAGALKSYKLAAKAISRLQSLPSGNMSLLCDVLVKEVSDLTGYDRVMVYKFHEDEHGEVIAECHRPDMEPYLGLHYPATDIPQASRFLFIKNKVRMICDCLAPPVKVIQDSSLTQPVSLCGSTLRSPHGCHAQYMTNMGTLASLVMSATINEDADEIDDDQQKGRKLWGLVVCHHNSSRFVPFPLRYACEFLIQVFGVQINKELELAAQMREKNMLQTQTVLCDMLLRDAPEAIITQSPNVMNLVKCDGAALYYRKKFWLLGVTPTEAQIKDIADWLLEYHGESTGLSTDSLMEAGYPGASILGDAVCGMAAIRISSKDFLFWFRSHTAKEIKWSGAKHDPEDKDDGRKMHPRSSFKAFLEVVKWRGLPWEDMEMDAI

SEQ ID NO: 1339 - protein, 522 aa, Zea mays
MNTLRRNKVRSQSEFSEDELVSSVLMKNGKKVVCGTPSGALLLYSWGYFNGCWYTMEGAGRDANPLSGYRIGKTLGIGSFGKVKIAEHILTGHKVAIKILNRKKIRSMDMEEKVKREIKILRLFMHPHIIRLYEVIDTPADIYVVMEYVKSGELFDYIVEKGRLHEEEARHFFQQVAFLHITMFIPKIAQCIAITVLKNCSMIISGVEYCHRNIVAHRDLKPENLLLDSKCNVKIADFGLSNIMRDGHFLKTSCGSPNYAAPEVISGKLYAGPEVDVWSCGVILYALLCGTLPFDDENIPNLFKKIKGGIYTLPSHLSPSARDLIPRMLVVDPMKRITIREIREHVWFKIRLPRYLAVPPPDTAQQVKKVDEETLNDVIKMGFDKNQLIESLQNRLQNEATVAYYLLLDDRLCTTSGYLGSDFQESMDSSFSQVITETPTSATELQQHVFTEGTFGCLPLPCFAWLSIKIHRLVGLLPVSVLALSRIFIASPSDLKPLSAAGKPGLAERGEASWPHKPTKRA

SEQ ID NO: 1340 - protein, 764 aa, Streptomyces aureofaciens
MSAARQPSPTVRDKAAPEPAAPAAPKGARAPRARRAAPPHGVRPAPALAAEERARLLEGRHHDPHAVLGARTQRGGVAFRVLRPYAKAVTVVAKGLRTELVDEGDGLFSGLLPLTGVPDYRLLVTYDSDEIEVHDPYRFLPALGELDLHLIGEGRHEELWTALGSQPMEHQGVAGTRFTVWAPNALGVRVTGDFSYWDAVAYPMRSLGASGVWELFLPGVAEGALYKYEITRPDGGRTLRADPMARYAEVPPANASIVTASRYEWQDAEWMARRGALAPHQAPMSVYELHLASWRPGLSYRQLAEQLPAYVKELGFTHVELMPVAEHPFGGSWGYQVTGFYAPTSRMGTPDDFRFLVDALHRAGIGVIVDWVPAHFPRDDWALAEFDGRPLYEHQDPRRAAHPDWGTLEFDYGRKEVRNFLVANAVYWCQEFHVDGLRADAVASMLYLDYSRDEGDWSPNAHGGREDLDAVALLQEMNATVYRRFPGVVTIAEESTAWDGVTRPTDSGGLGFGLKWNMGWMHDTLRYVSKEPVHRKYHHHDMTFGMVYAFSENFVLPISHDEVVHGKRSLVSKMPGDWWQQRATHRAYLGFMWAHPGKQLLFMGQEFAQGSEWSETYGPDWWVLDSSYPAAGDHLGVRSLVRDLNRTYTASPALWERDSVPEGFAWVEADAADDNVFAFLRFARDGSPLLCVSNFSPVVRHGYRIGVPQEVGQWREVLNTDLEPYGGSGVHHARALRPEPVPAQGRAVSLRMTLPPMATVWLRP

SEQ ID NO: 1341 - protein, 391 aa, Atuna racemosa
DLEPVNPADVPVTAAGALKSYKLAAKAISRLQSLPSGNISLLCDVLVKEVSDLTGYDRVMVYRFHEDEHGEVVAECCRPDLEPYLGLHYPATDIPQASRFLFMKNKVRMICDCLAPPVKVIQDKRLAQPLSLCGSTLRAPHGCHSQYMANMGAIASLVMSVTINDDEEEMEADQRKARKLWGLVVCHHTSPRFVPFPLRYACEFLIQVFGIQINKEVELAAQTREKHILRTQTVLCDMLLRDAPVAIITQSPNVMDLVKCDGAALYYRKKFWLLGITPTEAQIKDIVEWLLHYHGESTGLSTDSLMEAGYPGASVLGGAVCGMAAVKITSKDFLFWFRSHTAKEIKWGGAKHDPNDKDDGRKMHPRSSFKAFLEVVKRRSLPWEDVEMDAI

SEQ ID NO: 1342 - protein, 375 aa, Bacillus anthracis str. 'Ames Ancestor'
MTSSNKKSASIYEGTNVNAWGSFENVAETKLFNSIQIGSWPLRNRIAMAPMTRCFADNETGAVGADVVEYYRKRAADGVGLIITEGIVISPRAKGNPGVPGIYTQEQIDSWKPVTEAVHKEGGTIIAQIWHVGRMSHHEIIGGQMPQAPSAIAAEGNVPRFRKPFDTPEAMTLEEIQEVIGQYAQAAKNAIEAGFDGVEIHGAHGYLIDQFTYEFVNKRTDKYGGDLKQRLTFMKEVTEAVIEAIGADKTLLRFSAFKGDNPTYMWENPELAIETFVNMFKEVGLTMIHPSTMSYTQVIADGKNFHQLVRKYWDGAIVGVGNLNPKEAEEALQEGTIDVAAFGRPLIANPDFVHRIKSAESLVEYDAKEHLATLI

SEQ ID NO: 1343 - protein, 229 aa, Triticum aestivum
MCCVSYSDPPPPLPAEEKSKEEEQRCSAAMEVDAEASYSYGFLPPGRHQPYYAPPPPPPEDGELWEYFPCPFCYIEVEMPFICSHLQEEHCFDTRNAVCPICAENLGKDMSAHFRFQHSHLLKRRKPSRPSSSPWPAAASPPAYEVNPYMMSSRPCQDPEPDPLLSQFICGSGDQTETEPGSRDKKSQRHRPSSGHPAAGVQRPVSQLELEERLQRIEFLREIITSTIL

SEQ ID NO: 1344 - protein, 214 aa, Rubrobacter xylanophilus DSM 9941
MILQKLTVGTFQENCYILGDEASGSGALVDPGDEAVRIALAVEQTGLEIEKILLTHAHIDHVGAVASLVEEYGCPVLAHRESEPLLEQLPTQALMMGLRFGKVPRLDGYIEDRERVEVGGLTLEALYTPGHAPGHLAFYLESEGALLSGDALFAGSVGRTDLPGGDAGLLMRSIKERMLVLPDETVVHPGHGPQTTIGNERAYNPFLQQGGGIL

SEQ ID NO: 1345 - protein, 339 aa, Glycine max
MEERYETLKELGSGNFGVARLAKDKETGELVAIKYIERGKKIDANVQREIVNHRSLRHPNIIRFKEVFLTPTHLAIVLEYAAGGELFERICNAGRLSEDEARFFFQQLISGVSYCHSMQICHRDLKLENTLLDGNPAPRLKICDFGFSKSALLHSQPKSTVGTPAYIAPEVLSRKEYDGKVADVWSCGVTLYVMLVGAYPFEDPEDPKNFRKSIGRIMSVQYAIPDYVRVSKECRHLISCIFVANPAKRISISEIKQHLWFRKNLPREIIEPERRGYVDHKRTQPSQSVEETMRIIQEARTKIHTGEQAGTGTSDAVHGDEANEEVDINDHYAKYLALN

SEQ ID NO: 1346 - protein, 205 aa, Arabidopsis thaliana
IQKIDDSTSRQVTFSKRRKGLIKKAKELAILCDAEVCLIIFSNTDKLYDFASSSVKSTIERFNTAKMEEQELMNPASEVKFWQREAETLRQELHSLQENYRQLTGVELNGLSVKELQNIESQLEMSLRGIRMKREQILTNEIKELTRKRNLVHHENLELSRKVQRIHQENVELYKKAYGTSNTNGLGHHELVDQFMNPMHRLGCS

SEQ ID NO: 1347 - protein, 372 aa, Zea mays
MDSSGGGGGAQIKGMATHGGRYVLYNVYGNLFEVSSKYAPPIRPIGRGAYGIVCAAVNSQSGEEVAIKKVGNAFDNHIDAKRTLREIKLLRHMDHENILALKDVIRPPTRENFNDVYIVTELMDTDLHQIVRSNQPLTDDHCQYFLYQLLRGLKYVHSANILHRDLKPSNLFLNANCDLKIADFGLARTTSETDLMTEYVVTRWYRAPELLLNCSQYTAAIDVWSVGCILGEIVTRKPLFPGRDYIQQLKLITELIGSPDDASLGFLRSDNAKRYMKQLPQFPRQDFRLRFCNMSPGAVDLLERMLVFDPSRRITVDEALHHPYLASLHEINDEPTCPAPFSFDFEQPSFTEAHIKELIWRESLAFNPDPPY

SEQ ID NO: 1348 - protein, 880 aa, Cochliobolus carbonum
MSAAIDNEDLEELSISMPSQRRGAAQTSTTKAQDPAPPPPTALGTAVHETKSKDTKASQRLGQYTIVRTLGEGSFGKVKLATHQVSGQKVALKIINRKRLVTRDMAGRIEREIQYLQLLRHPHIIKLYTVITTPTEIIMVLEYAGGELFDYIVNHGKLQEAQARKFFQQIVCAVEYCHRHKIVHRDLKPENLLLDHDSNVKIADFGLSNIMTDGNFLKTSCGSPNYAAPEVISGKLYAGPEVDVWSCGVILYVLLVGRLPFDDEYIPTLFKKIAAGQYSTPSYLSPGATSLIRKMLMVNPVHRITIPELRQDPWFTTDLPAYLEPPAQEFFDSGADPNKAIDPKALAPLADAPRVQALHENVVTKLGKTMGYAKHDVQDALARDEPSAIKDAYLIVRENEMMRENPLLTNQDGVPVWNHQSPPAHDSYMEKFRPQSLNAVSRPQFIPPAPSDHERARQGSNASSQLASIRSPVSTIAILPSSLTEYHKAYMKGHPRPTNKISESEALPPTPEQTEEQRQISARRLKPNFRTMPEAGRTKPEPMTSLPTKKPRATKWQFGIRSRNQPAEAMLAIFKALKAMGADWEVPKIRRAGGRSGSRSRSTSQAPEDRKSKSRNHSQDSISSHSSDEDQGSRKGSPRREPLSVRNNGTSEQEARGRQKKHYNHTNDWGYHVPEDPWVIHARFLKEGMFPPGVAHPSSTHSSRVDLANDSSGARRRSSTNTSTSSAGHGVEGMTPSERAGSVSEDHVNPDEAVYIYMSIQLYSIDRDFFVVDFKCAGYERLVTNLVREIKASIPLSGSHQPPPHHQDGWDDEQGVWRRLDENEPLPEDLAKKLNEGGTEILRERTELVGAGRQEGEKIVTSPFPFLDVASTLILQLSGE

SEQ ID NO: 1349 - protein, 255 aa, Mesorhizobium sp. BNC1
MTLEIEQFMCRSDNFGILARDSETGITALVDAPEEQAILEAIKRTGWTPSLLLITHHHADHVEANLALKERFGLTIIGPAKEASKIPGIDRQVNEGDVVRVGNQEARVIETPGHTAGHITFYFAKAGIAFTADTLFALGCGRLFECKPPVMYESLKKLVELPLETVIYCGHEYTESNARFALSVDPTNSALKERAKKIEALRREGRPTLPTTLGEEMATNPFLRCHDPVLRNNLGMKNAADVEVFAEIRKRKDVF

SEQ ID NO: 1350 - protein, 326 aa, Triticum aestivum
  misc_feature (230)..(230): Xaa can be any naturally occurring amino acid
  misc_feature (245)..(245): Xaa can be any naturally occurring amino acid
  misc_feature (249)..(249): Xaa can be any naturally occurring amino acid
  misc_feature (258)..(260): Xaa can be any naturally occurring amino acid
  misc_feature (262)..(262): Xaa can be any naturally occurring amino acid
  misc_feature (271)..(271): Xaa can be any naturally occurring amino acid
  misc_feature (302)..(303): Xaa can be any naturally occurring amino acid
  misc_feature (306)..(307): Xaa can be any naturally occurring amino acid
  misc_feature (310)..(311): Xaa can be any naturally occurring amino acid
  misc_feature (314)..(315): Xaa can be any naturally occurring amino acid
  misc_feature (317)..(317): Xaa can be any naturally occurring amino acid
MDPYKYRPSSSFNAPMWSTNSGAPVWNNDNSLTVGSRGPILLEDYHLVEKIADFDRERIPERVVHARGASAKGFFEVTHDVSHLTCADFLRAPGVQTPVIVRFSTVIHERGSPETLRDPRGFAIKFYTREGNWDLVGNNFPVFFIRDGMKFPDMVHALKPNPKTHIQENWRILDFFSHHPESLHMFTFLFDDVGVPADYRHMDGSGVNTYTLVNRAGKAHYVKFHWKPTXGVKSLLEEEAVTVGXTNHXHATKDLTDXXXGXNYPEWTFYXQTIDPDHEDRFDFDPLDVTKTWPEDLVPALXXWGXXVLXXNIXXFXRNAFGGVLQ

SEQ ID NO: 1351 - protein, 391 aa, Austrobuxus megacarpus
DLEPVNPADVPVTAAGALKSYKLAAKAISRLQSLPSGNISLLCDVLVKEVSDLTGYDRVMVYRFHEDEHGEVVAECCRPDLEPYLGLHYPATDIPQASRFLFMKNKVRMICDCMALPVEVVQDERLSQPLSLCGSTLRSPHGCHAQYMANMGSVASLVMSVTINEDDDEMDSGQQTGRKLWGLVVCHHTCSRFVPFPLRYACEFLIQVFGVQISKEVELAAQMREKHILRTQTVLCDMLLRDAPVAIISQSPNVMDLVKCDGAALYYRKKFWSLGVTPTEAEIRDIAEWLLECHNGSTGLSTDSLMEAGYPGASILGDAVCGMAAVRITSKDFLFWFRSHTAKEIKWGGAKHDPDDKDDGRKMHPRSSFKAFLEVVKRRSLPWEDVEMDAI

SEQ ID NO: 1352 - protein, 391 aa, Balanops vieillardii
DLEPVNPADVPVTAAGALKSYKLATKAISRLQSLPSGNISVLCDVLVKEVSDLTGYDRVMVYRFHEDEHGEVVAECRRPDLEPYLGLHYPATDIPQASRFLFMKNKIRMICDCLAPPVKVIQDKRLAQPLSLCGSTMRAPHRCHVQYMANMGSIASLVMSVTINEDDDETESDQQNGRKLWGLVVCHHSSPRFVPFPLRYACEFLIQVFSIQINKEVELAAQMREKHILQTQTVLCDMLLRDAPEAIITQSPNVMDLVKCDGAALYYRKKVWLIGVTPTEAQIRDIAEWLLEYHRESTGLSTDNLVEAGYPGASVLGVAVCGMAAVRITSKDFLFWFRSHTAKEIKWGGAKHDPDDKDDGRKMHPRSSFKAFLEMVKRRSLPWEDVEMDAI

SEQ ID NO: 1353 - protein, 390 aa, Bergia texana
DLEPVNPADVPVTAAGALKSYKLAAKAISRLQSLPSGNISLCDVLVKEVSDLTGYDRVMVYKFHEDEHGEVIAECHRPDLEPYLGLHYPATDIPQASRFLFMKNKVRMICDCMAPPVKVIQDKRLTQPLSLCRSTLRSPHGCHAEYMANMGSIASLVLSVTINDEVDKIEGDKLLGRKLWGLVVCHHASPRFIPFPLRYACEFLIQVFGVQINKEVALAAQTREKHILRTQSVLCDMLLRDAPVAIITQSPNVMDLVKCDGAALYYRKKFWLLGVTPSEAQIRDIADWLLECHSGSTGLSTDSLMEAGFPGASVLGDAVCGMAAVKITSKDFLFWFRSHTAKEIKWGGAKHDPDDKDDGRKMHPRSSLRAFLEVVRWRSLPWEDVEMDAI

SEQ ID NO: 1354 - protein, 349 aa, Triticum aestivum
  misc_feature (106)..(106): Xaa can be any naturally occurring amino acid
  misc_feature (254)..(254): Xaa can be any naturally occurring amino acid
SKEVSDFAAKYMYHNPLHLDTYKEVSKMEAEILRMTASLVSKNPAYGVITSGGSESLIMSLYAYRKYFNKAKPNIVVPNTIHAAIDKGAMYLNIEVRKARLNERFXVDVAHMKSLIDHNTIALYASYPNFPHGIIDPIADIAPIAKKHKIGFHVDGCLGGFVAAFLKEHEGKFSLDIDGVTSISLDNHKFGLAPKGVAVLLFKEKKLRASMYFIYTEWVGGIYATPSFPGSRSGFASAGAWYALTHVGRKQYLXNSMRVVEATKKAAKELAKIEGVRVLGNPELCVLAFQTDIVDCFSVSSFLTKEKGWKISAIHLPKGLHISVTLANCNNVGQNLAKDVKEAIEKVKL

SEQ ID NO: 1355 - protein, 161 aa, Zea mays
MDGRMFGLETPLMVALQHLLDVPDGDAGAGGDKAGGGGPTRTYVRDARAMAVTPADVKELPGAYAFVVDMPGLGTGDIKVQVEDERVLVISGERRREEREDAKYLRMERRMGKFMRKFVLPDNADMDKISAVCRDGVLTVTVEKLPPPEPKKPKTIEVKVA

SEQ ID NO: 1356 - protein, 390 aa, Bergia texana
DLEPVNPADVPVTAAGALKSYKLAAKAISRLQSLPSGNISLCDVLVKEVSDLTGYDRVMVYKFHEDEHGEVIAECHRPDLEPYLGLHYPATDIPQASRFLFMKNKVRMICDCMAPPVKVIQDKRLTQPLSLCGSTLRSPHGCHAEYMANMGSIASLVLSVTINDEDDKIEGDQLLGRKLWGLVVCHHASPRFIPFPLRYACEFLIQVFGVQISKEVALAAQTREKHILRTQSVLCDMLLRDAPVAIITQSPNVMDLVKCDGAALYYRKKFWLLGVTPSEAQIRGIADWLLECHSGSTGLSTDSLMEAGFPGASVLGDAVCGMAAVKITSKDFLFWFRSHTAKEIKWGGAKHDPDDKDDGRKMHPRSSLRAFLEVVKWRSLPWEDVEMDAI

SEQ ID NO: 1357 - protein, 423 aa, Zea mays
  misc_feature (185)..(185): Xaa can be any naturally occurring amino acid
RPGGPNQLESSSSQLSRRAQPIPLPPAYTAHNSLLHLSLSLSPVSPPVCVQPHGDPRRRERQRARERRRARGKFNCYPAGVGLPEARRALAEHLSSDLPYKLTTDDIFVTAGGTQAIEVVVSVLAQPGTNILLPRPGYPNYEARAGLHNLEVRRFNLIPERGWEIDIDGLESIADKNTTAMVIIXPHNPCGSVYTREHLAKVAEVARKLGILVIADEVYGNLVFGDTPYVPMGVFGHIAPVLSLGSLSKRWIVPGWRLGWVAVCDPNKILQETKIIASITNFLNVSTDPATFVQGALPHILENTKEDFFRRIIGLLAETSEICYREIKDIKCITCPHKPEGSMFVMVKLNLYLLEGIHDDIDFCCKLAKEESVILCPGEMDLICWKKSYLTKTHFGSSSCLFRVTGIPGLNCMFALRNALRKQ

SEQ ID NO: 1358 - protein, 391 aa, Calophyllum soulattri
DLEPVNPADVPVTAAGALKSYKLAAKAISKLQSLPSGNISLLCDVLVKEVCELTGYDRVMVYKFHEDDHGEVVAECHRPDLEPYLGLHYPATDIPQASRFLFMKNKVRMICDCLAPPVKVIQDNGLSQALKSRWIYLESSPWLHSQYMANMGSIASLVMSVIINEDGDEMESDQQKGRKLWGLVVCHHTGPRFVPFPLRYACEFLIQVFGIQINKEVELAAQMREKHILETQTVLCDMLLRDAPMAIVTQSPNVMDLVKCDGAALYFKEKFWLLGITPTEAQIRDIAEWLLDYHNGSTGLSTDSLMEAGYPGASILGDAVCGMAAIRINSKDFLFWFRSDTAKEIKWGGAKHDPGDKDESRKMHPRSSFKAFLEVVKWRSLQWEDVEMDAI

SEQ ID NO: 1359 - protein, 464 aa, Enterococcus faecalis V583
MKYQFPENFWWGSAASGPQTEGVFEGDGKGQNIWDFWYQEAPEKFFQQVGPDKTSQFYKKYQEDIQLMKETGHNSFRTSIQWSRLIPDPTTGKVNQTAVDFYNQVIDDLLEHGIEPFMNLYHFDMPMVLQEKGGWESREVVDLYVDFAKTCFELFGDRVKKWFTHNEPIVPVEGGYLYGWHYPDKVNLKEGIQVLYHEALASAKAIAVYHSMNLSGEIGIILNLTPTYPRDEHNEADVNAAKFVDGFFNRSFLDPAVKGHFPEDMVAWAKANDLLPETTPEDLAIIAENTVDLLGVNYYQPRRAKAKETPVETRPEGLLPEDFYDVYDMPGKKMNPYRGWEIYEKGIYDTLMNLKENYGNIRCYISENGMGVEGEERFVNEQGVIEDDYRIEFVQDHLKWVHQAIQEGSNVQGYHMWTCMDNWSWLNAYKNRYGFIAVDLDDDAKRTIKKSGRWFKEMTANNGF

SEQ ID NO: 1360 - protein, 99 aa, Citrus x paradisi
YVFIVDMPGLKSGDIKVQVEDDNVLLISGERKREEEKDGAKYVRMERRVGKFMRKFVLPENANVEAISAVCQDGVLTVTVDKLPPPEPKKPKTIEVKIA

SEQ ID NO: 1361 - protein, 213 aa, Methanosarcina mazei Go1
MEVRYICPTAYDSSVYLVNGKVLIDAGMNSDLIIKQLEKYIKLTELKLIILTHCHYDHTAAAAAIAEKSGAEVGIHKADLEGVNDEYLSVSVLFGERAPAVKPTITYEEGDKIDIGDGEYLKVIHTPGHSKGSICLYEPVSKSLFSGDTVFPRGGFGRMDFEGSEPNKMLGSVEKLTKLDVKNLYSGHGAPTDRDGNKQITASYTMLKMIMGA

SEQ ID NO: 1362 - protein, 917 aa, Pseudomonas fluorescens
MLRKMGIKGRVLLLTLLPTSLMALLLGGYFTWMQLSELQTQLLQRGEMIAEQLAPLVAPPLSSKNTDLLERIATQSLEQPDVRTVSFLAPDRSSLAHAGPTMLNQPPIGNSSYLLQRTGNDATRYLLPVFGRHRNLAGELIPDESDRLLGWVEVELSHNGMLLRGYRSLFASLLLIAIGLICNAALALRISRTINLPISQIKLAVAQLKDGNLETRLPPLGSQELDQLASGINRMAETLQNAQEELQHSIDQATEDVRQNLETIEIQNIELDLARKEALEASRIKSEFLANMSHEIRTPLNGILGFTHLLQKSEMSPRQLDYLGTIEKSADNLLGIINEILDFSKIEAGKLVLDSVPFNLRDLLQDTLTILAPAAHAKQLELVSLVYRDTPLALVGDPLRLKQILTNLVSNAIKFTREGTIVARAMIEDEQEDSVQLRISVQDTGIGLSNQDVRALFQAFSQADNSLSRQPVGTGLGLVISKRLIEQMGGEIGVDSTPGEGSEFWISLNLPKTRDDVEDLPAAPLLGRRVAVLENHELARQALQHQLEDCGLEVTPFNSLENLTNGITSAHQTEQAIDLAVLGVTANDIPPERLNQHLWDLEHLGCKVLVLCPTTEQMLFNQSVPNPNSQLQAKPACTRQLRRALADLISPRPSRSEPGEPLSSRAPRVLCVDDNPANLLLVQTLLEDMGAKVLAVESGYAAIDAVKQETFDLVLMDVQMPGMDGRQSTEAIRQWESERHGTPLPVVALTAHAMANEKRALLQSGMDDYLTKPISERQLAQVVLKWTGLALRNQGPERAPDGLAPGVRLQVLDHEEGLRLAANKADLAADMLAMLLASLEADRQAITAAREANDNNALIERVHRLHGATRYCGVPQLRAACQRAETLLKQDDAKAMTALDELDMAIARLASEARVSA

SEQ ID NO: 1363 - protein, 56 aa, Citrus x paradisi
WHRVERSSGKFLRRFRLPDNAKVEQVKASMENGVLTVTVPKQEEKKPEVKAIEISG

SEQ ID NO: 1364 - protein, 459 aa, Zea mays
MMEAEKNGNILMQKYEVGKLLGQGTFAKVYHARNIETSQSVAIKVIDKDKIFKVGLMEQIKREISVMKLVRHPNIVQLYEVMATKSKIYFVLEYVKGGELFNKIAKGKLREDASRKYFQQLVSAVDFCHSRGVYHRDLKPENLLVDENGNLKISDFGLSALAESRRQDGLLHTTCGTPAYVAPEVISRKGYDGAKVDTWSCGVILFVLMAGYLPFQDSNLMEMYRKIGKADFKCPPWFPSDVRKLVSRILDPNPRTRMPITKIVECFWFKKGIDNKLIRKNIEMKGKVSALTDVNVVFSSTGIGSNNNKLVDVEQDVAKITNLNAFDIISLSEGFNLSGLFEESEKRKEARFTSSQSASTIISKLEDAATCSKMTIKKKEGGVLKMEGANEGRKGVLSIDAEIFEVTPAFHLVEIKKNNGDTLEYENLFKQDMKPALKDIVWAWQGESKDQQAKDHNQS

SEQ ID NO: 1365 - protein, 540 aa, Streptomyces coelicolor
MAKILKFDEDARRALERGVNKLADTVKVTIGPKANVVIDKKFGAPTITNDGVTIAREVEVEDPYENLGAQLVKEVATKTNDIAGDGTTTATVLAQALVREGLKNVAAGASPALLKKGIDAAVAAVSEDLLATARPIDEKSDIAAVAALSAQDQQVGELIAEAMDKVGKDGVITVEESNTFGLELDFTEGMAFDKGYLSPYFVTDQERMEAVLDDPYILINQGKISSIADLLPLLEKVIQANASKPLLIIAEDLEGEALSTLVVNKIRGTFNAVAVKAPGFGDRRKAMLQDMAVLTGATVISEEVGLKLDQVGLEVLGTARRITVTKDDTTIVDGAGKRDEVQGRIAQIKAEIENTDSDWDREKLQERLAKLAGGVCVIKVGAATEVELKERKHRLEDAISATRAAVEEGIVSGGGSALVHAVKVLEGNLGKTGDEATGVAVVRRAAVEPLRWIAENAGLEGYVITSKVADLDKGQGFNAATGEYGDLVKAGVIDPVKVTRSALENAASIASLLLTTETLVVEKKEEEEPAAGGHSHGHSH

SEQ ID NO: 1366 - protein, 60 aa, Citrus x paradisi
PGVKRDELKIEVEENRVLRVSGERKREEEKKGDHWHRVERSHGKFWRQFKLPDNADLDSV

SEQ ID NO: 1367 - protein, 441 aa, Brassica napus
MVGAKPIENGSDGGASTGLLHGRYELGRLLGHGTFAKVYHARNVTTGKSVAMKVVGKEKVVKVGMVDQIKREISVMRMVKHPNIVELHEVMASKTKIYFAMELVRGGELFAKVAKGRLREDVARVYFQQLISAVDFCHSRGVYHRDLKPENLLLDEEGNLKVTDFGLSAFTEHLKQDGLLHTTCGTPAYVAPEVILKKGYDGAKADLWSCGVILFVLLAGYLPFQDDNLVNMYRKIYRGDFKCPGWLSSDARRLVTKLLDPNPNTRITIDKVMDSHWFKKSSTRSRNEPVAATPEAEEDVDVSVHKSKEETETLNAFHIIALSEGFDLSPLFEEKKKEEKMEMRFATSRPASSVISSLEEAAKVGNKFDVRKSECRVRIEGKQNGRKGKLAVEAEIFAVAPSFVVVEVKKDHGDTLEYNNFCSTALRPALKDIFWTSTTPA

SEQ ID NO: 1368 - protein, 255 aa, Zea mays
LQLGLAGKVGSHGEGPGGAEADREQDQPPVTFAKRRNGLLKKAYELSVLCDAEVALIVFSNRGKLYEFCSGPSITRTLERYEKNSYAGPDTAVQNKENELVQNSRNEYLKLKAKVDNLQRTQRNLLGEDLGSLGVKELDQLEKQIDSSLSHIRSTRTQHMLDQLTDLQRREQMMCEANKCLRRKLEETSNQVHGQVWEHGANLLLGYERHSSPQQAPSHVGNGLFFHPLEAAAEPTLQIGFAPEHMNNFMPAWLP

SEQ ID NO: 1369 - protein, 545 aa, Mycoplasma penetrans HF-2
MAKEIKFSDSARNKLFNGVQQLFDAVKVTMGPRGRNVLIQKSYGAPVITKDGVSVAKEVDLTNPIENMGAQLVKDVASKTADEAGDGTTTATVLAYGVFKEGLRNVISGANPIEIKRGMDKTVNAIVNELNKSSKKIARKDEIIQVATISANSDKKIGELIANAMEKVGSDGVITVEEAKGINDELTVVEGMQFDRGYISPYFVTDTNKMIAKLENPYILITDKKVSSIKDILPILEEIMKTGRPLLIIADDVDGEALTTLVVNKMRGVFNVVAVKAPEFGDKRKQVLEDIAILTGGSFVTDDLGISFDKVTLQDLGQAESVVIDKDNSTIVKGKGLESQIKERISKIKTAIEMTDSDYDKDSLRNRLAKLNKGVAVIKVGAVSEVELKEKKDRVDDALSATKAAIEEGIVIGGGAALVHVSKRINVNTLNLIGDEKIGYQIVMSAIMSPISQIVSNAGFDKGVVINEILKATNPHLGFNAATGKYVDMFQTGIIDPVKVTRIALQNAVSVSSMLLTTEAVIYDVKDDKEDSVPAMPNMGMGGMM

SEQ ID NO: 1370 - protein, 727 aa, Xylella fastidiosa 9a5c
MSLRILNSLKVALLTLAITTAPALMAKSDSASPQVATPDQTTATKLVYGLLSDSRYAYRLRPLDEAMSKDIFKRYLEALDSNKQFFTQADIDNFSAFKAEIPDSICNGNLKPAFSIFAMYKKRVAERVTYANQLLKQNFDFSGQEKYEYDRSKAPWPASPQDLDDIWRRSTMNDWLRLKLAGKKPEDIRKTLKKRYANLLKTVNELKGEDVFQLYLNAYTNSIDPHTDYFTPRTADAFNQQMSLSLEGIGAQLQKQEDMVIIREVIPGGPTALDGTLKPGDRIVGVGQGKGGPIEDVIGLRIDDVVSKIRGKKDTQVRLEYIPAESGIDGAHRIVTLTRQKVRLAEQAAKGETITIEGSNGDAQRRIGIIKLPTFYEDFEGRRRNVANYTSATRDVAKLLINFKTDKVDGVVLDLRNNGGGSLDEAIQLTGLFIEQGPVVQVRESGGRVTVNGDRDDKVTWDGPLAVLINRGSASASEIFAGAIQDYGRGLVIGETSFGKGTVQNIVDLDRWPANESRRFGQVKLTIAQFFRISGSSTQHKGVLPDIAFPASVGATEFGESTYENALPWTRIASLQHTQYGNFSPILSKLKKIHISRTANDIEFKWWQEDVHNFSLEKEKKYVILNEAERLAERRKQETQHRERQTIRKNLGLQLDPLSEESDDGLIGNERDIAKDTAREKLADKRPDPLLHESAAILTDTINLLEKDQILSAQVLLQSTTPGHWAN

SEQ ID NO: 1371 - protein, 455 aa, Aspergillus nidulans FGSC A4
MSAPTADIRARAPEAKKVHIADTAINRHNWYKHVNWLNVFLIIGIPLYGCIQAFWVPLQLKTAIWAVIYYFFTGLGITAGYHRLWAHCSYSATLPLRIWLAAVGGGAVEGSIRWWARDHRAHHRYTDTDKDPYSVRKGLLYSHLGWMVMKQNPKRIGRTDISDLNEDPVVVWQHRNYLKVVFTMGLAVPMLVAGLGWGDWLGGFVYAGILRIFFVQQATFCVNSLAHWLGDQPFDDRNSPRDHVITALVTLGEGYHNFHHEFPSDYRNAIEWHQYDPTKWSIWAWKQLGLAYDLKKFRANEIEKGRVQQLQKKLDRKRATLDWGTPLDQLPVMEWDDYVEQAKNGRGLVAIAGVVHDVTDFIKDHPGGKAMISSGIGKDATAMFNGGVYYHSNAAHNLLSTMRVGVIRGGCEVEIWKRAQKENVEYVRDGSGQRVIRAGEQPTKIPEPIPTADAA

SEQ ID NO: 1372 - protein, 265 aa, Arabidopsis thaliana
MVAYPTKKTAIKQFLHCNSQATFKLKLERQEILRIFNLMALEALTSPRLASPIPPLFEDSSVFHGVEHWTKGKRSKRSRSDFHHQNLTEEEYLAFCLMLLARDNRQPPPPPAVEKLSYKCSVCDKTFSSYQALGGHKASHRKNLSQTLSGGGDDHSTSSATTTSAVTTGSGKSHVCTICNKSFPSGQALGGHKRCHYEGNNNINTSSVSNSEGAGSTSHVSSSHRGFDLNIPPIPEFSMVNGDDEVMSPMPAKKPRFDFPVKLQL

SEQ ID NO: 1373 - protein, 392 aa, Cespedesia bonplandii
DLEPVNPADVPVTAAVALKSYKLAAKAISGLQSLSSGNISMLCNVLVKEVCDLTGYDRVMVYKFHEDEHGEVIAEYHRPDLEPYIGLHYPATDIPQASRFLFMKNKVRMICDCMAPAVKVVQEKKLAQPLSLGGSTLRAPHGCHSQYMANMGSIASLVMSVMINDDDYNEMESDRQKPRKLWGLVVCHHTSPRLVPFPLRYACEFLIQVFGVQINKEVELTAQMKEKQILQTQTVLCDMLLRDTPVAIVTQSPNVMDLVKCDGAALFYKNKFWLIGITPPEDQIRDIACWLNEYHDGSTGLSTDSLMEAGYHGASILSGAVCGMAAIRVSLKDFLFWFRSQAAKEIKWGGAKHDPNEKDNGRNMHPRSSFNAFLEVVKWRSLPWEDMEMDAI

SEQ ID NO: 1374 - protein, 287 aa, Brassica napus
  misc_feature (118)..(118): Xaa can be any naturally occurring amino acid
MVKFERVPLLLGLVLVLTLVVAKASEPVCRQAEKFSRASFPEGFLWGTATAAFQVEGAVDEGCRGPSMWDTFTKKYPHRCQNHNADVAVDFYHRYKEDIKLMIDLNTDAFRLSIAWPXIFPHGRMSKGISKQGVQFYHDLIDELLKNKITPLVTVFHWDTPQDLEDEYAGFLSGNIVKDFTEYANFTFHEYGHKVKNWITFNEPWVFSRAGYDVGKKAPGRCSPYIQEWGKHCEDGRSGFEAYQVSHNLLLAHAYSVEAFRACKQCAGGKIGIAHSPAWFEPADLES

SEQ ID NO: 1375 - protein, 392 aa, Clusia gundlachii
DLEPVNPADVPVTAAGALKSYKLAGKAISKLQSLPSGNILLLCDVLVKEVRELTSYDRVMMYKFHEDDHGEVIAECRRPDLEPYLGLHYPATDIPQASRFLFMKNKVRMICDCMAPPVNVIQDNGLSQPLSLGGSTLRAPHGCHAQYMANMGSIASLVMAVTINEDDDGDREGDQRKQRRLWGLVVCHHTGPRFVPYPLRYACEFLIQVFGIQINKEVELGAQMREKHILETQTVLCDMLLRDSPVAIVTQSPSVMDLVKCDEAALYYKKKFWLLGITPTETQIRDIAEWLLEYHSGSTGLSTDSLMEAGYADASLLGDAVCGMAAIKINSRDFIFWFRSHTAKEIKWGGAKHDPDDKDEGMKMHPRSSFKAFLEVVKWRSLPWEDIEMDAI

SEQ ID NO: 1376 - protein, 391 aa, Croton alabamensis
DLEPVNPADVPITAAGAMKSYKLAAKAISKLQSLPSGNMSLLHDILVKEISDLTGYDRVMVYKFHEDDHGEVVAECRRNDLEPYLGLHFPATDIPQASRFLFMQNKVRMICDCSAPPVKVIQDKSLAQPLSLCGSILRSPHGCHAQYMGNMGTIASLVMSVTINEDDDEMETDRQKGKKLWGLVVCHHTSPSFVPFPLRYACEFLIQVFGVQIIKEVKLAAQKREKHILQTQPLLCDMLLRDDPVAIVTQTPNIMDLVNCDGAALYYKKKIWLLGAAPSEERVRDIAEWPLEYHSESTGLSTDSLMEAGYPGASILGDATCGMAAIRISSRDFIFWFRSHTAKEIKWGGAKHDPGAKDDVRKMHPRSSFKAFLEVVKWRSLPWEDVEMDAI

SEQ ID NO: 1377 - protein, 251 aa, Arabidopsis thaliana
MGRGRVELKRIENKINRQVTFAKRRNGLLKKAYELSVLCDAEVALIIFSNRGKLYEFCSSSSMLRTLERYQKCNYGAPEPNVPSREALAVELSSQQEYLKLKERYDALQRTQRNLLGEDLGPLSTKELESLERQLDSSLKQIRALRTQFMLDQLNDLQSKERMLTETNKTLRLRLADGYQMPLQLNPNQEEVDHYGRHHHQQQQHSQAFFQPLECEPILQIGYQGQQDGMGAGPSVNNYMLGWLPYDTNSI

SEQ ID NO: 1378 - protein, 396 aa, Denhamia celastroides
  misc_feature (75)..(78): Xaa can be any naturally occurring amino acid
  misc_feature (170)..(173): Xaa can be any naturally occurring amino acid
YLEPVNPADVPITAAGALKSYKPAAKAISRLQSLPSGNMSLLCDVLVKEVNELTGYNRVMVYRFHDDDHGEVVAXXXXELIWNLIQACNYPATDIPQASRFLFMKSKVRMICDCLAPPVRVLQDKRLAQPFSLGGSTLRSPYGCHAQYMANMGSIASLVMSVTINEDDDXXXXETNSDQQKARRLWGLVVCHHTTPRFVPFPLRYACEFLIQVFGVQINKEVELATQLKEKHILQTQTVLCDMLLRDSPVGILIQSPNVMDLVKCDGAALYYRDKFWLLGLTPTETQIKYIAEWLLEYHSESTGFSTDSLMEAGYPNASILSEAVCGMAAVKITSKDFLFWFQSHTAKEMKWGGAKYDPDYKDDGKRMHPRSSFKAFLELVKQHSLPTEDVEMDAI

SEQ ID NO: 1379 - protein, 391 aa, Dichapetalum macrocarpum
DLEPVNPADVPVTAAGALKSYKLAAKAISKLQSLPSGNISLLCDVLVKEVRDLTGYDRVMVYKFHDDEHGEVVSECHRPHLEPYLGLHYPATDIPRASRFLFMKNKVRMICDCLAAPVKVIQDNRLTQPLSLCGSTLRAPHGCHAQYMENMGSIASLVMSVMINEDDDEDRNCQQKGRKLWGLVVCHHTSPRFVPFPLRYACEFLIQVFGIQINKEVELSAQMREKHVLRIQTVLCDMLLRDAPVAIITQSPNVMDLVRCDGAALYYRKKFWLLGITPTEGQISDIAEWLLEYHRESTGLSTDSLMEAGYPGASDLGDAVCGMAAVRIASKDFLFWFRSHTAKEIKWGGAKHDPDVKDDGRKMHPRSSFKAFLEVVKWRSLPWEDIEMDAI

SEQ ID NO: 1380 - protein, 474 aa, Campylobacter jejuni RM1221
MKKLTNDFGNIIADNQNSLSAGAKGPLLMQDYLLLEKLAHQNRERIPERTVHAKGSGAYGEIKITADLSAYTKAKIFQKGEITPLFLRFSTVAGEAGAADAERDVRGFAIKFYTKEGNWDLVGNNTPTFFIRDAYKFPDFIHTQKRDPRTHLRSNNAAWDFWSLCPESLHQVTILMSDRGIPASYRHMHGFGSHTYSFINDKNERFWVKFHFKTQQGIKNLTNQEAAELIAKDRESHQRDLYNAIENKDFPKWKVQVQILAEKDIEKLGFNPFDLTKIWPHSLVPLMDIGEMILNKNPQNYFNEVEQAAFSPSNIVPGIGFSPDKMLQARIFSYPDAQRYRIGTNYHLLPVNRAKSEVNTYNVAGAMNFDSYKNDAAYYEPNSYDNSPKEDKSYLEPDLVLEGVAQRYTPLDNDFYTQPRALFNLMNDDQKTQLFHNIAASMEGVDEKIITRALEHFEKISPDYAKGIKKALEK

SEQ ID NO: 1381 - protein, 352 aa, Methanosarcina mazei Go1
MIEIDGSYGEGGGQLVRTAVALSAVTGEEIKVTNIRENRPNPGLKQQHLKALETAAKICGARVSGLSQGSSELFFAPVEIKGGKYNIDIGTAGSITLLLQCIMPALPFVEEKVELTIRGGTDVAWSPTIDYLKHVTLRALEQFGYAGSVTLKERGYYPRGGGSVSAVFEPCKLHGFHFRKTEGNKKTESNPVGEGLKGEKSMMEEIIGVSHASNLPAHVPARQAESARSLFLEAGYDARIDVSSSEFFSTGSGITLWKGYCGGSALGKKGLPAEKVGRQAAEEVIKELRAGAAVDIHLADQLIPYMALAGNSSFTVRELTLHAATNIWVTEQFLDVKFKIKEKEGLFEVSVG

SEQ ID NO: 1382 - protein, 255 aa, Bradyrhizobium sp. BTAi1
MAADIRVFTCLSDNFGYLIHDPATGATASVDAPEAGPIIRQLEAAGWTLTDILITHHHHDHVGAVAELKQKYGCRVVAPHDKTTAIADVDLRVGHGDVIKVGELLARVLETPGHTLDHVSYVFDADKAVFAADTLFSVGCGRVFEGTYPMMWDSLLKLRALPDDFRLYCGHEYTASNVKFALTVDGDNEALKARAAEVTRLRAANESTIPSLLGDEKQTNVFLRADDPAVAIKLRMKGATAEQVFGELRERKNKS

SEQ ID NO: 1383 - protein, 625 aa, Bradyrhizobium japonicum USDA 110
MCGIFGWVLAAAKHQNRDTLIGLTDLMSHRGPDASGYWLHQTSDERYQIGFGHRRLSIIDIGGGAQPMATEDGRFNLVFNGEIYNYLELRKELVALGHHFRTDSDTEVLIEAYRAWQLDAVRRLRGMFAFALWDDAEQRLVLARDAFGKKPLFLAEAQGAVLFGSEIEPLVQFPGFSRALDSDAIGHYLLNRYVPGPSTFFQSVKKLQPGHCAVWQNGMLKSTRYYTPPFATTVPDVKDFNSAIRLFEGAFDEAVRIRMRSDAPYGAYLSGGIDSSAVVATMVKHSTEPVRTFSVGFRETGYSELDHARVIAGQFGTIHNDLIVEPSAFMDHWSTAALRRGAPVSEASDIPIFMLSEMASRSVKMVLTGEGADELMGGYPKYRAERWIGLYQWLIPHLLHERLIHPLVRSLPYGMRRAKIVALAAGERDLANRMRVWFGGLSVGESEAMLGRLLSATPPDLFPYSSQIGSSLRRTLFFDQTSWLPDNLLERGDRMMMAGSIEGRMPFMDTVLAGVVARFPDDFLTGGKGGKRVLRAAMDKILPSEIIRRKKIGFRVPIGEWFRGPYREFLRDMLVSETSAVAQMVRGDRLRQLVTEHLDARQNHERLLWSFVNLEIFVRAFRVAS

SEQ ID NO: 1384 - protein, 401 aa, Oryza sativa
MSSGGGRPPAAQHIVRSVRQRFVPLPPPLARAPFAAAPGDYHRFAAASRGGEIEEGIVIRRTPSCGIDAKVEGFVKCLSSGSPGNPSTPASSRYDNSLGLLTRKFINLLKQTQDGILDLNDAAKILDVWVRKRRIYDITNVLEGTGLIEKKLKNRIRWRGSDDSGTNLDSDISCLKTEVENLYIQEQALDRSISEIREKMEELTEDESNHRWLFVTEDDIKGLPCFQNEALIAIKGPRGTTVEVPDPDELLPQKKLSDEHPYYIISQYKKMEELGETATPPRHASVVEPPSIATEAGHSSKQTMPLNVQQDIQETPELNASRAFGRMKKITPSDVDTDADYWLLTDDDISITHMWTTASEMQWDQIDTNDFLAEEISDTPCALNQPSAAASEPTGVGFNHG

SEQ ID NO: 1385 - protein, 466 aa, Glycine max
ILQLSLNSSEAGDSVPSSAFFGTSLKKVTASRVPNVKISSGSFKIVAAEKEIDEQQQTNKDRWKGLAYDISDDQQDITRGKGMVDSLFQAPQETGTHYAVMSSFEYLSTGLKQYNLDNNMDGFYIAPAFMDKLVVHITKNFMTLPNIKVPLILGIWGGKGQGKSFQCELVFAKMGINPIMMSAGELESGNAGEPAKLIRQRYREAADIISKGKMCCLFINDLDAGAGRLGGTTQYTVNNQMVNATLMNIADNPTNVQLPGMYNKQENPRVPIIVTGNDFSTLYAPLIRDGRMEKFYWAPTRDDRVGVCKGIFRTDNVPEDEIVKLVDTFPGQSIDFFGALRARVYDDEVRKWISGVGVDLIGKKLVNSKEGPPTFDQPKMTLSKLLEYGNMLVQEQENVKRVQLADKYLNEAALGDANQDAIKRGTFYGKAAQQVKIPVPEGCTDPNASNFDPTARSDDGTCLYTP

SEQ ID NO: 1386 - protein, 154 aa, Oryza sativa
MSMIRRSNVFDPFSLDLWDPFDGFPFGSGSGSLFPRANSDAAAFAGARIDWKETPEAHVFKADVPGLKKEEVKVEVEDGNVSRSAGERIKEQEEKTDKWHRVERSSGKFLRRFRLPENTKPEQIKASMENGVLTVTVPKEEPKKPDVKSIQITG

SEQ ID NO: 1387 - protein, 465 aa, Akebia quinata
SGKPFYAIVHRVTGSLIIDFEPVKPYEVPMNAAGALQSYKLAAKAIARLQSLPNASMDRLCDTVVQEVFELTGYDRVMAYKFHDDDHGEVVSEITKPGLEPYLGLHYPATDIPQAARFLFMKNKIRMICDCNATHVKVFQDEKLPLDLTLCGSTLRAPHSCHSQYMENMGSIASLGMAVVINEGDEEDNGSGSAQPQRRKRLWGLVVCHNTTPRFVPFPLRYACEFLIQVFAIHINKELELGNQVLEKSVLRTQTLLCDMLMRNAPLGIVSQSPNIMDLVKCDGATLLYKNKIWRLGLSPSEFHIRDIASWLYEYHMDSTGLSTDSLHDAGFPGALSLGDGICGMAAVRITSKDMIFWFRSHTAAEVRWGGAKHDPCEEDDGRKMHPRSSFKAFLEVAKTRSLAWKDYEMDAIHSLQLILRNAFKDGDTADLNPSVIHSRLDNLKIEGMEELEAVTNEMVRLMET

SEQ ID NO: 1388 - protein, 549 aa, Colwellia maris
MAAKDVLFGNDARVKMLRGVNILADAVKVTLGPKGRNVVIDKSFGGPIITKDGVTVAKEIELEDKFENMGAQMVKEVASKANDEAGDGTTTATVLAQAIVNEGLKSIAAGMNPMDLKRGIDKAVIAAVEALKESSTPVTDNKAIEQVGTISANSDETVGKIIATAMEKVGTEGVITVEEGQALTDELDVVEGMQFDRGYLSPYFINKQENGTVELENPFILLVDKKISNIRELLTTLEGVAKAGKPLLIIAEDVEGEALATLVVNNMRGIVKVAAVKAPGFGDRRKAMLQDVATLTAGTVISEEIGMELEKVTLEDLGQAKRVVISKDTTIIIDGIGVEADIQARVSQIRGQIEDSSSDYDKEKLQERLAKLAGGVAVIKIGAATEMEMKEKKSRVEDALHATRAAVEEGVVAGGGVALIRAADAIKDLEGANEDQTHGINVAIRAMEAPLRQIVANCGDEPSVVLNEVRNGKGNYGYNAGNSTYGDMIEMGILDPTKVTRSALQFAASVAGLMLTTEAMITDAPVKDAGGMPDMSGMGGGMGGMGGMM

SEQ ID NO: 1389 - protein, 392 aa, Akebia quinata
DLEPVNPAEDPVTAAGALKSYKLAAKAISRLQSLPSGDISLLCDVLVHEVSDMTGYDRVMVYKFHEDEHGEAVAECLRSDLEPYLGLHYPATDIPQASRFLFLKNKVRMICDCSARSVEIVQDKRLTQPLSLGGSTLRAPHGCHAQYMENMGSVASLVMSVTINEDDDEMETNQQKGRKLWGLVVCHHSSPRFVPFPLRYACEFLIQVFGIQLNKEVELAAQLREKHILRIQTVLCDMLLRDAPVGIFTQSPNVMDLVKCDGAALYYKNKLWLLGVTPTEAQIREIAAWILEYHDRSTGLSTDSLMEAGYPGASVLGDAVCGMAAINITSKDFIFWFRSHTAKEIKWGGAKHDTVDKDDGRKMHPRSSFKAFLEVVQWRSLPWEDMEMVAIQ

SEQ ID NO: 1390 - protein, 979 aa, Debaryomyces hansenii CBS767
MSSQVVTNLEETTNQHKAINNPNVVKRIHREVRFGLYILGSTLGEGEFGKVKLGWRKDGKHPSQVAIKLIKRDTIMKDSESEIKIHREINSLKMLNHPNIVNLVEVMKSGKYIGIVLEYASGGELFDYILQHKYLKENVAKKLFAQLVSGVDYMHSKGLIHRDLKLENLLLDKHKNVIISDFGFVNSYNKDKNDLMKTSCGSPCYAAPELVLTQAPYEGRKVDTWSLGVILYAMLAGYLPFDDDPENEDGSDIVRLYHYICKTPLTFPEYISPLARDLLRKIIVPDPKKRITIKNIKNHPWLTPYVNLLSVTQPEWDKVHKDNKTVNPKSAATANNSYTNLIHSNTNKRFSMINEKTNSSSLMMPAGRSYSSTNVVNQLYSNPSAPTTSSSLANAVALSKPKDPASDRSRTPSPTKQLPNGNNYSSTNYQRGHAKSTSISNPYSSASNALKAMVTENDSKRNSLVSLDSTTSSMISLTSSTKPAQHNHLPSPHLPRSTTYTGSAISTIAESPSKPSPATHLAVDNESNVTHHNTASSSNITNLKPNSSSRESAKLPHANKKPRPTSYHPSSMSASLMSSNGSSLQDYIKIPTPLLPIPQLLSTSPTKASPSSETSSPVFTDTNNSSPTMRSNASINSRRNSVVTHVHVNGVLTSESNANHNENKRNSVLSYLEDKMDALELTELHSPLKSNKPGFTDNASDTNITPQINQLPMFDGQTESPIIHTSKAEESQVKDQSEEGNKIETDEHPFVNVANQVDENKVVDLALEKESISEAPEEPNVSHSQDRTNQQENITLEFEEPKYTLEAQPAEPVSQTFKDEPVVSLDEQLIKRDHVNIIDEQEKENLDRKTTNTKKETSREINKSSAKEIKDNKKRNRFSLLSFYSNYNGSSSSNVVLQQAPTSNVSHSGKRILEPSLEQNVPTQPQDQKRNVSNSSGKSSTSKKSNNSGTAHISSNNGKEASAARKVMDFFKRRSVKIG

SEQ ID NO: 1391 - protein, 466 aa, Aristolochia grandiflora
SGKPVYAIIHRVTGSLIIDFEPVKPYEAPMTAAGALQSYKLAAKAISRLQSLPSGSMERLVDTVVQEVYELTGYDRVMAYKFHDDDHGEVISEVTKPDLEPYLGLHYPATDIPQAARFLFMKNKVRMICDCYAKPVKVFQDEKLSFDLTLCGSTLRAPHSCHLQHMKNMSSIASLVMAVVVNEGEEDDNPDPNQQQQVPKRKRLWGLVVCHNTTPRFVPFPLRYACEFFMQVFAIHVNNEIELENQIREKNILRTQTLLCDMLLRDSPLSIVTRSPNIMDLVKCDGAALMYQNKVYTLGLSPTESQISEINRWLLEYHMDSTGLSTDSLHDAGYPNAPSLGDIVCGMAAVRITSTDMLFWFRSHTAGEVRWGGAKHDPSDKDDGRRMHPRSSFKAFLEVVKNRSLPWKDYEMDAIHSLQLILRGSTKETAAIDTKTVISSQLNNLKLDGLHELQAVTNEMVRLMET

SEQ ID NO: 1392 - protein, 240 aa, Triticum aestivum
  misc_feature (140)..(140): Xaa can be any naturally occurring amino acid
  misc_feature (182)..(182): Xaa can be any naturally occurring amino acid
  misc_feature (184)..(184): Xaa can be any naturally occurring amino acid
MSFARAVQRIKSIQNFLTRPTVPHISAAAAGQSRLINMASTTETNNYKFNHSMIRVKDPKASTKFYEFLGMSLVKKLEFPDNKFDLYFFGYDSPNALSHNKSTFDRQGLIELTHNYGTENDPEYKVNNGNQDPHRGFGHXCIAVDNIQAACQRIEDAGYKFQKKLTDGRMRNIAFVLDPDGXWXVEVVARNDYKETENVKETDVSTYTMNHTMLRVKDAEKSPEYYPRSLGMSRLRTLRN

SEQ ID NO: 1393 - protein, 652 aa, Geobacillus stearothermophilus
MIAANPTDLEVYLFHEGSLYKSYELFGAHVINEGGKVGTRFCVWAPHAREVRLVGSFNDWDGTDFRLEKVNDEGVWTIVVPENLEGHLYKYEIVTPDGQVLFKADPYAFYSELRPHTASIAYDLKGYQWNDQSWKRKKRRKRIYDQPMVIYELHFGSWKKKDGRFYTYREMADELISYVLDHGFTHIELLPLVEHPLDRSWGYQGTGYYAVTSRYGTPHDFMYFVDRCHQAGIGVIMDWVPGHFCKDAHGLYMFDGAPTYEYANEKDRENYVWGTANFDLGKPEVRSFLISNALFWLEYYHIDGFRVDAVANMLYWPNNDRLYENPYAVEFLRKLNEAVFAYDPNALMIAEDSTDWPKVTAPTYEGGLGFNYKWNMGWMNDMLKYMETPPYERRHVHNQVTFSLLYAYSENFILPFSHDEVVHGKKSLLNKMPGSYEEKFAQLRLLYGYMMAHPGKKLLFMGNEFAQFDEWKFEDELDWVLFDFELHRKMNDYMKELIACYKRYKPFYELDHDPQGFEWIDVHNAEQSIFSFIRRGKKEDDVLVIVCNFTNQAYDDYKVGVPLLVPYREVLNSDAVTFGGSGHVNGKRLSAFNEPFHGKPYHVRMTIPPFGISILRPVQKRGERKRNEKEMHRHVIGRRARKSASLADDKHR

SEQ ID NO: 1394 - protein, 349 aa, Pseudomonas syringae pv. tomato str. DC3000
MTTIFDPITLGDLQLPNRIILAPLTRCRADEGRVPNALMSEYYVQRASAGLILTEATSVTPMGVGYPDTPGIWSNDQVRGWSNITQAVHNAGGRIVLQLWHVGRISHPSYLNGETPVAPSAIAAQGHVSLMRPITPLPTPRALELAEIGDIVEAYRVGAENAKAAGFDGVEVHGANGYLLEQFLLTGSNQRTDQYGGSLENRARLLLEVTDAVIDVWGAGRVGVHLSPRFDMHNMSDENRAETFSYVAKELGKRGIAFICARERDAEDSLGPQLKKDFGGVYIANEKFTKDSANAWLAEGKADAFAFGVPYIANPDLPERLASDAPLNEAHPETFYGKGPVGYIDYPRL

SEQ ID NO: 1395 - protein, 392 aa, Aristolochia grandiflora
DLEPVNLADAQVSASGALKSYKLAAKAISRLQSLPSGNIVLLCDVLVREVRDLTGYDRVMAYKFHEDEHGEVIAECKRPDLEPYLGLHYPATDIPQASRFLFMKNKVRMIYDCSATPVSVIQDKGLAQPLCLGGSTLRAPHGCHSQYMANMGSIASLVMSVTINEDDDEKGSGQRGRKLWGLVVCHHCSPRFIPFPFRYACDFLMQVFGIQINKEVELAAQVREKHILRTQTLLCDMLLRDAPMGIVNKSPNVMDLVKCDGAALYYQNKFWLLGTTPTEAQIRDLAQWLLQYHNNTTGLSTDSLVEAGYPGAQDLGDAVCGMAAVKITSRDFLFWFRSHAGKEIKWGGAKHDPKEHDGDGKKLHPRSSFNAFLEVVKWRSTPWEDVEMDAIQ

SEQ ID NO: 1396 - protein, 554 aa, Asparagus falcatus
PYEVPMTAAGALQSYKLAAKAISRLESLPGGSMEKLCNAVVEEVFELTGYDRAMAYRFHEDDHGEVFSEVTKPGLEPYLGLHYPATDIPQAARFLFMKSKVRMICDCRAKPVRVLQDEKLPFDITFCGSTLRAPHSCHLQYMENMNSIASLVMAVVVNEGGEDEGEGEAGQASSPAQQQQGLRRKRLWGLVVCHNESPRFVPFPLRYACQFLMQVFAIHVNKEFELEHQIREKNILRTQTLLCDILLREAGPLGIVTARSPNVTDLVRCDGAALLYEDKIWRLGRTPTDSEIRDIAYWLVEYHADSTGLSTDSLLEAGYPGAFALGDLVCGLAAARINSRDILFWFRSHTAAEVRWGGAKHDPSDEDDGRRMHPRSSFKAFLEVVKTRSLPWSDYEMDAIHSLQLILRGSFNDVKKSEGLDSRMRSLRVEGMEELQAVTNEMVRLIETATVPILAVDVDGVINGWNLKIAELTGLPVDEAIGKHLLALVEDSSVAQVRRMLLLALQGTEEQNVEFQMKTCGDRGDDGPVILVVNACASRDLNEKVVGVCFVAIT

SEQ ID NO: 1397 - protein, 391 aa, Dillenia philippinensis
DLEPVNPTDVPVTAAGALKSYKLAAKAISRLQSLPSGNMSLLCDALVQEVSDLTGYDRVMVYKFHEDDHGEVVAECRRPDLEPYLGLHYPATDIPQASRFLFMKNKIRMICDCLAPPVQVIQDKCLAQPLSLCGSTLRSPHGLHAQYMANMGSIASLVMSVTINEDDDEVESDKQKGRKLWGLVVCHHTSPKVVPFPLRYACEFLIQVFGVQVNKEVELAAQLKEKHILKTQTVLCDMLLRDAPVGIVTQSPNVMDLVKCDGAALYYRNKFWLLGITPTEAQIRELAGWLLDCHNGSTGLSTDSLMEAGYPGASILGDALCGMAAIKITSKDFLFWFRSHTAKEIKWGGAKHDPVDKDDGKKMHPRSSFKAFLDVVKRRSFPWEDVEMDAI

SEQ ID NO: 1398 - protein, 461 aa, Zea mays
  misc_feature (224)..(224): Xaa can be any naturally occurring amino acid
  misc_feature (265)..(265): Xaa can be any naturally occurring amino acid
  misc_feature (424)..(424): Xaa can be any naturally occurring amino acid
MARSRQEGEAGGEERKLVLGKYELGRLLGQGTFAKVYYARDLSAAAGTGSTSVAIKVIDKARLRRMEGMVEQLRREISVMRMVRHPNVVGIREVLASRSRVFVVMEYARGGELFAKVARGRLTEDHARRYFQQLVAAVGFCHRRGVAHRDLKPENLLLDEDGRLKVTDFGLAALPEQLRHDGLLHTQCGTPAYVAPEVLRKRGYDGARADLWSCGVVLYVLLCXFLPFQHDNCAKMYQRIFKAEYQVPPWVSGDARRLIARLLVXDPAKRASIPEVMCTPWFRKGFVPPVLSVSPPMTPKKRLDGDDGGGGALFDSSSNSGATSPRSCNAFQLISSMSSGLDLSGLFENEHKAATVFTARAPAATVVEKLESAARALGFETTRGKGWKVRMEAKAGGTNGRLAVTAEVLEVAVDVAVVEFAHDXGPALAFTKFCPVDVRPALPEIVWAWQGDSPAAAVGPA

SEQ ID NO: 1399 - protein, 391 aa, Dissiliaria muelleri
DLEPVNPADVPVTAAGALKSYKLAAKAISRLQSLPSGNISLLCDVLVKEVSDLTGYDRVMVYRFHEDEHGEVVAECRQPDLEPYLGLHYPATDIPQSSRFLFMKNKVRMICDCMAPPVEVVQDERLSQPLSLCGSTLRSPHGCHAQYMANMGSVASLVMSVTINEDDDEMDGDQQTGRKLWGLVVCHHTCPRFVPFPLRYACEFLVQVFGVQINKEVELAAQMREKHILRTQTVLCDMLLRDAPVGIITQSPNVMDLVKCDGAALYYRKKFWLLGVTPTEAEIRDIAEWLLECHSGSTGLSTDSLMEAGYPGASILGDAVCGMAAVRITSKDFLFWFRSHTAKEIKWGGAKHDPGDKDDGRKMHPRSSFKAFLEVVKRRSLPWEDVEMDAI

SEQ ID NO: 1400 - protein, 391 aa, Dovyalis rhamnoides
DLEPVNPADVPVTAAGALKSYKLAAKAISRLQSLPSGNISLLCDVLVKEVSALTGYDRVMAYKFHEDQHGEVVAECCRPDLEPYLGLHYPATDIPQASRFLFMKNKVRMICDCLAPPVKVVEHKRLAQPLNLCGSTLRSPHGCHVQYMENMGSIASLVMSVTINEDDDEMDSDQQKGRKLWGLVVCHHTSPRFVPFPLRYACEFLLQVFGVQINKEVELAAQMREKHILETQTVLCDMLLRDAPAAIITQSPNVMDLVKCGGAALYFRKKFWLLGVTPTEAQIRDLSEWLLQYHSESTGLSTDSLLEAGYPGASALGDAVCGMAAIKISSKDFLFWFRSYTAKEIKWGGAKHDPDDKDDGRKMHPRSSFKAFLEVVKRRSLPWEDVEMDAI

SEQ ID NO: 1401 - protein, 391 aa, Putranjiva roxburghii
DLEPVNPSDVPVTAAGALKSYKLASKAISRLQSLPVANISLLCDVLVKEVRDLTGYDRVMVYRFHKDEHGEVVAECCRPDLEPYLGLHYPATDIPQASRFLFVKNKVRMICDCMAPAVKVIQDKRVARPLSLCGSTLRAPHGCHTQYMVNMGSIASLVMSVTINEDDDEMDSDQEQGRRLWGLVVCHHTSHRFVPFPLRYACEFLIQVFGVQIDKEVELARQMRKNIFCKLKLVLCDMLLRDAPMAIITQSPNVMDLVNCDGAALYYRKKIWLLGVTPTEAQIRDITEWLLEYPSGSTGLTTDSLMEAGYPGASILGGSVCGMAAIRITSNDFLFWFRSHTAKEIKWGGAKHDPGDKDDGRQMHPRSSFKAFLGVVKWRSLPWEDIEMDAI

SEQ ID NO: 1402 - protein, 392 aa, Elaeodendron orientale
DLEPVNPADVPITAAGALKSYKLAAKAISRLQSLPSGNISLLCDVLVKEVNELMGYDRVMVYRFHDDDHGEVVAEYCRPDLEPYLGLHYPATDIPQASRFLFMKNKVRMICDCLAPPVKVLQDKILAQPLSLSGSSLRSPHGCHAQYMANMGSIASLVMSVTINDDDDDETNNDQQKGRKLWGLVVCHHTTPRFVPFPLRYACEFLIQVFGVQINKEVELATQLKEKHILRTQTVLCDMILRDAPVGILTQSPNVMDLVKCDGAALYYRNKVWLLGVTPTETQIKEIVEWLLEYHSESTGLSTDSLMEAGYPDASILGEAVCGMAAVKITSKDFLFWFRSHTAKEMKWGGAKHDPDDKDDGKRMHPRSSFKAFLEVVKIRSLPWEDVEMDNH

SEQ ID NO: 1403 - protein, 640 aa, Corynebacterium glutamicum ATCC 13032
MCGLLGILTANGNAEAFVPALERALPCMRHRGPDDAGTWHDADAAFGFNRLSIIDIAHSHQPLRWGPADEPDRYAMTFNGEIYNYVELRKELSDLGYAFNTSGDGEPIVVGFHHWGESVVEHLRGMFGIAIWDTKEKSLFLARDQFGIKPLFYATTEHGTVFSSEKKTILEMAEEMNLDLGLDKRTIEHYVDLQYVPEPDTLHAQISRLESGCTATVRPGGKLEQKRYFKPQFPVQKVVKGKEQDLFDRIAQVLEDSVEKHMRADVTVGSFLSGGIDSTAIAALAKRHNPDLLTFTTGFEREGYSEVDVAAESAAAIGAEHIVKIVSPEEYANAIPKIMWYLDDPVADPSLVPLYFVAAEARKHVKVVLSGEGADELFGGYTIYKEPLSLAPFEKIPSPLRKGLGKLSKVLPDGMKGKSLLERGSMTMEERYYGNARSFNFEQMQRVIPWAKREWDHREVTAPIYAQSRNFDPVARMQHLDLFTWMRGDILVKADKINMANSLELRVPFLDKEVFKVAETIPYDLKIANGTTKYALRRALEQIVPPHVLHRKKLGFPVPMRHWLAGDELFGWAQDTIKESGTEDIFNKQAVLDMLNEHRDGVSDHSRRLWTVLSFMVWHGIFVENRIDPQIEDRSYPVEL

SEQ ID NO: 1404 - protein, 369 aa, Desulfotalea psychrophila LSv54
MSELFELAKINGLELKNRFIRSATYEAMAGLDGRVTDQLLLYMANLAQGELGLIISGHTHVTLEGQAGPRQMGIYSDEMIEGLQRFTATVHENGGLIAAQLAHAGLRAIGRNEYAPLSPSDLFAGSLKVASEMTVDDIARTVKAFGDAGQRAVAAGFDAIQIHAAHGYLLSQFLSPHYNTRDDLYGGSLENRARFLIQVYEEIRQRVGTSFPIMVKINSEDFLPGGITTEEVLKVCQMLEESGIDAIEMSGGTLESEELIPSRVGTATSAEREVYYRKAAEAFRKKKIAVPLILVGGFLSLYIAEEVVASGLADFVALSRALVREPHLVKRWAAGDRKKATCISCNKCFLTLAMPEGLYCAVEKKARRK

SEQ ID NO: 1405 - protein, 366 aa, Xanthomonas campestris pv. campestris str. ATCC 33913
MSSLFSPYQLKDVSLRNRIAIPPMCQYTATDGFTNDWHQVHYASMARGGAGLVIVEATGVSPEGRITPGCLGLWNDAQAEGLAGIAASISAAGAVPGIQIGHAGRKASANLPWEGDDHIADGDARGWDTLSPSAVAFGANLPKLPRAMDLDDIARVRGDFVAAAKRALAAGFKWLELHFAHGYLAQSFFSVHANQRQDAYGGSAENRARFLLETLQAVRAVWPEHLPLTARFGVIEFDGRDEETLQEAIALTRNFKRDGLDLLNVSMGFSTPNAVIPWGPALLAPIAERVSREAALPVASSWNIDDPLEADRVVAAGQMELVMVGRAHLANPHWPYHAALALGEERPSRVLPPSYAHWLARYGKRS

SEQ ID NO: 1406 - protein, 917 aa, Pseudomonas chlororaphis
MLKKLGIKGRVLLLTLLPTSLMALVLGGYFTWMQQSDLQTQLLQRGEMIAEQLAPLVAPALAHQNTALLERIATQSLEQQDVRAVSFLAPDRTPLAHAGPSMLNQAPTGNGSQMLQRTGSDATRYLLPVVGRHRNLAGDLIPDESDRLLGWVELELSHNSMLLRGYRSLFASLLLITAGLICTGLLALRMGRTINNPLSQIKQAVTQLKDGNLETRLPLLGSQELDELASGINRMAGTLQNAQEELQHSIDQATEDVRQNLETIEIQNIELDLARKEALEASRIKSEFLANMSHEIRTPLNGILGFTHLLQKSELTPRQLDYLGTIEKSADSLLGIINEILDFSKIEAGKLVLDSIPFNLRDLLQDTLTILAPAAHAKQLELVSLVYRDTPLSLVGDPLRLKQILTNLVSNAIKFTREGTIVARAMLEEEHEDSVQLRISIQDTGIGLSNQDVRALFQAFSQADNSLSRQPGGTGLGLVISKRLIEQMGGEIGVDSTPGEGSEFWISLRLPKTRDDAEDLPAPPLLGRRVAVLENHELARQALQHQLEDCGLEVTPFNTLEALTNGVTGVHQTEQAIDLAVLGITTNDMPPERLNQHIWDLEHLGCKVLVLCPTTEQTLFHLSVPNPHSQLQAKPACTRKLRRALADLVNPKAVRSEPSEPIASRPPRVLCVDDNPANLLLVQTLLEDMGAKVLAVDSGYAAVKAVQNESFDLVMMDVQMPGMDGRQSTEAIRQWESERNCTPLPVIALTAHAMANEKRALLQSGMDDYLTKPISERQLAQVVLKWTGLALRNQGPERTGEPSGNGHELQVLDHDEGLRLAAGKADLAADMLAMLLASLEADREAIRAARAANDHNALIERVHRLHGATRYCGVPQLRAACQRSETLLKQEDIKAFAALDELERAINRLATEARINA

SEQ ID NO: 1407 - protein, 544 aa, Agrobacterium tumefaciens
MAAKEVKPGASAREKMLKGVDILADAVKVTLGPKGRNVVIDKSFGAPPITKDGVSVAKEIELEDKFENMGAQLVREVASKTNDIAGDGTTTATVLAQAIVREGAKAVAAGMNPMDLKRGIDLAVAEVVKDLQAKAKKINTSEEVAQVGTISANGERQIGLDIAEAMQRVGNEGVITVEEAKTAETELEVVEGMQFDRGYLSPYFVTNPEKMVADLEDAYILLHEKKLSNLQAMLPVLEAVVQTGKPLVIIAEDVEGERLATLVVNKLRGGLKIAAVKAPGFGDRRKAMLEDIAILTGGTVISEDLGIKLESVTLDMLGKSKKVSISKENTTIVDGAGQKSDIEGRVAQIKAQIEETTSDYDREKLQERLAKLAGGVAVIRVGGSTEVEVKEKKDRIDDALNATRAAVQEGIVPGGGVALLRSSTKITVKGVNDDQEAGINIVRKALQSLVRQIAENAGDEASIVVGKILDKNEDNYGYNAQTGEYGDLIALGIVDPVKVVRTALQNAASVASVLITTEAMIAELPKKESAMPQMPGGGMGGMDF

SEQ ID NO: 1408 - protein, 217 aa, Vibrio fischeri ES114
MSLQYQIIPVTSYEQNCSIVWCDETMKGVVIDPGGDVQLLKQAIEALNVDVVHMVLTHGHLDHVGGTEDLAAITNATIVGPHKEDNFWLQGLPNQSERFGFPHTEAFEPSQWLNEGDVIEFGNQKLDVLHTPGHTPGHVVLFNQEAKMAFVGDVLFKGAIGRSDFPKGDFDTLISSIKTKLWPLGNDMRFVPGHGPESTFGHERQTNPFVADKMPLW

SEQ ID NO: 1409 - protein, 334 aa, Nitrosomonas europaea ATCC 19718
MHTGTTLTQFIIEEQRHIAGASGDFTALLNDIVTAIKTISNAVNKGALIGVMGALDTENVQGETQKKLDVITNEIMIRNNEWAGHLSGMASEEMDDVYSIPSPYPLGKYLLVFDPLDGSSNVDLNISVGTIFSILRSPVPSRAASMEDFLQPGVKQVCAGYALYGSSTMLVLTTGHGVNGFTLDRDIGEFVLTHPNMRIPADTREFAINASNQRFWEAPVQRYVAECLAGSTGPRGRDFNMRWVASMVAEVHRILTRGGIFMYPRDTKDPSKPGRLRLMYEANPMSFIVEQAGGLSTTGYERILDVVPQDLHQRVPVILGSKNEVEVVLEYHNA

SEQ ID NO: 1410 - protein, 240 aa, Zea mays
MGRGKIVIRRIDNSTSRQVTFSKRRNGIFKKAKELAILCDAEVGLVIFSSTGRLYEYSSTSMKSVIDRYGKAKEEQQVVANPNSELKFWQREAASLRQQLHNLQENYRQLTGDDLSGLNVKELQSLENQLETSLRGVRAKKDHLLIDEIHDLNRKASLFHQENTDLYNKINLIRQENDELHKKIYETEGPSGVNRESPTPFNFAVVETRDVPVQLELSTLPQQNNIEPSTAPKLGLQLIP

SEQ ID NO: 1411 - protein, 142 aa, Streptococcus thermophilus
MLNKIQPRNSDTYSMTPFDFFEDFSRNLFNDFKSNLIKTDIHETDNEYLVEAELPGIPKENIQVTYEDGVLTISGQQQIDTVDEDKKGKLIRSERSSTSLRRQYLLENVKEDEIKASYSDGILKVTLPKDSNKEIKKSIPIE

SEQ ID NO: 1412 - protein, 212 aa, Zea mays
EACYNYGFLPADRGKHQPPPAPHATLPHAAADFLCISEDAGELWEYFPCPFCYIEVEVPFICNHLQEEHCFDTRNAVCPICANNLGKDMAAHFRLQHTHLLKRRKPYRPSSCPAAATSPATYQVNSYYEEAEPQQHYSRPYKDPAPDPLLSQFICSVDAIPGDDNAQKDDQRLKLNNKGATASDDDASSKLGLEERLQRIDFLTEILMSTIL

SEQ ID NO: 1413 - protein, 439 aa, Arabidopsis thaliana
MDKNGIVLMRKYELGRLLGQGTFAKVYHARNIKTGESVAIKVIDKQKVAKVGLIDQIKREISVMRLVRHPHVVFLHEVMASKTKIYFAMEYVKGGELFDKVSKGKLKENIARKYFQQLIGAIDYCHSRGVYHRDLKPENLLLDENGDLKISDFGLSALRESKQQDGLLHTTCGTPAYVAPEVIGKKGYDGAKADVWSCGVVLYVLLAGFLPFHEQNLVEMYRKITKGEFKCPNWFPPEVKKLLSRILDPNPNSRIKIEKIMENSWFQKGFKKIETPKSPESHQIDSLISDVHAAFSVKPMSYNAFDLISSLSQGFDLSGLFEKEERSESKFTTKKDAKEIVSKFEEIATSSERFNLTKSDVGVKMEDKREGRKGHLAIDVEIFEVTNSFHMVEFKKSGGDTMEYKQFCDRELRPSLKDIVWKWQGNNNNSNNEKIEVIH

SEQ ID NO: 1414 - protein, 1132 aa, Bdellovibrio bacteriovorus HD100
MNHKNRLFLFTSVLVLGTLLIAGTVGYKMGSSSLEQSTRERLVQIRDFKSDEIQKEFAYLKNALVLTSEYTPILQFLRRYPQEHQQMQSWLRSHGKATAWRNEMEEHRPPQVSDYPRILEQFTALPLFLQYQFQQSARSQNRPLPQLASVNGFSDLNYFRSYESLHSKLFDVLERSHLNDVLLIEPNGTVAYSAAKSLALGDNLISGPLSNSRLAQAYRWSLNAPKGATKYFDFTPVSHFWHTPAAFLTMPLFDQTNFVGTLVFQLSLERIDQILSHNSKWKELGLGMTGEVVAFGTDGFVRNNPRLYLESPVQFLQKVRQQEDARAALESIERSSSASLSLILPPTQIRRYMERGVAFDSGEDYMGTRSLQSAGRVNVVDNTDWIIISKMDLNEALAPLSFKLPWFFIGGFLLWSLALGGAWLVYRRMFFPSQVLSDGMDKLKSHNFSETLQAPEEEEYKDLYKKFDEIREDFRKTKAARDFLENVVYSLNEVFFIVEVEDVEDSLRKNFRVRGFNPTAQSLTGAPGPALKNSDLSLWLETDYSVIENSLRERDANKSTHTAEASLKKITGDRVPLEVSWARVNTENKDKVLLAMMGTDMRWKKEIEKELKLKEELLKESQSLSKTGSFRWDIRTGKCLWSEEEFHLLGLTPDNVVPSYDLFRSLILSEDLPVFDKALAEAHKNIAPFHVDLRMKKQDSNDLIWVRCQGRTEYDDYGNALFMYVTTQDITELRRVEQSLITTKNEALKASQAKSEFLAQMSHEIRTPMNAIMGMAELLKETRLDVDQKYYVTIFCKAGEVLMSLINDILDLSKIEAGEVSIENIPFDMKKLMADVEDMMKPRALEKGLNCICEIAPGVSPHLMGDPTKLRQVLINLIGNSIKFTNKGQVRLVIGKNPSKKDTLLISITDTGIGIPEDRQHMIFQKFSQADNSVTRKYGGTGLGLAISKSLVELMGGQIWFKSRPGTGTTFFFTIPYREQIYNPVNYMPVPMRTPELDFVSPKPRDPNHKVKILIADDTEDNRTLFTHYLKNEPFEIIEAENGLQAIDQIKSGEFDIVFMDVQMPEMDGYAATDRIREWEKESHKPPVPIIALTAHALAEDRQKSLRAGCNDHIAKPFKKDTLLGVINKYSL

SEQ ID NO: 1415 - protein, 444 aa, Asparagus falcatus
  misc_feature (59)..(59): Xaa can be any naturally occurring amino acid
DLEPVNPADVPVTAAGALKSYKLAAKAISRLQSLPSGNISLLCDVLVREISDLTGYDRXMAYKFHDDEHGEVIAECRRSDLEPYIGLHYPATDIPQASRFLFMKSKVRMICDCSAHPVKIIQDKKLAQPLSLCGSTLRAPHGCHAQYMSNMGSVASLVMSVTINEDDDESGSDQKGRKLWGLVVCHHTNPRFVPLPLRYACEFLLQVFGIQLNKEVELAAQAREKHILRTQTVLCDMLLRDAPIGIFTQTPNVMDIVKCDGAALYYKNQIWVLGTTPAEPQIRDISAWLLECHDGSTGLSTDSLMEAGYPGALALGDAVCGMAAIKITDKDFIFWFRSHTAKEIKWGGAKHEPANRDDEGRKLQPRSSFKAFLEVVKWRSLPWEDIEMDSVHSLQLILRESLHNEIAVGESKTLVNSTLDDMKRIQGMDELRAVTNEMVRLIET

SEQ ID NO: 1416 - protein, 540 aa, Arabidopsis thaliana
MRRFLINQAKGLVDHSRRQHHHKSPSFLSPQPRPLASSPPALSRFFSSTSEMSASDSTSSLPVTLDSINPKVLKCEYAVRGEIVNIAQKLQEDLKTNKDAYPFDEIIYCNIGNPQSLGQLPIKFFREVLALCDHASLLDESETHGLFSTDSIDRAWRILDHIPGRATGAYSHSQGIKGLRDVIAAGIEARDGFPADPNDIFLTDGASPAVHMMMQLLLSSEKDGILSPIPQYPLYSASIALHGGSLVPYYLDEATGWGLEISDLKKQLEEARSKGISVRALVVINPGNPTGQVLAEENQRDIVNFCKQEGLVLLADEVYQENVYVPDKKFHSFKKVARSLGYGEKDISLVSFQSVSKGYYGECGKRGGYMEVTGFTSDVREQIYKMASVNLCSNISGQILASLVMSPPKPGDDSYDSYMAERDGILSSMAKRAKTLEDALNSLEGVTCNRAEGAMYLFPRINLPQKAIEAAEAEKTAPDAFYCKRLLNATGVVVVPGSGFGQVPGTWHFRCTILPQEDKIPAIVNRLTEFHKSFMDEFRN

SEQ ID NO: 1417 - protein, 209 aa, Ustilago maydis 521
MIVLALIAKGSNILAETHDPAHDRFLPAAQTILSRIPPNSSKLSYAFEDWLFHYVSQDGMVYMAVADADTGRRMPFTFLAHIQKHFLSTYDVPEAGDSDMDYSSLTTTLSKLIKQFNSDPQAVDPIAQAKTELAGVKDIMTQNVEQILSRGERIELLMDRTDNAANQSMAFRRRAVGLRRQMWWKNAKVMALAGFSGLVFLFFLWGMFR

SEQ ID NO: 1418 - protein, 463 aa, Ceratophyllum demersum
GKPFYAVVHRVTGSLVIDFEPVRPYEVPTTAAGALQSYKLAAKAITKLQSLPSGSMQRLCDTIVKEVYELTGYDRVMVYKFHEDDHGEVVAEVTKPNMEPYLGLHYPATDIPQASRFLFMKNKVRMICDCHAKAIKVYQDGNLPMDLTLCGSTLRAPHSCHVQYMHNMGSVASLVMAVVVNEGEDDQGESTESGQQRKKKLWGLVVCHNTSPRFVPFPLRYACEFLMQVFAIHVGKQIELENQLQEKNILRIQTLLCDMLMRDSPLGIVSKSPSIMDLVKCDGAALLYKNKVWLLGLTPSELQIHDIASWLSTHHMDSTGLSADSLYDAGYPGALSLGNAVCGMASVRITSKDMIFWFRMHTASEVRWGGAKHYPDDKDDGQKMHPRSSFKAFLEVVKTRSLPWKDYEMDAIHSLQLILQGTFKEIENGGIKNTIDSQFDGLKIDQMEELQVVANEMVRLMET

SEQ ID NO: 1419 - protein, 356 aa, Ceratophyllum demersum
ILHRIDAGIVIDLEPVNPSDVPVTAAGALKSYKLAAKSISRLQSIPSGNISLLCDVLVREVSELTGYDRVMAYKFHEDEHGEVIAECKRSDLEPYLGLHYPATDIPQASRFLFMKNRVRMICDCMVKPVKVIQDKRLNQSLSLCGSTLRAPHGCHAQYMANMGSIASLVMSVTINDDEEEEAPGEVQNQKTRKLWGLVVCHHTSPRFVPFPLRYACEFLIQVFGIQLNKEVELAVQLREKHILRTQTMLCDMILRDTPIGIVTRSPNVMDLVKCDGAALYYQNQFWLLGITPTEVQIRDILLWLLEYHKGTTGLSTDSLMEAGYPGALVLGDAVCGMAAIEITPKDYLFWFRSHTA

SEQ ID NO: 1420 - protein, 541 aa, Bifidobacterium longum NCC2705
MAKIISYDEEARQGMLEGLDKLANTVKVTLGPKGRNVVLDKTYGAPTITNDGVSIAKEIDLEDPYERIGAELVKEVAKKTDDVAGDGTTTATVLAQSLVHEGLKNVVAGSNPIALRRGIEKATEVIVKELVAAAKDVETKDQIAATATISAADPEVGEKIAEALDKVGQDGVVTVEDNNRFGLDLDFTEGMRFDKGYIAPYFVTNADDQTAVLEDPYILLTSGKVSSQQDIVHVAELVMKTGKPLLIIAEDVDGEALPTLILNNIRGTFKSCAVKAPGFGDRRKAMLQDMAILTGAQVVSDELGLKLESVDTSVLGHAKKVIVSKDETTIVQGAGSKEDIDARVAQIRAEIENTDSDYDREKLQERLAKLAGGVAVIKVGAATEVEAKERKHRIEDAVRNAKAAIEEGLLPGGGVALVQAAAKAEKTEAVTSLTGEEATGAAIVFRAIEAPIKQIAENAGVSGDVVINTVRSLPDGEGFNAATDTYEDLLAAGVTDPVKVTRSALQNAASIAGLFLTTEAVVANKPEPKSAAPAAGADMGY

SEQ ID NO: 1421 - protein, 465 aa, Coptis trifolia
SGKPFYAIAHRVTGSLIIDFEPVKPYEVPMTAAGALQSYKLAAKAITRLQSLPGGSMERLCDAVVQEVYELTGYDRVMAYKFHEDDHGEVVSEVTKEGLEPYLGLHYPATDIPQAARFLFMKNKIRMICDCRAKHVRVLQDEKLSFDLTLCGSTLRAPHSCHLQYMENMDSIASLVMAVVVNDDDEDDEGTRPSQPQKRKRLWGHAVCHNTTPRFVPFPLRYACEFLIQVFAIHVSKEFELENQILEKNILRTQTLLCDMLMRNVPLGIVSQSPNIMDLVKCDGAALLYKNKIWRLGSSPNEIQIRDIASWLSDYHMDSTGLSSDSLYDAGFPGALSIADTVCGMAAVRINSKDMLFWFRSHTAAEVRWGGAKHDPGEKDDGRKMHPRSSFKAFLEVVKTRSAPWKDYEMDAIHSLQLILRSAFKDIETTDGNTKAFHSQLDNLKINGMEELEAVTNEMVRLIET

SEQ ID NO: 1422 - protein, 492 aa, Raphanus sativus
MDPYKYRPSSAYNAPFYTTNGGAPVSNNISSLTIGERGPVLLEDYHLIEKVANFTRERIPERVVHARGISAKGFFEVTHDISNLTCADFLRAPGVQTPVIVRFSTVVHERASPETMRDIRGFAVKFYTREGNFDLVGNNTPVFFIRDGIQFPDVVHALKPNPKTNIQEYWRILDYMSHLPESLLTWCWMFDDVGIPQDYRHMEGFGVHTYTLVSKSGKVLFVKFHWKPTCGIKNLTDEEAKVVGGANHSHATKDLHDAISSGNYPEWKLFIQTMDPADEDKFDFDPLDVTKIWPEDILPLQPVGRLVLNRTIDNFFNETEQLAFNPGLVVPGIYYSDDKLLQCRIFAYGDTQRHRLGPNYLQLPVNAPKCAHHNNHHEGFMNFMHRDEEINYYPSKFDPVRCAEKVPIPSKSYTGIRTKCVIKKENNFKQAGDRYRSWAPDRQDRFVKRWVEILSELRLTHEIRSIWISYWSQADRSLGQKLASRLNVRPSI

SEQ ID NO: 1423 - protein, 448 aa, Zymomonas mobilis subsp. mobilis ZM4
MALASTGMLIPALTSSMAAVDSQNKDTYHQLDQFMRVFEQVKSSYVDKVDDQKLIQGAIDGMLSNLDPHSSYMNAHQFANIKTQADGNYGGLGLTVMAQDGILKVISPMKDTPSWRAGLKAGDYITHIDGQFIYGSNIDDSVSKMRGKPGTSVKLTVVRPGRDKEFDVTLTREIIQVQSVKWAVTNHIGVITVSSFSHNVGADVTKAIADIEKQNKGAPLGYILDLRSNPGGLLDQAVALSDIFLDHGEVVSERGREKTDIRRYFSKPGDLANGLPLIVLVDGGSASASEIVSGALQDHHRALIMGTRSFGKGSVQTLLPLGDDTALRLTTARYYTPSGRSVQEGGIEPDIIVPQLSDPDYKTRPKLREADLLRHLVNQANTDNSLLEDDNGKTDPQFTATPESLKKENITDFQLDYALKTIGRISRQPSPITKEIPAGKSATPSGRE

SEQ ID NO: 1424 - protein, 391 aa, Coptis trifolia
DLEPVNPADVPVTAAGAMKSYKLAAKAISRLQSLPSGNIAVLCDVLVQEVSDLTGYDRVMVYKFHEDDHGEVIAECRVPELEPYLGLHYPATDIPQASRFLFMRNKVRMICDCSAAPVKVIQDNKLEQPLSLGGSALRAPHGCHAQYMANMGSVASLVMSVTINENDDQMETDQQKGRKLWGLLVCHHTSPRFVPYPLRYACEFLIQVFGMQINKEVELATQVRERHILQTQTVLCDMLLRDAPIGIVTQSPNIMDLVKCNGAALYYRSRFWLLGVTPTEAQIRDIAEWLLQYHNASTGLSTDSLMEAGFPGASVLGTAVCGMAAIKITLKDFLFWFRSHTAKEIKWGGAKHNPTEKDDGWKMHPRSSFKAFLEVVKHRSLPWEDVEMDAI

SEQ ID NO: 1425 - protein, 679 aa, Pseudomonas aeruginosa PAO1
MTAAVPYPHLLAPLDLGFTTLRNRTLMGSMHTGLEEKPQGFERMAAYFAERARGGVGLMVTGGIGPNEEGGVYSGAAKLSTPEEAEKHRIVTQAVHEAGGKICMQILHAGRYAYSPKQVAPSAIQAPINPFKPKELDEEGIEKQIADFVNCASLAQVAGYDGVEIMGSEGYFINQFLVQHTNQRTDRWGGSYENRMRLPVEIVRRVREAVGPNFIIIYRLSMLDLVEGGSSWDEIVLLAKAVEKAGATLINTGIGWHEARIPTIATKVPRAAFTKVTAKLRGEVGIPLITTNRINTPEVAEKVLAEGDADMVSMARPFLADPDFVNKAAAGHAERINTCIGCNQACLDHTFGGKLTSCLVNPRACHETELNYIPTTRPKKIAVVGAGPAGLAAATVAAERGHRVSLFDAAGEIGGQFNVAKRVPGKEEFHETLRYFRNKLESTGVELHLNRRVGVDDLVAGGYDEIVLATGIVPRTPAIPGIEHPKVISYLDAILERKPVGGKVAVIGAGGIGFDVSEFITHAGPSTSLEREAFWKEWGIDTRLEARGGIAGIKAEVHPAARQVFLLQRKKSKVGDGLGKTTGWIHRAGLKNKQVQMVNAVEYLRIDDAGLHIRVAEGEPQVLPVDTVIVCAGQDPLRELQDGLLAAGQSVHLIGGADVAAELDAKRAINQGSRLAAEL

SEQ ID NO: 1426 - protein, 391 aa, Elatine triandra
DLEPVNPADVPVTAAGALKSYKLAAKAISRLQSFPSGNIPLLCDVLVKEVSDLTGYDRVMVYKFHEDEHGEVIAECRKPDLEPYLGLHYPATDIPQASRFLFMKNKVRMICNCMVTPVKVIQDKRLPQPLSLSGSTLRSPHGCHAQYMANMGSIASLVLSVTINEEDDKIDGDQLLGRKLWGLVVCHHTNPRFVPFPLRYACEFLIQVFGVQINKEVELATQVKEKHILRTQSVLCDMLLRDAPVAIVTQSPNVMDLVNCDGAALYYKKKFWLLGVTPSEAQIRDIGDWILECHSSNTSLSTDSLMEAGFPGASVLGEAVCGMAAIKITSKDFLFWFRSHTAKEIKWGGAKHDPDDKDDGRKMHPRSSFRAFLEVVKWRSLPWEDVEMDAI

SEQ ID NO: 1427 - protein, 391 aa, Elatine triandra
DLEPVNPADVPVTAAGALKSYKLAAKAISRLQSLPSGNIPLLCDILVKEVRDLTGYDRVMVYKFHEDEHGEVIAECRKHDLEPYLGLHYPATDIPQASRFLFMKNKVRMICDCMATPVKVIQDKRLPQPLSLSGSTLRSPHGCHAQYMANMGSIASLVLSVTINEEDDKIDGDQLLGRKLWGLVVCHHTNPRFVPFPLRYACEFLIQVFGVQINKEVELATQVKEKHILRTQSVLCDMLLRDAPVAIITQSPNVMDLVNCDGAALYYKKKFWLLGVTPSEAQIRDISDWLLECHSGNTGLSTDSLMEAGFPGASVLGEAVCGMAAIKITSKDFLFWFRSHTAKEIKWGGAKHDPDDNDDGRKMHPRSSFRAFLEVVKWRSLPWEDVEMDAI

SEQ ID NO: 1428 - protein, 566 aa, Cladosporium fulvum
MAPSATAHSADGRTTGDIHRDYNDDRNASAEDTVYCTSNGVPIAHPYEAQRVGDNGPLLLQDFHLVDLLSHFDRERIPERVVHAKGGGAHGYYQTTDPLDDLCLADIFQAGKKCPISVRFSTVGGESGSHDCARDPRGFSVKFRTEEGNWDMVANNTPVFFLRDPAKFPHFIHTQKRDPQSHLTHADDSTMFWDYLSQNPESVHQVMILMGDRGIPDGWRKMHGYAGHTLKLVNKKGDWVYAQMHMKSKQGTDFITQEDSANYSPDYAQKDLYQAIEKGDYPGWDVEFQTMTPKEAEDLWETQKINVFDLTHVWPQKQFPRRKVGEFFLNENVKNYFAEIEQIAFNPAHMPPGIEPSADPVLQSRLFSYPDTHRHRIGVNYQQLPVNAPRVPYRIANFQRDGAMAYLNQGSRPAYLSSIQPNQFRKRTVNLDKTHGHFVGDAVTFLSEIRPEDFNAPRALWERVWDDGARERFINNVSGHMSNCTKEEIIKRQIAIFREVSNDLATRLEKATGVEGYDGIAGLSFNGEHNGMAKDASLRAANNMVDKQSMAANNGAPAAGTHVKVN

SEQ ID NO: 1429 - protein, 514 aa, Bifidobacterium longum NCC2705
MFAERLRNAMNSRGLKQVDLVHAAEHRGVKMGKSHISQYVAGKTMPREDVLEFLASELDVDMNWLRGEESTTQLNSDASNSVTDGEHAATPLATGASKPQTDSEIPVGRRRTFGKSHKLDNVLYDVRGPVADEAMRMEANGTHILKLNIGNPAPFGFRTPDEVVYDMAHQLTDTEGYSPSKGLFSARKAIMQYAQLKNIPNVTIDDIYTGNGVSELINLSMSALLDTGDEVLVPSPDYPLWTACVNLAGGTAVHYLCDEQSEWYPDIDDIRSKITSNTKAIVIINPNNPTGALYPKEVLQQIVDIAREHQLIIFSDEIYDRLVMDGLQHISIASMAPDLFCVTFSGLSKSHMIAGYRIGWMILSGNKRIAKDYIEGLNMLANMRMCSNVPAQSVVQTALGGHQSVNDYIVPGGRVHDQRDLVYDMLNQIPGITAVKPKAAFYIFPKIDVKRFNIHSDEQFALDLLHDKHILISHGGAFNWHRPDHFRVVYLPRMGMLRETMGEISDFFSYYWQS

SEQ ID NO: 1430 - protein, 513 aa, Hordeum vulgare subsp. vulgare
MDGNNRGGGHSEVLKNYNLGKTLGLGTFGDVKVAEHKLTGQRVAIKILNRRKMETMEMEEKANREIKIMRLFIDFIHPHIIRVYEVIETPKDIFVVMEYCNNGELLDYIIENGRLQEDEARRIFQQILAGVEYCHRIMVVHRDLKPENLLLDSKYNVKLADFGLSNVMRDGHFLKTSCGSLNYAAPEIISSKLYAGPEVDVWSCGVVLYALLCGSVPFDDDNIPSLFRKIKGGTYILPSYLSDSARDLIPKLLNIDPMKRITIHEIRVHPWFKNHLPCYLAVPPPYKEQQAKMIDEDILREVVNLGYDKDHVCESLWNRLQNEETVAYYLLLDNRFRSTSGYLGADHQHLMDRSFNEFTLSESASPSTRNYLPGINDSQGGGLRPYYPVQRKWAIGLQSGAHPRDIMIEVLKALKELNVCWKKNGLYNMKCRWCPGFPQVSDMLLDSNHNFVDDSTIMDNGNADGRLPAVVKFEIQLYKTKDNKYLLDIQRVTGPQLLFLEFCGAFLTNLRVL

SEQ ID NO: 1431 - protein, 240 aa, Oryza sativa
MVSPDLIRNVVGIVGNVISFGLFLSPVPIFWRIIKNKNVQNFKADPILVVTINGISLVIEAVYLTIFFLFSDKKNKKKMGVVLATEALFMAAVAVGVLLGAHTHQRRSLIVGILCVIFGTIMYSSPLTIMVVKTKSVEYMPLLLSVVSFLNGLCWTLYALIRFDIFITIPNGLGVLFAIMQLILYAIYYRTTPKKQDKNLELPTVAPIAKDTSIVAPVSNDDDVNGSTASHATINITIEP

SEQ ID NO: 1432 - protein, 391 aa, Endospermum moluccanum
DLEPVNPVDVPTTAAGALKSYKLAAKAISKLQSLPSGNISMLCDVLVTEVRDLTGYDRVMVYKFHEDEHGEVIAECHKPDLEPYLGLHYPATDIPQASRFLFMKNKVRMIYDCFASPVKVIQDKSLSQPLSLCGSTLRSPHGCHAQYMANMGSIASLVMSVTINVDGDEMDNDQQKGIKLWGLVVCHHTSTRFVPFPLRYACEFLIQVFGVQIHKEVGLAKQMREKHILQTQTLLCDMLLRDAPVAIITQSPNLMDLVKCDGAALYFENKFWLLGVTPTEEQIRDIAEWLLKYHSENTGLSIDSLVEAGYPGASVLGDAICGMAAIRIASKDFLFWFRSHTAKEIKWGGAKHDPEEKDDGRKMHPRSSFKAFLEVVKWRSSPWEDVEMDAI

SEQ ID NO: 1433 - protein, 391 aa, Galearia filiformis
DLEPVNPADVPVTAAGQLKSYKLAAKAISRLQSLPSGNISLMCDVLVKEVSDLTGYDRVMVYRFHEDEHGEVVAECCRPDLEPYLGLHYPATDIPQASRFLFMKNKVRMICDCQAPAVKVIQDKRLVQPLSLCGSTLRSPHGCHAQYMANMGSVASLVMSVTINGDDDEMHSDQQKRRKLWGLVVCHHTSPRFVPFPLRYACEFLIQVFGVQINKEVELAAQMREKHILQIQTMLCDMLLRDSPLAIITQSPNVMDLVKCDGAALYYKKKFQLLGVTPTEAQIKDIADWLLEYHSGSTGLSTDSLMEAGYQGASILGDAVCGMAAVRITSNDFLFWFRSHTAKEIKWGGAKHDPNDKDDGRKMHPRSSFKAFLEVVKWRSLPWEDVEMDAI

SEQ ID NO: 1434 - protein, 391 aa, Goupia glabra
DLEPVNPADVPVTAAGALKSYKLAAKAISRLQSLPSGNISLLCDVLVKEVSDLTGYDRVMAYRFHDDEHGEVVAERRRPDLEPYLGLHYPATDIPQASRFLFMKNKVRLICDCLAPPVKVIQDKRLAQPLSPCGSTLRSPHGCHAQYMANMGSIASLVMSVTINDDDDEMNSDQQKGRKLWGLVVCHHTSPRFVPFPLRYACEFLIQVFGVHISKEVELAAQMRKSIFCEFKLVLCDMLLRDAPVAIITQSPNVMDLVKCDGAALYYKKKFWLLGVTPTEAQIRDIAEWLLEYHNESTGLSTDSLMEAGYPGASILGDAICGMAAARITSKDFLFWFRSHTAKEIKWGGAEHDPGDQDDGRNMHPRSSFKAFLEVVKQRSLPWEDVEMDAI

SEQ ID NO: 1435 - protein, 534 aa, Sodalis glossinidius
MAAKDVKFGNDARVKMLRGVNVLADAVKVTLGPKGRNVVLDKSFGAPVITKDGVSVAREIELEDKFENMGAQMVKEVASKANDAAGDGTTTATVLAQSIVNEGLKAVAAGMNPMDLKRGIDKAVIAAVEELKKLSVPCSDSKAIAQVGTISANADETVGTLIAEAMAKVGKEGVITVEEGSGLQDELDVVEGMQFDRGYLSPYFVNKPETGAVELESPFILLADKKISNIREMLPVLEAVAKAGKPLLIIAEDVEGDALATLVVNTMRGIVKIAAVKAPGFGDRRKAMLQDIAILTAGTVISEEIGLELEKATLEDMGQAKRVVITKDTTTIIDGEGDKALIDSRVTQINQQRDEATSDYDREKLQERVAKLAGGVAVIKVGAATEVEMKEKKARVEDALHATRAAVEEGVVAGGGVALIRVANRIAELRGDNEDQNVGIKVARRAMEAPLRQIVANAGEEPSVIANKVKAGEGNTGYNAATEEYGNMIDMGILDPTKVTRSALQYAASIAGLMITTECMVTDLPKEDKPDLGG

SEQ ID NO: 1436 - protein, 388 aa, Prunus armeniaca
YFDGWKAYDRNPFHPTKNPEGVIQMGLAENQLSFDLIEERIKKNPKASICTPEGVEEFKNVAIFQDYHGFPEFRKAVAMFMSKARGGRVTFDPNRVVMSGGATGANELVMFCLADPGDAFLVPSPYYPAFFRDLGWRTGVQIVPVDCHSSNNFKITKEALEAAYEKAQKNNIKVKGLIITNPSNPLGTTLDRDTLESLVEFINQKNIHLVCDEIYAATVFSSPTFTCISEVIQNMNCNPNLIHIVYSLSKDMGLPGLRVGIVYSYNDDVVNIGRKMSSFGLVSSQTQHMLASMLLDEEFVARFLETSSKRLANRHGVFTKGLEEVGINCLKSNAGLFCWMDLRRLLKDQTFDGEMVLWRVIVNEVGLNVSPGSSFKCVEPGWFRVCFA

SEQ ID NO: 1437 - protein, 492 aa, Arabidopsis thaliana
MDPYRVRPSSAHDSPFFTTNSGAPVWNNNSSLTVGTRGPILLEDYHLLEKLANFDRERIPERVVHARGASAKGFFEVTHDITQLTSADFLRGPGVQTPVIVRLSTVIHERGSPETLRDPRGFAVKFYTREGNFDLVGNNFPVFFVRDGMKFPDMVHALKPNPKSHIQENWRILDFFSHHPESLHMFSFLFDDLGIPQDYRHMEGAGVNTYMLINKAGKAHYVKFHWKPTCGIKCLSDEEAIRVGGANHSHATKDLYDSIAAGNYPQWNLFVQVMDPAHEDKFDFDPLDVTKIWPEDILPLQPVGRLVLNKNIDNFFNENEQIAFCPALVVPFIHYSDDNVLQTRIFSYADSQRHRLGPNYLQLPVNAPKCAHHNNHHDGFMNFMHRDEEVNYFPSRLDPVRHAEKYPTTPIVCSGNREKCFIRKENNFKQPGERYRSWDSDRQERFVKRFVEALWEPRVTHEIRSIWISYWSQADKSLGQKLATRLNVRPNF

SEQ ID NO: 1438 - protein, 368 aa, Prunus armeniaca
QMGLAENQVSFDLLEKYLELEKHSKSSNLGSKGVSGFKKNALFQNYHGLLSFKKAMAIFMDQIKGGRAKFDPDRVFLTAGATAANELLTFIIADPGDALLVPTPYYPGFDKNLRWRTGVNIVPIHTDSSNNFQVTPQALEAAYKEAEAKNMKVRGVLITNPSNPLGATIQRQVLERILGFVTQKNIHLVSDEIYSGSAFSSSEFISVAEILESQQYKNSERVHIVYSLSKDLGLPGFRVGTVYSYNDKVVTTARRMSSFTLISSQTQHLLASMLSDKEFTENYIKTNRERLRKRYDMIIEGLKKAGIECLRGNAGLFCWMNLSPLLEKPTRGGELALWDSMLHEVKLNISPGSSCHCSEPGWFRVCFA

SEQ ID NO: 1439 - protein, 274 aa, Listeria monocytogenes EGD-e
MNLKDTVKLANGVEMPRLGFGVWKVQDGDEAVNSVKWAIEAGYISIDTAAAYKNEEGVGQAIKESGIKREDLFVTTKLWNAEQGYESTLAAFDESLRKLELDYVDLYLIHWPVKGKFKDTWRAFEKLYKDKRVRAIGVCNFHEHHLKELMEDAEIAPMVNQIELHPQLTQEPLRKFCAENNIVVEAWSPLGNGKLLSNPEIKAIADAHGKSVAQVILRWDLQIGVVTIPKSVHQERIIQNADIFDFELTEEEVAKISGLNKDERTGPDPDNFNF

SEQ ID NO: 1440 - protein, 383 aa, Corynebacterium efficiens YS-314
MLPASRWEIRWTIVDIMTSLFSPLQLRGLTVRNRVWMAPMCQYQVTTGDGVPNDWHLVHYGARAAGGFGLIIAEATGVSPEGRISPACTGLWNDEQVHAWKRITDFAHTQGAPMGVQLNHAGRKAGTYPWLPGNPSGTVPVAEGGWRILGPSAVAQKGLDVPEEMTLADIRKVVEDFAAASRRAVEAGFDSIEIHGAHGYLLHQFLTPLANKRTDDYGGSFDNRTRLIREVVTAVRATIPEEMPLVVRLSATDWIDDEPSWDADQTVRLVEILKGLGVDAVDISTGGAAPARIPVGPGYQVDFAARVKREVGIPTSAVGLITEPAQAQELLDDGLADIISLGRAVLRDPSWPLRAAHELGLPNEEIPYPASYWRGVWPEKVTV

SEQ ID NO: 1441 - protein, 194 aa, Arabidopsis thaliana
MTGTGQKLNIRRRVGEVNSLSFCCLSPTPTSLDNRCVNMIANLFHAPVGQDEAVISCGIVASSESAGLAFKMKWQHRRKAQGLPIDKPNIVTGVNVQVCWEKFARYFEVELKEVKLSEDYYVMDPAKAVEMVDENSICVAAILGSTFTGEFEYVKLLNDLLAEKNAKTAWETPIHVDAASGGFIASMGEEYQCQ

SEQ ID NO: 1442 - protein, 145 aa, Cytophaga hutchinsonii
MTIVKRNGHFPFIFDDFFNRQYNRGMADYSNTNTTIPAVNIKESAENFVIEVAAPGMNKKDFNVQVDGNVLTIRSEKTTEKEDANNEKYTTREFSYQSFVRTFNLPKDIADTDKIEAKYEDGVLHVLIPKKEKEKVKESRLVEVV

SEQ ID NO: 1443 - protein, 473 aa, Clostridium acetobutylicum ATCC 824
MKMKDGFLWGGATAANQFEGAWNEDGKGPSTADMMTGGTHTTPRRITPVLEEGTYYPSHEAIDFYHHYKEDIKLFAEMGFKTFRLSIAWSRIFPNGDDKEPNEAGLQFYDNVFDELLKYNIEPLVTISHYETPFGLTEKYNGWVGREVIDFYTRYCETIFNRYKDKVKYWLTFNEINCLTIPQFGAYMGGGIIPKEGDSEAQLRFQALHHQFVASAKAVKLGHEINPNFKIGCMIAYMCNYAKTCNPDDVLETQRKDQIHNMLCSDVQVRGYYPGFALNYFKENGIEIKMEKDDEKILREGCVDFYSFSYYMSNLVSTDKNDKEVSGNLLGGYKNPYLKSSDWGWQIDPKGLRWTLNHIYDRYQIPVMVVENGLGAVDVIEEDGSINDDYRIDYLRDHIVEMEEAVKNGVDLMGYTMWGCIDLVSASTGEMKKRYGFIYVDKDNDGNGTMARKPKKSFNWYKKVIASNGENLE

SEQ ID NO: 1444 - protein, 175 aa, Glycine max
  misc_feature (127)..(127): Xaa can be any naturally occurring amino acid
  misc_feature (164)..(164): Xaa can be any naturally occurring amino acid
  misc_feature (169)..(169): Xaa can be any naturally occurring amino acid
MSGGGCSSIVWFRRDLRVEDNPALAAGVRAGAVVAVFIWAPEEEGQYYPGRVSRWWLKHSLAHLDSSLRNLGSPLITKRSTDTLSSLLEVVKSTGATQLFFNHLYDPLSLVRDHRAKEVLTAQGITXVRSFNADLLYEPWDVNDAHGQPYTTCSADWERCLTMXPYDPXAPLLPP

SEQ ID NO: 1445 - protein, 243 aa, Lycopersicon esculentum
KRLMTDVPFGVLLSGGLDSSLVASVTARYLAGTKAAKQWGAQLHSFCVGLEGSPDLKAAKEVADFLGTVHHEFHFTVQDGIDAIEDVIYHIETYDVTTIRASTPMFLMSRKIKSLGVKMVISGEGADEIFGGYLYFHKAPNKEEFHRETCRKIKALHQYDCLRANKATSAWGLEARVPFLDKEFINVAMSIDPEWKMIKHDQGRIEKWVLRKAFDDEEQPYLPKHILYRQKEQFSDGVGYSWI

SEQ ID NO: 1446 - protein, 494 aa, Arabidopsis thaliana
MVLATNSDSDEHLHSTFASRYVRAVVPRFKMPDHCMPKDAAYQVINDELMLDGNPRLNLASFVTTWMEPECDKLIMDSVNKNYVDMDEYPVTTELQNRCVNMIANLFHAPVGEDEAAIGCGTVGSSEAIMLAGLAFKRKWQHRRKAQGLPIDKPNIVTGANVQVCWEKFARYFEVELKEVKLSEDYYVMDPAKAVEMVDENTICVAAILGSTLTGEFEDVKQLNDLLAEKNAETGWETPIHVDAASGGFIAPFLYPDLEWDFRLPWVKSINVSGHKYGLVYAGVGWVVWRTKDDLPEELVFHINYLGADQPTFTLNFSKGSSQIIAQYYQFIRLGFEGYKNIMENCMDNARRLREGIEMTGKFNIVSKDIGVPLVAFSLKDSSKHTVFEIAESLRKFGWIIPAYTMPADAQHIAVLRVVIREDFSRGLADRLITHIIQVLKEIEGLPSRIAHLAAAAAVSGDDEEVKVKTAKMSLEDITKYWKRLVEHKRNIVC

SEQ ID NO: 1447 - protein, 361 aa, Burkholderia vietnamiensis G4
MLGGGCLARPRILVGRARAAGGIEHEAAIRHAVLAQGIELRQPELQRVKPEHVGHDPVELRLLPAQHVAAGRRVGPGGPVYNLRIGHNDDCAPMNELEYVPVPAFEDNYIWLVSDGRDAIAVDPGEAAPVRRVLAERGWRLTAILLTHHHADHVGGVAALRDSQPDDAPLVVYGPAAEAIGVVTRPLAGGARVTLDAPALAFDVLDVPGHTRGHIAYFQAAGHGAAIPHVFCGDTLFSCGCGRLFEGTPAQMLASLDALAALPGDTRVHCAHEYTLSNIRFALACEPGNAALAAWRDDAQALRARGMPTLPTTIAHERAVNPFLRADSAAIHATLEAELHETVPDRLAAFTLMREWKNRFR

SEQ ID NO: 1448 - protein, 184 aa, Glycine max
MTNYGTIPTSSSPSTNLDFISRAKQRVKEGLGTRRPWKLMFNFRSFGLPAGVGDAVARVRENISYFQMNYAIVVLIVLFLSLLWHPISLIVFVVLMAAWLFLYFLRDEPLIIFGRLISDRVVLIVMAVLTVVLLLLTGAIGNILVALLIGAVLIVAHAALRKTDDLFLDEEEATGFSPPGAPLS

SEQ ID NO: 1449 - protein, 544 aa, Chlamydophila pneumoniae AR39
MAAKNIKYNEEARKKIHKGVKTLAEAVKVTLGPKGRHVVIDKSFGSPQVTKDGVTVAKEIELEDKHENMGAQMVKEVASKTADKAGDGTTTATVLAEAIYSEGLRNVTAGANPMDLKRGIDKAVKVVVDELKKISKPVQHHKEIAQVATISANNDSEIGNLIAEAMEKVGKNGSITVEEAKGFETVLDVVEGMNFNRGYLSSYFSTNPETQECVLEDALILIYDKKISGIKDFLPVLQQVAESGRPLLIIAEEIEGEALATLVVNRLRAGFRVCAVKAPGFGDRRKAMLEDIAILTGGQLVSEELGMKLENTTLAMLGKAKKVIVTKEDTTIVEGLGNKPDIQARCDNIKKQIEDSTSDYDKEKLQERLAKLSGGVAVIRVGAATEIEMKEKKDRVDDAQHATIAAVEEGILPGGGTALVRCIPTLEAFLPMLANEDEAIGTRIILKALTAPLKQIASNAGKEGAIICQQVLARSANEGYDALRDAYTDMIDAGILDPTKVTRSALESAASIAGLLLTTEALIADIPEEKSSSAPAMPSAGMDY

SEQ ID NO: 1450 - protein, 273 aa, Zymomonas mobilis subsp. mobilis ZM4
MVPVKNVVLNDGHSMPAIGQGVYQLNPAQAESMVALGYDLGYRAVDTAAWYENEEGVGEGLRSRHARSFITTKLMPQDMGRVNCFVALDKSIRNLGVTSLNLYLIHWPGQDRKRYEETWQTLIQIRAIGKASSIGVSNFTIDHLDHIIADSGVVPAVNQIELHPYFQQKELRAYHAERGIVTTSWSPLGRGAALNDPVIREIALKHGKTPAQVVLNWHLSLGLTVIPKASSKARLQENLEADSFALDEEDMQRIESLDKPDGRQGIDPAVFDF

SEQ ID NO: 1451 - protein, 745 aa, Cladosporium fulvum
MATEKISSGLGKLQDQLNGAAEGQKVAHVKNDPLYKDYHEPSNRITTDYGVKQHNTDDWLKIASEDKTGPMLLEDHAAREKINRFDHERIPERVVHARGSAAFGTFKLHKSLEQYTTAGVLTDTSRTTPTFLRFSTVLGSRGSADTVRDVRGFAIKHYTPEGNWDVVGNNIPVFFIQDAIKFPDVIHAGKPEPDNEVPQAQTAHNNFWDFQFMHTEATHMFMWTQSDRAIPRSYRMMQGFGVNTFTLTNAKGERFFVKFHWTPHLGVHSFVWDEALKLAGQDPDFHRKDLWEAIEAKAYPKWDFGVQVISEGEEDNFEFDILDATKVWPEELVPIQYVGELELNRNPDEFFPQTEQVAFCTGHVVPGIGFSDDPLLQGRNFSYQDTQISRLGVNFQELPINRPVCPVMNNNRDGALRHTVTKGKVNYWPNRFEATPPAAAEEKPYLDYPQKVAGMKTRLRSKKFSEHFNQAQLFYNSMSEPEKEHIKFALAFELDHCEDPVVYDRVSQRLADIDLSLAQSVADLVGGQIPQQQGRPNHGKKSKGLSQTEFPGKTPTIETRRIAIIIADGYDLVAYNGIVAAAKACQALPFTIAPRRSPIYAAGESKENSKGVKPDHHLEGMRSTMFDSVFVPGGADSVATLRKNGRALHWVREAFAHLKAIGAVGEAVDFVRNACQLPGMTFSASEEVTDSYGVVTAAKVKPESLSEAVKIGKDAADFVSKYFYEISQHKNFERELKGFPLMVAY

SEQ ID NO: 1452 - protein, 340 aa, Solanum tuberosum
MDHAADRHRTDLMTITRFVLNEQTKHPESRGDFSILLSHIVLGCKFVCTAVNKAGLAKLLGLAGETNVQGEDQKKLDVLSNEVFIKALVSSNRTCILVSEEDEEATFVRPANRGKYCVVFDPLDGSSNIDCGVSIGTIFGIYMIKDGHEPTLDDVLQPGMNMLAAGYCMYGSSCTLVLSTGSGVNGFTLDPSLGEFILTHPDIKIPKKGKIYSVNEGNAKNWDSPTSKYVQSCKYPADGSSPKSLRYIGSMVADVHRTLLYGGIFLYPGDKKSPNGKLRVLYEVFPMSFLMEQAGGQAFTGKQRALDLVPEKIHERSPIFLGSYDDVEEIKKLYAAEEQN

SEQ ID NO: 1453 - protein, 391 aa, Hirtella bicornis
DLEPVNPADVPVTAAGALKSYKLAAKAISRLQSLPSGNISLLCDVLVKEVSDLTGYDRVMVYRFHEDEHGEVIAECCMPDLEPYLGLHYPATDIPQASRFLFMKNKVRMICDCLAPPVKVIQDKRLAQPLSLCGSTLRAPHGCHSQYMANMGAIASLVMSVTINEDDEEMETGQQKARKLWGLVVCHHSSPRFIPFPLRYACEFLIQVFGIQINKEVELAAQTREKHILRTQTVLCDMLLRDAPVAIITQSPNIMNLVKCDGAALYYRKKFWLLGITPTDTQIKDIVEWLLQYHGESTGLSTDSLMEAGYPGASVLGDAVCGMAAVKITSKDFLFWFRSHTAKEIKWGGAKHDPDDKDDGRKMHPRSSFKAFLEVVKRRSLHWEDVEMDAI

SEQ ID NO: 1454 - protein, 404 aa, Gibberella zeae PH-1
MSNSAPEFLKFSGHRSFTQRLVLSTLTGRPIHIAKIRSSSPTNPGLAPHEISFLRLLEAVTNGSSMQISYTGTTITYHPGLITGTIAGFGASDGDVINHNISVNNTRGVTYFLMPLCLLAPFSKAHMNVRFTGPGVITSSTETGDISVDSFRTAILPLFGLYGIPPARIELRVLQRSCAGPGGKGGGGCVELRFASQVRLPKTLHLNRSPGRIKRIRGVAYCTGVSASNNARMIHSAREVLNPLVPDIHIAAQYDQAPLVPTGDKAGSKRRLGIGFGLSLVAESSAVGVLYSADVVVPAQGGVVPEDIGKQCAYQLLENISQGGCATQVSAKTMLILMAMGSEDVGRLRIGREVLGNEEMVILARDLRTFGASSWGLRDVGDDTNDIIVSVKGTGVGNVGRKIA

SEQ ID NO: 1455 - protein, 391 aa, Homalanthus populneus
DLEPVNPADVPITAAGALKSYKLVAKAISKLQSLPSGNISRLCDVLVKEVSDLTDYDRVMVYRFHNDEHGEVIAENCRPDLDPYHGLHYPATDIPQASRFLFMKNKVRMICDCLAPPVKVIQDQSLGQSINLCGSALRSPHGCHAQYMENMGSIASLVISVTINEDGSEMDDDQQKARKLWGLVVCHHTSPMFIPFPLRYACEFLIQVFGVQINKEVEMAAQMREKRILQTQTVLCDMLLRDAPVAIITQSPNVMDLVKCDGAALFYRKKFWLLGVTPTEAQVEDIVEWLLEFHSESTGLSTDSLMEAGYPGASTLGHAICGMAAVRISSKDFLFWFRSHTAKEIKWGGAKHDPEDKDDGRKMHPRSSFNAFLEVVKWRSLPWDDVEMDAI

SEQ ID NO: 1456 - protein, 205 aa, Yarrowia lipolytica CLIB122
MPPKKRTMLKVVILGDSGVGKSSLMQQYVNNKFSTQYKATIGADFLNKELTLEGRKVNMQIWDTAGQERFQSLGLAFYRGADCCVLVYDVNNSKSFDALTLWRDEFLLLANPRDPENFPFVVIGNKVDVEESKRAVSAKRAQAFCKATGNIPYFETSAKEDTGVDQAFETVARNAMAQVDSEDYTDDFADTINIHLDNEQSNCAC

SEQ ID NO: 1457 - protein, 499 aa, Zea mays
MVVSVAATGPGTDAEPVSSTFFASRYVRDPLPRYRMPERSIPREAAQQIISDELMLDGNPRLNLASFVTTWMEPECDKLIMDSINKNYVDMDEYPVTTELQNRCVNMIAHLFNAPIKEDETAIGVGTVGSSEAIMLAGLAFKRKWQNKRKEQGKPCDRPNIVTGANVQVCWEKFARYFEVELKEVKLSEGYYVMDPVKAVEMVDENTICVAAILGSTLTGEFEDVKQLNDLLTEKNKETGWDVPIHVDAASGGFIAPFLYPELEWDFRLPLVKSINVSGHKYGLVYPGVGWVIWRSKDDLPEELIFHINYLGTDQPTFTLNFSKGSCQIIAQYYQLIRLGFEGYRNIMENCQENAAILREGIAATGRFDVLSKDAGVPLVAFSLRDSSRFSVFDVSENLRRFGWIVPAYTMPADAEHVAVLRVVVREDFSRSLAERLVSDVRKILRELDARATHAVRVATATAEQSGDGVVAKKSVLEIEREVAARWMNAVNKKKTGVC

SEQ ID NO: 1458 - protein, 391 aa, Hugonia platysepala
DLEPVNLADVPMTATGALTSYKIAAKAISRLQTVPSGSINLLCDVLVKELRELTGYDRVMVYRFHEDDHGEVVAECRSSDLESYLGLHYPATDIPQASRFLFMKNKVRMICDCLASSVKVMQDKSLAEPVSLSGSILRSPHGCHAQYMANMGSIASLVMSVTINEDCNEMESDQQRGRKLWGLVVCHHTSPRFVPFPLRYACEFLIQVFSIQISKEVELEAQRREKHIMQTQTVLCDMLLRDAPLAIMTQSPNVMDLVKCDGAALCCRKNCWLLGLTPTEQQIADIAEWLLEYHGESTGLTTDSLMEAGYPGASVLGNAICGMAAIRITSKDFLFWFRSHTAKEIMWGGAKHDPGDKDGGRKMHPRSSFKAFLEVVKWRSLTWEDVEMDAI

SEQ ID NO: 1459 - protein, 548 aa, Raphanus sativus
MKLLHGLALVFLLAAASCKAYEEITCEENEPFTCNNTARLSSKNFPKDFIFGVASSAYQIEGGRGRGVNIWDGFSHRYPEKAGSDLKNGDTSCESYTRWQKDVDVMGEINATGYRFSFAWSRIIPKGKVSRGVNQGGLDYYHNLIDALLEKNITPFVTLFHWDLPQTLQDEYEGFLDRQIIQDFKDYADLCFREFGGKVKHWITINQLYTVPTRGYAIGTDAPGRCSPMVDTKHRCYGGNSSTEPYIVAHNQLLAHATVVDLYRTKYKFQRGKIGPVMITRWFLPFDESDPASIEAAERMNQFFHGWYMEPLTKGRYPDIMRQIVGSRLPNFTEEEAALVARSYDFLGLNYYVTQYAQPKPNTYPSPKHTAQDDAGVKLSYKNSRGEFIGPLFVEDKDNGNSYYYPKGIYYVMDYFKTKYGNPLIYVTENGFSTPDSENREQAIADYRRIDYLCSHLCFLRKVINEKGINVRGYFAWALGDNYEFCKGFTVRFGLSYVNWADLNDRNLKESGKWYQRFISGTVKNPAKQDFLRSSLSSQSQKKRLADA

SEQ ID NO: 1460 - protein, 406 aa, Candida albicans SC5314
MTVESTNSFVVPAGTKQIEIAPLGSTKLFQPIKVGKNILPHRVAHAPTTRFRAAKNHTPSDLQLEYYKTHSQYPGTLIITEATFTSEQGGMDLHVPGIYNDAQTKAWKKINDEIHANGSFSSMQLWYLGRVANPKDLKDAGLPLIGPSAVYWDKESEKLAKSIGNELRELTEKEIDHIVEVEYPNAAKRAIEAGFDYIEVHSAPGYFLDQFLNPASNKRTDKYGGSIENRARLLLRIIDKLIGIVGAEKLAVRLAPWSSFLGMEIEGEEIHSYILQQLQQRADNGQQLAYVSLIEPRVIGIFDASLEHQKGRSNEFAYKYWKGNFVRAGNYTYDAPEFKTLLHDLDNDRTIVAFARFFTSNPDLVEKLKLGKPLNHYDREEFYKYYNYGYNSYDESEKQVIGKPLV

SEQ ID NO: 1461 - protein, 154 aa, Lycopersicon peruvianum
MSLIPRIFGDRRSSSMFDPFSIDVFDPFRELGFPGTNSRETSAFANTRIDWKETPEAHVFKADLPGLKKEEVKVEIEEDRVLQISGERNVEKEDKNDTWHRVERSSGKFMRRFRLPENAKMDQVKASMENGVLTVTVPKEEVKKPDVKSIEISG

SEQ ID NO: 1462 - protein, 391 aa, Hymenanthera alpina
DLEPVNPADVPVTAAGALKSYKLAATAISRLQSLPSGNISLLCDTLVKEVSDLITYDRVMVYRFHDDEHGEVIAESCKPGLEPYLGLHYPATDIPQASRFLFMKNKIRMICDCLAPPVKVVQDKRLEQPLSLCGSTLRSPHGCHSQYMANMGSIASLVMSVTINEDDDEMDSDQQKGRKLWGLVVCHHSSPRFVPFPLRYACEFLIQVFSVQISKEVEVAAQMKEKHIFKTQTVLCDMLLRDAPEAIITHSPNVMDLVKCDGAALYYRKKVCLLGVTPTEAQIRDIAEWLLEYHSGSTGLSTDSLMEAGYPNASILGDLVCGMAAVRITSKDFLFWFRSQTDKEVKWGGAKHDATDKDDLRKMHPRSSFKAFLEVVKWRSLPWEDVEMDAI

SEQ ID NO: 1463 - protein, 546 aa, Raphanus sativus
MKLLGLALVLLLAAASCKAGEEITCEENEPFTCSNTAKLSSKSFGKDFIFGVASSAYQIEGGRGRGVNIWDGFSHRYPEKSGSDLKNGDTTCESYTRWQKDVDVMGEINATGYRFSFAWSRIIPKGKVSRGVNQGGLEYYHKLIDALLEKNITPFVTLFHWDLPQTLQDEYEGFLDRQIIQDFKDYADLCFKEFGGKVKHWITINQLYTVPTRGYAIGTDAPGRCSPMVDTKHRCYGGNSSTEPYIVAHNQLLAHAAAVDLYRTKYKFQKGKIGPVMITRWFLPYDDSDPASIEAAERMNQFFHGWYMEPLTKGRYPDIMRQIVGSRLPNFTEEEAALVAGSYDFLGLNYYVAQYTQPKPNPYPSETHTAMMDAGVKLTYENSRGELIGPLFVEDKDNGNSYYYPKGIYYVMEYFKTKYGNPLIYVTENGFSTPGSEKREQAIADYKRIDYLCSHLCFLRKVIKEKGVNVRGYFAWALGDNYEFCKGFTVRFGLSYVNWDDLDDRNLKESGQWYQRFINGTVKNPAKQDFLRSSLSSQSQKRLADA

SEQ ID NO: 1464 - protein, 392 aa, Hypericum empetrifolium
DLEPVNPADVPVTAAGALKSYKLAAKAISKLQSLPSANISLLCDVLVKEVSDLTGYDRVMVYKFHEDDHGEVVAECHRPDLEPFLGLHYPATDIPQASRFLFLKNKVRMICDCYAQPVKVVQYSGLSQSLSLCGSSLRAPHGCHAQYMVNMGSIASLVMAVTINDDDDDEAEADRRKGRKLWGLVVCHHRAPRFVPFPLRYACEFLIQVFGIQINKKVKLEAQMREKHILETQTVLCDMLLRESPVAIVTQSPTVMNLVKCDGAALCYQNTFWLLGVSPTEAQVRDITEWLLEYHAGSTGLSTDSLMEAGYPGASVLGDAVCGMAAIRINSKDFLFWFRSHAAKEIKWGGAKHDPDDKDEGRKMHPRSSFKAFLEVVKWRSLPWEDVEMDAI

SEQ ID NO: 1465 - protein, 367 aa, Bradyrhizobium japonicum USDA 110
MSRSTKLFETYKLGPITLANRLVMAPLTRNRAVPGTFVPGALAADYYGQRASAGLLITEASQVSQQGQGYQDTPGIYSKDQVAGWRKVTDKVHERGGKIFIQLWHVGRISHVALQANGAAPVAPSAIRAKGKTFVNGTFADVSEPRALELSEIRGIIDDFKRATKNALEAGFDGVEIHGANGYLLDQFAKDGANKRTDAYGGSIENRARLMLEVSRAVAAEAGTERTGIRISPVTPANDVSDSNPQALFDHIVDGLSALKLVYLHVVEGATGGPRDFAPFDYASLRKRFSGAYVANNGYDFDLATKVLDANAADLIAFGKPFISNPDLVERLKQGAALNDWDKNTFYGGSAKGYTDYPTLEAAEAAQ

SEQ ID NO: 1466 - protein, 248 aa, Helianthus annuus
MSFQNEDSGDISPQRRIGKGKIEIKRIENTTNRQVTFCKRRNGLLKKAYELSVLCDAEVALIVFSSRGRLYEYANNSVTGTIDRYKKSCLDPPSTGSVAEANAQFYQQEATKLRQQIANLQNQNRQFYRNIMGESLADMPGKELKNLESKLEKAINRIRAKKNELLFAEIEYMQKRELELHNSNQFLRARIAENERAQQQHMSLMPGSSGYNDLGPHQSFDGLNDLQTNELQLNNNYSCQDQTPLQLV

SEQ ID NO: 1467 - protein, 553 aa, Frankia sp. EAN1pec
MAADRPELGEPDRPGRPQHAGRGPLPGQHPRPRRHRARHAPRPRRIRPVRPPDHRRNHGRRVERLTTSPVPATDTTAATGVPAPEPSPGADELAARIATGLPTGFVWGAATSAYQIEGGAREGGRGPSIWDVFARTPGMTANGENGDVAADHLHRYREDVALMAGLGLGAYRFSVAWPRIVPAGSGAVNPDGLAFYDRLVDEILAAGIDPWLTLYHWDLPQPLQDAGGWPNRDTALRFADYTEHVVSALGDRVRHWSTLNEPWCSAFEGHLTGRHAPGVRDAGAAVRAVHHLLLAHGLGTAVLRAHGAADVGITLNLIPAEPPPDAGGAGDAVRLVDGQQIRLWLDPVLHGTYPSDVIADFARAGAELPAQDGDLAVIAQPVDWIGVNYYAPHIVAPGPDPSPKPTPFAGAGNVTRVPTSEDVTALGWPVRPRSFLALLRRLGADYPGVPFYIHENGAAYDDEVSPDGTVHDPLRVRYLAGHLDAVRQASEDGVDVRGYFVWSLLDNFEWAEGYRMRFGIVHVDFESLVRTPKSSGLWYSRLIREHRAASGTR

SEQ ID NO: 1468 - protein, 612 aa, Leifsonia xyli subsp. xyli str. CTCB07
MCGIVGWVSFDRDLTEHRESVDAMTATMACRGPDAEGVWLDRHGALGHRRLAIIDVEGGSQPMSAHTDDGAVTLTYSGEVYNFSELRGELMRRGHRFETRSDTEVVLHGYLEWDEAVAERLNGMYAFAIWDARAEKLVMIRDRMGVKPLYFFTTDDGVLFGSEPKAILAHPLADRAVDLDGLREVVSFAQTPGSAVWCGMREIVPGGVVTVCRAGLREYRYWTLTTRPHTDDLPTTIARVRSLLEDTVGRQLVSDVPRCTLLSGGLDSSAITAFSAAQLAGHGEKVRSFAVDFVGREDDFVADDLRSTPDAPYAREVASHVGSQHETIVLDNDAIADPAVRRAVIAARDNPLSLGDLDASLYLLFQAIRAHSTVALSGESADEVFGGYRWFHQPEVQAAPTFPWMALPVSGSPTRVRDRFTAKITAALDLPAYLRERYTSAIAEVQPLENESAHERRMREICYLHLTRLVRMLLDRKDRISMAVGLEVRVPFCDHRLVEYVYNVPWAMKTFDGREKSLLRAATADLLPESVLQRTKAPYPTTSDPGYARTLIQQSRDLLSADDRVFGLVDRGRLEEITRQDPATMTLDVRNGMETALDLSTWLEIYQPELRM

SEQ ID NO: 1469 - protein, 550 aa, Brassica juncea
MKLLYGLALVFLLAAASCKADEEITCEQNEPFTCGNTDILSSKNFGKDFIFGVASSAYQIEGGRGRGVNVWDGFSHRYPEKSGSDLKNGDTSCESYTRWKKDVEIMGELNATGYRFSLAWSRIIPKGKVSRGVNQGGLDYYHSLIDALLEKNITPFVTLYHWDLPQTLQDEYEGFLDRQIIQDFKDYADLCFKEFGGKVKHWITINQLFTVPTRGYALGTDAPGRCSPMVDSKHRCYGGNSSTEPYIVAHNELLAHAAVVDLYRKNYADQKGKIGPVMITRWFLPYDEADPSCREAADRMNQFFHGWYMEPLTKGKYPDIMRKIVGSRLPNFTEAEAKLVAGSYDFLGLNYYVTQYAQPKANPLLSEKHTAMMDAGVGLTYDNSRGEFIGPLFIEDKIAGNSYYYPKGIYYVMEYFKTQYNDPLIYVTENGFSTPSSENRCEAIADYKRIDYLCSHLCFLRKVIKDRGVNVRGYFAWALGDNYEFCKGFTVRFGLSYVNWDDLDDRNLKESGKWYQRFINGTSKNPTKQDFLRSSLSFLKARRRGLLADA

SEQ ID NO: 1470 - protein, 172 aa, Arabidopsis thaliana
SVRGTIERYKKACSDAVNPPTITEANTQYYQQEASKLRRQIRDIQNLNRHILGESLGSLNFKELKNLESRLEKGISSCSDPRKHEMLVAEIEYMQKREIELQNDNMYLRSKITERTGLQQQESSVIHQGTVYESGVTSSHQSGQYNRNYIAVNLLEPNQNSSNQDQPPLQLV

SEQ ID NO: 1471 - protein, 712 aa, Neurospora crassa
MAPRAEGSSTLKRARGSTDDNDSFKKPRRSERLSSQRTGDSPEPKQKTPLKTTKQLPSPVTHDSDEFPQDSKEPTATPPAGRPSQLSQISPRPENQHSQSQASQLNDTQAFSQLPDLDKALSDEVEDEVKEGVWGYLFPLDPRYGGRCVVLRRRAACPLPDTVSQAVGSKRGKRGQKALIKEEHDLDKTKVKGLPSGGYLIGRHPECDIQIEDPIVSNRHCIIFTENKGNDTIAVLEDLSSNGTFVNEAIVGRNRRRELQELDEIAVLGTARFIFRYPKSRHTSAFRQQYTMLQKLGKGHFAEVYLCVEKSTGTQYAVKVFSKTPGVEERSKDEGLQQEIAVLMGVSHPNVLCLKDTFNEPNAVHLVLELAPGGELFNYIVKKTKLSENECRKLFTQLFQGVKYLHDRNIVHRDIKPENILLVDDDLHVKLADFGLAKIIGEESFTTTLCGTPSYVAPEILTDTRHRKYTKAVDVWSLGVVLYICLCGFPPFSDELTSPDFPYSLSDQIRQGKFDYPSPYWDPVDDLALDLIDSMLVVDPEKRFTIDDCLSHPWMTQKTPGVNDSTNGLVNGIAGLDVTRRGVLRERTLLSSINTVEIADKIPLGENKPELKIYKKNPTETVGGPSEHELAGAQAGPSRQKEARPDDNRDPNEFMKMGGKGDEVLFADDPKSNYPTAKKDAKDIVESTTKTNGKGKLASGFGIVIMDARFHG

SEQ ID NO: 1472 - protein, 175 aa, Xylella fastidiosa Ann-1
MHPKNFQHQLKTIPQPPDETRDFVFNHTMLRVKEINASLDFYARILGFRLIDQRDFPEAQFSLYFLALLPQTVHISDNDTERRLWMSGIPGVLELTHNYGTETQEGQIYHNGNSEPRGFGHICISVPDLYSACARFDTLQVPYQKRLTDGRMKNIAFIKDPDGYWVEIISNTPLP

SEQ ID NO: 1473 - protein, 349 aa, Nostoc sp.
MAKTPESLESSINEITDRALDRDCTTLSRHVLQQLQSFSPDAQDLSALMNRIALAGKLVARRMSRAGLMEGVLGFTGEVNVQGESVKKMDVYANDVFISVFKQSGLVCRLASEEMENPYYIPENCPIGRYTLLYDPIDGSSNTDNNLSLGSIFAIRQQEGTDSDGKATDLLANGRKQLAAGYILYGPCTMLVYTIGKGVHSFVLDPSLGEFILTEENIRIPNHGSVYSVNEGNFWQWEESIREYIRYVHRTEGYSARYSGAMVSDIHRILVQGGVFLYPGTIQNPEGKLRLLYETAPLAFLIEQAGGRATTGLVNILDVVPKKLHQRTPLIIGSKEDVAKVESFIQNGH

SEQ ID NO: 1474 - protein, 168 aa, Arabidopsis thaliana
  misc_feature (106)..(106): Xaa can be any naturally occurring amino acid
  misc_feature (112)..(113): Xaa can be any naturally occurring amino acid
  misc_feature (117)..(117): Xaa can be any naturally occurring amino acid
  misc_feature (124)..(124): Xaa can be any naturally occurring amino acid
  misc_feature (132)..(132): Xaa can be any naturally occurring amino acid
  misc_feature (134)..(135): Xaa can be any naturally occurring amino acid
  misc_feature (146)..(146): Xaa can be any naturally occurring amino acid
  misc_feature (152)..(152): Xaa can be any naturally occurring amino acid
  misc_feature (155)..(155): Xaa can be any naturally occurring amino acid
  misc_feature (163)..(163): Xaa can be any naturally occurring amino acid
  misc_feature (165)..(165): Xaa can be any naturally occurring amino acid
  misc_feature (167)..(167): Xaa can be any naturally occurring amino acid
MASSMLSSTAVVTSPAQATMVAPFTGLKSSASFPVTRKANNDITSITSNGGRVSCMKVWPPIGKKKFETLSYLPDLSDVELAKEVDYLLRNKWIPCVEFELEHGFXVYREQXXNTPXYYDGRYXWAMWKLPXFXXPIPLKFLKEVXGSRRGXPGXLFGSIGFXKXRXA

SEQ ID NO: 1475 - protein, 533 aa, Corynebacterium efficiens YS-314
MTENSAADQIIDRGMRPKVAGNTTRHNGAPVASENISVTAGPQGPNILNDIHLIEKLAHFNRENVPERIPHAKGHGAFGELHITEDVSQYTKADLFQPGKVTPMGVRFSTVAGEQGSPDTWRDVHGFALRFYTQEGNYDIVGNNTPTFFVRDGMKFPDFIHSQKRLNKNGLRDADMQWDFWTRAPESAHQVTYLMGDRGTPKTTRHMNGYGSHTFQWVNKDGEAFWVKYHFISRQGVENFTDAEAAEMAGINADYHREDLYNAIERGDYPIWDVKVQIMPFAEAENYRWNPFDLTKVWSKKDYPRIDVGYFILNRNPRNFFAQIEQIALDPGNIVPGVGLSPDRMLQARAFAYADQQRYRIGPNYRDLPINRPINEVNTYSREGHMQYVFDAEGEPSYSPNRYTKGAGYLDDGETSSSNHTSYGQASDIYVNPDPHGTDLVRAAYVKHQDDDDFMQAGILYREVYNDEEKARLADNISNAMQGISEETEPRVYEYWTNVDENLGARVKELYLQKKAAGAAEHTSSTGDDIDKK

SEQ ID NO: 1476 - protein, 673 aa, Yersinia pestis CO92
MLAYPHLFTPLDLGFTTLKNRILMGSMHTGLEELPDGPQRLAAFYAERAAGGVGLIVTGGIAPNMKGGVYQGASVLNDAAQIPHHQVVTEAVHQAGGKIALQILHAGRYSYQKHPVAPSALQAPINPFVPQALSHEEILQTIADFAHCAQLAKQAGYDGVEIMGSEGYLINQFLTARTNQRDDEWGGDFTHRMRFAVEIVRAVRQATGHDFILIYRLSMLDLVEEGSNWVEIEQLAQAVEQAGATVINTGIGWHEARIPTIATMVPRAGFSWVTRKLMGKVNIPLITTNRINDPAVAEQVLADGCADMVSMARPFLADAAFVQKAAQGRADEINTCIGCNQACLDQIFDGKLTSCLVNPRACRETEMPELPTDAPKRLAVVGAGPAGLAFAVTAARRGHQVTLFDAAAEIGGQFNIAKQIPGKEEFYETLRYFRRQLVLNGVTLQLNTLVQVKQLAEFDEVILACGIQPRLPCINGIDHPKVLTYLDVLRDKKPVGQRVAIIGAGGIGFDTAEYLSQSGDSPRFDSTAFSTEWGIDQDLAHRGGLSPAGAKVPPSPRQIFLLQRKASKVGEGLGKTTGWIHRTSLAMRGVKMLNSVSYEAIDDKGLHIIRAEQACCLPVDTIIICAGQEPRRELHQPLLDMGKTVYLIGGADKAVELDARRAIDQGTRLALAI

SEQ ID NO: 1477 - protein, 259 aa, Pseudomonas syringae pv. tomato str. DC3000
MIQIHALPAFNDNYIWLLQDLSSQQCVVVDPGDAAPVLEWLAQNPHCRLTDILITHHHNDHVGGVVELKQATRARVLGPAAESIPARDVALADHDRLTVLGLEFVVHAVPGHTLGHIAFYHEDAAAPLLFSGDTLFAAGCGRLFEGTPGQMHASLERLAALPDSTLIYCAHEYTLSNLRFAQAVEPDNQDIAERLAQVTLMRSENRISLPSSLALEKRTNPFLRTRETSVKEKADERSGGQNTSQSAVFASLRAWKDKF

SEQ ID NO: 1478 - protein, 146 aa, Mesorhizobium sp. BNC1
MRYLHTMVRVRDIGESLDFYCNKLGMKEVRRIENEAGRFTLIFLAAPEDVEAAERHKAPLVELTYNWDPEDYQGGRNFGHLAYEVDDIYAFCQHLMDAGITINRPPRDGNMAFIRSPDGISIEILQKGEAKPKAEPWASMPNTGAW

SEQ ID NO: 1479 - protein, 679 aa, Lycopersicon esculentum
MSGGGCSIVWFRRDLRVEDNPALAAGVRAGAVIAVFIYAPEEEGHYYPGRVSRWWLKQSLAHLDSSLKSLGTSLITKRSTDSISSLLEVVKSTGATQLFFNHLYDPISLVRDHRTKEILTAQGISVRSFNADLLYEPWEVNDDEGRPFTTFSAFWEKCLSMPYDPEAPLLPPKRIISGDASRCPSDNLVFEDESEKGSNALLARAWSPGWSNADKALTTFVNGPLLEYSQNRRKADSATTSFLSPHLHFGEVSVRKVFHFVRIKQVLWANEGNKAGEESVNLFLKSIGLREYSRYMSFNHPYSHERPLLGHLRYFPWVVDEGYFKAWRQGRTGYPLVDAGMRELWATGWLHDRIRVVVSSFFVKVLQLPWRWGMKYFWDTLLDADLESDALGWQYISGTLPDGRELDRIDNPQFVGYKCDPHGEYVRRWLPELARLPTEWIHHPWNAPESVLEAAGIELGSNYPLPIVEIDSAKVRLEQALSQMWQNDAAARAAIENGMEEGHGDSADSPIAFPQAMHMEMDHEPVRNNPVIVTVRRYEDQMVPSMTSSLFRAEDEENSVDIRNSVVESRAEVPTDINVAEVHRRDTRDQAVMQTARTNATPHFNFAVGRRNSEDSTAESSSSTRERDGGVVPTWSPSSSNYSDQYVGDDNGIGTSSSYLQRHPQSHQLMNWQRLSQTG

SEQ ID NO: 1480 - protein, 391 aa, Lachnostylis bilocularis
DLEPVNPADVPVTTAGALKSYKLAAKAISRLQSLPSGNISLLCDVLVKEISDLTGYDRVMVYRFHDDEHGEVIAECRRPDLEPYLGLHYPAIDIPQASRFLFMKNKVRMICDCLAPPVKVIQDKRLSQQLSLGGSTLRSPHGCHAQYMANMGSIASLVMSVTINEDDDEMDSDRERGIRLWGLVVCHHTSPRFVPYPLRYACEFLIQVFGVQVSKEVQLAAQMREKHILQTQTVLCDMLLRDAPVAIITQSPNVMDLVKCDGAALYYRKKFWLLGVTPTEAQIKDIAEWLLECHGGSTGLSTDSLMEAGYPGAAVLDDAVCGMAAVRITSKDFLFWFRSHTAKEIKWGGAKHDPEDKDDGRKMHPVSSFKAFLDVVKQRSLPWEDIEMDAI

SEQ ID NO: 1481 - protein, 422 aa, Aspergillus nidulans FGSC A4
MALPDVENTPAAGIPYFTPAQNPPAGTAANPQTSGNAVPKLYTPLTVRGVTFHNRLGLAPLCQYSAEDGHMTDYHIAHLGGIAQRGPGLMMIEATSVSPEGRITPQDVGLWKDSQIAPMKRVIDFVHSQSQKIGVQIAHAGRKASNIAPWLMNKGIVATEKVGGWPDRVIGPSTVPFHETFPTPKAMTKDDIEQFKRDWFDACKRAIAAGADFIEIHNAHGYLLSSFLSPSSNTRTDEYGGSFENRIRLSLEIAQVTRDAVGPNVPVFLRVSATDWIEETLPEESWKLSDSVRFAEALAAQGAIDLIDVSSGGVHAAQKIKSGPAFQAPFAVAIKKAVGDKLLVATVGTITNGKQANKLLEEEGLDVALVGRGFQKDPGLAWTFAQHLDVEIAMASQIRWGFTRRGGTPYIDPKAYKESIFE

SEQ ID NO: 1482 - protein, 391 aa, Leonia glycycarpa
DLEPVNPIDVPVTAAGALKSYKLAAKAISRLQSLPSGNISLLCDVLVKEVSELTGYDRVMVYRFHEDEHGEVIAESCKPGLEPYLGLHYPATDIPQASRFLFMKNKIRMICDCLAPPVKVVQDKRLDQPLSLCGSALRSPHGCHSQYMTNMGSIASLVMSVTINEDDDEMDSDQQKGRKLWGLVVCHHTSLRFVPFPLRYACEFLIQVFGVQINKEVKLAAQMKEKHILQTQTVLCDMLLRDAPVAIITQSPNVMDLVKCDGAALYYGKKFWLLGVTPTEAQIRDIAEWLLEYHSGSTGLSTDSLMEAGYPNASILGDPVCGMAAVRITSKDFLFWFRSHTAKEVKWGGAKHDPDDKDDGRKMHPRSSFKAFLEVVKQRSLPWEDVEMDAI

SEQ ID NO: 1483 - protein, 545 aa, Triticum aestivum
  misc_feature (55)..(55): Xaa can be any naturally occurring amino acid
  misc_feature (294)..(294): Xaa can be any naturally occurring amino acid
VTLQNKFVQKSRLVPVRNSRDIVDPRVRPRVRDLIAHHPPPSTRDRPGRRRRPWXPYKHRPTSGANSGYWTTNSGAPVWNNNNALTVGQRGPILLEDYHLIEKLAQFDRERIPERVVHARGASAKGFFEVTHDVSQLTCADFLRAPGVQTPVIVRFSTVVHERGSPETLRDPRGFAVKFYTREGNFDLVGNNMPVFFIRDGMKFPDMVHAFKPSPKTNMQENWRIVDFFSHHPESLHMFTFLFDDVGIPLNYRHMDGFGVNTYTLISRDGKAHLVKFHWKPTCGVKCLLDDETXTVGGTCHTHATKDLTDAIAAGNYPEWKLFIQTIDADHEDKFDFDPLDVTKTWPEDIIPLQPVGRMVLNKNIDNFFAENEQLAFCPAVTVPGIHYSDDKLLQTRIFSYADTQRHRLGPNYLMLPVNAPKCAHHNNHHDGLMNFMHRDEEVNYFPSRFDPTRHAEQYPIPPRVLSGCREKCIIEKENNFKQAGERYRSFDPARQDRFLQRWVDALTDARVTHEIQGIWVSYWSQCDASLGQKLALRLKIKPSM

SEQ ID NO: 1484 - protein, 635 aa, Lycopersicon esculentum
MESNYKTIVWFRRDLRIEDNPALAAAARNGSVLPVFIWCPKEEGQFYPGRVSRWWLKQSLIHLKQSLKSLGAELVLMKAQSTLSALTECVDAVGATKVVYNHLYDPVSLVRDHNIKQKLGDLGISVQSYNGDLLNEPWEVYDDDGKVFTTFDAYWEKSLSIQNEPVSQLPPWRLTQAAGSVKMCSVEELGLENESEKSSNALLGKGWAPGWSNADKALTEFVESNLLAYSKDRLRVGGNSTSLLSPYLHFGEVSVRKVFNSVRLKQILWTKEGNSVGKDSATIYLRAIGLREYSRYICFNFPFTHERSLLNNLRFFPWNADQAHFKAWRQGRTGYPLVDAGMRELWATGWVHNKIRVIVSSFFVKFLLLPWQWGMKYFWDTLLDADLESDIIGWQYISGSLPDGHELERLDNPEVQGFNYDPEGEYVRHWLPELARMPAEWIHHPWDAPLNVLKAAGVELGMNYPNPIIDVDVARDRLMQAIIIMREKEAAVNTSHANGTVEVVFDNSENVGDSASIPKDDVVKGKEPCPSSSSYDQRVPSMQNVGTYRKRPKPEEETKKLNDNKLSYKNERIKMSNVDGDLCSTAESSSMKKQMTVSRNSFSVPRTITMSHDRKSFDDEASSHVKLQKEEEIDT

SEQ ID NO: 1485 - protein, 391 aa, Maytenus arbutifolia
DLEPVNPADVPITAAGALKSYKLAAKAISRLQSLPSGNMSLLCDVLVKEVSELTGYDRVMVYRFHDDDHGEVVGECCRPDLEPYLGLHYPATDIPQASRFLFMKNKVRMICDCLAPPVKVLQDKRLAQPLSLGGSTLRSPHGCHAQYMSNMGSIASLVMSVTINEDDDETTSDQQKGRKLWGLVVCHHSTPRFVPFPLRYACEFLIQVFGVQINKEVELATQLKEKHILRTQTVLCDMLLRDAPVGILTQSPNVMDLVKCDGAALYYRNKFWLLGVTPTETQITDIAEWLLEYHSESTGLSTDSLMEAGYPDASILGEAVCGMAAIKITSKDFLFWFRSHTAKEMKWGGAKHNPDDKDDGKRMHPRSSFKAFLVVVKRRSLPWEDIEMDAI

SEQ ID NO: 1486 - protein, 515 aa, Saccharomyces cerevisiae
MSKLGQEKNEVNYSDVREDRVVTNSTGNPINEPFVTQRIGEHGPLLLQDYNLIDSLAHFNRENIPQRNPHAHGSGAFGYFEVTDDITDICGSAMFSKIGKRTKCLTRFSTVGGDKGSADTVRDPRGFATKFYTEEGNLDWVYNNTPVFFIRDPSKFPHFIHTQKRNPQTNLRDADMFWDFLTTPENQVAIHQVMILFSDRGTPANYRSMHGYSGHTYKWSNKNGDWHYVQVHIKTDQGIKNLTIEEATKIAGSNPDYCQQDLFEAIQNGNYPSWTVYIQTMTERDAKKLPFSVFDLTKVWPQGQFPLRRVGKIVLNENPLNFFAQVEQAAFAPSTTVPYQEASADPVLQARLFSYADAHRYRLGPNFHQIPVNCPYASKFFNPAIRDGPMNVNGNFGSEPTYLANDKSYTYIQQDRPIQQHQEVWNGPAIPYHWATSPGDVDFVQARNLYRVLGKQPGQQKNLAYNIGIHVEGACPQIQQRVYDMFARVDKGLSEAIKKVAEAKHASELSSNSKF

SEQ ID NO: 1487 - protein, 392 aa, Maytenus senegalensis
DLEPVNPADVPITAAGALKSYKLAAKAISRLQSLPSGNMSLLCDVLVKEVSELTGYDRVMVYRFHDDDHGEVVAECCCRPDLEPYLGLHYPATDIPQASRFLFMKNKVRMICDCLAPPVKVLQDKRLAQPLSLGGSTLRSPHGCHAQYMTNMGSIASLVMSVTINEDEDETNSDQQKGRKLWGLVVCHHSTPRFVPFPLRYACEFLIQVFGVQINKEVELATQLKEKHILRTQTVLCDMLLRDAPVGILTQSPNVMDLVKCDGAALYYRNKFWLLGVTPTETQVKDIAEWLLEYHSESTGLSTDSLMEAGYLDASILGEAVCGMAAIKITSKDFLFWFRSHTAKEMKWGGAKHDPDDKDDGKRMHPRSSFKAFLVVVKRRSLPWEDVEMDAI

SEQ ID NO: 1488 - protein, 391 aa, Mesua sp. Coode 7884
DLEPVNPADVPVTAAGALKSYKLAAKAISKLQSLPSGNISLLCDVLVKEVCELTGYDRVMVYKFHEDDHGEVVAECRRPDLEPYLGLHYPATDIPQASRFLFMKDKVRMICDCLAPPAKVIQDNGLTQALSLCGSTLRAPHGCHAQYMENMGSIASLVMSVTINDDDDEMASDRQKGRKLWGLVVCHHTGPRFVPFPLRYACEFLIQVFGIQITKEAELAAQIREKHILETQTVLCDMLLRDSPMAIVIQSPNVMDLVKCDGAALYFKEKFWLLGITPTEAQIRDISEWLLDYHNGSTGLSTDSLMEAGYPGASILGDAVCGMAAIRVNSKDFLFWFRSHTAKEIKWGGAKHDPGDKDEGRKMHPRSSFKAFLEVVKWRSLPWEDMEMDAI

SEQ ID NO: 1489 - protein, 510 aa, Zea mays
  misc_feature (30)..(30): Xaa can be any naturally occurring amino acid
  misc_feature (227)..(227): Xaa can be any naturally occurring amino acid
MDGSSKGSGHSEALRNYNLGRTLGIGTFGXVKIAEHKLTGHRVAIKIINCRQMRNMEMEEKAKREFKILKLFIHPHIIRLYEVIYTPTDIYVVMEYCKYGELFDYIVEKGRLQEDEARRIFQQIISGVEYCHRNMVVHRDLKPENLLLDSKYNVKLADFGLSNVMHDGHFLKTSCGSPNYAAPEVISGKLYAGPEVDVWSCGVILYALLCGTLPFDDENIPNLFKKXIKGGIYTVPSHLSALARDLIPRMLVVEPMKRITIREIREHQWFQIRLPRYLAVPPPDTTQQAKMIDEDTLRDVVNMGFNKNHVCESLCSRLQNEATVAYYLLLDNRFRATSGYLGADYQESMDRNLNQLASSESSSSGTRNYVPGSSDPHSSGLRPYYPVERKWALGLQSRAHPREIMVEVLKALQELNVRWKKNGHYNVKCRWCPGFPEVNDTLDASNSFLGDSTIMDNDDANGRLPTVIKFEFQLYKTKDDKYLLDMQRVTGPQLLFLDFCAAFLTKLRVL

SEQ ID NO: 1490 - protein, 548 aa, Rhopalosiphum padi endosymbiont
MAAKDVKFGNEARIKMLRGVNVLADAVKVTLGPKGRNVVLDKSFGAPSITKDGVSVAREIELEDKFENMGAQMVKEVASKANDAAGDGTTTATLLAHSIVNEGLKAVAAGMNPMDLKRGIDKAVISAVEELKNLSVPRSDSKAITQVGTISANADEKVGALIAEAMEKVGNDGVITVEEGTVFKDELEVVKGMQFDRGYLSPYFINKPETGVVELENPYILMADKKISNVREMLPILESVAKSGKPLLIISEDLEGEALATLVVNSMRGIVKVAAVKAPGFGDRRKAMLQDISVLTGGSVISEELAMDLEKSTLEDLGQAKRVVINKDTTTIIGGVGEKSQAIQSRISQIRQEIQEATSDYDKEKLNERLAKLSGGVAVLKVGAATEVEMKEKKARVEDALHATRAAVEEGVVAGGGVALVRVAGKISNLRGHNEDQNVGIRVRLRAMEAPLRQIVSNSGEEPSVVTNNVKDGKGNYGYNAATDEYGDMIDFGILDPTKVTRTALQYAASVAGLMITTDMVTDLPEEDKTSDASSSPAGGMGGMGGMM

SEQ ID NO: 1491 - protein, 548 aa, Sitobion avenae endosymbiont
MAAKDVKFGNEARIKMLRGVNVLADAVKVTLGPKGRNVVLDKSFGAPSITKDGVSVAREIELEDKFENMGAQMVKEVASKANDAAGDGTTTATVIAQSIVNEGLKAVAAGMNPMDLKRGIDKAVISAVEELKFHLSVPCSDSKAITQVGTISANADEKVGSLIAEAMDKVGNDGVITVDEGTGLQDELEVVKGMQFDRGYLSPYFINKPETGIVELENPYILMADKKISNVREMLPILESVAKSKPLLIISEDLEGEALATLVVNSMRGIVKVAAVKAPGFGDRRKAMLQDISILTGGSVISEELAMELEKSTLEDLGQAKRVVISKDTTTIIGGVGEKHTVQSRISQIRQEIQEATSDYDKEKLNERLAKLSGGVAVLKVGAATEVEMKEKKARVEDRLHRTRAAVEEGVVAGGGVALVPVAGKISHLRGQNEDQNVGIRVALRAMEAPLRQIVSNSGEEPSVVTNNVKDGQGNYGYNAATDEYGDMIDFGILDPTKVTRSALQYAASVAGLMITTECMVTDLPKEDKSSDSNSAPAGGMGGMGGMM

SEQ ID NO: 1492 - protein, 392 aa, Bradyrhizobium sp. BTAi1
MADTCETSDQRAFRRPPFRNIRMSVLFTPIKLRGLELANRIVVSPMCQYSAENGAANDWHFTHINTLALSGAAMFCIEATHVEPIGRITPGCLGLWDDATEAALVPILTSVRKHSKTAIAMQLAHAGRKGSSHKPWDGGQQIAPASGGWQTVAPSAVPHKDGELAPEALDTDGLARIRDAFVSAAQRAARLGIDAIELHAAHGYLLHQFLSPLANRRSDAYGGSLENRMRYPLELFDAVRSVFPADKPVGVRVSATDWVDGGWDLDQTIVFAQELKRRDVDWIDVSSGGVSPLQKITLGPGYQVPFAAAVKQATGLPTMAVGLITQAQQAEEIVASGKADMVALARGMLYDPRWGWHAAAELGGQVAAPPQYWRSQPSTQKELFGRTTFGAR

SEQ ID NO: 1493 - protein, 686 aa, Bacillus subtilis
MSDDQNKRVNEHSKDEQLEQYRTDNSGKKMTTNQGLRVSEDEHSLKAGVRGPTLMEDFHFREKMTHFDHERIPERVVHARGFGVHGFFQVYEPMTEYTRAKFLQDPSVKTPVFVRFSTVAGSKGSADTVRDARGFATKFYTEEGNYDLVGNNIPVFFIQDAIKFPDLVHAFKPEPHNEMPQAATAHDTFWDFVANNPESAHMVMWTMSDRGIPRSYRMMEGFGVHTFRFVNEQGKARFVKFHWKPVLGVHSLVWDEAQKIAGKDPDFHRRDLWETIENGGKVEYELGVQMIDEEDEFKFDFDILDPTKLWPEELVPVKIIGKMTLNRNQDNVFAETEQVAFHPGNVVPGIDFTNDPLLQGRLFSYTDTQLIRLGGPNFHEIPINRPVCPFHNNQYDGYHRMTINKGPVAYHKNSLQNNDPSPATAEEGGYVHYQEKVEGKKIRQRSDSFNDYYSQAKLFWNSMSPVEKQHIISAFCFEVGKVKSKDVQRQVVDVFSNVDADLAEEIAKGVGVAAPAKRKASKENLTSPALSQARTVKTASTRKVAVLAGNGFHEKELQTVLEALKQEGITVDIISQNLGYMTSGSGQQLEASGTFLTVDSVLYDAVYAAGGLELKDNKQAMAFIREAYNHYKAIGAANEGIDLLQSSVGTTEGLGIVTAKDEPDYTAFSKAFIDAVAAHRHWDRRI

SEQ ID NO: 1494 - protein, 328 aa, Wigglesworthia glossinidia endosymbiont of Glossina brevipalpis
MISLREFIFSNNVNKYISKEDLYSLFIIIELTSKIIHNYIILNNITRIKQEKIKKNIHGEHQTKLDLLSNKKFIDMIKTHYNIAGIASEEEAKFISFKQEKYGKYIFLIDPLDGSLSADCNTPVGTIFSLYCRVTPIGVEISEKDFLQPGNKQILSGYILYGSSTILVFTVKSGVHIFTYHPFFSTFFLSKKNFNYPKKNNIYSINEANYNNFSLGIKKYIMSCKSNNNISSRYTGSLVADFHRNLIKGGIYLYPNTKIYKHGKLRLMYECNPIALISSQANGSSSDGNINILDINPKILHQCSPFFVGTKSMVKLVNKFILGYYNHN

SEQ ID NO: 1495 - protein, 338 aa, Oryza sativa (japonica cultivar-group)
MSTTKVKRRVGKYELGRTIGEGTFAKVKFARDTETGDPVAIKILDKEKVLKHKMVEQIKREISTMKLIKHPNVVRIYEVMGSKTKIYIVLEYVTGGELFDTIVNHGRMREDEARRYFQQLINAVDYCHSRGVYHRDLKPENLLLDSYGNLKVSDFGLSALSQQIKDDGLLHTTCGTPNYVAPEVLEDQGYDGAMADLWSCGVILFVLLAGYLPFEDSNLMTLYKKISNAEFTFPPWTSFPAKRLLTRILDPNPMTRVTIPEILEDEWFKKGYKRPEFDEKYDTTLDDVYAVFNDSEEHHVTEKKEEPEALNAFELISMSAGLNLGNLFDSEQVRDLPI

SEQ ID NO: 1496 - protein, 419 aa, Oryza sativa (japonica cultivar-group)
MSTTKVKRRVGKYELGRTIGEGTFAKVKFARDTETGDPVAIKILDKEKVLKHKMVEQIKREISTMKLIKHPNVVRIYEVMGSKTKIYIVLEYVTGGELFDTIVNHGRMREDEARRYFQQLINAVDYCHSRGVYHRDLKPENLLLDSYGNLKVSDFGLSALSQQIKDDGLLHTTCGTPNYVAPEVLEDQGYDGAMADLWSCGVILFVLLAGYLPFEDSNLMTLYKKISNAEFTFPPWTSFPAKRLLTRILDPNPMTRVTIPEILEDEWFKKGYKRPEFDEKYDTTLDDVYAVFNDSEEHHVTEKKEEPEALNAFELISMSAGLNLGNLFDSEQEFKRETRFTSKCPPKEIVRKIEEAAKPLGFDVQKKNYKLRLEKVKAGRKGNLNVATEILQVAPSLHMVEVRKAKGDTLEFHKVDHAN

SEQ ID NO: 1497 - protein, 742 aa, Vibrio vulnificus YJ016
MRIVFTTLAVWRGKKGLKKLVKSKVNQMFEKLSQAACSEPFAFLGPFIDPTQGALRVWMPGATGVALVLEGQPRIALEREKESAFILKADLNLHLTHYQLAIDWNGIEQLVDDPYQYHGIYAEYDDLHTPKTMYQHMGSQFMTLERDGKSISGIRFLVYAPHATAVSLVGSFNDWDGRRHPMQRLDYGIWGLFIPGLTEGVSYKFEMKGPKGEGLPHKADPWGFYAEQYPSFASVTYDHARYQWQDAQWQTRPVTEKRKEALSFYELHAGSWKRNEQGEFLNYRELAAELVPYLVDMGYTHVELMPVSEHPFYGSWGYQPVGLFAPTSRYGSPDDFKFFVDACHQAGIGVVLDWVPAHFPSDDHGLANFDGTPLFHDPDPRRGWHQDWNSFIYDLGREQVRRFLVSNALYWFEQFHIDGIRVDAVASMLYLDYSRSHGQWIPNMDGGNENYDAIATLKWMNEEVYKYFPNAMTIAEESTAFPGVSAPTFMGGLGFGFKWNMGWMHDSLSYIKEEPVHRKYHHNTLTFPLVYAHSENYVLSLSHDEVVYGKGSIHNKMPGDEWQQTANLRAYFGYMYGQPGKKLNFMGAEIGQTAEWNHDDQLQWFLLDFPRHQGVQALTRDLNHLYRNEAALHDQDCIPAGFEWRLQDAAEQSIIAHERISEAGERILVVSNFTPVPRDEFRLGVPNKGRYQLLLNTDDSKYAGSGYEVVVDVKSEAVVSEDLAQSIVLRLPPLSTLFYKLA

SEQ ID NO: 1498 - protein, 613 aa, Bacillus licheniformis ATCC 14580
MCGITGWVDFKKPLVREQSIMEKMTDTLSKRGPDDTNIWGKRHVLFGHKRLAVVDLEGGRQPMTRTHQGYDYTICYNGELYNTEDLRKELRRRGHQFKSHSDTEVLLHSYMEWKEECIDRLNGIFAFAVWDEKRDLLFAARDRLGVKPFFYTEQGSSFLFGSEIKAILAHPEVKAKVDRSGLAEIFGLGPSRSPGSGVFKGVKEIRPGHAMIFSKDGLTVWRYWNVKSEKHTDSFDETVENVRSLFQDAVTRQLVSDVPVCTFLSGGVDSSAITATAAKHFEREGKAPLHTFSIDYEDNEQYFTSSSFQPNADGPWIKKMSDAFGTVHHNCVISQEELAAYLEEAVLVRDLPGMADVDSSLLWFCREIKKDFVVSLSGECADEIFGGYPWFHSAEDVKGFPWMRSMEERIGLLQDGWQKKLNLSEYVKAKYEETVKETPLLEGETGAEKRRRELFYLNMLWFMTTLLDRKDRMSMGASLEVRVPFADHRLVEYVWNIPWDVKMHGSREKGIFRKALEGILPDEVLYRKKSPYPKTHHPAYTKAVIRWLESLLEQKDSALYAFLEKKKLERLIETEGASFQVPWYGQLMKGPQLIAHLAQIHTWFESYRIDIEE

SEQ ID NO: 1499 - protein, 502 aa, Corynebacterium glutamicum ATCC 13032
MRPKLSGNTTRHNGAPVPSENISATAGPQGPNVLNDIHLIEKLAHFNRENVPERIPHAKGHGAFGELHITEDVSEYTKADLFQPGKVTPLAVRFSTVAGEQGSPDTWRDVHGFALRFYTEEGNYDIVGNNTPTFFLRDGMKFPDFIHSQKRLNKNGLRDADMQWDFWTRAPESAHQVTYLMGDRGTPKTSRHQDGFGSHTFQWINAEGKPVWVKYHFKTRQGWDCFTDAEAAKVAGENADYQREDLYNAIENGDFPIWDVKVQIMPFEDAENYRWNPFDLTKTWSQKDYPLIPVGYFILNRNPRNFFAQIEQLALDPGNIVPGVGLSPDRMLQARIFAYADQQRYRIGANYRDLPVNRPINEVNTYSREGSMQYIFDAEGEPSYSPNRYDKGAGYLDNGTDSSSNHTSYGQADDIYVNPDPHGTDLVRAAYVKHQDDDDFIQPGILYREVLDEGEKERLADNISNAMQGISEATEPRVYDYWNNVDENLGARVKELYLQKKA

SEQ ID NO: 1500 - protein, 509 aa, Candida albicans SC5314
MDQQEAPIYYGRSVNKVYNQEFIIDSRFKIVKELGHGAYGIVCSAKYDNGSKKVPDSNNGNASSSANASFVAIKKITNIFSKNILCKRALRELKLLQFFRGHKNITCLYDLDIIPNPMTGEFNEIYLYEELMECDMHQIIRSGQPLSDQHYQSFIYQVLCGLNFIHSADVLHRDLKPGNLLVNADCELKICDFGLARGFSENPDENAGFMTEYVATRWYRAPEIMLSFTNYTKAIDIWSVGCILAELLGGKPLFRGKDYVDQLNQILMILGTPPESTLQRIGSHRAQNYVRSLPITRKASYEELFPDANPLALDLLERMLTLDPRERITVRDALNHKYLELWHDPKEEIECQVKFDFKSFETVDGLDEMKQLIMDEVQKFREFVRKPIEEQQRIQMQLHMQKREEQRQEEEEKELLEQQRQFPAQESMDISQTPYNNLETNIGTPQVEDDYPRPQELDEFTFSNLESSSSMNLFQDMAKPSGEEYIKLEEELGFGLDGAMFNNYCNDHQ

SEQ ID NO: 1501 - protein, 391 aa, Micrantheum hexandrum
DLEPVNPADVPVTAAGALKSYKLAAKAISRLQSLPSGNISLLCDVLVKEVSELTGYDRVMVYRFHEDEHGEVIAECCQPDLEPYLGLHYPATDIPQASRFLFMKNKVRMICDCMALPVKVLQDERLSQPLSLSGSTLRSPHGCHAQYMANMGSVASLVMSVTINDDDDGLDSDQQAGRKLWGLVVCHHTCPRFVPFPLRYACEFLIQVFGVQINKEVELAVQMREKHILQIQTVLCDMLLRDAPVAIITQSPNVMDLVKCDGAALYYRKKIWLLRVTPTEAQIRDIAEWLLESHSGSTGLSTDSLMEAGYPGASVLGDAVCGMAAVRITSKDFLFWFRSHAAKEIKWGGAKHDPDDKDDGRKMHPRSSFKAFLEVVKRRSLPWEDIEMDAI

SEQ ID NO: 1502 - protein, 391 aa, Microdesmis puberula
DLEPVNPADVPVTAAGALKSYKLAAKAISRLQSLPSRNISLLCDVLVKEVSDLTGYDRVMVYRFHEDEHGEVVAECCRTELEPYLGLHYPATDIPQASRFLFMKNKVRMICDCQAPPVKVLQDRRLAQPLSLCGSTLRSPHGCHAQYMANMGSVASLVMSVTINEDDDEMHSDQQKGRKLWGLVVCHHTSPRFVPFPLRYACEFLIQVFGVQINKEVELAAQMREKHILRIQTLLCDMLLRDSPVAIITQSPNVMDLVKCDGAALYYNNKFWLLGVTPTEAQIRDISEWLLEYHSGSTGLSTDSLMEAGYHRASILGDAVCGVAAVRITSNDFLFWFRSHTAKEMKWGGAKHDPVDKDDGKKMHPRSSFKAFLEVVKWRSLPWEDVEMDAI

SEQ ID NO: 1503 - protein, 507 aa, Frankia sp. EAN1pec
MTVQKPRPTTTDAGIPVASDEHSLSVGPDGPLLLQDHYLIEQMANFNRERIPERQPHAKGGGAFGTFQVTQDMSAFTRAAVFQPGTETDVIIRFSTVAGERGSPDTWRDPRGFAVKFYTSEGNLDIVGNNTPVFFIRDPLKFQHFIRSQKRRADNNLRDHDMQWDFWTLSPESAHQVTWLMGDRGIPRTWRHMNGYSSHTYMWINAAGERFWVKYHFKTDQGIEFFTQDEGDQMASVDTDYHQRDLFEHIAAGDFPSWTLKMQIMPFEEAKTYRFNPFDLTKVWPHGDYPLHEVGRLTLNRNITDFHTEMEQAAFEPNNIVAGTGLSPDKMLLARGFSYADAHRARLGVNYKQIPVNSAKVPVHSYSKDGAMRVQNVTDPVYAPNSYSGPVAQPELTDDGGHWYSDGEMVRAAYTSRPEDDDWGQAGTMVRDVLDDAARQRLVDNVVGHLLDGVSEPVLVRAFEYWRNVDKDLGTRIEADVRAKQDETDPKAAQQANPARSSAQAKA

SEQ ID NO: 1504 - protein, 391 aa, Neoscortechinia kingii
DLEPVNPADVPVTAAGALKSYKLAAKAISRLHSLPSGNISLLCDVLVKEVSDLTGYDRVMVYKFHEDEHGEVVAEFRRPDLEPYLGLHYPATDIPQASRFLFMKNKVRMICDCLAPPVKVIQDKSLAEPLSLWGSTLRSPHGCHAQYMANMGSIASLVMSVTINEDDDRMDSDQQKGRKLWGLVVCHHTCPRFVSFPLRYACEFLIQVFGIQINKEVQLAAQMREKHILQIQTMLCDMLLRDAPVAIITQSPNVMDLVKCDGAALYYKKKFWLLGVTPTEAQIRDIVEWLLDVHSESTGLSTDSLMEAGYLGASILGDAVCGMAAIRISSKDFLFWFRSHTAKEIMWGGAKHDPDDKDHVRKMHPGSSFKAFLEVVKWRSLPWEDMEMDAI

SEQ ID NO: 1505 - protein, 392 aa, Ochna multiflora
DLEPVNPADVPVTAAGALKSYKLAAKAISRLQSLPSGKISMLCDVLVKEVHDLTGYDRVMVYKFHEDEHGEVVAECHRPDLEPYIGLHYPATDIPQASRFLFMKNKVRMICDCMESPVKVIQDKKLAQPLSLSGSILRAPHGCHSQYMANMGSIASLVMSIMINDDDDNEMESNHQKPRKLWGLVVCHHTSPKVCPFPLRYACEFLIQVFGVQINKEVEVPAQVKEKHILRTQNVLCDMLLRDTPVAIVTQSPNVMDLVKCDGAALFYKNKFWLLGITPTADQIRDIASWLNEYHNGSTGLSTDSLMEAGYHGASILGGAVCGMAAIRISSKDFLFWFRSQTAKEIKWGGAKHDPNEKDDGRKMHPRSSFNAFLEVVKWCSLPWEDMEMDAI

SEQ ID NO: 1506 - protein, 902 aa, Clostridium thermocellum ATCC 27405
MDCRVKNEVRDDLNVNLEVMVAGNDEEFAASLKNALLDVGCKHSVKSAATFNEFKNYLRKNNFHIVFFDCSSDISFADVMESFENLKKEMPVVAVLEEDGSRHGFEMIKLGACEYLEKKDSSRLRSIIFKRCRELERERERIRFEKRLKEENERLLTTLESIGDGVIVTDKAGCVIMMNKAAQELTGYLSCNSIGKPLSEVFVIINGVNREPEPDPYERVLSERKTVGLRKNTMLVSKDGTLRYVSASTAPIKSSDREIMGVVVVFRDITRIRKAEEKLQKLSQAVEQSPGIIVMADTRGNIEYVNPRFTEVTGYSFDEVKGKSLFFMELEENGEEKCKDMIQAVFSGKEWRSEIRHKSKNNVVFWEYAYYSPIINSEGVVTNYLKVSEDITERKLMSENLFKAKEAAEAANRAKSEFLANMSHEIRTPLNGIIGMTNLTLQTELTDEQRENLNIVNSCAELLLRVINDILDYSKIEAGKMTLENVKFDFFNLLEKTYKAHIVQANEKGLRLSYTVQKGIPRILVGDPGRLQQVLNNLISNAVKFTDIGEVRIDVDIIEKRDDSVKLKFTVSDTGIGIDGDKMNMLFKSFSQVDSSITRKYGGTGLGLAISKQLVEMMGGEIWVESQKGKGSTFYFTAGFKRKAKSSVKAECTSNADERVLGRKLNILLAEDDKVNQQVIAGMLKKEQCSLTIAENGFEAIKLFEENEFDLILMDVQMPEMDGIEATKRIRKMEEGTFRHIPIIAVTAFAFENDREKILEAGMDDYISKPFSFDDIYAAINRVLYKDEQSSDDMQKEKEDEKGSLDPDEKVNETLSESGTVNETGPDYSLKDIMERLDLSILNGNFTAIDKSALAVKEFAQNRGFDKVKNLAFKIQLSARKNQLEDVKKLYEVLKQEISKFN

SEQ ID NO: 1507 - protein, 392 aa, Ochna sp. Davis 31-01
DLEPVNPADVPVTASGALKSYKLAAKAISRLQSLSSGNISMLCDVLVKEVHDLTGYDRVMVYKFHEDEHGEVVAEYHRPGLEPYIGLHYPATDIPQASRFLFMKNKVRMICNCMEPAVKVIQDKKLAQPLSLAGSTLRAPHGCHSQYMANMGSVASLVMSVMINDDDDNEMESNHQKPRKLWGLVVCHHTSPRFVPFPLRYACEFLIQVFGVQINKEVELTAQLKEKHILRTQSVLCDMLLRDTPVAIVTQSPNVMDLVKCDGAALFYKNKFWLLGITPTEDQIRHIASWLNEYHNGSTGLSTDSLMEAGYHGASILGGAVCGMAAIRISSKDFLFWFRSQTAKEIKWGGAKHDPSEKDDGGKMHPRSSFNAFLEVVKWCSLPWEDMEMDAI

SEQ ID NO: 1508 - protein, 617 aa, Escherichia coli
MLSEGTHLRPYETLGAHADTMDGVTGTRFSVWAPNARRVSVVGQFNYWDGRRHPMRLRKESGIWELFIPGAHNGQLYKYEMIDANGNLRLKSDPYAFEAQMRPETASLICGLPEKVVQTEERKKANQFDAPISIYEVHLGSWRRHTDNNFWLSYRELADQLVPYAKWMGFTHLELLPINEHPFDGSWGYQPTGLYAPTRRFGTRDDFRYFIDAAHAAGLNVILDWVPGHFPTDDFALAEFDGTNLYEHSDPREGYHQDWNTLIYNYGRREVSNFLVGNALYWIERFGIDALRVDAVASMIYRDYSRKEGEWIPNEFGGRENLEAIEFLRNTNRILGEQVSGAVTMAEESTDFPGVSRPQDMGGLGFWYKWNLGWMHDTLDYMKLDPVYRQYHHDKLTFGILYNYTENFVLPLSHDEVVHGKKSILDRMPGDAWQKFANLRAYYGWMWAFPGKKLLFMGNEFAQGREWNHDASLDWHLLEGGDNWHHGVQRLVRDLNLTYRHHKAMHELDFDPYGFEWLVVDDKERSVLIFVRRDKEGNEIIVASNFTPVPRHDYRFGINQPGKWREILNTDSMHYHGSNAGNGGTVHSDEIASHGRQHSLSLTLPPLATIWLVREAE

SEQ ID NO: 1509 - protein, 138 aa, Hortaea werneckii
YTDTDKDPYSVRKGLLYSHFGWMIMKQNPKRIGRTDISDLNDDAVVVWQHKHYLKVVLFMGLIFPCLVSGLGWGDWMGGFIYAGILRIFFVQQATFCVNSLAHWLGDQPFDDRNSPRDHVITALVTLGEGYHNFHHEF

SEQ ID NO: 1510 - protein, 537 aa, Glycine max
  misc_feature (205)..(205): Xaa can be any naturally occurring amino acid
  misc_feature (217)..(217): Xaa can be any naturally occurring amino acid
  misc_feature (220)..(220): Xaa can be any naturally occurring amino acid
MYRSSNIVARVFDRQICTPAPGTSVHHARRFYENLVPSHTVYEVECPDHSFRKFTDDGQYLISFSRNHQELIVYRPRWLSFSCKDEDCDKHDLPSRAKRFDSFFSQLYCVPLASCNELICKDFFLYMESNQFGLFATSTAQIHDAPAVGGAVHGVPSIEKITFHLLRLEDGEILDKKVFSNDFVNLTHNMGVFLYDDLLAIVSLXRYQTIHILQIRXSGXLVDVRAIGEFCREDDELFLNSNAQGMAFSDKNKQLQLPGNHIENHMHQGQPNLGNSFLSGIKQRLLSFIFQGLWNEERDDTLRIQRLRKKFYFHFQDYVDLIIWKVQFLDRHHLLIKFGSVDGGVSRNADHHPAFVAVYNMDTTEIVSFYQNSADELYLLFEQFCDHFHATSRNSMYMNFISSHSNNIHALEQLRSIKDKASSSAQFVKKMLASLPFSCQSQSPSPYFDQSLFRFDDKLISATDRHRQSTDHPIKFILRRYPYSLKFKIKPGPEAGSMDGRAKKISSFLFHPILPLALSVQQTLFLQPSVVNIHFRR

SEQ ID NO: 1511 - protein, 577 aa, Arabidopsis thaliana
MCGILAVLGCVDNSQAKRSRIIELSRRLRHRGPDWSGLHCYEDCYLAHERLAIVDPTSGDQPLYNEDKTIAVTVNGEIYNHKALRENLKSHQFRTGSDCEVIAHLVKHGEEFVDMLDGMFAFVLLDTRDKSFIAARDAIGITPLYIGWGLDGSVWFASEMKALSDDCEQFMCFPPGHIYSSKQGGLRRWYNPPWFSEVVPSTPYDPLVVRNTFEKAVIKRLMTDVPFGVLLSGGLDSSLVASVALRHLEKSEAACQWGSKLHTFCIGLKGSPDLKAGREVADYLGTRHHELHFTVQDGIDAIEEVIYHVETYDVTTIRASTPMFLMSRKIKSLGVKMVLSGEGSDEIFGGYLYFHKAPNKKEFHEETCRKIKALHQYDCLRANKSTSAWGVEARVPFLDKEFINVAMSIDPEWKMIRPDLGRIEKWVLRNAFDDEKNPYLPKHILYRQKEQFSDGVGYSWIDGLKDHANKHVSETMLMNASFVFPDNTPLTKEAYYYRTIFEKFFPKSAARATVPGGPSVACSTAKAVEWDAAWSQNLDPSGRAALGVHVSAYGEDKTEDSRPEKLQKLAEKTPAIV

SEQ ID NO: 1512 - protein, 682 aa, Yersinia pestis KIM
MVVCLMETAMLAYPHLFTPLDLGFTTLKNRILMGSMHTGLEELPDGPQRLAAFYAERAAGGVGLIVTGGIAPNMKGGVYQGASVLNDAAQIPHHQVVTEAVHQAGGKIALQILHAGRYSYQKHPVAPSALQAPINPFVPQALSHEEILQTIADFAHCAQLAKQAGYDGVEIMGSEGYLINQFLTARTNQRDDEWGGDFTHRMRFAVEIVRAVRQATGHDFILIYRLSMLDLVEEGSNWVEIEQLAQAVEQAGATVINTGIGWHEARIPTIATMVPRAGFSWVTRKLMGKVNIPLITTNRINDPAVAEQVLADGCADMVSMARPFLADAAFVQKAAQGRADEINTCIGCNQACLDQIFDGKLTSCLVNPRACRETEMPELPTDAPKRLAVVGAGPAGLAFAVTAARRGHQVTLFDAAAEIGGQFNIAKQIPGKEEFYETLRYFRRQLVLNGVTLQLNTLVQVKQLAEFDEVILACGIQPRLPCINGIDHPKVLTYLDVLRDKKPVGQRVAIIGAGGIGFDTAEYLSQSGDSPRFDSTAFSTEWGIDQDLAHRGGLSPAGAKVPPSPRQIFLLQRKASKVGEGLGKTTGWIHRTSLAMRGVKMLNSVSYEAIDDKGLHIIRAEQACCLPVDTIIICAGQEPRRELHQPLLDMGKTVYLIGGADKAVELDARRAIDQGTRLALAI

SEQ ID NO: 1513 - protein, 212 aa, Vibrio vulnificus YJ016
MRKVLLTGFEPFGGESINPSLELVKQMASRALPQVEIIGCEVPVVRYQAIETVLQAVETHQPDLVLMIGQASGRCAITPERVAINLDDYRIEDNAGHQPVDEPIIATGPAAYFSTLPVKAITHALQQAGIPCQISHSAGTFVCNHLFYGVQHHLHTRAIRSGFIHIPLLPEQASASNQPSMSLETLVHGLEMMMITCLETEQDTKHTGGTIC

SEQ ID NO: 1514 - protein, 692 aa, Yersinia pseudotuberculosis IP 32953
MNKFVRLAAIAGLLLAGASYATDTTYRIDQLPQLRQEPEHATVSERVTSRFTRSHYRQFALDDQFSAKIFDRYLNMLDYSHNVLLASDVAQFADKKYSLDKELKSGQLDTPFALFNLAQKRRFERYQYALSVLDRPMVFTGNDTIDIDRAKAPWPSSEAELNALWDAKVKYDQLNLKLAGKTDKEIKETLTKRYQSAIKRLTQSNSEDVFQLIMNAFAREIDPHTNYLSPRNTEQFNTEMSLSLEGIGAVLQMDDDYTLINSMVPGGPAAKSKTIAVGDRVIGVGQAGKPMVDVIGWRLDDVVALIKGPKGSKVRLEILPAGKGTKPRTVTLTRERIRLEDRAVKMSVKTIGKERVGVLDIPGFYVGLTEDVKVQLQKLEKQNVSSIIIDLRSNGGGALTEAVSLSGLFIPSGPVVQVRDNNGKVREDSDTDGVVYYKGPLVVLVDRYSASASEIFAAAMQDYGRALIVGEPTFGKGTVQQYRSLNRIYDQMLRPEWPALGSLQYTIQKFYRVDGGSTQRKGVTPDIVMPTGVDPAETGENFEDNALPWDRINAASYTKTGDLKPWEPELLKNHAERIAANPEFQYIQKDIERYKALKDKRNIVSLNYAQREKENRDDDMTRLTRLNERFIREGKKPLKSLDDLPKDYQEPDPYLDETVNIALDLAHQEKAQPQIASRPVAAATATAGATVK

SEQ ID NO: 1515 - protein, 493 aa, Cucumis melo
MGFHQTHETNQVLLSKIAISDGHGEDSPYFDGWKAYDNDPFHPENNPLGVIQMGLAENQLSPDLIVDWIRKHPKASIYTDEGLLNFKDIANFQDYHGLPEFRNAIASFMGKARGGRVKFDPSRIVMGGGATGASETVIFCLADPGDAFLIPSPYYAAFDRDLQWRTRAQIIPVHCNSSNNFQITREALEVAYKKAEESNIKVKGLIITNPSNPLGTIYDRDTLKSLVNFVNDNNIHLICDEIYSATVFKSPSFTSIAEIIEEMDHCKKELIHILSSLSKDMGLPGFRVGILYSYNDTVVSIARKMSSFGLVSSQTQHLLAAMLSDEEFVDNFLVENSKRLAKRHARFTEELEKMGITCLNSNAGLFVWMDLRKLLKDQSFESEMELWRVIINEVKLNVSPGSSFHVTEPGWFRVCFANMDDNTVGVALDRIHSFVGKIDKKENSTIPMPPKKKHRENKLRLSFSFSGRRYEEGNVLKSPHMMSPHSPLVRAKT

SEQ ID NO: 1516 - protein, 566 aa, Zea mays
MAPLLAAAMNHAAAHPGLRSHLVGPNNESFSRHHLPSSSPQSSKRRCNLSFTTRSARVGSQNGVQMLSPSEIPQRDWFPSDFTFGAATSAYQIEGAWNEDGKGESNWDHFCHNHPERILDGSNSDIGANSYHMYKTDVRLLKEMGMDAYRFSISWPRILPKGTKEGGINPDGIKYYRNLINLLLENGIEPYVTIFHWDVPQALEEKYGGFLDKSHKSIVEDYTYFAKVCFDNFGDKVKNWLTFNEPQTFTSFSYGTGVFAPGRCSPGLDCAYPTGNSLVEPYTAGHNILLAHAEAVDLYNKHYKRDDTRIGLAFDVMGRVPYGTSFLDKQAEERSWDINLGWFLEPVVRGDYPFSMRSLARERLPFFKDEQKEKLAGSYNMLGLNYYTSRFSKNIDISPNYSPVLNTDDAYASQEVNGPDGKPIGPPMGNPWIYMYPEGLKDLLMIMKNKYGNPPIYITENGIGDVDTKETPLPMEDALNDYKRLDYIQRHIATLKESIDLGSNVQGYFAWSLLDNFEWFAGFTERYGIVYVDRNNNCTRYMKESAKWLKQFNAAKKPSKKILTPA

SEQ ID NO: 1517 - protein, 337 aa, Burkholderia sp. 383
MSIARRTTLSKFLIEQQRETNNLPADLRLLIEVVARACKAISYNVSKGALGEALGTAGSENVQGEVQKKLDILSNEILLDANEWGGNLAAMASEEMETFFPIPANYPRGEYLLVFDPLDGSSNIDVNVSIGTIFSVLRCPDGKQATEESFLQPGTQQVAAGYAVYGPQTVFVLTTGNGVNCFTLDREVGSWVLTQSNMQIPADTREYAINASNARHWYDPVKRYVDELNAGKDGPRGDNFNMRWIASMVSDVHRILNRGGVFMYPADKRTPDRPGKLRLMYEANPMSFIVEQAGGAATTGTQRIMEVQPTGLHQRVPVFLGSKNEVDRVTGYHQEKQ

SEQ ID NO: 1518 - protein, 469 aa, Bacillus subtilis
MSSNEKRFPEGFLWGGAVAANQVEGAYNEGGKGLSTADVSPNGIMSPFDESMTSLNLYHNGIDFYHRYKEDIALFAEMGFKAFRTSIAWTRIFPNGDEEEPNEEGLRFYDDLFDELLKHHIEPVVTISHYEMPLGLVKNYGGWKNRKVIEFYERYAKTVFKRYQHKVKYWMTFNEINVVLHAPFTGGGLVFEEGENKLNAMYQAAHHQFVASALAVKAGHDIIPDSKIGCMIAATTTYPMTSKPEDVFAAMENERKTLFFSDVQARGAYPGYMKRYLAENNIEIEMAEGDEELLKEHTVDYIGFSYYMSMAASTDPEELAKSGGNLLGGVKNPYLKSSEWGWQIDPKGLRITLNTLYDRYQKPLFIVENGLGAVDKVEEDGTIQDDYRINYLRDHLIEARERIADGVELIGYTSWGPIDLVSASTAEMKKRYGFIYVDRDNEGNGTFNRIKKKSFNWYQQVIATNGESL

SEQ ID NO: 1519 - protein, 449 aa, Arabidopsis thaliana
MSGSRRKATPASRTRVGNYEMGRTLGEGSFAKVKYAKNTVTGDQAAIKILDREKVFRHKMVEQLKREISTMKLIKHPNVVEIIEVMASKTKIYIVLELVNGGELFDKIAQQGRLKEDEARRYFQQLINAVDYCHSRGVYHRDLKPENLILDANGVLKVSDFGLSAFSRQVREDGLLHTACGTPNYVAPEVLSDKGYDGAAADVWSCGVILFVLMAGYLPFDEPNLMTLYKRVRICKAEFSCPPWFSQGAKRVIKRILEPNPITRISIAELLEDEWFKKGYKPPSFDQDDEDITIDDVDAAFSNSKECLVTEKKEKPVSMNAFELISSSSEFSLENLFEKQAQLVKKETRFTSQRSASEIMSKMEETAKPLGFNVRKDNYKIKMKGDKSGRKGQLSVATEVFEVAPSLHVVELRKTGGDTLEFHKFYKNFSSGLKDVVWNTDAAAEEQKQ

SEQ ID NO: 1520 - protein, 405 aa, Shigella flexneri 2a str. 301
MSPIEKSSKLENVCYDIRGPVLKEAKRLEEEGNKVLKLNIGNPAPFGFDAPDEILVDVIRNLPTAQGYCDSKGLYSARKAIMQHYQARGMRDVTVEDIYIGNGVSELIVQAMQALLNSGDEMLVPAPDYPLWTAAVSLSSGKAVHYLCDESSDWFPDLDDIRAKITPRTRGIVIINPNNPTGAVYSKELLMEIVEIARQHNLIIFADEIYDKILYDDAEHHSIAPLAPDLLTITFNGLSKTYRVAGFRQGWMVLNGPKKHAKGYIEGLEMLASMRLCANVPAQHAIQTALGGYQSISEFITPGGRLYEQRNRAWELINDIPGVSCVKPRGALYMFPKIDAKRFNIHDDQKMVLDFLLQEKVLLVQGTAFNWPWPDHFRIVTLPRVDDIELSLSKFARFLSGYHQL

SEQ ID NO: 1521 - protein, 391 aa, Pera bicolor
DLEPVNPSDVPVTAAGALKSYKLAAKAISKLQSLPSGNISLLCDVLVKEVGDLTGYDRVMVYRFHEDEHGEVVAECRRPDLEPYLGLHYPATDIPQASRFLFMKNKVRMICDCLAPPVKVIQDSSLCQPVKSLWIYTEIPSWLHAQYMANMGSVASLVMSVTINEDDDEIDTDQRKGRKLWGLVGCHHTSPRFVPFPLKDACEFLIQVFGVQINKEVELAAQMREKHILRTQTMLCDMLLRDDPAAIVTQSPNVMDLVKCDGAALYYRKKFWFLGVTPTEAQTRDIAEWLLEYHSDSIGLISDSLMEAGYPGASVLGNAICGMAAVRITSKDLLFWFRFHTAKEIKWGGAKHDPGDKDDGRKMHPRSSFKAFLETVKWRSLPWEDVEMDAI

SEQ ID NO: 1522 - protein, 391 aa, Peridiscus lucidus
DLEPVNPADVPVTAAGALKSYKLAAKAISRLQSLPSGNISLLCDVLVKEVSDLTGYDRVMVYKFHEDEHGEVVAECCRPDLEPYLGLHYPATDIPQASRFLFMKNKVRMICDCLALPVKVIQDKRLAQPLSLCGSTLRSPHGCHAQYMANMGSIASLVISVTINEEDEEMESSQQRGRKLWGLVVCHHASPRFVPFPLRYACEFLIQVFGVQINKEVELAAQLKEKHILQTQTVLCDMLLRDAPVGILTQSPNVMDLVKCDGAALYYREKFWLLGVTPTEVQIKTIAEWLLEYHSGSTGLSTDSLTEAGYPGASILGDAVCGMAAVKITSKDFLFWFRSHTAKEIKWGGAKHDPSDKDDGRKMHPRSSFKAFLEVVKRRSLPWEDMEMDAI

SEQ ID NO: 1523 - protein, 419 aa, Bifidobacterium longum NCC2705
MHFSSRVDISAPNPIAAAAAAAKANGIALSKLNDSNPTRHGLAPELVPSVYTADPRGPRAAREALAAFLNTAKAVDASSPQSTSPAASEGGNERHAAFNNANTAIEGVDPDALYLLSSTSEAYSWLIKLLCDAGDAVLAPKPGYPLIESIARLECVDTVEYQLQFDGSWFIDIAELERLLSEPGGERIRALVLINPNNPTGSYVKPTERARIVTLCREHGIALIADEVFFDYSLEPFPGNARLAGERGVLTFALDGFSKMLAAPHAKVGWIQVSGPAEDVAEAQRRLDVIADDYLPMSDIIAERIPALLNAAPAQTRRVGERVRNNLAKLHELLDADPNGLVSVLRAEGGWNVLLRVPSVIDENELVLRLIDEHKLTGQPGYFFDMTSNGYLAVSLLPEPDEFERGIRAVLNTVAALLR

SEQ ID NO: 1524 - protein, 391 aa, Petalostigma pubescens
DLEPVNPADVPVTAAGALKSYKLAAKAISRLQSLPSGNISLLCDVLVKEVSELTGYDRVMVYRFHEDEHGEVVAECCRPDLEPYLGLHYPATDIPQASRFLFMKNKVRMICDCMAPPVEVVQDERLSQPLSLCGSTLRSPHGCHAQYMANMGLIASLVMSVTINEDNDEMDGDQQTGRKLWGLVVCHHTSPRFVPFPLRYACEFLIQVFGVQINKEVELAVQMREKHILRTQTVLCDMLLRDAPVAIITQSPNVMDLVKCDGAALYYRKKFWLLGVTPTEAQVRDIAEWLLECHSGSTGLSTDSLMEAGYPGASILGDAVCGMAAVRITSKDFLFWFRSHTAKEIKWGGAKHDPGDKDDGRKIHPRSSFNAFLEVVKRRSLPWEDVEMDAI

SEQ ID NO: 1525 - protein, 391 aa, Phyllanthus epiphyllanthus
DLEPVNPDDVPVTAAGALKSYKLAAKAISKLQSLPSGNISLLCDVLVKEVSELTGYDRVMVYKFHQDEHGEVVAESCRPDLEPYLGLHYPATDIPQASRFLFMKNKVRMICDCQAPPVKVVQDKQIAQLLSLCGSTLRSPHGCHAQYMANMGTIASLVMSVTINEDDEETDNDQQIGRKLWGLVVCHHTNPKFVPFPLRYACEFLIQVLGVQVHREVELAAQTTEKHILQTQTVLCDMLLRDAPVAIVTQSPNVMDLVKCNGAALFYRKKFWMLGVTPTEAQIKDITEWLLEYHGESTGLSTDSLMEAGYPGAAILRYAVCGMAAIKITSKDFLFWFRSHSAKEIKWGGAKHDPGDKDDGRKMHPRSSFKAFLEVVKWRSIAWEDVEMDAI

SEQ ID NO: 1526 - protein, 243 aa, Hordeum vulgare
MAAATAPFALVSRLSQAARLPIRAWRAARPAPLWTGRTRPLSVASAAQEDRDNSVDVQVSQARNAGNQQGNAVQRRPRRAGFDISPFGLVDPMSPMRTMKQMSDTMDRLFDDAVGFPTARRSPAAAAGEMPRMPWDIMEDDKEVKMRFDMPGLSREEVKVMVEDDALVIRGEHKKEAGEGQGEAAGGGDGWWKERSVSSYDMRLALPDECDKSQVRAELKNGVLLVSVPKRETERKVIDVQVQ

SEQ ID NO: 1527 - protein, 244 aa, Hordeum vulgare
MAAATAPFALVSRLSPAARLPIRAWRAARPAPLWTGRTRPLSVASAAQENTDSSVDVQVSQDRNAGNQQGNAVQRRPRRAAGFDISPFGLVDPMSPMRTMKQMLDTMDRLFDDAVGFPTAGRSPAAAAGEMPRMPWDIMEDDKEVKMRFDMPGLSREEVKVMVEDDALVIRGEHKKEAGEGQGEAAGGGDGWWKERSVSSYDMRLALPDECDKSQVRAELKNGVLLVSVPKRETERKVIDVQVQ

SEQ ID NO: 1528 - protein, 391 aa, Pimelodendron zoanthogyne
DLEPVNPADVPVTAAGALKSYKLAAKAISKSQSLPSGNISLLCDVLVKEVSDLTGYDRVMVYKFHEDEHGEVIAEYHRPDLEPYLGLHYPATDIPQASRFLFMKNKVRMICDCLAPPVKVIQDRSLAQSLSLCGSTLRSPHGCHAMYMTNMGSIASLVMSVAINEDGSEMDDDQQKGRKLWGLVVCHHTSPRFIPFPLGYACEFLIQVFGVQINKEVEMAAQMREKHILQTQTVLCDMLLRDSPMAIITRSPNVMDLVKCDGAALYYRKKFWLLGVTPTETQIKDIAEWLLECHRESTGLSTDSLIEAGYPGASIIGKAICGMAAVRINSKDFLFWFRSHTAKEIKWGGAKHDPDDKDDGRRMHPRSSFEAFLDVVKWRSLPWEDVEMDAI

SEQ ID NO: 1529 - protein, 642 aa, Caulobacter crescentus CB15
MGKRLDTKAGARIEAAAADWFFQNSLDMFVVLRDSRIIRANPAWSQLTGWAAEDTLGREIRDFFHLHDTEVLTAAGHTLKTVGHAHSENRLARKGGGWLWVRTQSTILEGGGQLIVFQDISEDRAREAARLQAERSNELLRNAAGVYVWRFNPRRGVYAFDQDIPTPSAPEGGARTMTVAEMTQSIHPEDSARVWQAFSRTLQTGEHVEIDYRYLDPGADDWIHLHVAWRGVRGSSPDTYDVIGITQNVTELVAARDAALAAAETKSQFLANMSHEIRTPMNGVLGVLHLLKTEKLSDDGRRLLTEALSCGEMLSALLNDIIDFSKIEAGKLELSAEPVCPAELLRGVADMLRAQAETKGLYLRVEASDDLGWVATDPLRLRQALFNLIGNAVKFTLEGGVVARLSGRRIDSPDGARLRLRFEIDDTGVGIGEEAGARLFERFRQGDGSTTRRFGGSGLGLAICRRLAELMGGEVGFESQLGKGSTFWLEVETQACARPDTQETLADGPLFDGLHVLLVEDNATNRLIATRMLEALGARVTTAEDGAQGVAAARQGFDLILMDIQMPVMDGVEATHRIRAFNSPAGAAPILAMTANAMAHQQASYLAAGMDGAIAKPLSPLALTQAIAAALTLDPSRQRKAS

SEQ ID NO: 1530 - protein, 281 aa, Campylobacter upsaliensis RM3195
MQELVKLIQEAVIDISNALKFPDTSYSEEKNSSGDTQLKFDILSDEIITHHLSKSKALKALISEEKEEILKLNENAQFIVAYDPLDGSSLMDVNFAIGSIFAIYKEKVSPKNLKAALYSVYGARLELVCCEGKEVKLYRLNEGGKFDFVKELKMAEKGKINATGGTQKFWDNKHANFIKELFEEGYRLRYSGAMVSDIHQILLKGGGLFSYPATKDAPNGKLRAFFEIFPLAFIIEKAGGATTNGQNASLLELEFNQIHATSPCFFGSEYEINKLLKAYNG

SEQ ID NO: 1531 - protein, 144 aa, Brassica napus
VDPRVRFPGQSIDFFGALRARVYDDEVRKFVEGLGVEKIGKRLVNSREGPPVFEQPAMTLEKLMEYGNMLVMEQENVKRVQLADQYLNEAALGDANADAIGRGTFYGKAAQQVNLPVPEGCTDPQADNFDPTARSDDGTCVYNF

SEQ ID NO: 1532 - protein, 474 aa, Streptococcus pyogenes MGAS10394
MSKERTKDMKQRKHRYQFPDGFLWGSSTSGPQSEGTVPGDGKGPSNWDYWFSIESAKFHHQIGPEKTSTFYENYKGDIALLKETGHTIFRTSIQWSRLIPEGVGEVNPKAVTFYREVFQDIIAQGIKLIVNLYHFDLPYALQEKGGWENKATVWAYETYAKTCFELFGDLVNTWITFNEPIVPVECGYLGYYHYPCKVDAKAAVQVAYNTQLASSLAVKACHKLHPDHKISIVLNMTPAYPRSDAPEDVKAARIAELFQTKSFLDPSVLGVYPAELVSILEEADLLPQYSADELEVIKNNTVDFLGVNYYQPLRVQAPSKSQQEGDPLILDIYFEPYDMPGKKVNPHRGWEIYEPGLYDIALNLKEHYGNIEWLVTENGMGVEGEEAFLADGQIQDDYRITFIEDHLIQLHKALGEGANCKGYLLWTFIDCWSWLNAYKNRYGLVALDLESQKRTIKKSGYWFKALSESNGFDK

SEQ ID NO: 1533 - protein, 535 aa, Zea mays
MATCSRPLFVSNSAASASPSRASFRRLHTVAVVSIWEPLPHPPLRAAACRFARTKQCSRRSTECLASGPSVSRLTRPIRRMLSRYSSLMVTLHGNLSRCYKAMSALRPDGVSRHFMSAGGFERVVLGVVLVMSISGASYTAPSSSALTEENLLFLEAWRAVDRAYYDKSFNGQSWFRYRENALRNEPMNTREETYAAIKKMLSTLDDPFTRFLEPEKLKSLRSGTQGALTGVGLSIGYPMAINGSPSGVAVMTATPGGPAEKAGILPGDTILAIDNRSTEDMDIYDAAERLQGPEGSSVDLSIRSGTNTRHVVLKRQTVNLNPVRSRMCEIPGSKDSSKIGYIKLTTFNQNAAESVKEAIKTLRDNNVKSFVLDLRNNSGGLFPEGIQIAKIWMDKGVIVYICDSQGVRDIYEADGADTIAASEPLVVLVNKGTASASEILAGALKDNKRAVVYGEPTYGKGKIQSVFGLSDGSGLAVTVARYETPAHTDIDKVGVIPDRPLPASFPTDEDAFCSCLRDSTAACNLNAAQLFAKS

SEQ ID NO: 1534 - protein, 192 aa, Zea mays
MSKYGTIPTTSSTPAPEGSSQLDFISRAKARGASALATRRPWRELADPRALSVPRGFSDAYRRARANLAHFAANYALVVLLVVFVSLLWRPVSMLVFLACFAAWLVLYFLRDRDVDGTLVICGRGVGDGVVVAVLSAVTLALLLLTGATGFILTSLLVGLLLVLLHALLHRPADSIDDEAGRWYTPVPPSNY

SEQ ID NO: 1535 - protein, 841 aa, Oryza sativa
MASFAVSGARLGVVRAGGGGGGGGGPAARSGGVDLPSVLFRRKDSFSRGVVSCAGAPGKVLVPGGGSDDLLSSAEPDVETQEQPEESQIPDDNKVKPFEEEEEIPAVAEASIKVVAEDKLESSEVIQDIEENVTEGVIKDADEPTVEDKPRVIPPPGDGQKIYQIDPMLEGFRNHLDYRYSEYKRMRAAIDQHEGGLDAFSRGYEKLGFTRSAEGITYREWAPGAQSAALVGDFNNWNPNADTMTRNEYGVWEISLPNNADGSPAIPHGSRVKIRMDTPSGVKDSIPAWIKFAVQAPGEIPYNGIYYDPPEEEKYVFQHPQPKRPNSLRIYESHIGMSSPEPKINTYANFRDEVLPRIKKLGYNAVQIMAIQEHSYYASFGYHVTNFFAPSSRFGTPEDLKSLIDKAHELGLLVLMDIVHSHASNNTLDGLNGFDGTDTHYFHGGPRGHHWMWDSRLFNYGSWEVLRYLLSNARWWLEEYKFDGFRFDGVTSMMYTHHGLQVAFTGNYGEYFGFATDVDAVVYLMLVNDLIHGLYPEAVAIGEDVSGMPTFCIPVQDGGVGFDYRLHMAVPDKWIELLKQSDEYWKMGDIVHTLTNRRWSEKCVTYAESHDQALVGDKTIAFWLMDKDMYDFMALDRPSTPRIDRGIALHKMIRLVTMGLGGEGYLNFMGNEFGHPEWIDFPRGPQSLPNGSVLPGNNYSFDKCRRRFDLGDADYLRYHGMQEFDQAMQHLEEKYGFMTSEHQYISRKHEEDKVIIFERGDLVFVFNFHWSNSYFDYRVGCLKPGKYKIVLDSDDGLFGGFSRLDHDAEYFTADWPHDNRPCSFSVYTPSRTAVVYALTED

SEQ ID NO: 1536 - protein, 579 aa, Arabidopsis thaliana
MCGILAVLGCIDNSQAKRSRIIELSRRLRHRGPDWSGLHCYEDCYLAHERLAIIDPTSGDQPLYNEDKTVAVTVNGEIYNHKILREKLKSHQFRTGSDCEVIAHLYEEHGEEFIDMLDGMFAFVLLDTRDKSFIAARDAIGITPLYIGWGLDGSVWFASEMKALSDDCEQFMSFPPGHIYSSKQGGLRRWYNPPWYNEQVPSTPYDPLVLRNAFEKAVIKRLMTDVPFGVLLSGGLDSSLVAAVALRHLEKSEAARQWGSQLHTFCIGLQGSPDLKAGREVADYLGTRHHEFQFTVQDGIDAIEEVIYHIETYDVTTIRASTPMFLMSRKIKSLGVKMVLSGEGSDEILGGYLYFHKAPNKKEFHEETCRKIKALHQFDCLRANKSTSAWGVEARVPFLDKEFLNVAMSIDPEWKLIKPDLGRIEKWVLRNAFDDEERPYLPKHILYRQKEQFSDGVGYSWIDGLKDHANKHVSDTMLSNASFVFPDNTPLTKEAYYYRTIFEKFFPKQSAARATVPGGPSIACSTAKAVEWDATWSKNLDPSGRAALGVHVAAYEEDKAAAAAKAGSDLVDPLPKNGT

SEQ ID NO: 1537 - protein, 744 aa, Mesorhizobium sp. BNC1
MGLANIKQIWKWLWDEIAQPGRGFSSRGGTILVAFGFADLLIAGAAFLTKAAPLIPFLLVFAGAAAVAAAIALPSEKKPEEHPHEQTPAEQHIEELADRVSQMQEAEQRFYGLLETLGDLVINRDGEGRILYANRIFGELMECEPQDLFGKTLHQLGVDITPPSAGIFPEEERLSSTDVAIHTRNGLRWFSWTEISRREGESSSVSHWAIARDITARKRAETALVNARERAEQASIAKSRFLATVSHEIRTPMNGIIGMATLLSDTRLSSEQRTYVAAISTSASALLALIEDLLDYSKIEAGRLELEPQRMAARELIESVIELMAVRAFTKKIGLGCHIAPTVPDTILADPGRLRQILLNLLGNAIKFTDEGGVLMTVTTTIHDGAPKLAFRVDDTGPGIEKDSLSRIFQEFEQADTSSTRKHGGAGLGLAITRRLIDAMEGTVTVDSAPGEGATFTVYIPLVGAEGSAAETSLALKGFDVAILTPHAVEGEALAMTVRAHGGKARVFEGEKSALSLLRRRKSGFDAVIIDASLENDNGDLLRRLCRNGLRVHQALTLIAPTDRGRLNKFRTNGYNAFIARPARDRTLLRLLLNPQTAENVAPIGEATARTKATNDGRGLKVLLAEDNEINAMLARATLSKAGHSVAVVSNGRAAVDVLTHPARDFDIVLMDLHMPIMDGLDAIIQIRRYEEDTGLAPIPILVLSADGQEKTRQNALAQGATGFITKPLEPGRLLSALEVHTPA

SEQ ID NO: 1538 - protein, 182 aa, Saccharomyces cerevisiae
MSSRKKNILKVIILGDSGVGKTSLMHRYVNDKYSQQYKATIGADFLTKEVTVDGDKVATMQVWDTAGQERFQSLGVAFYRGADCCVLVYDVTNASSFENIKSWRDEFLVHANVNSPETFPFVILGNKIDAEESKKIVSEKSAQELAKSLGDIPLFLTSAKNAINVDTAFEEIARSALQQNQA

SEQ ID NO: 1539 - protein, 275 aa, Kineococcus radiotolerans SRS30216
MTQATPQVTLHDGVGIPQLGFGVWQVPPEQTAEVVLRALQAGYRHIDTAAGYGNEAGVGDALRASQIPREDVFITTKLANSEHGRDKTLAAFDASMAKLGLDYLDLYLIHWPLQADDYVETWKAFEEIKASGRVRTIGVSNFQKTHLRKLLDETGTVPTVNQVEVHPYLVQEDLRSFHAEHGIATEAWSPLAQRAGLVEDPVVTGIAEQLGRTPAQVVIRWHLQQGNVVIPKSVTPERIVSNIDVFGFELPPEQVDALTGLDRAERTGPDPDVLG

SEQ ID NO: 1540 - protein, 232 aa, Triticum aestivum
MVISHASSSAGEAVYSTFSSRYVREELPRYRMPEGSIPKEAAYQIISDELMLDGNPRLNLASFVTTWMEPECGKLIMDSVNKNYVDMDEYPVTTELQNRCVNMIAHLFNAPIGEDETAIGVSTVGSSEAIMLAGLAFKRKWANKMKEQGKPCDKPNIVTGANVQVCWEKFARYFEVELKEVKLTEGYYVMDPKKAIEMVDENTICVAAILGSTLTGEYEDVKLLNDLLVEKN

SEQ ID NO: 1541 - protein, 125 aa, Zea mays
  misc_feature (106)..(106): Xaa can be any naturally occurring amino acid
MATSSRAHEAPANNPDLPTEDDPYTTGYFLPPTMLREKDPQESLDYYSRERGMSLLHRLDYEEMTFWVVSYEVTSVRCYCSDDHIKLTVRTIREKATHAIAHYRRXHSDPALKGYYNGNSDPRES

SEQ ID NO: 1542 - protein, 634 aa, Ustilago maydis 521
MCGILGCIHHPDAPAYRGKMLNMSRCIRHRGPDWSGCVVTQEEGSKGSILCHERLAIVGISTGAQPLVSTDGKLILAVNGEIYNHRQLRKNLKDQNAEFKTESDCEVILHLYREHGSDFVKMLDGMFSFILLDTTTTPHRVIAARDPIGITTLYQGASYKYPGAIYFSSELKAIHEECDRIRSFPPGHFYDSSLPEGKETVRYYTPSWLDGDAEGATIPTNPTDLKQIREALEKAVRKRLMSEVPYGVLLSGGLDSSLIASIAARETDKMADLQRKQWEERQARRSRGLTTPAGDANGAKLPVGLDEDADNEVENLAAWPRLHSFSIGLPGSPDLIAARKAAQFLGTVHHEYTFTVQEGLDAIADVIFHLETYDVTTVRASTPMYLLSRKIKAMGVKMVLSGEGSDEIFGGYLYFHAAPDKTSFHQECVRRVKNLHTADCLRANKSTMAWGLEARVPFLDKAFLDVAMNTDAADKMFSKGSLQQVDADGRPRMEKYILRKAFDVIPDDIEAGGDGSGSMLSASAPRKPYLPEDILWRQKEQFSDGVGYSWIDGIKDHAEKTVSDEKFQERAKRYPNDTPDTKEAYMIREIFESWFPSEAAASTAVRWIPRADWGCAADPSGRAVNIHESAYSTE

SEQ ID NO: 1543 - protein, 570 aa, Malus x domestica
RTLALEECALWMPTRTGLELQLSYTLRQQNPVGYTVPIHLPVVNQVFSSNCAVKISPNSPVARLRQLAGKHIPGEVVAVRVPLLHLSNFQINDWPELSTKRYALMVLMLPSDSARQWHVHELELVEVVADQVAVALSHAAILEESMRARDLLMEQNIALDLARREAETAIRARNDFLAVMNHEMRTPMHAIIALSSLLQETELTAEQRLMVETILRSSNLLATLINDVLDLSRLEDGSLQLEIATFNLHSVFREVHNMIKPVASIKRLSVTLNIAADLPMYAIGDEKRLMQTILNVVGNAVKFSKEGSISITAFVAKSESLRDFRAPDFFPVQSDNHFYLRVQVKDSGSGINPQDIPKLFTKFAQTQALATRNSGGSGLGLAICKRFVNLMEGHIWIESEGLGKGCTATFIVKLEFPERSNESKLPFAPKLQANHVQTNFPGLKVLVMDDNGVSRSVTKGLLAHLGCDVTAVSLIDELLHVISQEHKVVFMDVSMPGIDGYELAVRIHEKFTKRHERPVLVALTGSIDKTTKENCMRVGVDGVILKPVSVDKMRSVLSELLEHRVLFEAM

SEQ ID NO: 1544 - protein, 319 aa, Oryza sativa
MAAAEVYSPTAAAAAQQQQRGKVAAQAWQAVVGWIGFLLQVLLQILRGTPSCAQLLSFVGFRYPLLSGPADSEQSPSVAFMPLRSEIPADTAPAPTPPPESLQRLTSLAELWMVVLDLDETLVSAYESSSLPAIVRTQAVEAGLHCFDMECISTEKDVEGRNKVNHVTVFERPGLHEFLQKTSEFADLILFTAGLEGYARPLVDRIDVHNRFKLRLYRPSTVTTEYREHVKDLSCVSKDFCRVVIVDNNPFSFILQPLNGIPCVPFSAGQHNDNQLMEVIFPLLKHLSIQRDVRPALYERFHMPEWFQKHGIPQTDQAV

SEQ ID NO: 1545 - protein, 903 aa, Photobacterium profundum SS9
MSAFFTMSRYRDLEHQLISTGSSIIEPLAISSEYGMTDKNREAVRRLISYTHRKNSQIIRSIAVFDANNQLFVTSNFHRNFETLMYPTGQPIPLLLETRLSDNSLILRAPILAEGQFGSNNSNSYQGKALGYIALELDLSALRLQQYQEVFTALMVLLFGLTLSSLFAYRLMQDVTRPISHMVSVVDRIRRGHLDIRIEGQLLGELDTLKNGINAMAISLSEYHIEMQQSIDQATSDLRETLEQLEIQNVELDIAKKRAQEAARVKSEFLANMSHELRTPLNGVIGFTRQMLKTRLSSSQHDYLLTIEKSANNLLTIINDILDFSKLEAGKLLLENIPFDFTESLDEVMRLLAPSAHEKGLELTLKVDDRIPAGLIGDPLRIQQVVTNLIGNAVKFTERGNIDVSVELKASKDESIELQFTVRDTGIGISERQQAQLFQAFSQADASISRRYGGTGLGLVITQKLVTQMGGEISLTSRLHQGSTFWFSLSMLKTDLPVSQPIDTTALVGQKVLLIEPNMQAASIVQQRLIKAGMFVTYRSTMPEEVEHHQFALICLPPGQQPPIAILLDRVFKAEQVTDKVIISLPTTELALSERLINAGVSACLGKPLSHRKLFEVLNNKPDDIFEPELLSLPETAQKIEPLTVMAVDDNPANLKLISALLSERVETVITATGGRKAVEYAHQKAFDLIFMDIQMPEMDGVTACEAIHKTELNHSTPVIAVTAHAMPGERERLINAGMDDYLTKPIEEHILQQILAKWNQPPENEHNQNTIIDLEPDVISTQQHPIQDNKDISWDWDLALKQAAGKEDLAKDMLQMLLDFMPEVEMLVNEALDGKDIELWPPIHKLHGSCAYSGVPRLKSLCYTIETQLKANATVADIEPELFELMDEMNHVVKASKAFRNR

SEQ ID NO: 1546 - protein, 391 aa, Podostemum ceratophyllum
DLEPVNPSDVPASAAGALKSYKLAAKAISKLQSLPSGNIGLLCDVLVKEVTDLTGYDRVMIYKFHEDDHGEVVSEWHAPELEPYLGLHFPATDIPQASRFLFMKNKIRMICDCMAAPVNVVQDAGLTQALNLSGSTLRAPHGCHAQYMANMGSIASLIMSVTINEDDEELEQQQQAGDELWGLVVCHHTVPRFRAVPAAVRCEFLIQVFGIQINKEVEMAAQMHEKRVLETQAVLCDMLLRDSPVAIMTRTPNVMDLVKCDGAALYHEKRFWLLGITPKETQIRHLMTWLNENHRETTGLSTASLLEAGFPDAMALGDAVCGMVAIRVNSKDFLFWFRSHTAKEIKWGGAKHDADEKDEERKMHPRSSFKAFLEVVKWQSLPWEDMEMDAI

SEQ ID NO: 1547 - protein, 395 aa, Quiina pteridophylla
DFEPVKPYEVPMTAAGALQSYKLAAKAITRLQALPSGSMERLCDTMVQEVFELTGYDRVMTYKFHDDDHGEVISEITKPGLEPYLGLHYPATDIPQAARFLFMKNKVRMIVDCRAKHVKVLQDDKLPFDLTLCGSTLRAPHSCHLQYMENMDSIASLVMAVVVNEGNEDSDGPDPVHPQKRKRLWGLVVCHNTTPRFVPFPLRYACEFLAQVFAIHVNKELELENQIVEKNILRTQTLLCDMLMRDAPLGIVTQSPNIMDLVKCDGAALLYKSKIWRLGVTPTDLQLQEIALWLSDYHMDSTGLSTDSLYDAGYPGALALGDVVCGMAAVRITSKDLLFWFRSQTAAEVRWGGAKHEPGEKDDGRRMHPRSSFKAFLEVVKTRSLPWKDVEMDAI

SEQ ID NO: 1548 - protein, 360 aa, Stackhousia minima
DLEPVNPADVPITAAGALKSYKLAAKAITRLQSLPSGNISLLCDVLVKEVSELTGYDRVMVYRFHDDDHGEVVAECCRPDLEPYLGLHYPATEIPQASRFLFMKNKVRMICDCLAPPVKVLQDKRLTQPLSLGGSTLRSPHGCHAQYMVNMGSIASLVISVTINDDEDEANSEQHRGRKLWGLVVCHHTTPRSVPFPLRYACEFLIQIFGVQINKEVELSAQKKEKHILRIQTVLCDMLLRNAPEGILAQSPNVMDLVKCDGAALYYRNDVRLVGITPTEKQIRDIAEWLLEHHSESTGLTTDSLMEAGYADASILGEAVCGMAAVKITSKDFLFWFRSHTAKEMKWGGAKHDPDDKDGG

SEQ ID NO: 1549 - protein, 405 aa, Populus nigra
MGFLCCSGKPSKRLESSSINENNSNIKRKDQTHVTSGSLKMKPYVNNLSKEGESKDDQLSLDVKSLNMKDEISKDRRSNGKQAQTFTFEELAAATSNFRSDCFLGEGGFGKVYKGYLDKINQAVAIKQLDRNGVQGIREFVVEVVTLSLADHPNLVKLIGFCAEGDQRLLVYEYMPLGSLENHLHDIPPNRQPLDWNTRMKIAAGAAKGLEYLHNEMKPPVIYRDLKCSNILLGEGYHPKLSDFGLAKVGPSGDKTHVSTRVMGTYGYCAPDYAMTGQLTFKSDIYSFGVVLLELITGRKAIDQRKERGEQNLVAWARPMFKDRRNFSCMVDPLLQGQYPIRGLYQALAIAAMCVQEQPNMRPAVSDLVMALNYLASHKYDPQVHSVQDSRRSPSRPGLDKDRGQ

SEQ ID NO: 1550 - protein, 95 aa, Pisum sativum
MEGLHETGPPPFLTKTFDVVEDPSTDGIVSWSRARNSFVVWDLSKFSTAILPRYFKHSNFSSFVRQLNTYGFRKVDPDRWEFANEGFLAGQRILL

SEQ ID NO: 1551 - protein, 406 aa, Populus nigra
MGFLCFSGKSSKRSENSSIDENNSNIKRKDQTQLTSGSMKVKPYVNDSREEGASKDDQLSLDVKSLNLKDEISKDIRNNGNPAQTFTFEELVAATDNFRSDCFLGEGGFGKVYKGYLEKINQVVAIKQLDQNGLQGIREFVVEVLTLSLADNPNLVKLIGFCAEGDQRLLVYEYMPLGSLENHLHDIPPNRQPLDWNARMKIAAGAAKGLEYLHNEMAPPVIYRDLKCSNILLGEGYHPKLSDFGLAKVGPSGDHTHVSTRVMGTYGYCAPDYAMTGQLTFKSDVYSFGVVLLELITGRKAIDQTKERSEQNLVAWARPMFKDRRNFSGMVDPFLQGQYPIKGLYQALAIAAMCVQEQPNMRPAVSDVVLALNYLASHKYDPQIHPFKDPRRRPSHPGLDKDNGRT

SEQ ID NO: 1552 - protein, 701 aa, Gluconobacter oxydans 621H
MSTDKRKTVTIGDQTFERGPQGATHQVASGETPTLTTQQGVPVSDDQNTEKAGARGPALLEDFHFREKIFHFDHERIPERVVHARGYGAHGFFELTDSLADYTTASVLGKIGKRVPAFVRFSTVAGGRGSFDVARDVRGFAVKLYTEEGNWDLVGNNMPVFFIQDAIKFPDMVHAVKEEPDSGFPQAQSAHDNFWDFASLSPETVHMLMWIMSDRAIPRSFRFMEGFGVHTFRLVNAEGKSTYVKFHWKPKQGLQSVVWNEAVKINGADPDFHRRDLWESINSGDFPEWELGVQLFDDDFADKFDFDILDATKLIPEELIPVRRIGRLVLNRTVDNFFAETEQVAFCTQNVVPGIAFTNDPLLQGRNFSYLDTQTKRLGGPNFTHIPINAPKCPFHNFQQDGHMAMHNPKGRANYEPNSWGMGPRENPQTGYKPYAEELNGRKTRERGELFADHYSQARQFYTSQTPTEQTHIKNAFVFELSKCLTPAIRARVVAHLLNVDEKLAKGVAEGLRLEKMPAPAPAARTPLTDLPASDPLSILKNGPKTFKGRNLGVLVTDGTDADLLAALMKAAEAEGTIVELVAPAVGGVKTTDGKLVPAGQKIVGAPSVLYDAVVLLPSAAGAKLLTGEATARDFVADAFAHAKFIGYGPDAKPLLAKGGITPEDMDDGIIPLEAPSDLKTFITLCRKLRFWDREARTHAV

SEQ ID NO: 1553 - protein, 236 aa, Cucumis sativus
MGRGKIEIKRIENTTNRQVTFCKRRNGLLKKAYELSVLCDAEVALIVFSTRGRLYEYANNSVRGTIERYKKAFADSSNSGLSVAEANVQFYQQEATKLKRQIREIQNSNRHILGEALSSLPLKELKSLEGRLERGISKVRAKKNETLFAEMEFMQKREMELQSHNNYLRAQIAEHERIQQQQQQQQQTNMMQRATYESVGGQYDDENRSTYGAVGALMDSDSHYAPQDHLTALQLV

SEQ ID NO: 1554 - protein, 149 aa, Oryza sativa
MSLVRRSNVFDPFADFWDPFDGVFRSLVPATSDRDTAAFANARVDWKETPESHVFKADLPGVKKEEVKVEVEEGNVLVISGQRSKEKEDKNDKWHRVERSSGQFMRRFRLPENAKVDQVKASMENGVLTVTVPKAEVKKPEVKAIEISG

SEQ ID NO: 1555 - protein, 248 aa, Arabidopsis thaliana
MEEGGSSHDAESSKKLGRGKIEIKRIENTTNRQVTFCKRRNGLLKKAYELSVLCDAEVALVIFSTRGRLYEYANNSVRGTIERYKKACSDAVNPPSVTEANTQYYQQEASKLRRQIRDIQNSNRHIVGESLGSLNFKELKNLEGRLEKGISRVRSKKNELLVAEIEYMQKREMELQHNNMYLRAKIAEGARLNPDQQESSVIQGTTVYESGVSSHDQSQHYNRNYIPVNLLEPNQQFSGQDQPPLQLV

SEQ ID NO: 1556 - protein, 1647 aa, Ustilago maydis 521
MSQPGARRAYHHGSQRGGSTINQKAALASAYQELGKELSSSKLKIVGNYTLQRPIGEGTFGKVRLGLHRLTNTRVAIKQIPKAHSASLTREIHHHRRLHHPNVMQLYEVIATEQYIWMVSELCAGGELYDYLVENQVLAEPEARRIFGQLCLAVAYVHSKGIVHRDLKLENILLDERCNVKLGDFGFTREFERNRLMDTFCGTTGYASPEMLAGKKYTGEQVDIWSLGVILYALLCGALPFDDDDEAVMKQKILQGDFEIPDCLSEEAHDLVVSILQHDPAKRPSIQSILAHPWFTKMMVNSPMSTLEEDQIATDYFASKPSASTSQSKQHDRFPPTLHKALAELDTATELDTADATSAAPPTNPADAFDFEDHDSSNSCHRHHLSASSEQSYHSARSDSESSGRRSTNTDLTDPTTADSLSGTDEVEGLDQAIVQLNASSRPSALANATAAASHPDKNAIGLHRNERLGSNGSDASLSGVPRPSTKTNTASLPTHHELPPVPDGTGQDDHLSIYQSVPLTKRGSQSSSRGHHRTPSRTKRRSLSSGGLSDHHPPMLGRKPVDYVSQLADLQPATFSTSIEQNLLHQLSALGLDVGQMVHSVVTDACDASGATWWMLLRKSKDRHSEQPDITSPIVQVIPAPGDHPAPINASAFSKAGQTVTPSSPAQFSPPPVPVKDPARRSEDKFRTQERPTTLEASSSENAGLAEQSIRRLQTVVSHEELDVSAAPALHTSTSELMMATKPATDRQSSVPASGPMPLAGLPASTVSLPNDRSLTSTPDSVSSRPKSQHRHTTAVASPAKLQHVALTTLEGSPTSEGSKARGNSQNDRPRSNSLSVRQFAQSVLGTKDRGSATSSPVRPPPEQVVVAGEALPLERAKSPTLFGRRNTVSNVKDSMVGRLSGPSTPKKTPVDMLDKPRKSTGKKSCETDLDRVKALERSADSASSSPSRSTTGQAVGVVSNAKVDSSVPSASQDSFSTMSVTPQGSEKSGHRGKAGSFFMSTVRTWLGGNEKPTRKSKTGKQASASHRGLGIDDGPMAAKSPTNSLSTSGSVSTLTYGTPSRSASVRRRSAHYQQTSATRRGGPRSPHLGTSSRRSSNGSSYQAHLELPPNSFQQSMNRPANMRRMSAGSITPTATLHGDYLNDVGGVSGASRHSRPSSSHSLAHSGAASRPGLHGKAGSTGSTSSAYRPGQASSVYSTGSGRRHPRPSQDGGTTVRRHRTYASSSGSPSRRNSFRHDSRPSSIKSRASSPGRAMSGLGELWAADAEADGDGGGTGARRSTRSTPRHSLEMRKTGEAFDSAAPHHQHHQHVVAQSIFVAHKSRSPYRPPSANPNLHGSLVRGSSQLSGRSNVSANSEDAGYVAPNSTLGLPATGTGAWRHSWGRPPPCWAGPVDPPPTSSYSKRSGAAGVEDDGRPKLRDVFANRDDDDWTDEEEEQTYSGGLGQMGTLSSAMSSSVGRVGSGIGASSSPYATRNLAALGSSGYSTQRAVNLDTANAPEIGLREAPFSSRYAGVRNMFQTATAGTPAFGSRSHHSVSLSLGNEFAPRLLSTTIHSPTVSAASLGGGLGCIGESADAHSVTVSSKPKPESSGTQTQAQQQQSSASASASASASQQQQSGGGSSGSGSRITASFHKPVQIIEEEEEDE

SEQ ID NO: 1557 - protein, 221 aa, Glycine max
MGQKSLIYAFVSRGTVILAEYTEFSGNFNSIAFQCLQKLPATNNKFTYNCDAHTFNYLVDNGYTYCVVADESIGRQLPMAFLERVKDEFVAKYGGGKAATAPVNSLNKEFGPKLREHMQYCVDHPEEISKLAKVKAQVSEVKGVMMENIEKVLDRGDKIELLVDKTENLHNQAQDFRTSGTRIRRKMWLQNMKIKLIVLGILIALILIIVLSVCRGFNCGK

SEQ ID NO: 1558 - protein, 370 aa, Pseudomonas aeruginosa UCBPP-PA14
MSAPVEALFQPFRLGALELPTRVVMAPMTRNFSPGGVPNAKVVEYYRRRAAAGVGLIVSEGTTVGHKAANGYPNVPRFYGEDALAGWKQVVDAVHAEGGRIVPQLWHVGSVRRLGVEPDASVPGYGPMEKAKDGKVLVHGMSKADIQEVIAAFAQAARDAQAIGMDGVEIHGAHGYLIDQFFWEGSNQRDDEYGGSLANRSRFAVELVRAVRAAVGADFPIIFRFSQWKQQDYSARLVETPEGLREFLAPLVEAGVDIFHCSTRRFWIPEFEGSELNLAGWTRELTGKPTITVGNVGLDGSEFLQFFGKTDEVAQPASIDGLVERLDKGEFDLVAVGRALLVDPEWAVKVREGRIGDIKPFSREALASLV

SEQ ID NO: 1559 - protein, 578 aa, Arabidopsis thaliana
MCGILAVLGCIDNSQAKRSRIIELSRRLRHRGPDWSGLHCYEDCYLAHERLAIIDPTSGDQPLYNEDKTVAVTVNGEIYNHKILREKLKSHQFRTGSDCEVIAHLYEEHGEEFIDMLDGMFAFVLLDTRDKSFIAARDAIGITPLYIGWGLDGSVWFASEMKALSDDCEQFMSFPPGHIYSSKQGGLRRWYNPPWYNEQVPSTPYDPLVLRNAFEKAVIKRLMTDVPFGVLLSGGLDSSLVAAVALRHLEKSEAARQWGSQLHTFCIGLQGSPDLKAGREVADYLGTRHHEFQFTVQDGIDAIEEVIYHIETYDVTTIRASTPMFLMSRKIKSLGVKMVLSGEGSDEILGGYLYFHKAPNKKEFHEETCRKIKALHQFDCLRANKSTSAWGVEARVPFLDKEFLNVAMSIDPEWKLIKPDLGRIEKWVLRNAFDDEERPYLPKHILYRQKEQFSDGVGYSWIDGLKDHANKHVSDTMLSNASFVFPDNTPLTKEAYYYRTIFEKFFPKSAARATVPGGPSIACSTAKAVEWDATWSKNLDPSGRAALGVHVAAYEEDKAAAAAKAGSDLVDPLPKNGT

SEQ ID NO: 1560 - protein, 414 aa, Anabaena variabilis ATCC 29413
MSYYIAPRFLDKLAVHITKNFLNIPGVRVPLILGIHGRKGEGKTFQCELAFEKMGIEVTLISGGELESPDAGDPARLIRLRYRETAELIKVRGKMCVLMINDLDAGAGRFDEGTQYTVNTQLVNATLMNIADNPTDVQLPGSYDSNPIRRVPIIVTGNDFSTLYAPLIRDGRMEKFYWEPNRDDKVGIVGGIFAEDGLSKREIEQLVDTFPKQSIDFFSALRSRIYDEQIRDFIHQVGFERISLRVVNSVEAPPEFKKPDFSLAHLIESGNLVLGEQQRVDNSQLVDEYNRLNRGRGYQAAPPPEAPMIQPVNNSSHKRETSNTHLSLETQEQIRQILSQGHKITFEHVDARRFRTGSWQSCGTLHIDAESDAISTLEACLVDYEGEYVRLVGIDPKGKRRVVETIIQRPNDKN

SEQ ID NO: 1561 - protein, 150 aa, Bradyrhizobium sp. BTAi1
MRYLHTMLRVRNLDAALKFYSDALGLKEVRRIDNDKGRFTLVFLCAPEDEHLLKSLPPTRGAPLVELTYNWDEESYGEDRFFGHLAYEVDDIYATCDRLMKLGITINRPPRDGNMAFVRSPDLHSIELLQKGEPKAPAEPWLSMPNTGHW

SEQ ID NO: 1562 - protein, 214 aa, Solibacter usitatus Ellin6076
MIHEILPVGMLQCNCSIFGDEGTREAIVVDPGDEIESILAIVTRHGLTVKAIVITHAHIDHIAGAQQLKKATGAPVYMNQNDTELQRMLDVQATWLGMPTPQAVEIDVAAKDGDTLLLGSTELHVLHTPGHTQGSICLWMPGEGKLVAGDTLFRESIGRTDLPGGDGRQILQSIHDKLLPLPGETEVIPGHGDLTTLAHERQFNYFLKGMRQPQ

SEQ ID NO: 1563 - protein, 351 aa, Pneumocystis carinii
MTASSRNVRFNVSDDYEILDVIGEGAYGIVCSAIHKPSGQKVAIKKISPFDHSMFCLRTLREMKLLRYFNHENIISILDIQQPQDFESFSEVYLIQELMETDMHRVIRTQDLSDDHCQYFIYQILRALKAMHSADILHRDLKPSNLLLNANCDLKVCDFGLARSAVSTEDSSSFMTEYVATRWYRAPEIMLTFKEYTKAIDIWSVGCILAEMLSGRPLFPGKDYHHQLMLILDVLGTPTMEDYYGIKSRRAREYIRSLPFKKRVSFASIFPRANPLALDLLEKLLAFNPAKRVTAEEALQHNYLEPYHDPDDEPTAPPISPSFFDFDRIKDSLTKNDLKILIYKEIMSMNN

SEQ ID NO: 1564 - protein, 277 aa, Prochlorothrix hollandica
MTVATAEKRPLEWTTILFILGLHLGALCVLFPSNFSWYAVALALFMHWFTGCLGITLGWHRLISHRSFQVPKWLEYFFVFCGSLSCQSGPIEWIGLHRHHHAYSDQEEDHHNSNKGFWWSHMNWMWVDVPARKQLPRFTRDIASDPVYLFFDKYFIPLQFAVGIIFFIASDAIVGNGWSFVVWGVFLRIVLLYHCTWFVNSATHKFGYRTHETTDNSRNCWWVALLTYGEGWHNNHHAFQYSARHGWQWWEIDITWLTIRLLERLGLATKVKLISEA

SEQ ID NO: 1565 - protein, 728 aa, Rhodobacter sphaeroides 2.4.1
MNVTSKPGELVPESDVAAIMRGTHGDPFRVLGMHGGGGAPLSVRVFAPQAAEVAVLGQGGEVLAPLERIGAEGFFAGTVPGEEKFPYRLRFVSGPHEWEADDPYRFPEVLGELDEYLLGEGRHYQLYTRLGAHPAEIEGVQGVSFAVWAPNARRVSVVGAFNAWDGRRHPMRKRIGVGVWELFVPGLHTGDLYKYELLGPSGERLPLKSDPLSFAQEAPPATASVVHGLPEAEWHDAGWMQERESRQRRDAPISIYEVHAGSWRQGLDYDALAEELSAYVREMGFTHVEFLPISEHPFTGSWGYQPIGLFAPTARFGPPEGFARLVDRLHRDGIGVILDWVPAHFPSDAHGLANFDGTHLYDHADPRQGFHRDWNTQIYNFGRQEVANFLQASALFWLDRYHVDALRVDAVASMLYLDYSRNAGEWVPNRHGGRENLEAIDFLRGVNERVRLDHPGCITIAEESTAFPQVSRPVEDGGLGFGFKWNMGWMHDTLGYFRRDPIHRKHHQNDLTFGMVYAYSEDFVLPLSHDEVVHGKGSLIGQMAGDRWQKFANLRAYFGFMWAHPGKKLLFMGGEFAQEREWNHDASLDWHLLDDPSHAGMKRLVADLNREYRKRPALHRMDCDPEGFEWIDAGDSENSVLSFLRKAPGEKPVLAVCNLTPVVRSDYRIGVPEGGEWREILNSDAAIYGGSDVGNPGGLQAEEFSWHGRPASLRLTLPPLATIFVTPA

SEQ ID NO: 1566 - protein, 429 aa, Mycobacterium bovis AF2122/97
MDNDGTIVDVTTHQLPWHTASHQRQRAFAQSAKLQDVLYEIRGPVHQHAARLEAEGHRILKLNIGNPAPFGFEAPDVIMRDIIQALPYAQGYSDSQGILSARRAVVTRYELVPGFPRFDVDDVYLGNGVSELITMTLQALLDNGDQVLIPSPDYPLWTASTSLAGGTPVHYLCDETQGWQPDIADLESKITERTKALVVINPNNPTGAVYSCEILTQMVDLARKHQLLLLADEIYDKILYDDAKHISLASIAPDMLCLTFNGLSKAYRVAGYRAGWLAITGPKEHASSFIEGIGLLANMRLCPNVPAQHAIQVALGGHQSIEDLVLPGGRLLEQRDIAWTKLNEIPGVSCVKPAGALYAFPRLDPEVYDIDDDEQLVLDLLLSEKILVTQGTGFNWPAPDHLRLVTLPWSRDLAAAIERLGNFLVSYRQ

SEQ ID NO: 1567 - protein, 202 aa, Sinorhizobium meliloti
MSGATLEAYLASCTARGDDLSRDVAAVIQRLAKAALDIRKLVNQGALGTAFNGTHGGSNTDGDLQKDLDILCDDQFLTCLQGAPVACYASEELENPVLLDPSARLAVAIDPLDGSSNIDNNVSIGTIFSVLPAAKGPDVDPSQSFLQPGNRQLAAGFFIYGPQTALVLSLGKGTEIFIFSSRLGCFVEAYKSAIIPERAHEF

SEQ ID NO: 1568 - protein, 592 aa, Rhodobacter sphaeroides 2.4.1
MNDWAWGPRIEDGLGRFRLWAPSQERLVLRLDGTDHPMTRSDDAWFEVQVPAEAGMDYGFVLESGQVVPDPAARAQAGDVHGLSRLVAPSFDWRHDWTGRPWAETVVMELHIGTFTEEGTFRAAIEHLPHLAEIGITMIELMPVAQFGGNRGWGYDGVLLYAPHPAYGTPEDLKALVDAAHGLGMSVVLDVVYNHFGPDGNYLGAYAADFFDPERHTPWGSAIAYHLPPVRRFFLDNALYWLTEFRFDGLRIDAADHIRDPDSDPEVLVDLARAIRKRIPDRPIHLTTEDNRNITRLHERGPEGEVVLHTAEWNDDLHNVAHVLLTGETEGYYCDFVKDHWRKYARALAEGFVYQGEHSEHEGAPRGTPSGHLPPLAFVDFLQNHDQIGNRAFGERLTTLAPEARLRAMMAVLLLSPHVPLLFMGEEWGETRPFTFFTDFHGELADAVRNGRRKEFAHFSAFQGLDLDRTVPDPNAEGTFLSSKLDWLHRETERGRSWMAFVKDLLAARAREIAPRLERAPGNGGRIVAVSDDLVAVDWQLDGAVLRLRVNFDDRPQDLPEAGGRVIHASPGTEAGGPLPPCSVLVTLEETA

SEQ ID NO: 1569 - protein, 705 aa, Ajellomyces capsulatus
MPSGQKGPLDRRHDTLSDPTDQFLSKFYIDDEQSVLTTDVGGPIEDQHSLKAGNRGPTLLEDFIFRQKIQHFDHERVPERAVHARGAGAHGVFTSYNNWSNITAASFLNAAGKQTPVFVRFSTVAGSRGSVDSARDIHGFATRLYTDEGNFDIVGNNVPVFFIQDAIQFPDLIHAVKPQPDSEIPQAATAHDTAWDFLSQQPSSLHALFWAMSGHGIPRSMRHVDGWGVHTFRLVTDEGNSTLVKFRWKTLQGRAGLVWEEAQALGGKNPDFHRQDLWDAIESGRYPEWELGFQLVNEADQSKFDFDLLDPTKIIPEELVPFTPIGKMVLNRNPKSYFAETEQIMFQPGHVVRGIDFTDDPLLQGRLYSYLDTQLNRHGGPNFEQLPINRPRIPFHNNNRDGAGQMFIPLNTAAYTPNSMSNGFPQQANRTHNRGFFTAPGRMVNGPLVRELSPSFNDVWSQPRLFYNSLTVFEKQFLVNAMRFENSHVRSETVRKNVIIQLNRVDNDLARRVALAIGVEPPSPDPTFYHNKATVPIGTFGTNLLRLDGLKIALLTRDDGSFTIAEQLRAAFNSANNKVDIVLVGSSLDPQRGVNMTYSGADGSIFDAVIVVGGLLTSASTQYPRGRPLRIITDAYAYGKPVGAVGDGSNEALRDVLMAAGGDASNGLDQPGVYISNDVSEAYVRSVLDGLTAYRFLNRFPLDRS

SEQ ID NO: 1570 - protein, 203 aa, Thermoanaerobacter tengcongensis MB4
MKILVTAFDPFGGESVNPSYEVLKNLKDNIEGAEIIKLQVPTAFYVSVEKAIEKIKEVNPDAVLSIGQAGGRYDISVERVAINIDDARIPDNMGQQPIDIPIDPEGPPAYFATIPIKEIVEAIKKENLPASVSNSAGTYVCNHLMYGILNYIHKNKLNIKAGFIHIPYLPEQVLEKPNTPYMSLSDMVKAIETAIKVIVKAMA

SEQ ID NO: 1571 - protein, 548 aa, Buchnera aphidicola str. Sg (Schizaphis graminum)
MGAKDVKFGNEARIKMLRGVNVLADAVKVTLGPKGRNVVLDKSFGAPSITKDGVSVAREIELEDKFENMGAQMVKEVASKANDAAGDGTTTATLLAQSIVNEGLKAVAAGMNPMDLKRGIDKAVISAVEELKNLSVPCSDSKAITQVGTISANADEKVGALIAEAMEKVGNDGVITVEEGTGLQNELEVVKGMQFDRGYLSPYFINKPETGIVELENPYILMADKKISNVREMLPILESVAKSGKPLLIISEDLEGEALATLVVNSMRGIVKVAAVKAPGFGDRRKAMLQDISILTGGSVISEELAMDLEKSTLEDLGQAKRVVINKDTTTIIGGSGEKQAIQSRIGQIRQEIQEATSDYDKEKLNERLAKLSGGVAVLKVGAATEVEMKEKKARVEDALHATRAAVEEGVVAGGGVALVRVAGKISNLRGHNEDQNVGIRVALRAMEAPLRQIVSNSGEEPSVVTNNVKDGKGNYGYNAATDEYGDMIDFGILDPTKVTRSALQYAASVAGLMITTECMVTDLPREDKSSDVASSPAGGMGGMGGMM

SEQ ID NO: 1572 - protein, 565 aa, Zea mays
  misc_feature (50)..(50): Xaa can be any naturally occurring amino acid
  misc_feature (221)..(221): Xaa can be any naturally occurring amino acid
MSPFLAVVMNHAAPHPGLRSHLVRPNNDSFSRHHLPTSSPQSSNGMSKLXFTTRSGTVSRQYGDQMMIPSQIPQREWFPSDFTFVAVTSLYQMECAWNEHGKGESNWDHFCHNHPERILDGSNSDIGANSYHMYKTDVRLLKEMGMDAYRFSISWPRILPKGTKEGGINPDGIKYYRNLINLLLENGIEPYVTIFHWDVPQALEEKYGGFLDKSHKSIVEXYTYFAKVCFDNFGDKVKNWLTFNEPQTFTSFSYGTGVFAPGRCSPGLDCAYPTGNSLVEPYTAGHNILLAHAEAVDLYNKHYKRDDTRIGLAFDVMGRVPYGTSFLDEQAKERSMDINLGWFLEPVVRGDYPFSMRSLARERLPFFSDKQQEKLVGSYNMLGINYYTSIFSKHIDISPKYSPVLNTDDAYASQETNGPDGNPIGPWMGNPWIYMYPDGLKDLLMIMKNKYGNPPIYITENGMGDVDHGDLPMEVALDDHKRVHYLQRHIATLKESRDLGANVQGYFAWSLLDNFEWFSGYTERYGIVYVDRNDGCKRYMKRSAKWFKEFNAAKKAAAKKILTPA

SEQ ID NO: 1573 - protein, 255 aa, Zea mays
MISPDAARNVVGIIGNVISFGLFLSPVLTFWRIYKAKDVEEFKPDPYLATLLNCMLWVFYGIPVVHPNSILVVTINGIGLVIEAVYLTIFFLYSDSQKRKKAFAILAVEILFMVAVVLGVILGAHTHEKRSMIVGILCVIFGSMMYASPLTIMSRVIKTKSVEYMPFLLSLVSFLNGCCWTAYALIRFDLYVTIPNALGAFFGLIGHRRVPGRLPPRHRLRQRQADAVRQLHRLQAPRQRVETVARSTHGHASAC

SEQ ID NO: 1574 - protein, 497 aa, Rubrivivax gelatinosus PM1
MDKASGKTLDAALVWCRRDLRAHDHAALYHALRAARRVWVAFVFDTEILDPLPRTDRRVEFIRDSLVDLDAQLHTLGRSHGTEGVGLIVRHGRARDEIPRLAAALHVQAVYANTDYEPAAVARDAQVRGALAQTGIAFHPAKDQVVFDTDEVLTGAGTPYGVFTPYKNAWLKKLEPFYLQAYPVGRHAGALAPRPAGEAAGVPTLAAIGFEPTNLAALKLAPGTAGGRALLEDFGDERIDRYDQTRDFPAVKGPSYLSVHLRFGTLSIRELARLAWDRARAGSRGAEVWLSELIWRDFYHQVLHHHPQVVERSFKPEYDKIKWEHGKHADALFAAWCEGRTGYPLVDAAMLQINQTGYMHNRLRMVVASFLCKDLGLDWRRGERYFAEKLNDYDLAANNGGWQWASSSGCDAQPYFRIFNPVSQSQKFDAQGKFIRRYLPQLAALPDAALHAPWDAKPLDLVAAGLVLGRDYPEPIVRHELARERTLARYAVVKGAR

SEQ ID NO: 1575 - protein, 163 aa, Cucurbita pepo
HWKPTCGVKSMMEEEAIRIGGTNHSHATQDLYESIAAGNFPEWRLYIQTIDYEDQNKYDFEPLDTTITWPEDVVPLQPVGRLVLNKNIDNFFAENEMLAFSMSLVPGIHYSDDKMLQARSFAYADTQRHRLGPNYLQLPVNAPKCPHHNNHHEGFMNFMHRDE

SEQ ID NO: 1576 - protein, 474 aa, Arabidopsis thaliana
MAAAVSTVGAINRAPLSLNGSGSGAVSAPASTFLGKKVVTVSRFAQSNKKSNGSFKVLAVKEDKQTDGDRWRGLAYDTSDDQQDITRGKGMVDSVFQAPMGTGTHHAVLSSYEYVSQGLRQYNLDNMMDGFYIAPAFMDKLVVHITKNFLTLPNIKVPLILGIWGGKGQGKSFQCELVMAKMGINPIMMSAGELESGNAGEPAKLIRQRYREAADLIKKGKMCCLFINDLDAGAGRMGGTTQYTVNNQMVNATLMNIADNPTNVQLPGMYNKEENARVPIICTGNDFSTLYAPLIRDGRMEKFYWAPTREDRIGVCKGIFRTDKIKDEDIVTLVDQFPDQSIDFFGALRARVYDDEVRKFVESLGVEKIGKRLVNSREGPPVFEQPEMTYEKLMEYGNMLVMEQENVKRVQLAETYLSQAALGDANADAIGRGTFYGKGAQQVNLPVPEGCTDPVAENFDPTARSDDGTCVYNF

SEQ ID NO: 1577 - protein, 765 aa, Nostoc sp. PCC 7120
MRIDVESQNINVTSLKEAPIHLSGQIQPHGVLLVLEEPGLKILQVSNNTWGILGINAENILQKKLEDLLDSFQIERIQSGLSSGNLEFINPTKIWIRKKGDDYAVFDAVFHRNTEGFLILELEPAITQENIPFLSFYHLAKASINQLQKTANLRDFCQIIVQEVRKVTDFDRVMLYKFDDDGHGSVIAEEKLDSLEPYLGLHYPESDIPKPARKLFISNSIRVIPNAQAQAIQMIPALNPVSDRPVDLTNSILRSAANCHLEYLHNMGVGASLTISLIKDNKLWGLIACHHLSAKYVSYELRKACEFLGRVIFAEISAREETEDYDYRMNLTHIQSLLVEYMSQEDNFVDGLIKHQPSLLDLTSAQGAAVCFGDHCTLIGETPKAEDLVFLVQWLKNNVEEEVFYTDSLPQVYPDAERYKNVASGLLAIPISQRNYVLWFRPEVIQTVNWGGDPNQPFEVNKLDGNVRLCPRKSFELWKETVRLTSLPWRYVEIRAALELRKAIVNIVLRQADELAQLAHDLERSNAELKKFAYVASHDLQEPLNQVANYVQLLEMRYQDQLDADANEFITFAVEGVSLMQTLIDDVLAYSKVDTQAIAFQLTEVEKALDKALGNLRQRIAETGANITHDPLPTVMAGSTQLMQLFQNLIANAIKFRSEEAPQIHIGAERLEDEWLFSVRDNGIGIDPQFSDRIFVIFQRLHTRDEYHGTGMGLAICKKIIECHRGRIWVESQLGEGATFYFTIPVGGRERERRNGRKTQNNLFS

SEQ ID NO: 1578 - protein, 1817 aa, Nostoc sp. PCC 7120
MNRQHKHHRCNSVNLLSKQNLLPFLLGIVILLVVVMLWLRLQAEEEIKIQQLIKQQAIATQTELVTQLNTRILALKRIGKHWEMHGNIPQAQWELEAKAYLEDYGGYQAIKLVDPSWQVLRAVSVANNKAAENLEMIPKFPQWTGATSHETTVTRTVNLNQGDRVFFACVPLWMGDKFGGAVLGVFQVKQLFESVLHIAPGYKIRVFDGQELIYDQDRQSSTLPLWQQAVNIDFYGMTWQLQIYPTPELLKDLFSPLPTVVLVAGIFNAGAVTLLIYFAQATKLSNHKIGRINQELADRIEKQTQVEIALRASETRLRELVETVRVIPWEFDLKTQHFTYVGPQVETLLAYPVAQWYEENFWDNHLHTLDRDWAVRFCQEAANKGQNHELEYRMLAADGRVVWLRDVVNVVQVDGTPVMLRGFMFDITDLKRVEETLRLRERALAASSNGIVISDAKLPHYPVIYVNSAFEQITGYKATEVVGRNCRFLLGNDTQQSAIEELRSALKAGKNCKVILRNYRKDGSLFWNQLSVSPIYNDNGQLSHFIGIQTDISDRQQAEASLRRQALTFENIYDGVIITNLQGQILDWNPAAERMFGYSKNHICGQSISTLHKVDEDAALNSAIIAEITKQGRWSGEINFVRQDGSQGICETTIVALQDDQGQSMATISVNRDITERKHAELLLRRSEERFQAFMNHSPTPAWITDIDGTIVYVSETYRRTFQLPTQELIGKNIVDIYPPELTQTFRETIQIVARTRQVMETVESAPCSDGTGRDFLVYKFPISSKPDECLIGCIAIDITERKQAEAALRKSEERWQLVIEGNQDAIWDWNIITNETFRSARWAELIKEQNYQPIADHADCVSRIHPDDYERVMAVKQDCLSRKIPNYVVEYRLRCNDDSYRWVLVHATGQWDEQGNPVRMVGSIKDITERIEAQEALQRQLHRTLLLEKITQKIRQSLDSKEIFETAATQIGQALAVDRCLIHSYISHHDPHIPLVAEYNNVLDYCSMQKWEFTTTGNQHILKMMSQDKAIASANVYTDPLLQTAVPSCCEIGVKSMLAVRTSYQGEPSGAICLHQCGYFRQWTNEEIELLEAVAAQLGIALAQAQLLEQETRQREELTIKNFALEQAKRAAEAANRAKSEFLAMMSHEIRTPMNAVIGMTGLLLDTELTSQQRDFVETVLTSGDALLSIINDILDFSKIESGKLELEEQPFEVRTCVEQVIDLLAAKAAQKDIELAYLIHPQVPMQIAGDLTRLRQILTNLLNNAIKFTPEGEVVVSVRSQPSPNQKNKNCCEIIFTIKDTGIGIAPETMDLLFQPFVQADASMTRKYGGTGLGLVISKRLGEMMGGYLWVESRGCVGGNPPPGWQTKNSISSASVATGSTFYFSMTVPVVAHADLETPITSPVQLSGKRLLIVDDNPTNRQILRLQAEPWQMETYTAPSGAEALALIDQGMAFDIAILDVQMPEMDGLTLARQIRQRPSYQHLPLVILTSWGQPDTDLSDIEFAACLNKPIKQSQLYDVLASTLGNQPIRASVVPDRSTEINSCLAQQIPLRILLAEDIVVNQKVALLILKKMGYRADVVANGLEVLEALQRQFYDVVLMDVNMPEMDGLKASQIICQTWSPSSRPYIIAMTANAMRGDREACLAAGMDHYISKPLQLEELAKALGKCHPSGSAIEKALEKTSSQNQTFTDISDLKFATIDTKILQALRDMLGGDKVAFAELINCYLTESPKLIQNIDVAINTKDTQGIWKTAHKFKSSSGSVGAVFLAQLCKLLETKGRNNNLEGCVELGSQLRQEYELVQTALHREVNKETS

SEQ ID NO: 1579 - protein, 192 aa, Saxegothaea conspicua
DEHGEVISEIRKSDLEPYLGLHYPATDIPQASKFLFMKNRVRMICDYHAPPVGVVEDNRLPRELNLCGSTLSAPHGCHEQYMSNMGSIASFVIIDIVNEKDEEEGDSEGQHQQKGRRLWGLVVCHHSSPRFVPFPLRYACEFLMQVFGIQLNKEVELAAQVREKHILCTQTLLCDMLLRDAPTGIVTQKPNI

SEQ ID NO: 1580 - protein, 813 aa, Kluyveromyces lactis NRRL Y-1140
MKTVLLPLKIKDTESISWTKGLITYLKRSYGSSQWSVFYDGDKTAEIDSCRTTANSDLAPESLLDQNYKYAAILEQIYLRLGAHSGSLQMDFTWYEAEYHSRLSEKKFKQHTVVFEKSSVMYNIGVLLSQIAKKKMSDNYKSAIPYLSKAMACFDYMSNNFLNSPSIDCAAENTSFLSTLLHAEAQEMFLMTLINGPDASKRASLISKLAHTALNLYEKCQEFYEDSSTATFGTTPYGEDKWKDIITLKVHLYRAISTYNHLRVLEEAKKIGEAIAYGKLAVHEIKEAGFYKVYVKDEIDLTGLKAVIEEKLKSLIKDNDFIYNDLIPADVSIESIKTMDAVKPVTWEEQLKVYLEQVVDLCNGAFKGIVPMEVYENESIYSEEKASLLRKEVEETDTADWEYQSFIEFTDLPKLIKDLESRYVHGGNGSSDDPQYEIMKQKITTWSKVVQDSNFKDVRAQMQNILDKRNEILTILSSVSPDQRENALKIKNSLVQASQSDDKIFASINPCLEEVNLLANHQLLWSIMSKFQIRNDEPSLLDLDDSKNQQILDRLHNIKHNQEILRLLKEERTRNLKDFKESLNNDDITQKLILLTGKPKKEMRVIFEEELTKFKPLSTRIEATIFKQNNLINDIKIKLDEVFKLIGVQDKTPEQENTVKERQTFFDKVEKAFNQFVIFSTDLPKGLNFYDTLLKMTRELSHASTPGQSVNLIDSNTLPPNLPQKSTQSTTLTKSFANLNLCNDVNDSVTQSPANLANTNNTGVNPGPPQLPPKPLSTGISGLVSDQKLQNGPTSFYNNPSVFDENLYSKFSK

SEQ ID NO: 1581 - protein, 484 aa, Capsicum annuum
SSAFNSPFCTTNSGAPVWNNNSSLTVGARGPVLLEDYHLVEKLANFDRERIAERVVHARGASAKGFFEVTHDITHLTCADFLRAPGVQTPVIVRFSTVIHERGSPETLRDPRGFAVKFYTREGNFDLVGNNFPVFFIRDGMKFPDMVHSLKPNPKSHIQENWRVLDFFSHHPESLHMFTFLFDDIGIPQDYRHMDGSGVHTFTLINKAGKSTYVKFHWRPTCGVKSLLEEEAIRVGGANHSHATQDLYDSIAAGNYPEWKLFIQTMDPAHEDRFDFDPLDVTKTWPEDIFPLQPLGRLVLNKNIDNFFNENEQLAFCPSIVVPGVYYSDDKMLQTRIFSYSDTQRYRLGPNYLQLPANAPKCAHHNNHYDGSMNFMHRDEEIDYFPSRYDPVRHAENYPIPTTVCSGKREKCIIQKENNFQQPGERYRSFSADRQERFIRRWVEALSDPRITYEIRSIWISYWSQADKSLGQKLASRLNVRPSI

SEQ ID NO: 1582 - protein, 492 aa, Capsicum annuum
MDPYKHRPSSAANSPYWTTNSGAPVYNNNSSLTVGARGPILLEDYHLLEKLANFDRERIPERVVHARGASAKGFFEVTHDITRLTCADFLRAPGVQTPVIVRFSTVIHERGSPETLRDPRGFAVKFYTREGNFDLVGNNFPVFFVRDGMKFPDMVHALKPNPKSHIQENWRILDFFSHHPESLHMFSFLFDDLGIPQDYRHMEGSGVNTYTLINKAGKAHYVKFHWKPTCGVKCLLDDEAVKVGGTNHSHATQDLYDSIAAGNYPKWKLFIQTIDPDHEDKFDFDPLDVTKIWPEDILPLQPVGRLVLNKNIDNFFVENEQLAFCPAIIVPGIHYSDDKLLQTRVFSYADTQRHRLGPNYLQLPPNAPKCAHHNNHHEGFMNFMHRDEEVNYFPSRFDPCRHAEQYPIPPRVLNGKRDRCIIQKENNFKQPGERYRSWAPDRQERFICRWVDALSEPRVTHEIRTIWLSYWSQADKSLGQKLASRLNVKPTM

SEQ ID NO: 1583 - protein, 482 aa, Panicum miliaceum
MAATVAVENLNPKVLKCEYAVRGEIVIHAQHLQQQLQTQPGSLPFDEILYCNIGNPQSLGQQPVTFFREVLALCDHPCLLEKEETKSLFSADAISRAKQILSTIPGRATGAYSHSQGIKGLRDAIAAGIASRDGFPANADDIFVTDGASPGVHMMMQLLIRNEKDGILCPIPQYPLYSASIALHGGTLVPYYLDEKTGWGLEISDLKKQLEDARSKGIDVRALVVINPGNPTGQVLAEDNQCDIVRFCKNEGLVLLADEVYQENIYVDDKKFNSFKKIARSVGYGEDDLPLVSFQSVSKGYYGECGKRGGYMEITGFSAPVREQIYKIASVNLCSNITGQILASLVMNPPKVGDESYAAYKAEKDGILQSLARRAKALEDAFNNLEGISCNKAEGAMYLFPQIHLPKKAIEAAKAANKAPDAFYALRLLESTGIVVVPGSGFGQVPGTWHIRCTILPQEDKIPAVITRFKAFHEAFMAEYRD

SEQ ID NO: 1584 - protein, 125 aa, Cicer arietinum
PKCAHHNNHHEGFMNFIHRDEEVNYFPSRHDPVRHAERFPTPPAALSGKRERCIRPKENNFKQPGERYRTWAPDRQDRFARRWIEALSDPRVTHEVRSIWISYWSQADRSLGQKIASHLNMRPSI

SEQ ID NO: 1585 - protein, 497 aa, Zea mays
MVLSHASSGRDDDDAVASTFASRYVRERLPRYRMPERSIPREAAQQIISDELMLDGNPRLNLASFVTTWMEPECDKLIMDSINKNYVDMDEYPVTTELQNRCVNMIAHLFNAPIKEDETAIGVGTVGSSEAIMLAGLAFKRKWQNKRKEQGKPCDRPNIVTGANVQVCWEKFARYFEVELKEVKLSEGYYVMDPVKAVEMVDENTICVAAILGSTLTGEFEDVKQLNDLLTEKNKETGWDVPIHVDAASGGFIAPFLYPELEWDFRLPLVKSINVSGHKYGLVYPGVGWVIWRSKDDLPEELIFHINYLGTDQPTFTLNFSKGSCQIIAQYYQLIRLGFEGYRNIMENCQENAAILREGIAATGRFDVLSKDAGVPLVAFSLRDSSRFSVFDVSENLRRFGWIVPAYTMPADAEHVAVLRVVVREDFSRSLAERLVSDVRKILRELDARATHAVRVATATAEQSGDSVVAKKSVLEIEREVAARWRNAVNKKKTGVC

SEQ ID NO: 1586 - protein, 205 aa, Kluyveromyces lactis NRRL Y-1140
MDTETEAEKQERHNNYLNELAEQDRWLPINNVARLMKNTLPATTKVSKDAKECMQECVSEFISFVTSEACDRCTSGKRKTINGEDILLSLHALGFENYAEVLKIYLAKYRQQQAIKNQMMYPKEDVEGSYTEEESRAEDADHVTQERQQPLHPVPSSASTTTSTEVSASEHVQSSSKSTHNPAQAQPRIVVQQPLGSRHSTADHL

SEQ ID NO: 1587 - protein, 195 aa, Saxegothaea conspicua
DDHGEVISEIRRNDLEPYLGLHYPATDIPQASRFLFMKNKIRMICDACASPVRVIEDNRLSKDLSLVGSTLRAPHDCHAQYMYNMNSVASLVMAVVVNEREEEERDSDGRLQPQEAIRRLWGLVVCHHSSPRFVPFHLRYACEFLMQVFGIQLNKEVELAAQVREKRILRTQTMLCDMLLRGDVPKGIVTTKPNI

SEQ ID NO: 1588 - protein, 215 aa, Corynebacterium diphtheriae NCTC 13129
MISVDTMTNASSTEGISLHHISVSDLDNNCYLLTTESDEGTQGLLIDAADNAPALLDLAESAGARITAVVTTHRHFDHVRALEDVLDTTKATHFASLGDSPRLPRSADTTLGEGDTLRWAGHNLRAHILRGHTQEGLALSIKIDGIYHLFVGDSLFPRGVGKTSTPEEFNQLLSDVKTRLFDVYPDTAVVHPGHGKPTTLGTERPHLEQWRQRGW

SEQ ID NO: 1589 - protein, 188 aa, Stangeria eriopus
DEHGEVVAEIRRSDLEPYLGLHYPATDIPQASRFLFMQNRVRMICDCRAKPVRVIQAAKLRQPLCLVGSTLRAPHGCHAQYMVNMGSIASLVMAVVINVNDDAAGSGRGSSMKLWGLVVCHHTSPRAVPFPVRCACEFLMQAFGLQVNMELQLAAQLTEKHILKTQTLLCDMLLRDAPIGIVTQTPSV

SEQ ID NO: 1590 - protein, 262 aa, Bacillus cereus G9241
MPMIGLGVYKAKEGDEVKRAVKTALEVGYRSIDTATVYENESGVGEAVRESGIPREDIFITTKVWNDDQGYEETLEAFEKSLKKLQMDYVDLYLIHWPIRGKYVDTYRALEKLYEEGKVRAIGVSNFHKHHLELLLPNCKVKPMVNQVELHPMLTQFELRNFCQGEQIQMEAWSPLMRGGEVFQHPIIQAIATKYEKTSAQVILRWDIQSGVVTIPKSVTPSRIQENFSIFDFSLTEEEMTQINTLNRNLHVGTNPDKYDTL

SEQ ID NO: 1591 - protein, 196 aa, Pyrococcus furiosus DSM 3638
MIYRIKDGFVNVYIIDRGDHLVLIDTGIEGTCEKILSKIKELKKPLKTIIITHHHLDHTGSLKCVKDATGAKVVAHEEEVEVIEERTRVKVDVPVKDGDVIEGLKVFHMPGHTKGSICLLDEESGALFVGDIMIERDGKLYEVPHRYSEDPMMNRERIKDILNIEFKSIYPAHGEPVLENARKKVKELVEALEREK

SEQ ID NO: 1592 - protein, 429 aa, Arabidopsis thaliana
MESLPQPQNQSSPATTPAKILLGKYELGRRLGSGSFAKVHLARSIESDELVAVKIIEKKKTIESGMEPRIIREIDAMRRLRHHPNILKIHEVMATKSKIYLVMELASGGELFSKVLRRGRLPESTARRYFQQLASALRFSHQDGVAHRDVKPQNLLLDEQGNLKVSDFGLSALPEHLQNGLLHTACGTPAYTAPEVISRRGYDGAKADAWSCGVILFVLLVGDVPFDDSNIAAMYRKIHRRDYRFPSWISKQAKSIIYQMLDPNPVTRMSIETVMKTNWFKKSLETSEFHRNVFDSEVEMKSSVNSITAFDLISLSSGLDLSGLFEAKKKKERRFTAKVSGVEVEEKAKMIGEKLGYVVKKKMMKKEGEVKVVGLGRGRTVIVVEAVELTVDVVVVEVKVVEGEEDDSRWSDLITELEDIVLSWHNDIM

SEQ ID NO: 1593 - protein, 188 aa, Polypodium vulgare
DEHGEVVAEIRRADLEPYMGLHYPATDIPQAARFLFMKNRVRMICDCTLPPVKIIQDKNLAQPLSLTGSTLRAPHGCHAQYMSNMNSIASLVMAVIVNDSDIDSAGHASQGMKLWGLVVCHHTSPRYVPFPVRSACEFLMQVFSLQLNMEVGMAAQVREKHILRTQTLLCDMLLRDAPIGIVSQSPNI

SEQ ID NO: 1594 - protein, 165 aa, Glycine max
  misc_feature (118)..(118): Xaa can be any naturally occurring amino acid
LRGRGLRVRTAHASAHASADAWEKSQYAVRGELYLRASELQKEGKKIIFTNVGNPHALGQKPLSFPRQVVALCQAPFLLDDPNVGLLFPADAIARAKHYLSLTSGGLGAYSDSRGLPXVRKEVAEFILRRDGYPTDPELIYLTDGASKGVMQILNTIIRGQDDGI

SEQ ID NO: 1595 - protein, 332 aa, Shigella flexneri 2a str. 301
MKTLGEFIVEKQHEFSHATGELTALLSAIKLGAKIIHRDINKAGLVDILGASGAENVQGEVQQKLDLFANEKLKAALKARDIVAGIASEEEDEIVVFEGCEHAKYVVLMDPLDGSSNIDVNVSVGTIFSIYRRVTPVGTPVTEEDFLQPGNKQVAAGYVVYGSSTMLVYTTGCGVHAFTYDPSLGVFCLCQERMRFPEKGKTYSINEGNYIKFPNGVKKYIKFCQEEDKSTNRPYTSRYIGSLVADFHRNLLKGGIYLYPSTASHPDGKLRLLYECNPMAFLAEQAGGKASDGKERILDIIPETLHQRRSFFVGNDHMVEDVERFIREFPDA

SEQ ID NO: 1596 - protein, 486 aa, Listeria innocua Clip11262
MTEVKKQFPKGFLWGGATAANQVEGAYDVDGKGLSTADMVKFIPKEERTKDHALDVSKAEIEAIIAGKVEGRFPKREGVDFYHRYKEDIALFAEMGFKTFRLSLNWARIFPNGDDKEPNEKGLEFYDKVFDELLKYDIEPLVTLSHYETPLNLTLKYNGWADRRVIGFFTNYAETVFKRYKNKVKYWLTFNEINVISLSAYTGGGVLLEDAKNPLELSYQAGHHQFVASALATKLAHEIIPGSQVGCMLARMATYPATNNPDDILKAQYENQQNLFFTDVHARGEYPSYMNRFFQENDINIVKEVGDDEILKAHTVDFISFSYYMSLSATASPEGDRSAGNLMGGVKNEYLESSDWGWQIDPKGLRWTLNDLYSRYELPLFIVENGLGAYDTVEEDGKIHDDYRIDYLRKHIEQMKEAIADGVDLMGYTSWGPIDLVSASTSEMSKRYGFIYVDQDDWGKGTLERSRKDSFFWYKKVIETNGEDLD

SEQ ID NO: 1597 - protein, 544 aa, Ralstonia eutropha JMP134
MPEKTLIFHQSARREMLHGVELLARAVKVTLGPGGRNVIVERRDMVPLVANSGVVVAKSVSLPDPFADMGARLLCEAAVRTSEIAGDGTTTATTLAHAIVAEGVKYVEAGHDPMQLKRGIEAAGKLVSEHLLASAKPCGGTDEMRQIATISASGDHTVGTLVAQAVEHVGKDGAISVEDGSKLDDELDIAEGALIDRGYLSPLFATTESRAVVLESPLVLLCDASISSIAQLLPILEAVTRAGRSLLVIANDVEGEALATLVVNNLRGALKSCAVKSPGFGDSRTEQLGDLAALTGATVVSPQTGTSLEHVGLEQLGEARRVEINKDATTLVGSGADASRVAARIAVLRSRVPDARSDYDREGLQRRIARLTGGVAVIKVGAATESALHERKNRFQDALHATRAAVDEGIVAGGGVALLRARTVLQDWQAPNAEQAAGARIVHAALAAPMRQIVANAGADADAVVHRVCEASGTIGYDAGGERFGDMLELGVIDPVKVVRTALQNAVSIASLLLTTDCMIAIERIPHGSAENAAAGARMFGEEF

SEQ ID NO: 1598 - protein, 328 aa, Trichosporonoides megachiliensis
MSYNKNIPLNDGNSIPALGYGTWQAEPGQVGEGVKLAVKAGYRHLDLAKVYQNQTEIGQALKELFDEGVVKREDLFITSKLWNNRHAPEHVEPALDETLKELGLSYLDLYLIHWPVAFKFTTPDELLPADPTNKDLAYVDDSVKLSDTWKAVVALKKTGKTKSVGVSNFSTRLVDLVEEASGERPAVNQIEAHPLLQQDELVAHHKSKNIVITAYSPLGNNVAGKPPLTENPGIVDAAKRLNHTPAAVLIAWGIQRGYSVLVKSVTPSRIKSNFEQITLSDEEFQRVTNLIKEYGESRNNVPFNYKPSWSIDVFGTQDEAKATHKINA

SEQ ID NO: 1599 - protein, 718 aa, Mannheimia succiniciproducens MBEL55E
MKLNKSKTYLATLVVSAVIGMSGNAFAVHPTLKASDIVIPQPTEENGLATKRATTRLTQSHYRKFQLDDEFSHKIFARYLDFLDYSHNLFIKSDIDELQAKYAALLDDELNEGKLDIAFAMYDLMAKRRYERYEYALSLLDKEPSLKDDDQIEIDRKKAAWPASVEEANKLWAARVKNDIIDLKLKDKKWSEIKKTLTKRYNLAIRRLTQTNADDITQLFLNAFAREIDPHTSYLAPRTAKSFNESMNLSLEGIGATLQQEDDVTTIKSLVPGAPAERSKRIKAGDKIIGVGQAKGEIEDVVGWRLEDVVDKIKGKKGSKVRLEIEPAKGGKSKIITLVRDKVRIEDSAAKLTVEKVNGQNVAVIKIPTFYIGLTADVRKLLEQMKAKKATSLIIDLRENGGGALTEAVELSGLFISDGPVVQVRDAYNRIRVHEDPDNAQVYTGPLLVMTNRFSASASEIFSAAMQDYNRGIIIGQDTFGKGTVQQSRSLNFVYDLDQEPLGFIQYTIQKFYRINGGSTQLKGVTADINFPAIIDTKENGEEKEDNALPWDKIPAATYSQVSHARDAVEVLKSKHLDRISKDPEFIALAEDLKIRDERSERKYLSLNYEKRKAENDKDDARRLKALNERFAREGKKALKDINDLAKDYEAPDFFLKEAEKMASDLAKFETDKESIQAKAMSLENKADTKDVKAESKKTAEVKTETVKSKEDVRPETK

SEQ ID NO: 1600 - protein, 206 aa, Lotus corniculatus var. japonicus
MPSRRRTLLKVIILGDSGVGKTSLMNQYVNRKFSNQYKATIGADFLTKEVQFEDRLFTLQIWDTAGQERFQSLGVAFYRGADCCVLVYDVNSMKSFDNLNNWREEFLIQASPSDPENFPFVVIGNKIDIDGGNSRVVSEKKARAWCASKGNIPYFETSAKGGINVEEAFQCIAKNALKSGEEEELYLPDTIDVGNSSQQRASGCEC

SEQ ID NO: 1601 - protein, 328 aa, Trichosporonoides megachiliensis
MSYNKNIPLNDGNSIPALGYGTWQAEPGQVGEGVKLAVKAGYRHLDLAKVYQNQTEIGQALKELFDEGVVKREDLFITSKLWNNRHAPEHVEPALDETLKELGLSYLDLYLIHWPVAFKFTTPDELLPADPTNKDLAYIDDSVKLSDTWKAVVALKKTGKTKSVGVSNFSTRLVDLVEEASGERPAVNQIEAHPLLQQDELVAHHKSKNIVITAYSPLGNNVAGKPPLTENPGIVDAAKRLNHTPAAVLIAWGIQRGYSVLVKSVTPSRIKSNFEQITLSDEEFQRVTNLIKEYGESRNNVPFNYKPSWSIDVFGTQYEAKATHKINA

SEQ ID NO: 1602 - protein, 673 aa, Vibrio fischeri ES114
MNCRFRVSLIAAGVMLAASAHALEAKVLDAKFSETDLPVLAAETQHATASKRVTSRFTRSHYKHFSLDDDFSVAIYERYLDMLDYNRNVFIQADLASFAPLSTQLDDQLKVGDTKAAFDIYNLSLKRRFERYVYALSLLDKEFDYTVDESIELDRSEAAWPKDEAELNELWRKRVKYDALNLSMAGKDWPEIQEMLGKRYNNALKRLTQSHNEDAFQLYINAFAREVDPHTSYLSPRNAEQFQSEMNLSLEGIGAVLQATDDYTVIRSLVAGGPALTSKKLSEGDRIIGVGQEGEKIVDVIGWRLDDVVQLIKGPKGTKVKLEILPEGKDSKSHTVTIVRDKIRLEDRAVKSEVIEQNGKKIGVLEVPSFYVGLAEDTKKEIAELKEKDISGIIVDLRNNGGGALTEATALSGLFITAGPVVQVRDSYGRVNVNADTDGEISYTGPMTVLVNRYSASASEIFAAAMQDYGRAVILGENSFGKGTVQQHRSLNHIYDLFDKPLGHVQYTIQKFYRINGGSTQNLGVVPDIAFPTAIDPKDTGESVEDNALPWDSIKAADYAKTNQIAETIEPLAKKHVERIKTDEEFGFIQEDIARYKAEKDITSISLNKKVREKESDDADARRLTRVNERQKLLGKEEFKTLDDIPKDYEVPDAYLDEAVSITIDLALMNQKK

SEQ ID NO: 1603 - protein, 370 aa, Saccharum officinarum
MDGAPVAEFRPTVTHGGRFLQYNIFGNLFEITHKYQPPIMPIGRGAYGIVCSVMNFETREMVAIKKIANAFDNHMDAKRTLREIKLLRHLDHENIIGIRDVIPPPIPQAFNDVYIGTELMDTDLHHIIRSNQELSEEHCQYFLYQILRGLKYIHSANVIHRDLKPSNLLLNANCDLKICDFGLARPSSESDMMTEYVVTRWYRAPELLLNSTDYSAAIDVWSVGCIFMELINRQPLFPGRDHMHQMRLITEVIGTPTDDELGFIRNEDARKYMRHLPQFPRRPFASLFPKVQSVAALDLIERMLTFNPLQRITVEEALEHPYLERLHDIADEPICTEPFSFDFEQQALTEDQMKQLIFNEAIEMNPNFRY

SEQ ID NO: 1604 - protein, 548 aa, Legionella pneumophila str. Lens
MAKELRFGDDARLQMLAGVNALADAVQVTMGPRGRNVVLEKSYGAPTVTKDGVSVAKEIEFEHRFMNMGAQMVKEVASKTSDTAGDGTTTATVLARSILVEGHKAVAAGMNPMDLKRGIDKAVLAVTKKLQAMSKPCKDSKAIAQVGTISANSDEAIGAIIAEAMEKVGKEGVITVEDGNGLENELSVVEGMQFDRGYISPYFINNQQNMSCELEHPFILLVDKKVSSIREMLSVLEGVAKSGRPLLIIAEDVEGEALATLVVNNMRGIVKVCAVKAPGFGDRRKAMLQDIAILTKGQVISEEIGKSLEGATLEDLGSAKRIVVTKENTTIIDGEGKATEINARITQIRAQMEETTSDYDREKLQERVAKLAGGVAVIKVGAATEVEMKEKKARVEDALHATRAAVEEGIVAGGGVALIRAQKALDSLKGDNDDQNMGINILRRAIESPMRQIVTNAGYEASVVVNKVAEHKDNYGFNAATGEYGDMVEMGILDPTKVTRMALQNAASVASLMLTTECMVADLPKKEEGVGAGDMGGMGGMGGMGGMM

SEQ ID NO: 1605 - protein, 639 aa, Rhodopirellula baltica SH 1
MCGITGFWNPSRTNERELRFALDPMLDVLDHRGPDERGSRFFQERGLAMGHTRLSIIGLACGHQPIETDDGDYAVTVNGELYDYKRIRTALACENYECNGKSDSAITLPLYLKHDLAMVDHLRGEFAVVLYDDRKERLVLIRDRFGVKPLYYAVNDNGFIWGSEVKSILQHPDVEPRLCPKAAVHQMMQVMVPGSTAFEGVDALLPGHMLVVQRNGDSLEVQTKRWWDFEFPESHDENADPEPFIQGVQDRLIDAVAARLEADVPVGCYLSGGIDSCSILGLANTLQQSPVKAFTIAFDSDEYDESNIAKRMAERTGAEQELLRLTEKELYGPAFERATWHAERTFYNTLAVAKWHMSRRVRACNYKAVITGEGSDELFGGYPFFKRDWLGRDDEGGIFAGAILAEEDLKHSAWQDLCGFTPSWIQPWMLVLKRFEPILSSSLTDLLQEYDPVGEVAGAIDPAQVRGRHRLDVSQYTWSKTMLEGQILTWGGDRMDMANSMEARPAFLDHHVAEYATTIPPNIRIRNGVEKWVLREAMVNVLPRELYERKKFAFMAPPAHTDPVKRAAVQEMIDHWLTPSRVESVGFFQHDKLMQFIDDAWKESDGTIARRNDIVMNHVLQLHMLHGQYVEGLPLPAVD

SEQ ID NO: 1606 - protein, 578 aa, Solanum tuberosum
MGNTCVGPSISKNGIFQSVSAAMWRSRSPDDTASTTNGESARIETPISVKEPDSPLPVQEPPEQMTMPKSEKKEEEKEQPKKPKKPAEMKRVSSAGLRTDSVLQKKTGNLKEFFSIGKKLGQGQFGTTFKCVEKATGKEYACKSIAKRKLLTDDDVEDVRREVQIMHHLAGHPHVISIKGAYEDAVAVHVVMEFCAGGELFDRIIQRGHYTERKAAELTRTIVGVVEACHSLGVMHRDLKPENFLFVDQKEDSLLKAIDFGLSIFFKPGDRFTDVVGSPYYVAPEVLRKRYGPEADVWSAGVILYILLSGVPPFWAENEQGIFEQVLHGDLDFKSDPWPSISEDAKDLMRRMLVRDPRRRLTAHEVLCHPWVQVDGVAPDKPLDSAVLSRMKQFSAMNKLKKMALRVIAESLSEEEIAGLKEMFKMIDTDNSGQITFEELKEGLKRFGSNLKETEIYDLMQAADVDNSGTIDYGEFIAATLHMNKIERQDHLFAAFCYFDKDGSGYITADELQQACEEFGIGDVRMEEMIREADQDNDGRIDYNEFVAMMQKGNPVLGGGKKGLEHSFSIGFREAVKL

SEQ ID NO: 1607 - protein, 403 aa, Kluyveromyces marxianus
MSYMNFDPKPLGDTNIFKPIKIGNNELKHRVVMPALTRMRAIAPGNIPNTEWAEEYYRQRSQYPGTLIITEGTFPSAQSGGYPNVPGIWSKEQLAEWKKIFNAIHENKSFVWVQLWVLGRQAWPEVLKKEGLRYDSATDDLYMGEEEKERALKANNPQHGITKEEIKQYIKEYVDAAKKAIDAGADGVQIHSANGYLLNQFLDPISNNRTDEYGGSIENRARFTLEVVDAVVDAVGAERTSIRFSPYGTFGTMSGGENPGIVAQYAYVIGELEKRARAGKRLAFIDLVEPRVTDPFLPEFEKWFKEGTNEFIYSIWKGPVLRVGNYALDPDQATLDSKKPNTLIGYGRSFIANPDLVYRLEKGLPLNKYDRNTFYTFTKEGYTDYPSYEESVAKGYKKEEKKY

SEQ ID NO: 1608 - protein, 330 aa, Trichosporonoides megachiliensis
MSYKQYIPLNDGNKIPALGFGTWQAEPGQVGASVKNAVKAGYRHLDLAKVYQNQSEIGVALQELFDQGIVKREDLFITSKVWNNRHAPEHVEPALDETLKELGLSYLDLYLIHWPVAFKFTTPQELFPTEPDNKELAAIDDSIKLVDTWKAVVALKKTGKTKSVGVSNFTTDLVDLVEKASGERPAVNQIEAHPLLQQDELVAHHKSKNIVITAYSPLGNNVSGKPPLTQNPGIEATAKRLNHTPAAVLLAWGIQRGYSVLVKSVTPSRIESNYDQITLSPEEFQKVTDLIKEYGESRNNIPLNYKPSWPISVFGTSDEAKATHKINTNL

SEQ ID NO: 1609 - protein, 371 aa, Coxiella burnetii RSA 493
MKQISKINWLNVSFIILTGLVGITGTILFIVFGLVHWPTWVLAGAMLIACGLSITAGYHRLAAHKSYKAAWPIRLFFALFGAAAFEGSIVEWATDHRKHHRYTDTDQDPYSIKKGFWYAHIGWLFTLDPSKRDFSNVQDLLDDPIYRFQHRFFPIIAILMGFGLPMAIGALWGDPLSALVIAGALRITVVYQMTFFINSLCHMIGKQTYKNSSARDNWVTALLTMGEGFHNFHHQFPIDYRNGVRFFHFDPTKWLIYLLSRMGLVSGLKRVEQRRIIKYRLQTDTQRLALLSAERVEVVKPLYERIHHLLGRLEELEKSYLALKEAQFKAYKNRLREIRQKLKATERELRTFLTLWSKVARPLQTCQLSGS

SEQ ID NO: 1610 - protein, 317 aa, Nicotiana tabacum
MAQNNEQQQQGQGLIEAGVLDDIINRLLEFRNARTVRQVQLSEAEIRSLCSASREIFLQQPNLLDLKPPIKICGDIHGQYGDLLRLFEYGGFPPEANYLFLGDYVDRGKQSLETICLLLAYKIKYPENFFLLRGNHECASINRIYGFYDECKRRFNVKLWKCFTECFNCLPVAALIDEKILCMHGGLSPVLTNLDQIRNLPRPTDVPDSGLLCDLLWSDPSREVKGWGMNDRGVSYTFGPDKVAEFLMQHDMDLVCRAHQVVEDGYEFFAERQLVTIFSAPNYCGEFDNAGAMMSVDESLMCSFQILKPTDRKPRFL

SEQ ID NO: 1611 - protein, 310 aa, Nicotiana tabacum
MAQNGQGIEPAVLDDIINRLLEFRNARTVRQVQLSEAEIRSLCTASKEIFLHQPNLLELEAPIKICGDIHGQYGDLLRLFEYGGFPPEANYLFLGDYVDRGKQSLETICLLLAYKIKYPENFFLLRGNHECASINRIYGFYDECKRRFNVRLWKTNTDCFNCLPVAALIDDKILCMHGGLSPDLTDLDEIRNLPRPTDIPDSGLLCDLLWSDPSREVKGWGMNDRGVSYTFGSDKVAEFLMQHDMDLVCRAHQVVEDGYEFFAERQLVTIFSAPNYCGEFDNAGAMMSVDENLMCSFQILKPTDRKPRFL

SEQ ID NO: 1612 - protein, 449 aa, Vibrio vulnificus YJ016
MNKYQLPQDSQLRQADFLFGVATSSYQIEGGAQLGGRTPSIWDTFCNQPGAVDNMDNGDVACDHFHLWQQDIELIQGLGVDAYRLSMAWPRILPKDGQVNQQGLEFYERIIDECHARGLKVFVTLYHWDLPQYLEDKGGWLNRETAYKFAEYAEVVSGYFGNKIDSYATLNEPFCSAYLGYRWGIHAPGKKGEREGFLSAHHLMLAHGLAMPIMRKNAPQSMHGCVFNATPAYPYSEQDVAAAEYSDAEGFHWFIDPVLKGEYPQSVLEHQAHNMPMILDGDLDIIRGDLDFIGINFYTRCVVRFDANGELESMPQPDAEHTYIGWEIYPQALTDLLLRLKQRYPNLPPVYITENGAAGEDACINGEVNDEQRVRYFQSHLLALDEAIRAGVNVQGYFAWSLMDNFEWAYGYKQRFGIVHVDYATQKRTLKQSAIAYRNTLLARAEEKQ

SEQ ID NO: 1613 - protein, 547 aa, Vibrio vulnificus
MAAKDVKFGNDARVKMLEGVNILADAVKVTLGPKGRNVVLDKSFGAPTITKDGVSVAREIELEDKFQNMGAQMVKQVASQANDVAGDGTTTATVLAQAIVNEGLKAVAAGMNPMDLKRGIDKAVAAAVEELKAMSKDCSTSTEIEQVGTISANSDSSVGKIIAEAMEKVGRDGVITVEEGQALHDELDVVEGMQFDRGYLSPYFINNQESGSVELESPFFLLVDKKISNIRELLPALEAVAKASRPLLIIAEDVEDEALATLVVNNMRGIVIVAAVIAPGFGDRRKAMLQDIAILTGGTVISEEVGLELEKATLEDLGQAKRVSITKENTTIIDGVGEEAMIQGRVAQIRQQIEDATSDYDKEKLQERVAKLAGGVAVIKVGAATEVKMKEKKDRVEDALHATRAAVEEGIVAGGGVALIRAASKIVDLQGDNEEQNVGIRVALRAMEAPLRQITKNAGDEESVVANNVRAGEASYGYNAATGVYGDMLEMGILDPTKVTRSALQFAASVAGLMITTEAMVTDLPQKDSGMPDMGGMGGMGGMGGMM

SEQ ID NO: 1614 - protein, 173 aa, Pseudomonas fluorescens PfO-1
MSLQELNTFPGVTAIPDSATRHFVFNHTMLRVKDITKSLDFYTRVLGFSLVEKRDFPEAEFSLYFLALVDKSQIPADAAARTEWMKSIPGILELTHNHGTENDADFAYHNGNTDPRGFGHICISVPDIVAACARFEELGCDFQKRLTDGRMKSLAFIKDPDGYWVEIIQPAPL

SEQ ID NO: 1615 - protein, 547 aa, Xylella fastidiosa Ann-1
MAAKEIIFSEKARSRMVYGVNLLANAVKATLGPKGRHVVLDKSFGSPIITKDGVSVAKEIELADKFENMGAQMLKEVASKTNDHAGDGTTTATVLAQALIREGCKAVAAGMNPMDLKRGIDKAVIAAVTELKKISKPTSDDKAIAQVATISANSDESIGNIIAEAMKKVGKEGVITIEEGTTLENELDVVEGMQFDRGYSSPYFINNQQSQIVELDNPYILLHDKKISNVRDLLTVLDAVAKESKQLLIVAEEVEGEALATLVVNNIRGIIKVCAVKAPGFGDRRKAMLEDMAVLTGGTVISEEVGLSLEKATTSHLGKAKKVRVSKENTTIIDGMGDNDAINGRVKQIKTQIEETTSDYDREKLQERVAKLAGGVAVIKVGAATEVEMKEKKARVDDALLATRAAVEEGVIPGGGVALIRVITAISNLKGANEDQTHGIQIALRAMEAPLREIVANAGEEPSVILNKVKEGKGNFGYNAATGEFGDMVNFGILDPTKVTRSALQNAASIAGLMITTEAMIAEAPKKDEPTPPAAGGGMGGMGGMDF

SEQ ID NO: 1616 - protein, 456 aa, Arabidopsis thaliana
MENKPSVLTERYEVGRLLGQGTFAKVYFGRSNHTNESVAIKMIDKDKVMRVGLSQQIKREISVMRIAKHPNVVELYEVMATKSRIYFVIEYCKGGELFNKVAKGKLKEDVAWKYFYQLISAVDFCHSRGVYHRDIKPENLLLDDNDNLKVSDFGLSALADCKRQDGLLHTTCGTPAYVAPEVINRKGYEGTKADIWSCGVVLFVLLAGYLPFHDTNLMEMYRKIGKADFKCPSWFAPEVKRLLCKMLDPNHETRITIAKIKESSWFRKGLHLKQKKMEKMEKQQVREATNPMEAGGSGQNENGENHEPPRLATLNAFDIIALSTGFGLAGLFGDVYDKRESRFASQKPASEIISKLVEVAKCLKLKIRKQGAGLFKLERVKEGKNGILTMDAEIFQVTPTFHLVEVKKCNGDTMEYQKLVEEDLRPALADIVWVWQGEKEKEEQLLQDEQGEQEPS

SEQ ID NO: 1617 - protein, 211 aa, Asarum caudigerum
NRQVTYSKRRNGLLKKAYELSVLCEAEVALIVSSSRGRLYEYANNSVRTTIDRYKKASDSSNPASVSETNSQYYQQEATKLRQQIDILQNANRQLMGESISAMNVKQLKQLETRLEKGISRIRSKKNELLFAEIEYMQKREVELRNDNIYLRGKIVENERAQQNMNMLPGGGGYEVMSQHPSYDSRNYLPVNLLEHNQHFSHQEPTALQLG

SEQ ID NO: 1618 - protein, 830 aa, Triticum aestivum
MLCLTAPSCSPSLPPRPSRPAADRPGPGISGGGNVRLSAVPAPSSLRWSWPRKAKSKFSVPVSAPRDYTMATAEDGVGDLPIYDLDPKFAGFKEHFSYRMKKYLDQKHSIEKHEGGLEEFSKGYLKFGINTENDATVYREWAPAAMDAQLIGDFNNWNGSGHRMTKDNYGVWSIRISHVNGKPAIPHNSKVKFRFHRGDGLWVDRVPAWIRYATFDASKFGAPYDGVHWDPPSGERYVFKHPRPRKPDAPRIYEAHVGMSGEKPEVSTYREFADNVLPRIKANNYNTVQLMAIMEHSYYASFGYHVTNFFAVSSRSGTPEDLKYLVDKAHSLGLRVLMDVVHSHASSNKTDGLNGYDVGQNTQESYFHTGERGYHKLWDSRLFNYANWEVLRFLLSNLRYWMDEFMFDGFRFDGVTSMLYNHHGINMSFAGSYKEYFGLDTDVDAVVYLMLANHLMHKLLPEATVVAEDVSGMPVLCRSVDEGGVGFDYRLAMAIPDRWIDYLKNKDDLEWSMSGIAHTLTNRRYTEKCIAYAESHDQSIVGDKTMAFLLMDKEMYTGMSDLQPASPTIDRGIALQKMIHFITMALGGDGYLNFMGNEFGHPEWIDFPREGNNWSYDKCRRQWSLADIDHLRYKYMNAFDQAMNALDDKFSFLSSSKQIVSDMNEEKKIIVFERGDLVFVFNFHPSKTYDGYKVGCDLPGKYKVALDSDALMFGGHGRVAHDNDHFTSPEGVPGVPETNFNNRPNSFKILSPSRTCVAYYRVEEKAEKPKDEGAASWGKTALGYIDVEATGVKDAADGEATSGSEKASTGGDSSKKGINFVFLSPDKDNK

SEQ ID NO: 1619 - protein, 371 aa, Kluyveromyces lactis NRRL Y-1140
MGKRIVFNISSEFQLQSLLGEGAYGVVCSAKHKPSGEIVAIKKIEPFEKPLFSIRTLREIKILKHFQHENIISIFDVQKPSSFEQFNEVYIIQELMQTDLHRVIVTQELSEDHVQYFVYQTLRALKVLHGSNVIHRDLKPSNLLLNSNCDLKICDFGLARIVSERATDGDAHVDADDTDDNSPSSAANDGDPAISGMTEYVATRWYRAPEVMLTAAQYSKSMDVWSCGCILAELLGKQPLFPGKDYRDQLILIFQTLGTPTEQELVELVENRRAREYIRSLPKHPKINWRRRFPNASAAALDLLDRMLQFDPRLRITATEALSHPYLVSYHDPDDEPEGTPIPSSFFQFDQWKSRLNTKDLKRLLWNEIVS

SEQ ID NO: 1620 - protein, 451 aa, Zea mays
MVGGGGGGPLRRVGKYEVGRTIGEGTFAKVKFAQNTETGESVAMKVLDRSSILKNKMAEQIKREISIMKLVRHPNVVRLHEVLASRKKIFIILEFITGGELFDKIIRHGRLSEADARRYFQQLIDGVDFCHKKGVYHRDLKPENLLLDSQGNLKISDFGLSAWPAQGSFLLRTTCGTPNYVAPEVLSHKGYNGALADTWSCGVILYVLLAGYLPFDEVDLTTLYGKIESAEYSFPAWFSGGAKSLIRRILDPNPETRIRIEEIRSDEWFQKNYEPIKEIENEEVNLDDVNAAFDDPEDDNEDAFEDETGPLTLNAFDLIILSQGLNLAALFDRRQDCDKLQNRFLSRNPAKVILSSMEVVAQSMGFKTHIRNYKMRVEGLNADKTSHLSVMVEVFEVAPSIFMVELQRAAGDTSEYNTFVNNYCGKLDDIIWKFPTEKGKSRIPRLSKSHS

SEQ ID NO: 1621 - protein, 544 aa, Bacillus cereus G9241
MAKDIKFSEEARRSMLRGVDTLANAVKVTLGPKGRNVVLEKKFGSPLITNDGVTIAKEIELEDAFENMGAKLVAEVASKTNDVAGDGTTTATVLAQAMIREGLKNVTAGANPMGLRKGIEKAVTAAIEELKTISKPIEGKSSIAQVAAISAADEEVGQLIAEAMERVGNDGVITLEESKGFTTELDVVEGMQFDRGYASPYMITDSDKMEAVLDNPYILITDKKISNIQEILPVLEQVVQQGKPLLIIAEDVEGEALATLVVNKLRGTFNVVAVKAPGFGDRRKAMLEDIAILTGGEVITEELGRDLKSATVESLGRAGKVVVTKENTTVVEGIGNTQQIEARIGQIRAQLEETTSEFDREKLQERLAKLAGGVAVIKVGAATETELKERKLRIEDALNSTRAAVEEGIVAGGGTSLMNVYTKVASIVAEGDEATGINIVLRALEEPVRQIAINAGLEGSVVVERLKGEKVGVGFNAATGEWVNMLETGIVDPAKVTRSALQNAASVAAMFLTTEAVVADKPEPNAPAMPDMGGMGMGGMGGMM

SEQ ID NO: 1622 - protein, 365 aa, Escherichia coli K12
MSSEKLYSPLKVGAITAANRIFMAPLTRLRSIEPGDIPTPLMAEYYRQRASAGLIISEATQISAQAKGYAGAPGIHSPEQIAAWKKITAGVHAENGHMAVQLWHTGRISHASLQPGGQAPVAPSALSAGTRTSLRDENGQAIRVETSMPRALELEEIPGIVNDFRQAIANAREAGFDLVELHSAHGYLLHQFLSPSSNHRTDQYGGSVENRARLVLEVVDAGIEEWGADRIGIRVSPIGTFQNTDNGPNEEADALYLIEQLGKRGIAYLHMSEPDWAGGEPYTDAFREKVRARFHGPIIGAGAYTVEKAETLIGKGLIDAVAFGRDWIANPDLVARLQRKAELNPQRAESFYGGGAEGYTDYPTL

SEQ ID NO: 1623 - protein, 493 aa, Zea mays
MDPYKHRPSSAFNAPYWTTNSGAPVWNNDSSLTVGARGPILLEDYHLVEKLANFDRERIPERVVHARGASAKGFFEVTHDITHLTCADFLRAPGVQTPVIVRFSTVIHERGSPETLRDPRGFAVKFYTREGNWDLVGNNFPVFFIRDGIKFPDMVHALKPNPRTHIQDNWRILDFFSHHPESLHMFSFLFDDVGIPADYRHMDGSGVHTYTLVSRAGTVTYVKFHWRPTCGVRSLMDDEAVAVGGANHSHATKDLTDAIAAGNFPEWTLYIQTMDPEMEDRLDDLDPLDVTKTWPEDAFPLQPVGRLVLNRNIDNFFAENEQLAFCPGLIVPGIYYSDDKLLQTRIFSYSDTQRHRLGPNYLLLPANAPKCAHHNNHYDGSMNFMHRTEEVDYFPSRYDAVRNAPRYPIPTAHIAGRREKTVISKENNFKQPGERYRAMDPARQERFITRWVDALSDPRLTHEIRTIWLSNWSQADRSLGQKLASRLSAKPSM

SEQ ID NO: 1624 - protein, 706 aa, Candida glabrata CBS138
MSLTKIPENVQGAVSIDPWLEPFADVLSERRYLADKWLYDIKHATPDGSEQSLVDFARNAYKTYGLHANQQTKEIVYREWAPNAQRAFLVGEFNNWNEESHEMKHKDEFGVFSITLAPLENGDFAIPHDSKIKVMFVLPDGSKVYRIPAWITRATQPSKETAQKYGPTYEGRFWNPPNSYQFKHQRPKFNLANDSIKIYEAHIGISSPEPKVASYKEFTQNVLPRIKHLGYDAIQLMAIMEHAYYASFGYQVTNFFAISSRYGTPEDLKELIDTAHSMGILVLLDVIHSHASKNSEDGLNMFDGSDHQYFHSLTSGRGEHPLWDSRLFNYGSFEVQRFLLANLAYYIDVYQFDGFRFDGVTSMLYLHHGVGAGGAFSGDYNEYLSRDRSGVDHEALAYLMLANDLVHDLLPESAVTIAEDVSGYPTLCLPRTAGGGGFDYRLAMALPDMWIKLLKTKQDDDWDMGHIVHTLTNRRHGEKVVAYCESHDQALVGDKTLAFWLMDAAMYTDMTVLKEPTLVIDRGIALHKMIRLITHSLGGEAYLNFEGNEFGHPEWLDFPRVGNNDSYHYARRQFNLVDDDLLRYRHLNEFDAAMQNCESKHQWLNTPQAYVSLKHEVDKVIAFERNGHLFVFNFHPTQSFTDYRIGVDVAGTYKIVLNTDRAEFGGHNRIDEAQEFFTTDLEWNNRRNFIQVYIPSRTAIVLTRQM

SEQ ID NO: 1625 - protein, 186 aa, Anabaena variabilis ATCC 29413
MIKTEFTLTYFLNMMRTNERLKPGSDSQENLRGVKDMTIIRWNPWQDLNTLQRQLNHLFEEDMLPSTVLERTLTRVPAAEIHETAEAIHLKLELPGIDAKDVDLQVTDKAVYISGERKSETKTEDKGVVKSEFQYGKFQRVIPLPTRIQNTNVKAEYKDGILNLTLPKAEAEKNKVVKVNIESAVG

SEQ ID NO: 1626 - protein, 272 aa, Pisum sativum
FVRQLNTYGFRKVDPDRWEFANEGFLAGQRILLRTIKRRRNVAQSPSMQRESGGACIELGEFGLEGEIERLRRDRSVLVAEIVKLRQQQNNSRDQISAMEARLLITEKKHQQMMAFLARALSNQSFIQQLANNKELKGVEMKRKRRLPASSSLENLQNDSVTMMTVPIESVVDYSSREQQEGLTAIESEIETLLSAYDNESRSEIKDPSANESNLSDWEELLNQKLVGGNPEDEVLIGDFSQIDAPVEDLVEKNDDWTVDLQNLVDEMDFEP

SEQ ID NO: 1627 - protein, 478 aa, Listeria innocua Clip11262
MEHQKRSPFPKDFLWGSASAAYQIEGAWDADGKGKSVWDEYVRIPGTTFKGTNGDVAVDHYHRYKEDVKLMAEAGLKAYRFSIAWTRIFPNGKGEVNEAGLKFYDNLIDELLKYDIEPLVTLYHWDIPQALFDEYGGWESRQVIEDFTNYSTTLFKRYGDRVKYWVSLNEQNIFVGMGYGQALHPPKVSDPKRMYAVNHIANLANASVIKAFHEIVPDGKIGPSFAYTPHYPIDTDPKNVQAADDAEELNSYFWMDMYAFGRYPKAVWKYLEENDIAPVIEDGDMELLASAKPDFMGVNYYQSATVAYNPLDGVGQNNEMNFTGKKGSTKETGVPGVYKKVVNPFVKTTNWDWTIDPKGLQIALRRINSRYALPILITENGLGEFDKLVDGEVNDDYRIDYLSAHATAIRDAISDGVDMLGYCTWSFTDLLSWLNGYQKRYGFVYVDRDVEDDAPMTRIPKKSYYWYKQVIETNGADL

SEQ ID NO: 1628 - protein, 1129 aa, Avena sativa
MSSSRPASSSSSRNRQSSQARVLAQTTLDAELNAEYEESGDSFDYSKLVEAQRDGPPVQQGRSEKVIAYLQHIQKGKLIQTFGCLLALDEKSFNVIAFSENAPEMLTTVSHAVPSVDDPPRLGIGTNVRSLFSDQGATALHKALGFADVSLLNPILVQCKTSGKPFYAIVHRATGCLVVDFEPVKPTEFPATAAGALQSYKLAAKAISKIQSLPGGSMEVLCNTVVKEVFDLTGYDRVMAYKFHEDDHGEVFSEITKPGLEPYLGLHYPATDIPQAARFLFMKNKVRMICDCRARSIKVIEAEALPFDISLCGSALRAPHSCHLQYMENMNSIASLVMAVVVNENEEDDEAESEQPAQQQKKKKLWGLLVCHHESPRYVPFPLRYACEFLAQVFAVHVNREFELEKQLREKNILKMQTMLSDMLFREASPLTIVSGTPNIMDLVKCDGAALLYGGKVWRLRNAPTESQIHDIAFWLSDVHRDSTGLSTDSLHDAGYPGAAALGDMICGMAVAKINSKDILFWFRSHTAAEIRWGGAKNDPSDMDDSRRMHPRLSFKAFLEVVKMKSLPWSDYEMDAIHSLQLILRGTLNDASKPKREASLDNQIGDLKLDGLAELQAVTSEMVRLMETATVPILAVDGNGLVNGWNQKAAELTGLRVDDAIGRHILTLVEDSSVPVVQRMLYLALQGKEEKEVRFEVKTHGPKRDDGPVILVVNACASRDLHDHVVGVCFVAQDMTVHKLVMDKFTRVEGDYKAIIHNPNPLIPPIFGADEFGWCSEWNAAMTKLTGWNRDEVLDKMLLGEVFDSSNASCPLKNRDAFVSLCVLINSALAGEETEKAPFGFFDRSGKYIECLLSANRKENEGGLITGVFCFIHVASHELQHALQVQQASEQTSLKRLKAFSYMRHAINNPLSGMLYSRKALKNTDLNEEQMKQIHVGDNCHHQINKILADLDQDSITEKSSCLDLEMAEFLLQDVVVAAVSQVLITCQGKGIRISCNLPERFMKQSVYGDGVRLQQILSDFLFISVKFSPVGGSVEISSKLTKNSIGENLHLIDLELRIKHQGLGVPAELMAQMFEEDNKEQSEEGLSLLVSRNLLRLMNGDVRHLREAGVSTFIITAELASAPTAMGQ

SEQ ID NO: 1629 - protein, 480 aa, Yersinia pestis KIM
MMSKKKGLTTAAGAPVVDNNNVITAGRRGPMLLQDVWFLEKLAHFDREVIPERRMHAKGSGAYGTFTVTHDITQYTRAKIFSEIGKKTDMFVRFSTVAGERGAADAERDIRGFAMKFYTEEGNWDLVGNDTPVFYLRDPLKFPDLNHVVKRDPRTNLRNPVYKWDFFSQLPEALHQLTIDFSDRGLPKSYRHMHGFGSHTFSLINANNERFWVKFHFRCQQGIENLMDDEAEKLIGSDRESSQRDLYEAIERGDFPRWKLQIQVMPEHEASQTPYNPFDLTKVWPHGDYPLIDVGYFELNRNPENYFAEVEQSSFNPANVVPGISFSPDRMLQGRLFSYGDAARYRLGVNHHQIPVNSAKCPFHNYHRDGAMRVDGNSGNGATYEPNSFGLFQEQPDFSEPPLTLEGAADHWNHREDTDYFSQPRALFNLLSEEEHQRMFTRIAGELSQVPEAIQRRQIALFTQVDPAYGAGVKKALGLN

SEQ ID NO: 1630 - protein, 650 aa, Mesorhizobium sp. BNC1
MTSAFKHLLSPIRIGNNLVRNRSMSTAHGTGYAVDGKISDQLIEYHMARARGGIGLIVLEATGVNAAPIGAKGGSYLRNSDDSVLPGYRKLSKALHEEGVVVYTMLSHSGRNTTMGINGTPPRAPSPIPFDRARDIPRPLEIEEIKGIVKAFADAACRAREGGLDGVELSYTHGNLVQQFLSPLTNIREDEYGGSEENRLRLAREILEAVRTALGDDYTLGIRFSADELVPGGYTIDDGERYARMMVEWGKLDYVSVSAGTNGSMWSRSIHYPSISMPEKVLIPYSKRVKQAVDVPVFCIGKITDPAEAEGILAQGEADIVGMTRAHIAEPAIIRKLMDDRIEDIRPCIHWNEGCFARKQRGGDLGCVFNPRTGREADWDPIVPVEDYKTVMIIGGGPAGLEAGRVAAKRGHDVVLHEKLDVLGGQVRQLALTPHRRDYRILTDWLERQARKAGVLIRTGSEMTAEKVLEAAPDVVIIATGAKDTLPRIKGADRPGVITARQLLDGANVGKRVVVGDWDGRNMGMSIAEHLAVRGHEVEIVSTTMYIGEDAELMTWHPAYERLQNLGVKLTALAELVEVRDGAAVVRALNGALTEVACDNVVTCTRGSAAEDLYLGLKGKVPHLYTIGDAFTPRQLEQAVYEGAKVARQI

SEQ ID NO: 1631 - protein, 173 aa, Pseudomonas fluorescens Pf-5
MSLNELNTFPGVTAQPDAATARFVFNHTMLRVKDITRSLDFYTRVLGFSLVEKRDFPEAEFSLYFLALVDKAQIPADAGARTEWMKSIPGILELTHNHGTENDPAFAYHNGNSDPRGFGHICISVPDIVAACERFEALGCDFQKRLNDGRMKSLAFIKDPDGYWVEIIQPAPL

SEQ ID NO: 1632 - protein, 326 aa, Arabidopsis thaliana
  misc_feature (292)..(292): Xaa can be any naturally occurring amino acid
  misc_feature (319)..(319): Xaa can be any naturally occurring amino acid
MKNFNLTHRIVMAPMARMRSYGNIPQPHVALYYCQRTTPGGLLISEATGVSETAMAYQNMPGIWRKEQIEAWKPIVDAVHSHGGIFFCQLWHAGRVSHQDCQPNGESPVSSTDKPFADDPSNEFTPPRRLRTDEIPTIINDFRLAARNATEAGFDGVEIHGAHGYLIDQFMKDSVNDRTDSYGGSLENRCRFALQVIEAVSKEIGPDRVGIRLSPFADYMESGDTDPKRLGLYMAKSLNRFEILYCHMIEPRMKTVSEIFECRESLTPMRNAFNGTFIVAGGYTREDGNKAXVAEGRTDLVAYGRLFLANPDLPKRFEXLNAPLNK

SEQ ID NO: 1633 - protein, 747 aa, Xanthomonas oryzae pv. oryzae KACC10331
MCLHTLWRSCALTCEHALRMLTHPVNGHAPRLEGIASISARQRGVPMAKSSGKPASAVSVDRSASAPDARGTGDELHQKARGRHPQLTTNQGIPVGDNQNSLRATPRGPTLLEDFILREKITHFDHERIPERIVHARGSAAHGYFKLTKSLSQYTTAKIFTEIGEKTPLFTRFSTVAGGAGSVDTPRDVRGFAVKFYTKEGNWDLVGNNIPVFFIQDAIKFPDLIHAVKMEPDRGFPQAASAHDTFWDFISLTPESMHMIMWAMSDRTIPRSLRMIEGFGIHSFRFLNDKGESTFVKFHWRPKLGLQSTIWDEAVKIAGADQDFHRRDLFEAIQNGDFPEWELGVQLFTEAEADAFPFDHLDSTKIIPEELVPLQIVGRMVLDRWPDNFFAETEQVAYCPGNIVPGIDFSNDPLLQGRLFSYLDTQLSRLGGPNFHQIPINAPKCPFVNNQRDGHMQMDVPKGRVAYEPSSLQADAPREALRGFPSHSTPAEDGAKGRVRAERFADHYSQARLFFRSQTAPEQAHMASALVFELSKVETAHVREAIVGHLRHIDQKLAQRVADGMGMTTLPPAPPAAVAPIDMPLSPALQVIGKMKDTLKGRTVGILIHDGSDASTIKAVRKAAEAEGATVKIVAPKLGGAKLSDGKQLAADGQLAGTPSVVFDAVAVLLSSEAAKLLTRESAALDFVSCAWAHLKAIAFDEGAQLLLKAGNIGKDAGVVPAADTKAFISAAKTRQWAREPKVRMLA

SEQ ID NO: 1634 - protein, 361 aa, Gluconobacter oxydans 621H
MPTLFDPIDFGPIHAKNRIVMSPLTRGRADKEAVPTPIMAEYYAQRASAGLIITEATGISREGLGWPFAPGIWSDAQVEAWKPIVAGVHAKGGKIVCQLWHMGRMVHSSVTGTQPVSSSATTAPGEVHTYEGKKPFEQARAIDAADISRILNDYENAARNAIRAGFDGVQIHAANGYLIDEFLRNGTNHRTDEYGGVPENRIRFLKEVTERVIAAIGADRTGVRLSPNGDTQGCIDSAPETVFVPAAKLLQDLGVAWLELREPGPNGTFGKTDQPKLSPQIRKVFLRPLVLNQDYTFEAAQTALAEGKADAIAFGRKFISNPDLPERFARGIALQPDDMKTWYSQGPEGYTDYPSATSGPN

SEQ ID NO: 1635 - protein, 581 aa, Zea mays
SSSVPLSAEGITVQSFNADLLYEPWEVLDDDGFPFTMFAPFWNRCLCMPDPAAPLLPPKRINSGDLSRCPWDELIFEDESERGSNALLARAWSPGWQNADKALTAFLDGPLVDYSANHKKADSASTSLLSPYLHFGELSVRKVFHQVRMKQLMWSNDGDRAGEESCTLFLRAIGLREYSRYLTFNHPCSLEKPLLSHLRFFPWVVDEVHFKVWRQGRTGYPLVDAGMRELWATGWVHDRIRVVVSSFFVKVLQLPWRWGMKYFWDTLLDADLESDALGWQYISGSLPDGRELDRIDNPQFEGYKFDPHGEYVRRWLPELARLPTEWIHHPWDAPESVLQAAGVELGSNYPRPIVELDAANSRLQGALSEMWELEAASRAAIENGMEEGLGDSTDEPPIDFPQELRMEVDRQPAQPAIIHTSVVAGWRREDQRVPSMTSSLIRAETELTADFGNTSEDSRPEVPSNIHLQARAEREETVDGATGNTVRVNGNQQQQNLQNNMHRVLGIAPSISEASSSWTGREGGLVPVWSPPAASVHSDPYTADEADISSRSYLDRHQQSNTMMNWSQLSQSLTTGWEVDN

SEQ ID NO: 1636 - protein, 222 aa, Arabidopsis thaliana
MGRGKIEIKRIENTTNRQVTFCKRRNGLLKKAYELSVLCDAEVALIVFSSRGRLYEYSNNNIRSTIERYKKACSDHSSASTTTEINAQYYQQESAKLRQQIQMLQNSNRHLMGDALSTLTVKELKQLENRLERGITRIRSKKHEMLLAEIEYFQKREIELENENLCLRTKITDVERIQQVNMVSGPELNAIQALASRSFFNPNMLEGGTVYPHSDKKILHLG

SEQ ID NO: 1637 - protein, 309 aa, Brassica napus
  misc_feature (290)..(290): Xaa can be any naturally occurring amino acid
  misc_feature (296)..(296): Xaa can be any naturally occurring amino acid
MCNPTRDDGSSQSGMVRKEKTPYFQRYWTWADVARAVTVTVVHFLCLLAPFNYKWEALRFGLILVAVTNLLITFSYHRNLAHRSFTLPKWLEYPIAYAAVFALQGDPLDWVSIHRFHHQFTDSDHDQFTDSDRDPHSPKEGFLFSHVMWIFDTLYIKYKCGGRNNVMDLKQQWFYRFLRKTIGFHVLMFWTVLYLYGGLPYLTCGGGVGGVLGYHVTWLVNSACHICGSRSWKTKDTSRNVWWLSIFTMGDSWHNNHHAFQSSARQGLEWWQIDITWYLIRLFEVLGLAXDVKLPXEYQKQKLALACSS

SEQ ID NO: 1638 - protein, 731 aa, Mycobacterium tuberculosis CDC1551
MSRSEKLTGEHLAPEPAEMARLVAGTHHNPHGILGAHEYDDHTVIRAFRPHAVEVVALVGKDRFSLQHLDSGLFAVALPFVDLIDYRLQVTYEGCEPHTVADAYRFLPTLGEVDLHLFAEGRHERLWEVLGAHPRSFTTADGVVSGVSFAVWAPNAKGVSLIGEFNGWNGHEAPMRVLGPSGVWELFWPDFPCDGLYKFRVHGADGVVTDRADAFAFGTEVPQQTASRVTSSDYTWGDDDWMAGRALRNPVNEAMSTYEVHLGSWRPGLSYRQLARELTDYIVDQGFTHVELLPVAEHPFAGSWGYQVTSYYAPTSRFGTPDDFRALVDALHQAGIGVIVDWVPAHFPKDAWALGRFDGTPLYEHSDPKRGEQLDWGTYVFDFGRPEVRNFLVANALYWLQEFHIDGLRVDAVASMLYLDYSRPEGGWTPNVHGGRENLEAVQFLQEMNATAHKVAPGIVTIAEESTPWSGVTRPTNIGGLGFSMKWNMGWMHDTLDYVSRDPVYRSYHHHEMTFSMLYAFSENYVLPLSHDEVVHGKGTLWGRMPGNNHVKAAGLRSLLAYQWAHPGKQLLFMGQEFGQRAEWSEQRGLDWFQLDENGFSNGIQRLVRDINDIYRCHPALWSLDTTPEGYSWIDANDSANNVLSFMRYGSDGSVLACVFNFAGAEHRDYRLGLPRAGRWREVLNTDATIYHGSGIGNLGGVDATDDPWHGRPASAVLVLPPTSALWLTPA

SEQ ID NO: 1639 - protein, 869 aa, Leptospira interrogans serovar Lai str. 56601
MNIFKIESQSSGFFAIIHLTIKKELLSKMIKSLRISCIFFILISFLTFLLNCSQFKQNNPIASNGVIDLSTWNPNIESINLKGNWEFCWDQWIPPNAEESQWKENCNGFYPAPAYWKFYNIPGKNLSPFGKATYRLKVILPTSFHDSYGIRWTEILSAFQIFINNKSVAQIGVLGTDFNTMTPKLKPDRTEIGPQNNQMTIVIWVSNFNHQNHGFWQPIYLGKWEIIRNTQVSHLMMDIASFASVALIGFYHLVLFLFRTRSKEYLFFGLFCISMGIRQLSVEDHAFIIFFPDIDFDFYIRFIYFTVLSIGIFMCMFIKSLFPEEVSSFFINSAIGVFGCSSFTLALPVRVFTEFFSIIFVLISFLPLGLTTYLFKAHKMKRKGATLILIAYLIFSTVVLNDILFTLGYISTGYISYIGITVFIFFQAGVLAQQLTQAFNHSEDLALELKSTLQENIETHNELLALKELQNTNLEFQVQSRTRELLKARDDAEFANKVKSQFLASMSHEIRTPLNGIIGLIEQFKSTPLDESQQHIRNLIQKSGENLLKIINDILDFSKLEEDKINLELHEFYWKETVEETIGIFLYQATQKGLVLSVDYSPDFIDKSVGDKRRITQVLSNLISNAVKFTDSGKIQIRAFSEKIETKIEYKIQVIDSGIGIPREKIDLLFQKFFQLDSSISRKYGGTGLGLAISKKLVELMNGKIHVSQNKSKGSTFEFTVLLSEFVSKDHSTYLPEITDLSSLSPDTFILIAEDDSTNIFLLSGILKKLKIKFELAKDGLEAITKVRVSRFDLIFMDINMPHLDGISASNFILTDPMISPKPVIIAVTADVLQEDKIKCRQAGMSDFLGKPYYKKDIEQMIYKWLVIH

SEQ ID NO: 1640 - protein, 838 aa, Streptomyces avermitilis MA-4680
MIPRPPSDDRANQNGDGSKKTGAKKTGAKKAAAAKKTAGKKATPAAKATAAKGAVTKKTGKGKATAKKAVADKAAAKATVPQQAVPKQAVSKRAVSKKAVPRKAVVKAALDIPEAPVSPAVAPDDRDRLLSGTHHAPHSVLGAHPVPGGVAFRVLRPYALSVTVVTDDLRTELHDDGAGFFTGLLPLRAVPDYRLHVAYEGTVHETEDAYRFLPALGELDLHLINEGRHEELWTALGAEPMTHQGVPGTRFTVWAPNARGVRLAGTFNFWDATAFPLRSLGSSGVWELFVPGVGEGELYKFEITRPDGSKTLRADPVARRTEAPPRTSSIVHASHYAWADEAWMAARGERPVHESPFSVYEVHLPSWRPGLTYRQLAEQLPAYVADLGFTHVELLPVAEHPFGGSWGYQVTGFYAPTARLGTPDDFKYLVDALHRAGVGVLMDWVPAHFPRDDWALAEFDGRPLYEHEDPLRAAHPDWGTLEFDYGRREVRNFLVANAVYWCEEFHIDGLRVDAVASMLYLDYSREEGQWSPNEFGGRENLDAVAFLQEMNATVYRRVPGVVTIAEESTAWEGVTRATHDNGLGFGLKWNMGWMHDSLGYVQHEPVHRRFHHHEMTFSMVYAYSENYVLPISHDEVVHGKGSLVSKMPGDWWQQRATERAYLGFMWAHPGKQLLFMGQEFAQGAEWSETHGPDWWLLDPAYGAEPDHRGMRDLVRDLNTVYRHEPALWERDTDPSGFAWVTGDAVEDNVFAFLRHAADGTPLLAVSNFSPVVRHDYRLGVPDDIPAWHETLNTDGARYGGSDVTNPHPVKPEPQGRHGRPASIRLTLPPLSTLWLRPA

SEQ ID NO: 1641 - protein, 402 aa, Streptomyces anulatus
MEFRQSSKLSEVCYEIRGPVIEHANALEEAGHSVLRLNTGNPALFGFEAPEEIVQDMIRMLPQAHGYTDSRGVLSARRAVAQRYQALGLDEVSVDDVFLGNGVSELVTMAVQALLEDGDEILIPAPDFPLWTAVTTLSGGKAVHYVCDEAADWYPDLDDMASKITDQTKAVEIINPTGAVYPKEILEGILDLARRHGLMVFADEIYDQILYDDAVHHSVAALAPDLVVLTFCGLSKTYRVAGFRSGWLVITGPRQHARDYLEGLTMLASMRLCPNAPAQFAIQAALGGRQSIRELTAPGGALHEQRDRAWEKLNEIPGVSCVKPKGALYAFPRLDPKVHPIHDDEKFVLDLLLQEKIQVVQGTGFNWPRPDHFRILTLPHADDLDAAISRIGRFLSGYRQGR

SEQ ID NO: 1642 - protein, 432 aa, Oryza sativa
  misc_feature (172)..(172): Xaa can be any naturally occurring amino acid
MYRAKRAALSPKVKRRVGKYELGRTIGEGTFAKVRFAKNTENDEPVAIKILDKEKVLKLAVRAQPSGEICTMKLVKHPNVVRLFEVMGSKARIFIVLEYVTGGELFEIIATNGRLKEEEARKYFQQLINAVDYCHSRGVYHRDLKLENLLLDASGNLKVSDFGLSALTEQVXEVIEDRGYDGAAADIWSCGVILYVLLAGFLPFEDDNIIALYKKISEAQFTCPSWFSTGAKKLITRILDPNPTTRITISQILEDPWFKKGYKPPVFDEKYETSFDDVDAAFGDSEDRHVKEETEDQPTSMNAFELISLNQALNLDNLFEAKKEYKREPRFSSQCPPKEIISKIEEAAKPLGFDIQKKNYKMRMENLKAGRKGNLNVATEVFQVAPSLHVVELKKAKGDTLEFQKLYRTLSTQLKDVVWKCDGEVEGNGAAA

SEQ ID NO: 1643 - protein, 396 aa, Kineococcus radiotolerans SRS30216
MAGLFTPLTIKDVTLRNRIGMSPMTMYRSVDGAMNDFHLMYLGARAAGGFGLVFPEQVAIAPEGRTTVHCAGIYDDAQVEGHARVTAMIKDMGAVAGIQLGHTGRNGSEVPPWEGGLQLPPEHPDGWQVSGPSNIPYGCGKRPYPVHALSVAEIKTLHRQYADAARRALDAGYEWLEMHFAHGYLASEFFSPLANQRTDEYGGSLENRARFLLEALDAVREVWPERLPLTMRLGSDDFHPEGITFEESITAIGWMKEHGLDLADISQGGNTDDMVNPIWNDPSAWVARAARLKDRVDIPVTTSWNLGIPANADAAIRSGDVDLVLLGRPALANPHWPVWAARELGTTEPFDLVPKDWGFWLQNFRGHGPSIGWPEPEVSRPAVVTLPQQGAHLQNV

SEQ ID NO: 1644 - protein, 542 aa, Crocosphaera watsonii WH 8501
MRTRCCPVLRNSWIPLSSPLLGYRSSSSAFRMTWLTTLMIISTTISYHTVVYLENETKPTGISDFVCSVFWRHLTMFNRKKIDIPRLQPSWRAIIGEFPPNQSSQSLWHCQGFSLVEGVPKLSKNKRFAVVGDVSLSNTDLLLKRLAINPSRWQEDHQTLIAWGWEELGKDCLHYLRGIFSFVVWDTHEKQGWAIRDRVGGRTLYYYQQDSTFYISPRLKNLSPYFKKNLDLIALRDYLCTGFIPGKRTLWQGVKELRPGTILSLPQEKIETYWTPQENISQSPLSFDKSSEILRELLETIIQEYLPPQEPVGVYLSGGLDSSCVTALAKQFHQETVHTYSIHFGEDYPNELEFSSLVAAHCQTKHHILAISPQEMWENLPITMANLDSPIGDPLTVPNYLLAQLAKQDVKVILNGEGSDPCFGGPKNQPMLLHSLYHNSEQKIDLLSSYLTSFKKCFLDLPNLLNPDIFKQVKDAPSVFEADLLSSADYLNRLMLLNIKFKGSDHILNKVNNLTLSGLLEGRSPLFDSRVVDKIFIHSSSL

SEQ ID NO: 1645 - protein, 334 aa, Photorhabdus luminescens subsp. laumondii TTO1
MKTLGEFIVEKQQDFSHATGELTALLSAIKLGAKIIHRDINKAGLVDILGTSGVSNVQGEVQMKLDLYANEKLKAALKARGEVAGIASEEEDDIVIFEGDRAENAKYVVLMDPLDGSSNIDVNVSVGTIFSIYRRITPIGQPVTEKDFLQPGHRQVAAGYVVYGSSTMLVYTTGCGVHAFTYDPSLGVFCLSHEKVQFPPNGNMYSINEGNYIKFPMGVKKYIKYCQEQDEATQRPYTTRYIGSLVADFHRNLLKGGIYIYPSTASHPSGKLRLLYECNPMAFLAEQAGGKASDGANRILDITPSKLHQRVPFFVGSKSMVEKAESFMAEFPDE

SEQ ID NO: 1646 - protein, 672 aa, Shewanella sp. MR-4
MSFPHLLEPLDLGFTQLKNRVLMGSMHTGLEEEKGGFEKLAAFYKERALGGVGLIVTGGISPNLRGRLTPHACQLSFPWQVGKHRIVTQAVHEAGGKICMQILHAGRYGYHPFSQAPSKIKSPITPFTPSAMSSRQVRATIKDYASSAALAKRAGYDGVEVMGSEGYLINQFISSRTNTRTDEWGGSFEKRAQFPIEIVNAIRAKVGKDFIIIFRLSMLDLVDNGSTWDEVVQLAKWLEHAGVSIINTGIGWHEARVPTIATSVPRGAFAWVTEKLKKSVSVPLIATNRINTPEIGEQIIVSGQADMVSMARPFLADPEFVNKAAANTPELINTCIGCNQACLDHTFSLKRATCLVNPRACYETEINFLPTSNKKRIAVMGAGPAGMAFSVYAAMRGHEVVLFEAKSEVGGQFNLARKIPGKEEFNETIRYFLNQIKLHKIDLRLNTRLDAKVLETETFDEIVIASGVVPRELSLPGFDSPKVVDYQQVLTGQATIGNKVALIGAGGIGFDMAHYLCESESSTLNPEKWLKQWGIDKQYQHAGGLAEPEVDNSEHRQVYLLQRKTSKMGQGLGKTTGWIHRLVLKQHDVKMKTGVSYDKFDDAGLHIRVGEQTEVLAVDNVILCAGQESNRTLVDEMKATGIPVHLIGGVDVAAELDAKRAIRQGAELAMRL

SEQ ID NO: 1647 - protein, 541 aa, Glycine max
MRKSAADRFRHLFNRSLLLLRHRHHHNHHPFPYSSSVSSLSPFSRSRFLSSTPFSMASDSPFPVTAQNINPKVLKCEYAVRGEVVTLAQNLQKDLQANPGSHPFDEILYCNIGNPQSLGQQPITFFREVLALCDHPAILDKSETQGLFSTDAIQRAWQIVDQIPGRATGAYSHSQGVKGLRDTIAAGIEERDGFPANPDDIFMTDGASPAVHNMMQLLIRSENDGILCPIPQYPLYSASIALHGGCLVPYYLDEATGWGLEIPELKKQLEAAKSKGINVRALVVINPGNPTGQVLGEANQRDIVEFCKQEGLVLLADEVYQENVYVPEKKFHSFKKVSRSMGYGENDITLVSFQSVSKGYHGECGKRGGYMEVTGFSAEVREQIYKVASVNLCSNISGQILASLVMSPPKVGDESYDSFMAEKENILASLARRAKTLEDAFNKLEGVTCNKAEGAMYLFPQIRLSEKAIKAAEAANATPDNFYCKRLLNATGVVVVPGSGFGQVPGTWHFRCTILPPEEKIPAIVTRLTEFHEKFMDEFRD

SEQ ID NO: 1648 - protein, 215 aa, Oryza sativa
MWSSDSEADLTAAAAAMTTTTTTSSSSSSSSSPSSSPPPPRRRHRHHRRAARRTHPVEAEAEEVWRGAQWEAAWPRRTKPVVVAEDEPPSGGVIVGACTAGGGEEGGGVGRARSLTDDDLEELKGCVDLGFGFSYDEIPELCGTLPALELCYSMSQRFLDDHPQSHHSPPPPPPPMPSPSIPNWKISSPGDSPDEVKARLKYWAQAVACTVRLCS

SEQ ID NO: 1649 - protein, 709 aa, Ustilago maydis 521
MSHLEALKKPVVFSNGVTAPNATLKSAMTERLCTWSEDDFKKRGWPTPEYINLYKTWGEGEIGTIVLGNIPCDARYPEAKKNACIDPEIGSHQEYVEAYKPVIDAASAHGSLVIAQVTHAGRQTSEEIASIPVSSSDVQCPPGMGMTFGKPRPLTVDEIHDIARRFGFAAKVLYEAKANGIELHAAHGYLLSQFLSPRVNKRTDQYGGNLEGRSRIVFEIIESIRKAVPDPKFIISIKINSADFADGGFDAEESFTMSKKLEAAGVGLIELSGGTYESSGFEHKKESTIARESFFIEFAERIRPHLSTARLAVTGGFRSSKAMAKAVEERSCDIVGLARPLCGEPHLCKHLLSGKQQKARDVHPDLPRQIEIGACVVQLNQIGHGATPCDTSTAEGAKFATDAVMRLREPEHDRMAVITTITVIHDHEAFLDRLQIYSADELLTTASSTTFSGVLDEPLATRLKIFCYFLASDESRTDALLSSDIPRPLLPLCLVLRYLILKEQKRLGESSKRFNWSLKQVHAAVASAFRAYTIHETLKADPTLTHLPSHLTYPDTYSVDPTTRDIHLESSIQLTLLSANRLAQSLLLCPTPFSAPPSAMVLGSLYHTIAQSTDETTREAIAAASSPIENAMLDWILFDTQDHLAIDVEALRKAKRERRKEEKRQQTAAEGEKRRAITAEQNVARSGFGLLQLDQDEAEEESAEEDQEQ

SEQ ID NO: 1650 - protein, 155 aa, Lycopersicon esculentum
MDLRLMGIDNTPLFHTLQHMMEAAGEDSVNAPPKKYVRDAKAMAATPVDVKEYPDSYVFVVDMPGLKSGDIKVQVEEDNVLLISGERKREEEKEGVKFIRMERRVGKFMRKFSLPENANTDAISAVCQDGSLTVTVQKLPPPEPKKSKTIQVKVA

SEQ ID NO: 1651 - protein, 221 aa, Glycine max
MSQESFIYSFVARGTMVLAEYTEFTGNFPAIAAQCLQKLPSSNNKFTYNCDHHTFNFLVEDGYAYCVVAKESVSKQISIAFLERVKADFKKRYGGGKADTAVAKSLNKEFGPVMKEHMKYIIDHAEEIEKLIKVKAQVSEVKSIMLENIDKAIDRGENLTILADKTETLHSQAQEFKKQGTHVRRKMWYQNMKIKLVVLGILLLLVLVIWLSVCHGFNCAN

SEQ ID NO: 1652 - protein, 377 aa, Oryza sativa
VGSRFAFVFVWSPAEAMERAAAGPLGMEMPIMHDGDRYELVKEIGSGNFGVARLMRNRASGDLVAVKYIDRGEKIDENVQREIINHRSLRHPNIIRFKEVILTPTHLAIVMEYASGGELFERICSAGRFSEDEARFFFQQLISGVSYCHSMQVCHRDLKLENTLLDGSTAPRLKICDFGYSKSSVLHSQPKSTVGTPAYIAPEVLLKKEYDGKIADVWSCGVTLYVMLVGAYPFEDPEDPKNFRKTIQKILGVQYSIPDYVHISPECRDLITRIFVGNPASRITMPEIKNHPWFMKNIPADLMDDGMVSNQYEEPDQPMQNMNEIMQILAEATIPAAGTSGINQFLTDSLDLDDDMEDMDSDLDLDIESSGEIVYAM

SEQ ID NO: 1653 - protein, 143 aa, Arabidopsis thaliana
  misc_feature (97)..(97): Xaa can be any naturally occurring amino acid
  misc_feature (104)..(104): Xaa can be any naturally occurring amino acid
MASSMLSSTAVVTSPAQATMVAPFTGLKSSASFPVTRKANNDITSITSNGGRVSCMKVWPPIGKKKFETLSYLPDLSDVELAKEVDYLLRNKWIPCXEFELEHXICVPVSTENTSIRLQILEFHCGTFKFLREGKGGPLPLIR

SEQ ID NO: 1654 - protein, 424 aa, Xylella fastidiosa 9a5c
MSNSPQTPLATRQRLSEVRYEIRGELARRARELEAEGRKLIKLNIGNPGAFGFRAPEHLQRAIADDMGRTDPYTHQQGLPIAREAIAAAYVRRHYPDADADRVFVGNGVSELIDLSLRALLNPGDEVLVPSPDYPLWSAATILNDGRPVYYRCAPENGFQPDAVEIETLVSSRTRAIVLINPNNPSGANYSQELLERIVAIAVKHHLLLLVDEIYDQILYDGAVFVPVAPLAGTHPCITFSGLSKVHRACGWRVGWALLSGSSIQIDNLRNAMDLLGALRLCANVPGQYAIDAAVNGPDTITPLCSPGGPLYETRRAVIEACVVSEHLSLVVPAGALYAFPSVVGPAARHFDDYAFALELMNDEGVLVVPGSSFNVPYRDHFRVTLLPDAALIREVFSRIDRALSRRAEVAEKVVPLKSRSAAA

SEQ ID NO: 1655 - protein, 496 aa, Arabidopsis thaliana
MGLPGKNKGAVLSKIATNNQHGENSEYFDGWKAYDKDPFHLSRNPHGIIQMGLAENQLCLDLIKDWVKENPEASICTLEGIHQFSDIANFQDYHGLKKFRQAIAHFMGKARGGRVTFDPERVVMSGGATGANETIIFCLADPGDVFLIPSPYYAAFDRDLRWRTGVEIIPVPCSSSDNFKLTVDAAEWAYKKAQESNKKVKGLILTNPSNPLGTMLDKDTLTNLVRFVTRKNIHLVVDEIYAATVFAGGDFVSVAEVVNDVDISEVNVDLIHIVYSLSKDMGLPGFRVGIVYSFNDSVVSCARKMSSFGLVSSQTQLMLASMLSDDQFVDNFLMESSRRLGIRHKVFTTGIKKADIACLTSNAGLFAWMDLRHLLRDRNSFESEIELWHIIIDRVKLNVSPGSSFRCTEPGWFRICFANMDDDTLHVALGRIQDFVSKNKNKIVEKASENDQVIQNKSAKKLKWTQTNLRLSFRRLYEDGLSSPGIMSPHSPLLRA

SEQ ID NO: 1656 - protein, 656 aa, Burkholderia mallei ATCC 23344
MCGITGFVGPVACAPQTARATLARMTDSLAHRGPDDTGLWIDHDAGVALGHRRLSIVDLSEHGHQPMLSACGRYAMTFNGEIYNFRQLRSELEREHRAPEWRGHSDSEVLLAAFCAWGVDRALQKAVGMFALALWNRESRVLTLARDRIGEKPLYYGRIGGSFVFGSELKALRRFPGFDAHPIDRDALCLYLRHASVPAPYTIYEGIRKLPPGTYAQLEDLAEAPAPRRYWSLERAIAAGRANPFDGDANAAVAQLDYVLRDAIAEQSVADVPLGAFLSGGVDSSVIVALMQTQTAQPVQTFTIGFHEAGYDEAGYAKAVARHLGTSHTELYVKPADVLATVPRMPCVYDEPFADSSQIPTLLVSELTRRHVKVSLSGDGGDELFGGYTRYFLTPRLWGRLRRVPAAVRMRIAAALHALRPDHADQIASLVQGAWSASAQRDASPRVGDRLHKLANVMTADSRASLYRLLMSSVHHPERFTLAGHEPQTLIDTPGAWPAGLSFAEQAMAVDTLTYLPTDILTKVDRAAMAVSLETRMPFLDHRVVEFAWRLPEALRIPDGQDKWLLRKLLYRYVPRPLIDRPKQGFCAPVGAWLRGELSDWAAELLRPARLRDEGYLDAARVERLWRQHQSGRMNWQHPLWTVLMFQAWLERQRAE

SEQ ID NO: 1657 - protein, 313 aa, Yarrowia lipolytica CLIB122
MPIITETFKLNDGRSIPALGLGTASDANVEEVTYAAIKDGYKHIDTAYIYKSEEAIGKGIKRAIADGLIKREELFVTTKVWPTFHGRVKESLDYSLKDLGLDYVDLLLVHWPAALHPDPNDRHAYVPKNADGSAHYTDNNDWISIYEELEKEQAAGRTKSIGVSNVSEKYLKELLKRVKTVPAVNQFENHPYLPQKKEIEFNKKHGILVTAYSPLGSSNGKIKLHENPVVAEIAKKHNATTGSVLINWHISQGRSVIPKTRSVERVKANAQKVDLDSDDLAKLDKIWEQTGTQRAIGLDWLDKAGDNLGFEDK

SEQ ID NO: 1658 - protein, 549 aa, Mycobacterium sp. 'graecum DL049'
IRRNHFAMAKTIAYDEEARRGLERGLNSLADAVKVTLGPKGRNVVLEKKWGAPTITNDGVSIAKEIELEDPYEKIGAELVKEVAKKTDDVAGDGTTTATVLAQALVREGLRNVAAGANPMALKRGIEKAVEKVTETLLKSAKEVETKDQISATAAISAGDSQIGELIAEAMDKVGNEGVITVEESNTFGLQLELTEGMRFDKGYISGYFVTDAERQEAVLEEPYILLVSSKVSTVKDLLPLLEKVIQSGKPLLIIAEDVEGEALSTLVVNKIRGTFKSVAVKAPGFGDRRKAMLQDMAILTGGQVVSEEVGLSLETADVSLLGKARKVVVTKDETTIVEGAGDSDAIAGRVSQIRAEIENSDSDYDREKLQERLAKLAGGVAVIKAGAATEVELKERKHRIEDAVRNAKAAVEEGIIPGGGVALLQASKAAEIEGLEGDELTGAQIVLAACTAPLKQIAINAGLEGGVVAEKVAGLPAGQGLNAANDEYVDMVEAGIIDPAKVTRSALQNAASIAALFLTTEAVIADKPEPVKAPAGGGDMDGMGGMDF

SEQ ID NO: 1659 - protein, 369 aa, Mesorhizobium loti MAFF303099
MFAPFKLRDMKLQNRVVVSPMAQYKAVDGCPTDWHFTHYAERAKGGAGLIYIEMTCVSPEGRITPGCPGFYAPEHEVAWKRLVDFVHSETEAKICAQIGHSGAKGSTRLGWEGTDVPLASGNWPVMAASAVAWSPENQVPKAMDRADMDLVRNQFVVSAEMAERCGFDMLEIHAAHGYLLSSFITPVTNRRTDEYGGSLENRMRYPLEIFHAVRAAWPAEKPISMRISANDWVGIEGVTPADAVEIARLLHEAGVDICDVSAGQTSVSAKPIYGRMFQTPFSDRIRNEVGMATMAVGNIYEPDHVNSILMAGRADLVALARPHLADPYWTLHAAVTLGDRGVKWPDPYLPGRDQIYRLAERDAAAGLKV

SEQ ID NO: 1660 - protein, 349 aa, Pseudomonas syringae pv. syringae B728a
MTTIFDPITLGDLQLPNRIIMAPLTRCRADEGRVPNAMMAEYYVQRASAGLILTEATSVTPMGVGYPDTPGIWSNDQVRGWSNITKAVHNAGGRIALQLWHVGRISHPSYLNGETPVAPSAIAAEGHVSLMRPITPLPVPRALELAEIGDIVEAYRVGAENAKAAGFDGVEVHGANGYLLEQFLLTGTNQRTDEYGGSVENRARLLLEVTDAVIDVWGAGRVGVHLSPRFDMHDMSDANRAETFSYVAKELGKRGIAFICAREHDAEDSLGPQLKKDFGGVYIANEKFTKDSANAWLAEGKADAIAFGVPYIANPDLPERLASDAPLNEAHPETFYAKGPVGYIDYPRL

SEQ ID NO: 1661 - protein, 401 aa, Cryptococcus neoformans var. neoformans JEC21
MSTSTRRHVLEDKLANHKADPNAAANAGQVQERTTKGSSSSAPRKVRFNVGNNYHVVDVIGEGAYGVVASAVHRPSGTKVAIKKIAPFDHSMFALRTLRELKLLKYFAEEGVSENIISVLDIIKPPSYDTFKEVYLVQELLETDLHRVIRTQDLSDDHCQYFLYQTCRALKALHSAEIIHRDLKPSNLLLNANCDLKVCDFGLARSTQTAFPAEGNNQGFMTEYVATRWYRAPEVMLSFRMYTKSIDVWSVGCILAEMLSGKPLFPGKDYHNQLALILDVLGTPTIDEFHAITSKRSKDYIRSLPFRKKRTFESIYPSANPLAIDFLRKTLTFDPRKRYTVEQCLAHPYLDAYHDPEDEPSAKPLPPSFFEFDMMKDDISREELKRLLYEEIMGFRPVLEG

SEQ ID NO: 1662 - protein, 541 aa, Clostridium thermocellum ATCC 27405
MAKQIKFGEEARRALERGVNQLADTVKVTLGPKGRNVVLDKKFGSPMITNDGVTIAKEIELEDPFENMGAQLVKEVATKTNDVAGDGTTTATLLAQAIIREGLKNVAAGANPMLLKKGIAKAVDAAVEGIKEISQKVKGKEDIARVASISANDEVIGELIADAMEKVTNDGVITVEEAKTMGTNLEIVEGMQFDRGYVSPYMVTDTEKMEAVLDEPYILITDKKISNIQDILPLLEQIVQQGKKLVIIAEDVEGEALATLLVNKLRGTFTCVAVKAPGFGDRRKAMLEDIAILTGGQVITSDLGLELKDTTVEQLGRARQVKVQKENTIIVDGAGDPKEIQKRIASIKSQIEETTSDFDREKLQERLAKLAGGVAVIQVGAATETEMKEKKLRIEDALAATKAAVEEGIVAGGGTALVNVIPKVAKVLDTVSGDEKTGVQIILRALEEPVRQIAENAGLEGSVIVEKVKASEPGIGFDAYNEKYVNMIEAGIVDPAKVTRSALQNAASVASMVLTTESVVADIPEKETSGGPGGAGMGGMY

SEQ ID NO: 1663 - protein, 243 aa, Cucumis sativus
DDVGIPINYRHMEGFGVQAYSLINKSGKARLVKFHWKPTCGVKSMLEEEAIRIGGTNHSHATQDLYESIAAGNFPEWRLYIQTIDYDDQNNFDFEPLDTTIEWPEDVIPLQPVGRLVLNKNIDNFFAENEMLAFSMSLVPGIHYSDDKMLQARSFAYADTQRHRLGPNYLQLPVNAPKCPHHNNHHEGFMNFMHRDEEVNYFPSRYDPCRHAEKFPMPPNVLSGKRERCVIPKENHNFKHAGS

SEQ ID NO: 1664 - protein, 466 aa, Bacillus halodurans C-125
MTKDTVTYRFPEGFWWGSATSATQTEGATHRDGKGKNIWDHWYEVEPSRFFQGVGPQDTSQFYERYKEDIQLMKEVGHNSFRFSISWSRLIPDGRGEVNPKGVEFYNNVIDELLGQGIEPFVNLFHFDMPMELQKIGGWANREVVDAYEAYAKTCFERFGDRVKKWFTHNEPIVPVEGGYLYDFHYPNEVDFEKAIQVGYHTVLSSAKAIRAYKQLNQGGKIGIILNLTPSYPRSNHPADLKAAKIADAFFNRSFLDPSVKGEFPEELVQILKEEGFMPIIEEEDLEIIRQHTVDLLGVNYYQPRRVKAKETLPNPDAPFMPERYFDHYAMPGRKMNVHRGWEIYEKGIYDILINLKEHYGNIECFISENGMGVEGEEKFRDENGVIHDDYRIEFIQDHLKWVHRAIQEGSNVKGYHLWTFMDNWSWANAYKNRYGLVSVNLDKNGERTIKKSGKWYKTLSENNGF

SEQ ID NO: 1665 - protein, 302 aa, Triticum aestivum
MVLSRAASDTDVSVHSTFASRYVRSSLPRYRMPENSIPKEAAYQIINDELMLDGNPRLNLASFVTTWMEPECDKLIMASINKNYVDMDEYPVTTDLQNRCVNMIAHLFHAPLGESETAVGVGTVGSSEAIMLAGLAFKRRWQNKRKAEGKPFDKPNIITGANVQVCWEKFARYFEVELKEVKLREGYYVMDPEQAVEMVDENTICVAAILGSTLNGEFEDVKRINDLLEEKNKQTGWETPIHVDAASGGFIAPFLYPELEWDFRLPWVKSINVSGHKYGLVYPGIGCCVWRTKEDLPDELIF

SEQ ID NO: 1666 - protein, 445 aa, Oryza sativa
NRPLWPARRTTRVGRYELGKTIGEGSFAKVKVARDTRTGDTLAIKVLDRNHVLRHKMVEQIKREISTMKLIKHPNVVQLHEVMASKSKIYMVLEYVDGGELFDKIVNSGRLGEDEARRYFHQLINAVDYCHSRGVYHRDLKPENLLLDSHGALKVSDFGLSAFAPQTKEDGLLHTACGTPNYVAPEVLADKGYDGMAADVWSCGIILFVLMAGYLPFDDPNLMTLYKLICKAKVSCPHWFSSGAKKFIKRILDPNPCTRITIAQILEDDWFKKDYKPPLFEQGEDVSLDDVDAAFDCSEENLVAEKREKPESMNAFALISRSQGFNLGNLFEKEMMGMVKRETSFTSQCTPQEIMSKIEEACGPLGFNVRKQNYKMKLKGDKTGRKGYLSVATEVFEVAPSLHMVELRKTGGDTLEFHNFYNNFSSELKDIVWKSESDAKAAKKR

SEQ ID NO: 1667 - protein, 645 aa, Bacillus anthracis str. A2012
MSVINCEEVKRDEFHTEKYYESYNIFGAHIVTEDEMRGVRFTVWAPHAKAMSVVGDFNEWDYEQHKMLQVTEEGIWSLFIPHIEEREIYKYAIETMAGDVIFKADPYAVYAEVRPNTASVVFDIKGYEWNDKNWSRKKKKKSVYKEAMTVYELHFGSWKKKEDGTLYSYREMAEELIPYVVEHQFTHIEIMPLVEHPYDRSWGYQGTGYYAATSRFGTPHDLMHFVDECHKYGIGVILDWVPGHFCKDAHGLYLFDGTPTYEYKDKDVQENPVWGTVNFDLGKREVRNFLISNALFWMRYFHIDGFRVDAVANMLYWNKEGQEQSNEHAVSFLRELNEAVFAEDEDFLMTAEDSTAWPLVTAPTYEGGLGFNYKWNMGWMNDVLKYMECAPEYRKYIHDKMTFSLLYAYSENFILPLSHDEVVHGKKSLLNKMPGDYWDKFAQLRLLYGYFFTHPGKKLLFMGGEFGQFDEWKDLEDLDWNLHDFEMHRYMHDYFKELIALYKRSKPLWQLDHSREGFQWIDANNNEQSIFSFIRQGDKQEDALVVVCNFTKATYENYKVGVPDFEYYNEVLNSDAEQYGGSGQVNKKRLKTFQEPYHNQTAHVEITIPPFGVSILRPVKTRKGSKKQDGSKTKVRSNVTSRGKR

SEQ ID NO: 1668 - protein, 337 aa, Thermoanaerobacter tengcongensis MB4
MSILHTPLKIKDITIKNRIMMSPMCMYTASTEGMPNDWHIVHYATRAIGGVGLIMQEATAVESRGRITDRDLGIWNDEQAEELKKIVDICKANGAVMGIQLAHAGRKCNIPYEDVVGPSPIKAGDQYKLPRELTIDEIKSIVKAFGEAAKRANLAGYDVVEIHAAHGYLIHEFLSPLSNKRKDEYGNSIENRARFLIEVIDEVRKNWPQNKPIFVRVSADDYIEGGINIDMMVEYINMIKDKVDVIDVSSGGLLNVDINPYPGYQVKYAETIKKRCNIKTCAVGLITTQELAEEILSNERADLVALGRELLRNPYWVLHTYTSKEDWPKQYERAFKN

SEQ ID NO: 1669 - protein, 115 aa, Zea mays
  misc_feature (98)..(98): Xaa can be any naturally occurring amino acid
  misc_feature (100)..(100): Xaa can be any naturally occurring amino acid
HASSNTLDGLNGFDGTDTHYFHSGPRGHHWMWDSRLFNYGNWEVLRFLLSNARWWLEEYKFDGFRFDGVTSMMYTHHGLQVTFTGNFNEYFGFATDVXAXVYLMLVNDLIHGLYP

SEQ ID NO: 1670 - protein, 775 aa, Schizosaccharomyces pombe
MEKLATPFFYLNKKETKHSDWVEPFTTFVSRIYGNSVDVEDQIKAFNTLRENAADVDDTVAGKDILYSYYGQLDYLSFRFPTGGNGINISFEWSDILDPDADFVKQSSLAFEKASVLFNLVSLLSRMAANHASAYTVDDYKAAANCLQCASGIAKLLRESFIHAPGRDLDSNFLLGIYNLFLGQAQECVLGHMSFSASDSNMNYSLAAKIASSAATLYDSCVHAFESMEPACNPNFIRLASAKKAALEGFSSYFMARAQLEKSKQGLAIGYLQQAKSILSSAQKLFNGIKLSTDFIHKPSLSDYPQTISTFIKSSLSHLLKTAEKDNDFVFHDLVVKEVELPKISPLQALPPLPLEKLYGSQDGFETAKKIVGDDLFKAFVPSAVTTASSLYSEETAKVFRAEQAEVERQNTQMATVFASLDLSRLQEITHSDSKTNFIPKELIEARSQLISFNPTFKIHELFAKSTKLKQIIAKIKSDLEVEANENAKMKAKLGPSWTLSDSLEFAAPYQSELNNYLKTLAEASATDSAISQQYALVKDDVETLCNSSKISALLESSISSTDNSGQSLLDIPIEQEEQERDMKIQLDLLEELQSRVQKLVPERQTTLQALQQKCLQDDISESLMQNSKRKDSALDTNQLFELELKKFDPLRNRLHASYRQQQLLLNEMRNVTQKLKQNPEFLRKMEVYNNQFSKNKELCSNLLSSSLTAKAISEGVSKGLEYYKTVEQRLAEINKTLGEQLLLRRKQGATCLSKLSSSSSSHTSISSNMRNLHI

SEQ ID NO: 1671 - protein, 135 aa, Ananas comosus
MADEQPKKPVPAAEEAPAAEAEAEEEEGLHLEDDQEPREHPIMGGIYDAPLNNENGFDKEDLARFAVREYNNKNNALLEFVRVVKAKEQVVSGMMHYLTVEVNDAGKKKLYEAKVWEQVWMNFRQLQEFTYLGDA

SEQ ID NO: 1672 - protein, 477 aa, Bacillus halodurans C-125
MSKHSFPEGFLWGGAIAANQAEGAYLEDGKGLTLVDLLPTGQKRWDVMLGKLDSFTPLEGEFYPSHEAIDFYHRYQEDVALLAEMGFKAFRLSISWARIFPNGDDPEPNEKGLQFYDDLFDELLKYNIQPVVTMAHFDVPVHLIESYGGWRSRKLVGLFETYAKTILSRYKDKVKYWMTFNEINMLLHLPFVGAGLVFKEGENKKQIQYQAAHHQLVASSLAVKACHELIPDAKIGCMLAAGATYPYTCHPNDVFEAMTKDRESFFFIDVQSRGEYPGYAKRFFRDHNIVIDMEEGDEALLKNHTVDYIGFSYYASRVTSTDPEVLKNITSGNVFGSVENPYLEKSEWGWTIDPKGFRTTANQLYDRYQKPLFVVENGLGAVDDVTLEGEINDEYRIDYLRKHIAEMAEAIADGVDIIGYTSWGPIDVVSASTGEMKKRYGYIYVDRDNEGKGSLKRMKKKSFHWYKKVIETNGEKR

SEQ ID NO: 1673 - protein, 251 aa, Escherichia coli CFT073
MNLNSIPAFDDNYIWVLNDEAGRCLIVDPGDAEPVLNAIAANNWQPEAIFLTHHHHDHVGGVKELVKKFPQIVVYGPQETQDKGTTQVVKDSETAFVLGHEFSVIATPGHTLGHICYFSKPYLFCGDTLFSGGCGRLFEGTPSQMYQSIKKLSALPDDTLVCCAHEYTLSNMKFALSILPHDLSINDYYRKVKELRAKNQITLPVILKNERQINVFLRTEDIDLINVINEETLLQQPEERFAWLRSKKDRF

SEQ ID NO: 1674 - protein, 256 aa, Phaseolus vulgaris
MDATTPSELPPGFRFHPTDEELIVYYLCNQATSKPCPASIIPEVDLYKFDPWELPDKTEFGENEWYFFSPRDRKYPNGVRPNRATVSGYWKATGTDKAIYSGSKLVGVKKSLVFYKGRPPKGDKTDWIMHEYRLAESKQPVNRKIGSMRLDDWVLCRIYKKKNTGKTLEHKETHPKVQMTNLIAANNDEQKMMNLPRTWSLTYLLDMNYLGPILSDGSYCSTFDFQISNANIGIDPFVNSQPVEMANNYVSDSGKY

SEQ ID NO: 1675 - protein, 220 aa, Oryza sativa
MALDGKPPVPPPSTPPMDSWACGGRRSKRRGGGGGSSGGSGSSGGGGGGESEEEYLAACLLMLAHGVRDEAEVVGVAAATAKPQHGYECSVCGKVYGSYQALGGHKTSHRKPPSPAAEPAAGEEPSSGGVAGEAKVHRCSICLRTFPSGQALGGHKRLHYEGGAVGDAVKEKNSLKTKAAVATAVLKDFDLNLPAAATTAGDEAESSPPEAKRARLLLLV

SEQ ID NO: 1676 - protein, 544 aa, Neisseria meningitidis MC58
MAAKDVQFGNEVRQKMVNGVNILANAVRVTLGPKGRNVVVDRAFGGPHITKDGVTVAKEIELKDKFENMGAQMVKEVASKTNDVAGDGTTTATVLAQSIVAEGMKYVTAGMNPTDLKRGIDKAVAALVDELKNIAKPCDTSKEIAQVGSISANSDEQVGAIIAEAMEKVGKEGVITVEDGKSLENELDVVEGMQFDRGYLSPYFINDAEKQIAALDNPFVLLFDKKISNIRDLLPVLEQVAKASRPLLIIAEDVEGEALATLVVNNIRGILKTVAVKAPGFGDRRKAMLQDIAILTGGVVISEEVGLSLEKATLDDLGQAKRIEIGKENTTIIDGFGDAAQIEARVAEIRQQIETATSDYDKEKLQERVAKLAGGVAVIKVGAATEVEMKEKKDRVEDALHATRAAVEEGVVAGGGVALLRARAALENLHTGNADQDAGVQIVLRAVESPLRQIVANAGGEPSVVVNKVLEGKGNYGYNAGSGEYGDMIEMGVLDPAKVTRSALQHAASIAGLMLTTDCMIAEIPEDKPAVPDMGGMGGMGGMM

SEQ ID NO: 1677 - protein, 425 aa, Xylella fastidiosa Temecula1
MMSNSPQTPLVTRQRLSEVRYEIRGELARRARELEAEGRKLIKLNIGNPGAFGFRAPEHLQRAIADDMGRTDPYTHQQGLPIAREAIAAAYARRHYPDVDADRVFVGNGVSELIDLSLRALLNPGDEVLVPSPDYPLWSAATILNDGRPVYYRCAPENGFQPDAVEIETLVSSRTRAIVLINPNNPSGANYSQELLERIVAISVKHHLLLLVDEIYDQILYDGAVFVPVAPLAGTHPCITFSGLSKVHRACGWRVGWALLSGSSIQVDNLRNAMDLLGALRLCANVPGQYAIDAAVNGPDTITPLCSPGGPLYETRRAVIDACAASEHLSLVVPAGALYAFPSVVGPAARHFDDYAFALELMNEEGVLVVPGSSFNVPYRDHFRVTLLPDAGLIREVFSRIDRALSRRAEVAEKVVPLKSRSAAA

SEQ ID NO: 1678 - protein, 555 aa, secondary endosymbiont of Bemisia tabaci
MAAKDLKFGNDARKKMLKGVNILANAVKVTLGPKGRNVVLDKSYGAPSITKDGVSVAREIELEDKFENMGAQMVKEVAFKANDAAGDGTTTATVLAQSIVTEGLKAVAAGMNPMDLKRGIDKAVEAAVEELKIIPKPCKDSKEIAQVGTISANADAKVGKLISDAMKRVTNEGVITVEEASGLEDDLIVVEGMQFDRGYLSPYFINKQESSSIEFDNPYILLVDKKISNIRDMLSILEVVAKEGKPLLIIAEDVEGEALATLVVNTMRGIVKVSAVKAPGFGDRRKEMLQDIAVLTHGHVISEETGDSLEKATKENLGNAKRVVITKDATTIIDGAGEKSKIEARIQNIKKQIENATSDYDKEKLQKRVAKLSGGVAVIKVGAPTEIAMKEKKARVEDALQATRAAVEEGVVPGGGVALIRVASKIANSSLKGDTEDQNVGIRVALRAMESPLRQIVVNAGEEASVIANKIKENKGNDNYGYNAQTEAYGDMIEMGILDPTKVTRSALQYAASIAGLMITTECMVTDLPKEEKASDMGAGGMGGIGGMGGMNGMM

SEQ ID NO: 1679 - protein, 547 aa, Pseudomonas syringae pv. syringae B728a
MAAKEVKFGDSGRKKMLAGVNVLADAVKATLGPKGRNVIIEKSFGAPLITKDGVSVAKEIELKDRFENMGAQLVKDVASRANDDAGDGTTTATVLAQAIVNEGLKAVAAGMNPMDLKRGIDKATIAIVAELKKLSKPCTDTKAIAQVGTISANSDHSIGDIIAEAMEKVTKDGVITVEEGSGLENELSVVEGMQFDRGYLSPYFINKPDTMVAELDSPLLLLVDKKISNIREMLPVLEAVAKAGRPLLIVAEDVEGEALATLVVNNMRGIVKVAAVKAPGFGDRRKAMLQDIAVLTGGTVISEEIGLSLETTTLEHLGNAKRVILNKENTTIIDGAGVKTDIDSRISQIRQQIGDTSSDYDKEKLQERLAKLSGGVAVIKVGAGSEVEMKEKKARVEDALHATRAAVEEGVVPGGGVALVRSLQAIEGLKGDNADQDVGIALLRRAVEAPLRQIVANSGDEPSVVVDKVKQGSGNYGYNAASGEYGDMIEMGILDPAKVTRSALQAASSIASLMITTEAMIADVPEDKPAGGGMPDMGGMGGMGGMM

SEQ ID NO: 1680 - protein, 555 aa, secondary endosymbiont of Bemisia tabaci
MAAKDLKFGNDARKKMLKGVNILANAVKVTLGPKGRNVVLDKSYGAPSITKDGVSVAREIELEDKFENMGAQMVKEVAPKANDAAGDGTTTATVLAQSIVTEGLKAVAAGMNPMDLKRGIDKAVEAAVEELKIISKPCKDSKEIAQVGTISANADAKVGKLIPDAMKRVTNEGVITVEEASGLEDDLIVVEGMQFDRGYLSPYFINKQESSSIEFDNPYILLVDKKISNIRDMLSILEVVAKEGKPLLIIAEDVEGEALATLVVNTMRGIVKVSAVKAPGFGDRRKEMLQDIAVLTHGHVISEETGDSLEKATKENLGNAKRVVITKDATTIIDGAGEKSKIEARIQNIKKQIENATSDYDKEKLQERVAKLSGGVAVIKVGAPTEIAMKEKKARVEDALQATRAAVEEGVVPGGGVALIRVASKIANSSLKGDNEDQNVGIRVALRAMESPLRQIVVNAGEEASVVANKIKENKGNDNYGYNAQTEAYGDMIEMGILDPTKVTRSALQYAASIAGLMITTECMVTDLPKEEKASDMGAGGMGGIGGMGGMSGMM

SEQ ID NO: 1681 - protein, 546 aa, Pseudomonas putida KT2440
MAAKDVKFGDSARKKMLVGVNVLADAVKATLGPKGRNVVLAKSFGAPTITKDGVSVAKEIELKDAFENMGAQLVKEVASKANDAAGDGTTTATVLAQAIVNEGLKAVAAGMNPMDLKRGIDKATAAVVAELKNLSKPCADSKAIAQVGTISANSDNSIGEIIAEAMEKVGKEGVITVEEGSGLENELSVVEGMQFDRGYLSPYFVNKPDTMVAELEGPLLLLVDKKISNIRELLPVLEAVAKAGRPLLIVAEDVEGEALATLVVNNMRGIVKVAAVKAPGFGDRRKAMLQDIAVLTGGQVISEEIGLSLETATLEHLGNAKRVILSKENTTIIDGAGADTEIEARVKQIRAQIEETSSDYDREKLQERLAKLAGGVAVIKVGAGTEVEMKEKKARVEDALHATRAAVEEGVVPGGGVALVRALAAIIDLKGDNEDQNVGIALLRRAVESPLRQITANAGDEPSVVADKVKQGSGNFGYNAATGEYGDMIEMGILDPAKVTRSALQAAASIGGLMITTEAMVADLPEDKPAAGMPDMGGMGGMGGMM

SEQ ID NO: 1682 - protein, 551 aa, Kineococcus radiotolerans SRS30216
MTDVASQSSAPGDERPVLTNRQGHPVYDNQNQRTVGARGPATLENYQFLEKISHFDRERIPERVVHARGTTAFGYFEAYGSFGDEPISKYTRAKLFQEKGKRTDLAIRFSTVAGGRDSAETLRDPRGFAVKMYTEDGNWDLVGNNLGVFFIRDAIKFPDFIHSQKPDPVTFDRQVPNRVFDFASQTPESLHMFTLVFSPRGIPASYRTQQGFGVNTYKWVNSEGETVLVKYHWHPKQGVKSWTSADAAAVQAQDLGPHTRDLYAAIDAGDYPEWELLVQTMSDEEHPELDFDPLDDTKVWPENLFPLTPIGKMVLNRKPVDFFTESEQIAFGTGVLVDGLDFSDDKMLVGRTFSYSDTQRYRVGPNYLQLPVNAAKVPVRTNQRDGQMAYGVDGRGENPTVNYEPSIIGGLREGTYPTHDEQGPVITGRVTRKRIPRTNDYQQAGERFQLSEDWEKDELVANFVDALSQCIRPIQERMVWHMFMADDEYGRRVGEGLGITADDVRHLEPLQTQTLTEEELQRAANLGKNGPRDVTGLVMTHAVPNERDVRA

SEQ ID NO: 1683 - protein, 154 aa, Zea mays
  misc_feature (125)..(125): Xaa can be any naturally occurring amino acid
MSLVRRSSVFDPFSVDLFDPFDSMFRSIVPPSLSSSAASETAAFASARIDWKETPEAHVFKADLPGVKKEEVKVEVEDGNVLLISGQRSREKEDKGDKWHRVERSSGQFVRRFRLPENAKTEEVXAALENGVLTVTVPKAEVKKPEVKSIQISG

SEQ ID NO: 1684 - protein, 682 aa, Pisum sativum
MSSGGCSIVWFRRDLRVEDNPALAAGVRAGAVVGVFIWAPEEEGQYYPGRVSRWWLKNSLSQLDSSLRNLGTPLVTKRSTDSISSLLEVVKSTGATQIFFNHLYDPLSLVRDHRAKEILTAQGITVRSYNSDLLYEPWDVNDEHGQPFTTFDSFWERCLSMPYDPQAPLLPPKRIIPGDVSRCPSDTLVFEDELEKSSNALLARAWSPGWSNANKALTTFINGPLIEYSVNRRKADSATTSFLSPHLHFGEVSVKKVFHLVRIKQVFWANEGNKAGEESVNLFLKSIGLREYSRYISFNHPYSHERPLLGHLKFFPWVVDEGYFKAWRQGRTGYPLVDAGMRELWATGWLHDRIRVVVSSFFVKVLQLPWRWGMKYFWDTLLDADLESDALGWQYISGTLPDGREFDRIDNPQFEGYKCDPNGEYVRRWLPELARLPTEWIHHPWNAPESVLQAAGIELGSNYPLPIVEIDAATVRLEEALIQMWQLEAASRTAAENGTEEGLGDSTESAPIAFPQDIQMEERHEPVRNNPPHGTRRYQDQMVPSMTYSRVRVEDEETSSVRNSAGDSRAEVPTNANTQQNGREPMDQGMLQNVNRNTRQRRNNTTTTFWLRNAAEDSTAESSSSTRRERDGGVVPEWSPQASNFSDQFVDDENGIGATSPYLQRHPQTHQMMSWTRLPQTG

SEQ ID NO: 1685 - protein, 162 aa, Triticum aestivum
  misc_feature (61)..(62): Xaa can be any naturally occurring amino acid
  misc_feature (72)..(72): Xaa can be any naturally occurring amino acid
  misc_feature (87)..(87): Xaa can be any naturally occurring amino acid
  misc_feature (94)..(94): Xaa can be any naturally occurring amino acid
  misc_feature (108)..(108): Xaa can be any naturally occurring amino acid
  misc_feature (117)..(117): Xaa can be any naturally occurring amino acid
QYYQLIRLGFEGYKNIMENCQENATVLKQGLEKTGKFNIVSKDNGVPLVAFSLKDSSRHSXXEISDFLRRFXGWARAGYTIPPNAQXVTVLRRXIREDSNRTSPERLXVLHIEKVLXHQLDPLPPFSQAGTTRVAGRSTKRKWRTTQVFPWKRLPHQEDASL

SEQ ID NO: 1686 - protein, 1390 aa, Cryptococcus neoformans var. neoformans B-3501A
MSLPDAYPPVIATEGSTAFQSHILSLLSVISQHPSPDYPFPSSGDSTLQDNASVTAKKNATLSTFPGKKTPAEDAIERAIIALGDRVWTSERTQAHLVKDVKRDVPAQPGSDLLTPDWTPPVPTLNDSSPDPVCPTCTRPVSSSETSSFTPQQIASFYHPFTAALSTPPPPLPEQMFFPQSVLAAYVSATSDSESAGDSGMSAEKELELLKAQVQDIARVCKAVATGDLTQKIIVPVKGQTMTELKNIINAMVDRLQTFAVEVERVSLEVGTEGKLGGQAVVPNVEGTWKVLTAVVNKLAANLTNQVRSIAKVTKAVAKGDLSETIDVEASGEIAELKTTVNGMVMSLRTLADEVSRVSLEVGSQGKLGGQANVPDVEGVWKDLTVNVNRMCESLTTQVRSIGSVTTAVARGDLSKMIEIEAEGEMAVLKNTVNSMVRQLTVFAKEVTRVALEVGTHGQLGGQAVVPGVEGVWDDLTTNVNKMARNLTDQVREIAMVTKAVARGDLSKTVNADVQGEILDLKCTVNEMLTNMPCKVAQLTVFAAEVTRVSLEVGTEGKLGGQAVVPNVEGTWMVLTDNVNLMALNLTTQVRSVAEVTTAVAAGDLSKKINVAAFGEILELKNTVNNMVDSLRSFSSEVTRVAREVGTDGRLGGQAKVPGVAGTWKDLTDCVNIMAANLTEQVRTIAHATTAVARGDLTQKVVGVKVSGEILDLVNTINNMIDQLAIFAAEVTRVAREVGTEGKLGVQAEVENIEGTWQEITSNVNTMASNLTSQVRAFAQISAAATDGDFTRFITVEASGEMDSLKTKINQMVYNLRESIEKNTKARQEAEMANRSKSEFLANMSHEIRTPMNGIIGMTVLTLESELTRQQRENLMIVSSLAGSLLTIIDDILDISKIEAGRMTMEQIPFSLRVAVFSVLKTLCVKAAQNKLDLIFDVDPTMPDQLIGDPLRLRQVITNLIGNAVKFTTKGQVALSCRVKRYVTVADAVELEFCVADTGIGIKQDKLDVIFDTFAQADGSTTRKYGGTGLGLTISKRLVNLMSGDLWVESEYGQGSRFYFTTVAEMTSVPRDQIIERLSPWSGRSVLFIDTLGDQTGIVEMLQELGLKPIVIHSVNDVYLLQDQGLTVFDTMIVDSLKAAGELRGIEYLRYIPIVLLAPSNKPSGPSNPSFISLPESRRRLLALPSASEQLLSPIPVKDCLEMGINTYYTTPLSLQELSNAIVPALESHQIQPGDTVKDTILSVLLAEDNLVNQKLAVKLMEVAGHKIEVADNGEIALEKYKRRQLARTPFDVILMDVSMPVMGGMEATGLIREFEANEGVPRTPIIALTAHAMIGDKERCLAAGMDEYVTKPLRRGDLLASIAKVLAPKQSASGLEMPTVPIPANIYGR

SEQ ID NO: 1687 - protein, 682 aa, Pisum sativum
MSSGGCSIVWFRRDLRVEDNPALAAGVRAGAVVGVFIWAPEEEGQYYPGRVSRWWLKNSLSQLDSSLRNLGTPLVTKRSTDSISSLLEVVKSTGATQIFFNHLYDPLSLVRDHRAKEILTAQGITVRSYNSDLLYEPWDVNDEHGQPFTTFDSFWERCLSMPYDPQAPLLPPKRIIPGDVSRCPSDTLVFEDELEKSSNALLARAWSPGWSNANKALTTFINGPLIEYSVNRRKADSATTSFLSPHLHFEEVSVKKVFHLVRIKQVFWANEGNKAGEESVNLFLKSIGLREYSRYISFNHPYSHERPLLGHLKFFPWVVDEGYFKAWRQGRTGYPLVDAGMRELWATGWLHDRIRVVVSSFFVKVLQLPWRWGMKYFWDTLLDADLESDALGWQYISGTLPDGREFDRIDNPQFEGYKCDPNGEYVRRWLPELARLPTEWIHHPWNAPESVLQAAGIELGSNYPLPIVEIDAATVRLEEALIQMWQLEAASRTAAENGTEEGLGDSTESAPIAFPQDIQMEERHEPVRNNPPHGTRRYQDQMVPSMTYSRVRVEDEETSSVRNSAGDSRAEVPTNANTQQNGREPMDQGMLQNVNRNTRQRRNNTTTTFWLRNAAEDSTAESSSSTRRERDGGVVPEWSPQASNFSDQFVDDENGIGATSPYLQRHPQTHQMMSWTRLPQTG

SEQ ID NO: 1688 - protein, 484 aa, Glycine max
MGLMDVDQTQLLSKMVIGDGHGEASPYFDGWKAYDENPFHPKENPNGVIQMGLAENQLTSDLVEDWILNNPEASICTPEGINDFRAIANFQDYHGLPEFRNAVAKFMGRTRGNRVTFDPDRIVMSGGATGAHEVTTFCLADPGDAFLVPIPYYPGFDRDLRWRTGIKLVPVMCDSSNNFKLTKQALEDAYEKAKEDNIRVKGLLITNPSNPLGTVMDRNTLRTVMSFINEKRIHLVSDEIYSATVFSHPSFISIAEILEEDTDIECDRNLVHIVYSLSKDMGFPGFRVGIIYSYNDAVVHCARKMSSFGLVSTQTQYLLASMLNDDEFVESFLVESAKRLAQRHRVFTGGLAKVGIKCLQSNAGLFVWMDLRQLLKKPTLDSEMELWRVIIDEVKINVSPGSSFHCTEPGWFRVCYANMDDMAVQIALQRIRNFVLQNKEIMVPNKKHCWHSNLRLSLKTRRFDDIMMSPHSPIPQSPLVKATI

SEQ ID NO: 1689 - protein, 229 aa, Magnolia praecocissima
MARGKIQIKKIDNVTARQVTFSKRRRGLFKKAEELSILCDAEVALIIFSATGKLFEYSSSSMKEIIERHTMHSKNLQKLDQQPSLELQLENSNYNRLSKQVAEKSHLIRQMRGEDIQGLTVEELQKLEKTLETGLSRVMERKAEQIMKEISGLQIKGVKLMEENMRLRQRIIEMSRGDSKGDRQIIESEIVVNEDGQSSDSVTNACNSGAPQDYESSDTSLKLGVPFSS

SEQ ID NO: 1690 - protein, 503 aa, Zea mays
MEGAGRDANPLGGYRIGKTLGIGSFGKVKIAEHILTGHKVAIKILNRRKIRSMEMEEKVKREIKILRLFMHPHIIRLYEVIDTPADIYVVMEYVKSGELFDYIVEKGRLHEEEARRFFQQIISGVEYCHRNMVAHRDLKPENLLLDSKCNIKIADFGLSNVMRDGHFLKTSCGSPNYAAPEVISGKLYAGPEVDVWSCGVILYALLCGTLPFDDENILNLFKKIKGGIYTLPSHLSPSARDLIPRMLVVDPMKRITIREIREHVWFKIQLPRYLAVPPPDTAQQVKKLDEETLNDVIKMGFDKNQLIESLHNRLQNEATVAYYLLMDNRLRTTSGYLGSEFQESMDPSFSQVHAETPTSATEHRQHVFTESPGSGLRQHFASERKWALGLQSRAHPREIISEVLKALQELNVYWKKIGHYNMKCRWSPGCLESMMHNCDGFSAESAIIETDDLIAKSTRIVKFEIQLYKTRDEKYLLDLQRVSGPQLLFLDLCSAFLTQLRVL

SEQ ID NO: 1691 - protein, 204 aa, Euphorbia esula
MASSLAIKRLVSSNLIPSSLRVIRPCVAAQPSSRLFNTNAVRQVDDIDEDDRRIDGPLYGRGGDFLSDVVNPFWPSTNLSRMLNVMEPFIENPFVSRGMSAGIRRNWDARETEDALNLRVDMPGLDKKDVKVSVEKNTLIIKGEGEKESEDEESGRKYSGRIDLPEKMFKTDEIKAEMKNGVLKVVVPKVKEDERADVFHVKIE

SEQ ID NO: 1692 - protein, 373 aa, Zea mays
MDSSGGGGGGAQIKGMATHGGRYVLYNVYGNLFEVSSKYAPPIRPIGRGAYGIVCAAVNSQSGEEVAIKKVGNAFDNHIDAKRTLREIKLLRHMDHENILALKDVIRPPTRENFNDVYIVTELMDTDLHQIVRSNQPLTDDHCQYFLYQLLRGLKYVHSANILHRDLKPSNLFLNANCDLKIADFGLARTTSETDLMTEYVVTRWYRAPELLLNCSQYTAAIDVWSVGCILGEIVTRQPLFPGRDYIQQLKLITELIGSPDDASLGFLRSDNAKRYMKQLPQFPRQDFRLRFRNMSPGAVDLLERMLVFDPSRRITVDEALHHPYLASLHEINDEPTCPAPFSFDFEQPSFTEAHIKELIWRESLAFNPEPPY

SEQ ID NO: 1693 - protein, 798 aa, Xanthomonas oryzae pv. oryzae KACC10331
MSGARLPHVPPAWPAGGDAARSDAASQRLGRGGQQISLSLRTHRCNRACACDGVMSERQGVQEQDREADGVTTEGISEMSQTLQALADGLPVDAFAVLGPHPLADGRRQVRVLAPGAEAMGLIDSRGKLLARMQASAIDGVFEGILSIEGPYRLRIVWPDMVQEIEDPYAFAVTLDESLLLQIAAGDGQALRRALGAQHVQCGEVPGVRFAVWAPHAQRVAVVGDFNGWDVRRHPMRQRIGGFWELFLPRVEAGPRYKYAVTAADGRVLLKADPVARQTELPPATASVVPGTDTFAWTDAAWMAKRDPSAVPAPLSIYEVHAASWRRDGHNQPLDWPTLAEQLIPYVQQLRFTHIELLPITEHPFGGSWGYQPLGLYAPTARHGSPDGFAQFVDACHRAGIGVILDWVSAHFPDDAHGLAQFDGAALYEHADPREGMHRDWNTLIYNYGRPEVTAYLLGSALEWIDHYHLDGLRVDAVASMLYRDYGRAEGEWVPNAHGGRENLEAVAFLRQLNREIAAHFPGVLTIAEESTAWPGVTAAISDGGLGFTHKWNMGWMHDTLSYMQRDPAERAHHHSQLTFGLVYAFDERFVLPISHDEVVHGTGGLLGQMPGDDWRRFANLRAYLALMWAHPGDKLLFMGAEFGQWADWNHDQSLDWHLLEGARHRGVQLLVGDLNATLRRTPALYRGTHRAKGFDWSVADDARNSVLAFIRHDPDGGGVPLLAVSNLTAQPLHDYGVGVPRAGAWREILNTDSAHYGGSNLGNSGRLATEPMGMHGHAQRLRLTLPPLATIYLQAEK

SEQ ID NO: 1694 - protein, 155 aa, Arabidopsis thaliana
MSLIPSFFGNNRRINNNIFDPFSLDVWDPFKELQFPSPSSSAIANARVDWKETAEAHVFKADLPGMKKEEVKVEIEDDSVLKISGERHVEKEEKQDTWHRVERSSGGFSRKFRLPENVKMDQVKASMENGVLTVTVPKVETNKKKAQVKSIDISG

SEQ ID NO: 1695 - protein, 585 aa, Xanthomonas oryzae pv. oryzae KACC10331
MNQRTAITPVWGAWPAGEGQVRFALWAPAAKNVDVVFDTGARSALQAGQDGFFSAVIDCAPGARYRYSIDGGEPVPDPASRWQPEGVHGPSAVQPTDGHAWQNTRWQGRPWDQAVIYELHVGTCGGYAGVQAQLPQLAAMGITAIELMPLSAFPGAHNWGYDGVLPYAPVEAYGTPDDLKALIDAAHGHGLMVLLDVVYNHFGPDGNYLHSYAAPFFNEDKPTPWGAAIDFRKPPVQRYFLDNALMWLHEYGFDGLRLDAVHAISPNAFLDTLRETIETSLPAGRHVHLVLENEANQASQLQRGYTAQWDDDFHNALHVLLTGEEEGYYAAFADKPTEHLARVLGEGFAYQGEPDPRGHVRGEPSGALPPHKFVVFAQNHDQIGNRARGERLSVLVLPQRLRAALALTALTPMIPLFFMGEPWGAKQPFLFFTDFGPPLDEAVREGRRREFAHFAAFADAAQRATIPDPNSHSTFAASRSPIADATHGDGAQWAAWFKALLDVRRQWLVPGVAQARAVRASVLADGALTGTWQLPGGLWHIAFNVGTQAVPMPPLRGRVAHVENVAADTQELPVDGFIAWYEPQS

SEQ ID NO: 1696 - protein, 463 aa, Lactobacillus plantarum WCFS1
MTMVEFPEGFVWGAATSGPQTEGNFHKQHQNVFDYWFATEPEQFDAGVGPDTASNFYNDYDHDLALMAQAGVQGLRTSIQWTRLIDDFETASLNADGVAFYNHVIDSMLAHHITPYINLHHFDLPVALYDKYHGWESKHVVELFVKFAEQCFKLFGDRVDHWYTFNEPKVVVDGQYLYGWHYPQVINGPKAVQVAYNMNLASAKTVARFHELCVRPEQQIGIILNLTPAYAASDDPADLAAAEFAELWSNNLFLDPAVLGHFPEKLVERLTMDGVLWDATPTELAIIAANPVDCLGVNYYHPFRVQRPDISPKSLQPWMPDIYFKEYDMPGRMMNVDRGWEIYPQAMTDIARNIQKNYGNIPWMISENGMGVAGEERFLDKQGVVQDDYRIDFMKEHLTALAKGIAAGSNCQGYFVWSGIDCWSWNHAYHNRYGLIRNDIHTQTKTLKKSAKWFAELGERNGF

SEQ ID NO: 1697 - protein, 305 aa, Bordetella parapertussis 12822
MGHGVIIRENVLQECRIFHPVRFVNTREGFMAQVPVLKLNDGNAMPQLGLGVWQVPNDQAAASVKAALAAGYRSIDTAAIYGNEAGVGEGLRAAGVARKDLFVTTKLWNDRHGYDEAQRAMDESLRKLGLAYVDLFLIHWPVAGSDKFVDAWRAMVAMKEDGRARSIGVSNFTIANLRRLVDETGVVPAVNQVELHPGFAQRELRAFHAEQGIATESWSPLGQGAVMHDATLAGIAARHGKSAAQVTLRWHLQNGLIVIPKSVTPARIQANIDVFDFELSADEMADIDALPEGPRLGPDPATFTG

SEQ ID NO: 1698 - protein, 720 aa, Xanthomonas oryzae pv. oryzae KACC10331
MATRKFTQRSRIREGRPNSLGATWDGLGVNFALYSRNATRVELCLFDDRGREQERIALPEYTDEVWHGYLPDARPGQLYGYRVHGPYAPDAGHRFNHNKLLLDPYAKQIVGELKWAPHLFGYIIGHRDKDLSFDRRDSAAFMPKSAVIDPAFTWGQDRPPQTPWNRTVIYEAHVRGLSMLHPAVPPEERGTFSALKTDELIDHISSLGVTAVELLPVHAFVDDQYLLENGLRNYWGYNTLGFFAPQARYMSTRTVAEFKQMVARLHHAGLEVLLDVVYNHTAEGNELGPTLSFKGIDNASYYRLADDRRFYINDTGTGNTFDLTNVGALRMVMDSLRYWVQEMHVDGFRFDLASILGRERYGFDPSGSFLDAVRQDPVLSQTKLIAEPWDIGPGGYQVGNFPPGWVEWNDKFRDNVRAFWRGDGGQLAELATRLTGSADLFNHSGRRPTASVNFVTAHDGFTLRDLVSYEGKHNLANGEDGRDGSDHNISCNYGVEGETNDPTIKQLRRQQMRNLLATLLLSQGTPMLLAGDEFGHSQNGNNNAYCQDNELTWIDWTAATKAAAADQAAFVRRLIRIRQRYPLLHRARFFDGKFDEALGLKDLTWLAPDGHEMDEAGWHDPEARALMLRLDGRSPATGLREIAANVTLLMLINAASTSVSFTLPAMHDEHWRVLVDTARHGGRVVAGGSEWKASAHSLTLLAVERDRIISSARIVSEGAR

SEQ ID NO: 1699 - protein, 555 aa, secondary endosymbiont of Bemisia tabaci
MAAKDLKFGNDARKKMLKGVNILANAVKVTLGPKGRNVVLDKSYGAPSITKDGVSVAREIELEDKFENMGAQMVKEVASKANDAAGDGTTTATVLAQSIVTEGLKAVAAGMNPMDLKRGIDKAVEAAVEELKIISKPCKDSKEIAQVGTISANADAKVGKLISDAMKRVTNEGVITVEEASGLEDDLIVVEGMQFDRGYLSPYFINKQESSSIEFDNPYILLVDKKISNIRDMLSILEVVAKEGKPLLIIAEDVEGEALATLVVNTMRGIVKVSAVKAPGFGDRRKEMLQDIAVLTHGHVISEETGDSLEKATKENLGNAKRVVITKDATTIIDGAGEKSKIEARIQNIKKQIENATSDYDKEKLQERVAKLSGGVAVIKVGAPTEIAMKEKKARVEDALQATRAAVEEGVVPGGGVALIRVASKIANSSLKGDNEDQNVGIRVALRAMESPLRQIVVNAGEEASVIANKIKENKGNDNYGYNAQTEAYGDMIEMGILDPTQVTRSALQYAASIAGLMITTECMVTDLPKEEKASDMGAGGMGGIGGMGGMNGMM

SEQ ID NO: 1700 - protein, 545 aa, Sodalis glossinidius
MAAKDVKFGNDARVKMLRGVNVLADAVKVTLGPKGRNVVLDKSFGAPVITKDGVSVAREIELEDKFENMGAQMVKEVASKANDAAGDGTTTATVLAQSIVNEGLKAVAAGMNPMDLKRGIDKAVIAAVEELKKLSVPCSDSKAIAQVGTISANADETVGTLIAEAMAKVGKEGVITVEEGSGLQDELDVVEGMQFDRGYLSPYFVNKPETGAVELESPFILLADKKISNIREMLPVLEAVAKAGKPLLIIAEDVEGEALATLVVNTMRGIVKIAAVKAPGFGDRRKAMLRDIAILTAGTVISEEIGLELEKATLEDMGQAKRVVITKDTTTIIDGEGDKALIDSRVTQINQQRDEATSDYDREKLQERVAKLAGGVAVIKVGAATEVEMKEKKARVEDALHATRAAVEEGVVAGGGVALIRVANRIAELRGDNEDQNVGIKVARRAMEAPLRQIVANAGEEPSVIANKVKAGEGNTGYNAATEEYGNMIDMGILDPTKVTRSALQYAASIAGLMITTECMVTDLPKEDKPDLGGAGGMGGMGGMM

SEQ ID NO: 1701 - protein, 555 aa, secondary endosymbiont of Bemisia tabaci
MAAKDLKFGNDARKKMLKGVNILANAVKVTLGPKGRNVVLDKSYGAPSITRDGVSVAREIELEDKFENMGAQMVKEVASKANDAAGDGTTTATVFAQSIVTEGLKAVAAGMNPMDLKRGIDKAVEAAVEELKIISKPCKDSKEIAQVGTISANADAKVGKLISDAMKRITNEGVITVEEASGLEDGLIVVEGMQFDRGYLSPYFINKQESSSIEFDNPYILLVDKKISNIRDMLSILEVVAKEGKPLLIIAEDVEGEALATLVVNTMRGIVKVSAVKAPGFGDRRKEMLQDIAVLTHGHVISEETGDSLEKATKENLGNAKRVVITKDATTIIDGAGEKSKIEARIQNIKKQIENATSDYDKEKLQERVAKLSGGVAVIKVGAPTETAMKEKKARVEDALQATRAAVEEGVVPGGGVALIRVASKIANSSLKGDNEDQNVGIRVALRAMESPLRQIVVNAGEEASVIANKIKENKGNDNYGYNAQTEAYGDMIEMGILDPTKVTRSALQYAASIAGLMITTECMVTDLPKEEKASDMGAGGMGGIGGMGGMNGMM

SEQ ID NO: 1702 - protein, 728 aa, Escherichia coli CFT073
MSDRIDRDVINALIAGHFADPFSVLGMHKTTAGLEVRALLPDATDVWVIEPKTGRKLAKLECLDSRGFFSGVIPRRKNFFRYQLAVVWHGQQNLIDDPYRFGPLIQEMDAWLLSEGTHLRPYETLGAHADTMDGVTGTRFSVWAPNARRVSVVGQFNYWDGRRHPMRLRKESGIWELFIPGAHNGQLYKYEMIDANGNLRLKSDPYAFEAQMRPETASLICSLPEKVVQTEERKKANQFDAPISIYEVHLGSWRRHTDNNFWLSYRELADQLVPYAKWMGFTHLELLPINEHPFDGSWGYQPTGLYAPTRRFGTRDDFRYFIDAAHAAGLNVILDWVPGHFPTDDFALAEFDGTNLYEHSDPREGYHQDWNTLIYNYGRREVSNFLVGNALYWIERFGIDALRVDAVASMIYRDYSRKEGEWIPNEFGGRENLEAIEFLRNTNRILGEQVSGAVTMAEESTDFPGVSRPQDMGGLGFWYKWNLGWMHDTLDYMKLDPIYRQYHHDKLTFGMLYNYTENFVLPLSHDEVVHGKKSILDRMPGDAWQKFANLRAYYGWMWAFPGKKLLFMGNEFAQGREWNHDASLDWHLLEGGDNWHHGVQRLVRDLNHTYRHHKAMHELDFDPYGFEWLVVDDKERSVLIFVRRDKEGNEIIVASNFTPVPRHDYRFGINQPGKWREILNTDSMHYHGSNAGNGGAVHSDEIASHGRQHSLSLTLPPLATIWLVREAE

SEQ ID NO: 1703 - protein, 254 aa, Ipomoea batatas
MRVRFFFYFAYFLITLVFFPSVTLQSYSGGHRQEATGFCGEEGEREDNLIRMATTTLGGISDSASAENSVEIESLARFAVEEHNKKENAMIELVRVVKAEEQVVAGKLHHLTLEVIDAGKRKLYEAKVWLKPWMNFKELQGFNHIEDIPTLTSSDLGARRDCPNTGLKSVPVNDPVVQEAAQHAVKTIQQRSNSLLPYELQEIVHANAEVIDDSAKVHMLIKTKRGEKEEKFSVEVHKNNEGAFLLHHMAPANS

SEQ ID NO: 1704 - protein, 396 aa, Lycopersicon esculentum
MDGSVPQTDTMMSDVAAPPAQQPPPPSQPLAGMDNIPATLSHGGRFIQYNIFGNIFEVTAKYKPPIMPIGKGAYGIVCSALNSETNESVAIKKIANAFDNKIDAKRTLREIKLLRHMDHENIVAIRDIIPPPQREAFNDVYIAYELMDTDLHQIIRSNQGLSEEHCQYFLYQILRGLKYIHSANVLHRDLKPSNLLLNANCDLKICDFGLARVTSETDFMTEYVVTRWYRPPELLLNSSDYTAAIDVWSVGCIFMELMDRKPLFPGRDHVHQLRLIMELIGTPSEAEMEFLNENAKRYIRQLPLYRRQSFTEKFPHVNPAAIDLVEKMLTFDPRRRITVEDALAHPYLTSLHDISDEPICMTPFSFDFEQHALTEEQMKELIYRESIAFNPEYQRM

SEQ ID NO: 1705 - protein, 466 aa, Shigella flexneri 2a str. 301
MDKKQVTDLRSELLDSRFGAKSISTIAESKRFPLHEMRDDVAFQIINDELYLDGNARQNLATFCQTWDDENVHKLMDLSINKNWIDKEEYPQSAAIDLRCVNMVADLWHAPAPKNGQAVGTNTIGSSEACMLGGMAMKWRWRKRMEAAGKPTDKPNLVCGPVQICWHKFARYWDVELREIPMRPGQLFMDPKRMIEACDENTIGVVPTFGVTYTGNYEFPQPLHDALDKFQADTGIDIDMHIDAASGGFLAPFVAPDIVWDFRLPRVKSISASGHKFGLAPLGCGWVIWRDEEALPQELVFNVDYLGGQIGTFAINFSRPAGQVIAQYYEFLRLGREGYTKVQNASYQVAAYLADEIAKLGPYEFICTGRPDEGIPAVCFKLKDGEDPGYTLYDLSERLRLRGWQVPAFTLGGEATDIVVMRIMCRRGFEMDFAELLLEDYKASLKYLSDHPKLQGIAQQNSFKHT

SEQ ID NO: 1706 - protein, 629 aa, Pisum sativum
MGSNRTIVWFRRDLRIEDNPALAAAARDGSVFPVFIWCPKEEGQFYPGRVSRWWLKQSLAHLDQSLKSLGAKLVLIKTDSTLNALLECVNAIQATKVVFNHLYDPVSLVRDHNIKEKLVELGISVKSYNGDLLYEPWELYDEKGHAFTTFDPFWERCLHKQMEPVSLIPPWQLIPAKGKVERCSIEDLGLENELEKPSNALLGRAWSPGWGNANKALTEFMDKQLLNYSKNRQKVGGDSTSLLSPYLHFGELSVRKVFQMARVKQISWGNEGNSVGKESVTLFLRAIGLREYSRYLCFNFPFTHERALLGHLSFFPWNADPSNFKTWRQGRTGYPLVDAGMRELWATGWMHNRIRVIVSSFAVKMLLLPWKWGMKYFWDTLLDADLECDILGWQYISGCLPDGHELERLDDPEILGAKFDPEGEYVRQWLPELARMPTEWIHHPWNAPLSVLRASGVELGQNYPNPIIDIDLAREKLTQAIFKMWEIQAASKASGSEARDEVVVDNENQDIPKVILKDKGPCVTISANDQKVPALPDPKNELPVRKRKKGMEEKGKEQESSVNNEKDSKVSSPDQETCSTADSSACKKQCSTSTYTFSVPQQCSSSSNLKWSWQEQIDMEQSSGKDGPT

SEQ ID NO: 1707 - protein, 496 aa, Nicotiana tabacum
MVLSKTASESDVSIHSTFASRYVRTSLPRFKMPENSIPKEAAYQIINDELMLDGNPRLNLASFVTTWMEPECNKLMMDSINKNYVDMGEYPVTTELQNRCVNMIAHLFNAPLGDGETAVGVGTVGSSEAIMLAGLAFKRKWQNKMKAQGKPCDKPNIVTGANVQVCWEKFARYFEVELKEVKLSDGYYVMDPEKAVEMVDENTICVAAILGSTLNGEFEDVKRLNDLLIEKNKETGWDTPIHVDAASGGFIAPFLYPELEWDFRLPLVKSINVSGHKYGLVYAGIGWAIWRNKEDLPDELIFHINYLGADQPTFTLNFSKGSSQVIAQYYQLIRLGFEGYKNVMENCQENARVLREGLEKSGRFNIISKEIGVPLVAFSLKDNSQHNEFEISETLRRFGWIIPAYTMPPNAQHVTVLRVVIREDFSRTLAERLVIDIEKVLHELDTLPARVNAKLAVAEANGSGVHKKTDREVQLEITAAWKKFVADKKKKTNGVC

SEQ ID NO: 1708 - protein, 181 aa, Coxiella burnetii RSA 493
MTKKQKPSQNEDLNLTTAQGTPISDDQNSLKIGDRGPLLLEDFPFREKLFHFDHERIPERVVHARGFGVHGYFETDVSLSEITMAHLFQKKGEKTPVFVRFSTVVGSQGSPDLARDVRGFAVKFYTKEGNWDLVGNNIPVFFIQDPIKFPDLIHAAKAEPDRGFPQAQTANDNFWENFRYQ

SEQ ID NO: 1709 - protein, 208 aa, Magnolia praecocissima
NRQVTFCKRRNGLLKKAYELSVLCDAEVALIVFSSRGRLYEYANNSVRNTIDRYKKACADSSSLGCVSEANSQYYQQESSKLRQQIALLQNANRHLMGEALSSMTVKELKQLENRLEKGISRIRSKKNELLFAEIEYMQKREVDLQNDNMYLRAKITENERAQQQMGMLPAPEYDVMPGFDSRNFLQVNLMDSSHHYSHQEQTALQLG

SEQ ID NO: 1710 - protein, 598 aa, Pisum sativum
MGMNRTIVWFRRDLRIEDNPALAAAARDGSVFPVFIWCPKEEGQFYPGRVSRWWMKQSLVHLDQSLKSLGAGLVIIKTDSTLKALLECVNAVQATKVVFNHLYDPVSLVRDHNIKEKLVEQGVSVQSYNGDLLYEPWEIFDESGHAFTTFDPFWNTCLHMQMKTYSPIPPCQLILAQGKVEKHSIEQLGLEDELEKSSNSSLGRSWSPGWSKSDKALAEFIENYLLHYSGNRLNLGGDSTSLLSPYIHFGELSVRKVFQLARTKQILWTHEGNIIGEESATLFLRAIGFREYSRYLCFSFPFTLERPLLGNLKFFPWNNDPSNFKAWRQGRTGYPLVDAGMRELWATGWIHNKMRVIVSSFAVKMLLIPWKWGMKYFWDTLLDADLESDILGWQYISGSLPDGHKLERLDDPEVLGRKYDPAGEYIRQWLPELARMPAEWIHHPWDAPLTVLTASGVELGQNYPKPIIDIDLAREQLTQAILKMWETEAATEASSSQDRHEVVDENEKLLIPKVFLKDKVPRGATSANDQTVPILQNLKSDDPPNKRQKCTAEEDRKPDKSRNRSDHTEVSCIDQEDCSTAESSSKRQSSSTSSFSVP

SEQ ID NO: 1711 - protein, 494 aa, Brassica juncea
MVLSRAATESGENVCSTFGSRYVRTALPKHKIGESSIPKEAAYQIIKDELMLDGNPRLNLASFVTTWMEPECDKLIMESINKNYVDMDEYPVTTELQNRCVNMIARLFNAPLEETETAMGVGTVGSSEAIMLAGLAFKRNWQNKRKAEGKPYDKPNIVTGANVQVCWEKFARYFEVELKEVKLSEGYYVMDPDKAAEMVDENTICVAAILGSTLNGEFEDVKRLNDLLVKKNEETGWNTPIHVDAASGGFIAPFIYPELEWDFRLPLVKSINVSGHKYGLVYAGIGWVVWRTQQDLPDELIFHINYLGADQPTFTLNFSKGSSQIIAQYYQLIRLGFEGYKNVMENCRENMVVLREGIEKTERFNIVSKEVGVPLVAFSLKDHSFHNEFEISEMLRRFGWIVPAYTMPADAQHITVLRVVIREDFSRTLAERLVADIVKVLHELDTLPSKISKKMGAEDFGNVKGKKVDRDVLMEVIVGWRKFVKDRKKMNGVC

SEQ ID NO: 1712 - protein, 223 aa, Fusobacterium nucleatum subsp. vincentii ATCC 49256
MMESLDDPHSVYFTKEEMRSFQEDIKGKYVGVGMVIQKKVGEPLTVVSPVEDGPAYKAGIKPKDKIIEIDGESTYNLTSEEASKRLKGKANTTVKVKVFREVNKMTKIFELKRETIELKYVKSKMLDGGIGYLRLTQFGDNVYPDMKKALEDLQAKGMKGLIFDLRSNPGGELGQSIKIASMFIEKGKIVSTDKKGRRKYIYKRRPLLWEILLWYSKTGVVMP

SEQ ID NO: 1713 - protein, 482 aa, Pseudomonas aeruginosa UCBPP-PA14
MEEKTRLTTAAGAPVVDNQNVQTAGPRGPMLLQDVWFLEKLAHFDREVIPERRMHAKGSAAYGTFTVTHDITPYTRAKIFSQVGKKTDMFLRFSTVAGERGAADAERDIRGFSMRFYTEQGNWDLVGNNTPVFYLRDPLKFPDLNHVVKRDPRTNLRNATFKWDFFSHLPESLHQLTIDFSDRGLPKSYRHIHGFGSHTFSFINANNERFWVKFHFKTQQGIENLTNAEAAEVIAQDRESSQRDLYESIEKGDFPRWKMYVQIMPEKEAATYRYNPFDLTKVWPHGDYPLIEVGFFELNRNPDNYFAEVEQAAFTPANVVPGIGFSPDKMLQGRLFSYGDAHRYRLGVNHHQIPVNAARCPHQVYHRDGGMRVDGNNAHQRVTYEPNSFNQWQEQPDFSEPPLSLEGAADHWNHRVDDDYYSQPAALFHLFTDEQKQRLFANIAEDIRDVPEQIQRRQIGLFLKVDPAYGKGVADALGLKLD

SEQ ID NO: 1714 - protein, 132 aa, Zea mays
  misc_feature (69)..(69): Xaa can be any naturally occurring amino acid
  misc_feature (114)..(114): Xaa can be any naturally occurring amino acid
RIVSFVAVILELLALTTLRCTHNAQRESITNNTDMLASCIKDVPMNKNKLQLQELARFGGYDHNQTANXALMGIEKLVNAKTQIGACTMYYLTIETKDGVGKKLYETNVWEKPXENFKQLQEFKPVDKGASA

SEQ ID NO: 1715 - protein, 533 aa, Propionibacterium granulosum
MAKLIEFNIEARRALEQGMNTLADAVKVTLGPKGRNVVLEKSWGAPTITNDGVSIAKEIELEDPYEKIGAELVKEVAKKTDDVAGDGTTTATVLAQAMVREGLRNVTAGANPMGLKKGIEAAVEVISARLSEMAIDIETKEHIAATATISAGDPSVGETIAEAMDKVGKEGVITVEESNTFGIDLELTEGMRFDKGYISPYFVTDTESMEAVLEDPYILIVNSKISSLKDILPVLEQVMKSSKPLLVIAEDVEGEALAGLIVNKIRGTFKSVAVKAPGFGDRRKAMLADIAILTGGQVISEEVGLSLDAVTLDLLGKARSVRVTKDECTIVDGAGDAEQIAGRVTQIRKEIENSDSDYDREKLQERLAKLAGGVAVIKVGAATEVELKERKHRIEDAVRNAKAAVEEGIIPGGGVALMQASKAATIEGLEGDEATGAQIVLSACSAPLKQIATNAGLEGGVIAEKVANLPAGEGLNAATGEYVDMVKAGIIDPAKVTRSALQNASSIAALFLTTEAVIADKPEPAPAPAGDPG

SEQ ID NO: 1716 - protein, 400 aa, Candida glabrata CBS138
MPFKHDFTPVALKDTNLFKPLKVGNTEVLQRVAMAPLSRFRADPQGNVPNKNWTEEYYRQRSQRPGTMIITEATFISAQAGGYDAAPGIWTEEQMEQWKKIFKAIHDNKSFVWVQMWALGRQAFPNNMARDGLRLDAPSADLYMSDKQKEVAKENNIAQHELTKEDIKQYIKDYVKAAKNSVESGADGVEIHSANGYLLNQFIDPKSNRRTDEYGGSIENRCRFALEVVDAVVDAIGAERTGIRLSPYGLFGNMSGGFEPSIVAHYAYLIGELEKRGIAGKRLAYIHLVEPSVTDLMLVEDQGEYKEGTNDFAYSIWKGPIIRAGNYALHPELVKEQVKDPRTLIAYGRYFISNPDIIDRLENGLPLNEQDRPTFYTPTAEGYIDYPNYNDALQLGWDKQ

SEQ ID NO: 1717 - protein, 228 aa, Sorghum bicolor
KVQLKRIENKINRQVTFSKRRNGLLKKAHEISVLCDAEVAVIVFSPKGKLYEYATDSRMDKILERYERYSYAEKALISAESESEGNWCHEYRKLKAKIETIQKCHKHLMGEDLESLNPKELQQLEQQLESSLKHIRSRKSHLMAESISELQKKERSLQEENKALQKELAERQKAAASRQQQQGAVGPADTDPGPDKLIIVLLHDEAGSAGSAASTKHMLPAADNRRER

SEQ ID NO: 1718 - protein, 394 aa, Lycopersicon esculentum
MDGSAPQTDTVMSDAAAGQQPAMPPLPMAGMENIPATLSHGGRFIQYNIFGNIFEVTAKYKPPIMPIGKGAYGIVCSALNSETNEHVAIKKIANAFDNKIDAKRTLREIKLLRHMDHENIVAIRDIIPPPQREAFNDVYIAYELMDTDLHQIIRSNQGLSEEHCQYFLYQILRGLKYIHSANVLHRDLKPSNLLLNANCDLKICDFGLARVTSETDFMTEYVVTRWYRPPELLLNSSDYTAAIDVWSVGCIFMELMDRKPLFPGRDHVHQLRLLMELIGTPSEAEMEFLNENAKRYIRQLPLYRRQSFVEKFPHVNPAAIDLVEKMLTFDPRRRLTVEDALAHPYLTSLHDISDEPVCMTPFSFDFEQHALTEEQMKELIYREGLAFNPEYQHM

SEQ ID NO: 1719 - protein, 490 aa, Candida glabrata CBS138
MSRVETRNVTTEFQKDGLDEVDLVQANILAAGLDKKTVRVVNGLGKLMGSKEMVQVEFNKDKPTSKISASTPHISEQPWTLNNWHEHLNWLNLVLVCGLPMIGWYFVVSGKAKLTWQMALFATFYYALGGISITAGYHRLWSHRAYSARLPLKIFFAFFGAASVQGSIKWWGHSHRIHHRYTDTLRDPYDARQGLWYSHMGWMLLKPNPKYKARADISDLTDDWVVRFQHKHYIPMMLLSGFVLPCLLGGYLLNDYLGGLIYGGFIRIFVIQQATFCINSMAHYLGTQPFDDRRTPRDNWITAIVTFGEGYHNFHHEFPSDYRNAIKWYQYDPTKVFIYLTSLFGLSYDLKTFSQNIIQQALIQQRQKKIDRDSKSVNWGPKLADLPAWTKEEFLEKNRENDGLVIVGGIVHDVSGYITEHPGGEKLLKNALGKDATKAFSGGVYRHSNAAHNTLATMRVAVMKDNKETAMRFAQKRGERAERVERAHMN

SEQ ID NO: 1720 - protein, 546 aa, Wigglesworthia glossinidia
MAAKDVKFGNDARSKMLRGVNVLADAVKVTLGPKGRNVVLDKSFGSPMITKDGVSVAREVELEDKFENMGAQMLKEVASKANDAAGDGTTTATVLAQSIVNEGLKAVAAGMNPMDLKRGIDKAVIGAVAELKKLSVPCSDSKSIAQVGTISANADKTVGTLIAEAMEKVGKEGVITVEEGSGLQDELDVVEGMQFDRGYLSPYFVNKPEARSVELDNPFILLSDKKISNIREMLPILESVAKAGKPLLIIAEDVEGEALATLVVNNMRGIVKVAAVKAPGFGDRRKAMLQDIAILTSGTVISEEMGLDLEKSTLEDMGQAKRVVITKDTTTIIDGTGNKSMISSRVSQINQERDEATSDYDKEKLQERVAKLAGGVAVIKVGAATEVEMKEKKARVEDALHATRAAVEEGVVAGGGVALIRVANRIVNLRGENEDQNVGIRVARRAMEAPLRQIVANAGEEPSVIANKVKAGEGNTGYNAATEVYGNMIDMGILDPTKVTRSALQYAASIAGLMITTECMITDLPKEEKPDLSGAGAGMGGMGGMM

SEQ ID NO: 1721 - protein, 464 aa, Zea mays
MVNGEQRADAECTRASLLGRYEIGRTLGEGNFGKVKYARHIATGGHFAIKILDRSKILSLRIDDQIRREIGTLKLLKHPNVVRLHEVAASKTKIYMVLEFVNGGELFDKIAIKGKLSEHEGRRLFQQLIDGVSYCHDRGVYHRDLKPENVLVDRKGTIKISDFGLSALPQHLGSDGLLHTTCGSPNYIAPEVLQNRGYDGSLSDLWSCGVILYVMLVGCLPFDDRNLVVLYQKIFKGDCQIPKWLSPAAQDLLKRILQPNPMKRINVAGIREHEWFKKDYVPAVPHDDDEDVLPSPAPSIKEPIDEPAQEKCTPINAFQLIGMASSLDLSGFFEEEDAAQRKIRFTSTHPPKDLFDKIESVVMEMGFKVHRGAGKLKVLKNSKCSRNSRNPSSLLVCTEVFELGPSLYVVELRKSHGDSTLYRQLCERLSDELGACKTDQIARTESSSDDLSSLDGEAFPLSGF

SEQ ID NO: 1722 - protein, 252 aa, Neisseria meningitidis MC58
MKITPVKALTDNYIWMIQHGNHAVCVDPSEPSPVLEFLVRNRLMLAQTWVTHPHPDHEGGAAALWRGYMESPVYGESDIEAATHTVTAGTQFTFGDGQVTVWATPGHTDRHTSYLLETSDGIHVFCGDTLFSAGCGRVFTGTIEQLYDSFQRFNRLPENTLFYPAHEYTAANLRFAAHIEPDNADIQTALKAAAHTPTLPVTLAHERRVNPFLRVDLPHVRDRAEALSGKTLNSSLDTFVALRELKNQYRTK

SEQ ID NO: 1723 - protein, 493 aa, Brassica juncea
MVLSKTASESDVSIHSTFASRYVRTSLPRFEMPENSIPKEAAYQIINDELMLDGNPRLNLASFVTTWMEPECDKLMMESINKNYVDMDEYPVTTELQNRCVNMIARLFNAPLGDGEAAVGVGTVGSSEAIMLAGLAFKRQWQNKRKAQGLPYDKPNIVTGANVQVCWEKFARYFEVELKEVKLREGYYVMDPEKAVEMVDENTICVAAILGSTLTGEFEDVKLLNDLLVEKNKQTGWDTGIHVDAASGGFIAPFLYPELEWDFRLPLVKSINVSGHKYGLVYAGIGWVVWRTKSDLPDELIFHINYLGADQPTFTLNFSKGSSQVIAQYYQLIRLGFEGYRNVMDNCRENMMVLREGLEKTGRFNIVSKENGVPLVAFSLKDSSRHDEFEVAETLRRFGWIVPAYTMPADAQHVTVLRVVIREDFSRTLAERLVADFEKVLHELDTLPARVQAKMANGNANGVKKTEEETTREVTAYWKKFVEAKKSNKNRIC

SEQ ID NO: 1724 - protein, 465 aa, Oryza sativa
  misc_feature (94)..(94): Xaa can be any naturally occurring amino acid
  misc_feature (287)..(287): Xaa can be any naturally occurring amino acid
  misc_feature (299)..(299): Xaa can be any naturally occurring amino acid
  misc_feature (317)..(317): Xaa can be any naturally occurring amino acid
EGSFAMVKVARDTRTGDTLAIKVLDRNHVLRHKMVEQIKREISTMKLIKHPNVVQLHEVLCYLCRNNSVITTHTLLFFFISSHSMRILHSMCVXQVLASKSKIYMVLEYVDGGELFDKIVNSGRLGEDEARRYFHQLINAVDYCHSRGVYHRDLKPENLLLDSHGALKVSDFGLSAFAPQTKEDGLLHTACGTPNYVAPEVLADKGYDGMAADVWSCGIILFVLMAGYLPFDDPNLMTLYKLICKAKVSCPHWFSSGAKKFIKRILDPNPCTRITIAQILEDDWFNXVDPRAAGYKPPXFEQGEDVSLDDVDAAFDXSEENLVAEKREKPESMNAFALISRSQGFNLGNLFEKEMMGMVKRETSFTSQCTPQEIMSKIEEACGPLGFNVRKQNYKMKLKGDKTGRKGHLSVATEVFEVAPSLHMVELRKTGGDTLEFHNFYNNFSSELKDIVWKSESDAKAAKKR

SEQ ID NO: 1725 - protein, 493 aa, Brassica juncea
MVLSKTASGTDVSVHSTFASRYVRNSLPRFEMPENSIPKEAAYQIINDELMLDGNPRLNLASFVTTWMEPECDKLMMESINKNYVDMDEYPVTTELQNRCVNMIARLFNAPLGDGEAAVGVGTVGSSEAIMLAGLAFKRQWQNKRKAQGLPYDKPNIVTGANVQVCWEKFARYFEVELKEVKLREGYYVMDPEKAVEMVDENTICVAAILGSTLTGEFEDVKLLNDLLVEKNKQTGWDTGNHVDAASGGFIAPFLYPELEWDFRLPLVKSINVSGHKYGLVYAGIGWVVWRTKSDLPDELIFHINYLGADQPTFTLNFSKGSSQVIAQYYQLIRLGFEGYRNVMDNCRENMMVLREGLEKTGRFNIVSKENGVPLVAFSLKDSSRHNEFEVAETLRRFGWIVPAYTVPADAEHVTVLRVVIREDFSRTLAERLVADFEKVLHELDTLPARVRAKMANGKAKVVKQTEEETTREVTAYWKKFVETKKTNQNKIC

SEQ ID NO: 1726 - protein, 430 aa, Oryza sativa (japonica cultivar-group)
MESGGAGGEGETAGWRFGAANPALAVAGSQSIRAAVTRIYRCLDGSGDARPVAPLAHGDPSAFACFRAAPAATDAVAAAAASGKYNYYSPAVGIAPACSAVAAHLSRELPYAVSPADVVLTAGCNHAVEIMMSVLASPGANVLLPRPGYPLYASRAALSGLEFRHFDLLPDSEWEVDLAGVEALADANTVAMVIVNPNNPCGCVYSRDHLAKIAETARKLGIMVISDEVYDHFAFGSKPFVPMGVFGDVAPVMTLGGISKRWMVPGWRLGWIAATDPNGILRNKKIIDSVIDYRAISVDPVTFVQGALPDILAKTDDAFFTNALGVVKKAAEICYEKLKEIDCITCPHKPEGSMFVMAKLDLSSLDGIEDDVDFCSKLAKEESVVICPGSGLGMKNWLRITFAVDPQLLEDGLERTKCFCKRHGKIKEAS

SEQ ID NO: 1727 - protein, 262 aa, Brassica juncea
MVLSHAASDSDVSVHSTFASRYVRTSLPRFKMPENSIPKEAAYQIINDELMLDGNPRLNLASFVTTWMEPECDKLIMASINKNYVDMDEYPVTTELQNRCVNMIAHLFNAPLGRDETAVGVGTVGSSEAIMLAGLAFKRKWQNKRKAEGKPFDKPNIVTGANVQVCWEKFARYFEVELKEVKLSEGYYVMDPEKAVEMVDENTICVAAILGSTLNGEFEDVKLLNDLLVLKNKENGWDTPIHVDAASGGFIAPFLYPELEWD

SEQ ID NO: 1728 - protein, 825 aa, Oryza sativa
MAAPASAVPGSAAGLRAGAVRFPVPAGARSWRAAAELPTSRSLLSGRRFPGAVRVGGSGGRVAVRAAGASGEVMIPEGESDGMPVSAGSDDLQLPALDDELSTEVGAEVEIESSGASDVEGVKRVVEELAAEQKPRVVPPTGDGQKIFQMDSMLNGYKYHLEYRYSLYRRLRSDIDQYEGGLETFSRGYEKFGFNHSAEGVTYREWAPGAHSAALVGDFNNWNPNADRMSKNEFGVWEIFLPNNADGSSPIPHGSRVKVRMETPSGIKDSIPAWIKYSVQAAGEIPYNGIYYDPPEEEKYIFKHPQPKRPKSLRIYETHVGMSSTEPKINTYANFRDEVLPRIKKLGYNAVQIMAIQEHAYYGSFGYHVTNFFAPSSRFGTPEDLKSLIDKAHELGLVVLMDVVHSHASNNTLDGLNGFDGTDTHYFHSGSRGHHWMWDSRLFNYGNWEVLRFLLSNARWWLEEYKFDGFRFDGVTSMMYTHHGLQVAFTGNYSEYFGFATDADAVVYLMLVNDLIHGLYPEAITIGEDVSGMPTFALPVQDGGVGFDYRLHMAVPDKWIELLKQSDESWKMGDIVHTLTNRRWSEKCVTYAESHDQALVGDKTIAFWLMDKDMYDFMALDRPATPSIDRGIALHKMIRLITMGLGGEGYLNFMGNEFGHPEWIDFPRAPQVLPNGKFIPGNNNSYDKCRRRFDLGDADYLRYRGMLEFDRAMQSLEEKYGFMTSDHQYISRKHEEDKMIIFEKGDLVFVFNFHWSNSYFDYRVGCLKPGKYKVVLDSDAGLFGGFGRIHHTAEHFTADCSHDNRPYSFSVYSPSRTCVVYAPAE

SEQ ID NO: 1729 - protein, 416 aa, Saccharomyces cerevisiae
MTTNEEFIRTQIFGTVFEITNRYNDLNPVGMGAFGLVCSATDTLTSQPVAIKKIMKPFSTAVLAKRTYRELKLLKHLRHENLICLQDIFLSPLEDIYFVTELQGTDLHRLLQTRPLEKQFVQYFLYQILRGLKYVHSAGVIHRDLKPSNILINENCDLKICDFGLARIQDPQMTGYVSTRYYRAPEIMLTWQKYDVEVDIWSAGCIFAEMIEGKPLFPGKDHVHQFSIITDLLGSPPKDVINTICSENTLKFVTSLPHRDPIPFSERFKTVEPDAVDLLEKMLVFDPKKRITAADALAHPYSAPYHDPTDEPVADAKFDWHFNDADLPVDTWRVMMYSEILDFHKIGGSDGQIDISATFDDQVAAATAAAAQAQAQAQAQVQLNMAAHSHNGAGTTGNDHSDIAGGNKGQRSCSCK

SEQ ID NO: 1730 - protein, 741 aa, Neurospora crassa
MNDISDNSSNSLANGGTVANSDIPKDGTGVLSIDPWLEPFKDTLKSRYSKAQSWIDTINKTEGGLEKFSRGTEIFGFNVDKDNTITYREWAPNAKQASLIGEFNNWDRNAHRMKKNEFGVFEITIPPTANGQPAIPHNSKIKITLELPDGQWVDRLPAWIKYVTQDLSVSPAYEARFWNPPQSERYTFKHKRPSKPESLRIYEAHVGISSPECKVATYKEFTKTMLPRIKNLGYNAIQLMAIMEHAYYASFGYQVNSFFAASSRYGPPEDLKELVDTAHAMGIAVLLDVVHSHASKNVLDGLNEFDGTDHQYFHGGGRGKHDLWDSRLFNYGHHEVMRFLLSNLRFWMDEYAFDGFRFDGVTSMLYLHHGIGTGFSGGYHEYFGPDVDEEAVVYLMLANEMLHQLYPNVITVAEDVSGMPALCLPLSLGGVGFDYRLAMAIPDMWIKILKEKKDEEWDMANITWTLTNRRHGEKTIAYCESHDQALVGDKTLMMHLCDAELYTNMSILTPLTPVIDRGMALHKMIRLLTHSLGGEGYLNFEGNEFGHPEWLDFPREGNQNSFWYARRQLNLTEDGLLRYQYLNNFDRSMNLTEDKYGWLHAPQAYISLKHEGDKVIVFERAGLVFVFNFHPSNSYTDYRIGIEQAGTYRIVLDSDTKEHGGFNRLDPQTRFFTSDLPWNNRKNSTHVYIPARTAFRPGEGHKRRKASLCKSSAFVVIVALICVLLKPAAAKVLVEMVGDDV

SEQ ID NO: 1731 - protein, 189 aa, Magnolia praecocissima
ELTVLCDAEVALIVFSSRGRLYEYSNNSIKATIERYKKACADSSNTTSITQANSQYYQQEASKLRQQIQILQNANRHLMGDALSSLTVKELKQLENRLERGITRIRSKKHELLFAEIEYMQKREVELQNDNLYLRAKIAENERAQQANVLPAPEFDTLPSFDSRNYFEANMLEAASHYSHQDQTALHLG

SEQ ID NO: 1732 - protein, 249 aa, Rosa rugosa
MEFPKQITPADDPESSSQKKLGRGKIEIKRIENTTNRQVTFCKRRNGLLKKAYELSVLCDAEVALIVFSTRGRLYEYANNSVRATIERYKKACDSSNTGSVTETNVQFYQQEASKLRRQIREIQNSNRHILGEALSTLNVKELKNLEGRLEKGISRIRSKKNEMLFAEIEYMQKREIELQNHNNFLRAKIAENDRAQQQQANMMPGTLSAYDQSMPPPQSYDRSFLPVILESNHHYNRQGQNQTPLQLV

SEQ ID NO: 1733 - protein, 994 aa, Ralstonia solanacearum
MATMLRRALPAPAHLWRRGRTALLLCATAIALLTTSDRAQADRTTRALPPMGHPLMPSAAAQMASGTPAAAIALWTLAVLSMRHVQLRRENRRRRRAEADLARQLDFHHRLLESLPFPLAAQDTQHRYVAVNAAFCHLFGQPREALLGRTPAHLGWRCAHTAARAQDIDRRATAASQGACEALTITAADGRERHVLYWVAPVHGPDGRPGGTVASLIDIDGIRDAQAPAEQRAQRLHELTESLPALVCQFEMRPGTAARGRMRHLAGNASETLGAPAGKARGRLPSPARLVHRDDRQRMRGAALQSAAQLTLLDQQFRHGNGDGPVRWLHIRARPRRGADGCTVWNGYLRDVTAERAQADALVSARQAAESALRAKDRFLATMSHEIRTPMNGVLGLVELLLQTRLEREQQRMMTLVQESSRALLHVLDDILDYAKIEADRLSITPAPTDLRALLDSTVGLLASRAHERSLAVRVDVDAAVPATVSVDGMRLRQVLCNLLSNAIKFTEHGSVRLSAKCMETAADTVHLIIRVTDTGIGIAPEAQATLFTPFVQADSTITHRQCGTGLGLAISRQLARLMGGSLDMDSTPNVGTTLTLRLEVPVVDARYRLPRLASATVRVAVDDDTCRHGLEQFAVAAGLRVVHTGTADLTLVDSVRAPADAPRIVPVTGDAPYTGPGRSIPRPEALSTNPLNWQAFVQACDTALARPADGHAANGMPKSRTVPEPAPAAETPGMHILVAEDHPINRELITRQLRLLGYRVTLAEDGAAALQRLCETRFDALLTDCCMPRLDGFDLARQIRQREQQAPGGRRLPILAITATTLAEEHARCRTVGMDGYVLKPTTLATLQDALSRLGNAAVSPDAAKAPATAPDNALAFRLDDLRQTLGDGPAAVSLIRVFTTALGDDARQLGGLLATADRPALRKWTHRTGGALALLHHTAIDAEMSAFRHAVHSADDTGLRQAGARMLQLLAHLQGVMRLAETPSPGTAPTCQ

SEQ ID NO: 1734 - protein, 248 aa, Rosa rugosa
MAYENKPNTVLDSDAQRRLGRGKIEIKRIENTTNRQVTFCKRRNGLLKKAYELSVLCDAEVALIVFSNRGRLYEYSNNSVRETIERYKKACADSSNNGSVSEATTQYYQQEAAKLRAQITTLQNSNRGYMAEGLSNMSIKELKGVETKLEKAISRIRSKKNELLFAEIEYMQKRELDLHNNNQLLRAKIAENERHQQSINAIAGGHGSYDIMQPTQPFHEARNYFQVNALQPNIHQYSRHDQISLQLV

SEQ ID NO: 1735 - protein, 807 aa, Triticum aestivum
MLCLTAPSCSPSLPPRPSRPAADRPGPGISAKSKFSVPVSAPRDYTMATAEDGVGDLPIYDLDPKFAGFKEHFSYRMKKYLDQKHSIEKHEGGLEEFSKGYLKFGINTENDATVYREWAPAAMDAQLIGDFNNWNGSGHRMTKDNYGVWSIRISHVNGKPAIPHNSKVKFRFHRGDGLWVDRVPAWIRYATFDASKFGAPYDGVHWDPPSGERYVFKHPRPRKPDAPRIYEAHVGMSGERPEVSTYREFADNVLPRIKANNYNTVQLMAIMEHSILCFFWYHVTNFFAVSSRSGTPEDLKYLVDKAHSLGLRVLMDVVHSHASSNMTDGLNGYDVGQNTQESYFHTGERGYHKLWDSRLFNYANWEVLRYLLSNLRYWMDEFMFDGFRFDGVTSMLYNHHGINMSFAGNYKEYFGLDTDVDAVVYMMLANHLMHKILPEATVVAEDVSGMPVLCRSVDEGGVGFDYRLAMAIPDRWIDYLKNKDDLEWSMSAIAHTLTNRRYTEKCIAYAESHDQSIVGDKTMAFLLMDKEMYTGMSDLQPASPTIDRGIALQKMIHFITMALGGDGYLNFMGNEFGHPEWIDFPREGNNWSYDKCRRQWSLSDIDHLRYKYMNAFDQAMNALDDKFSFLSSSKQIVSDMNEEKKIIVFERGDLVFVFNFHPSKTYDGYKVGCDLPGKYKVALDSDALMFGGHGRVAQYNDHFTSPEGVPGVPETNFNNRPNSFKVLSPPRTCVAYYRVEEKAEKPKDEGAASWGKAAPGYIDVEATRVKDAADGEATSGSKKASTGGDSSKKGINFVFGSPDKDNK

SEQ ID NO: 1736 - protein, 204 aa, Capsicum annuum
MKVGNSKCNGVNNNKDVHYRGVRKRPWGRYAAEIRDPGKKSRVWLGTFDTAEEAAKAYDAAAREFRGCKAKTNFPLPSENQNGSDSGSPDESFSGENRAHAPSEFELTRCLGAGGEGVGNGGRLAEVGLVRNGDTIVHAPTELDLTRLLGAGGEGGDNSGYSAEVGLVRNGFPIFHHQPPIEAPMMSNRSSPAESYSGETIINT

SEQ ID NO: 1737 - protein, 280 aa, Listeria monocytogenes str. 1/2a F6854
MTLSFSDTYRLNNGIEMPRHGFGVYKLTDEARMRTALETAVDVGYRLFDTASFYHNEKELGDFFASSGLKRDEFFVTTKMWNTEQGYDETLWAFEKSQKKLQLDQIDLYLVHWPKQDTFFDTWRAVEKLYDEGLVRAIGVSNFEAHHLDRLRTSANVLPVVDQLETHPHFPNHLLHRYLEELHIVHQAWSPLGRGGVLQEQILIDLAEKHGKSPAQIVLRWHLQNNISIIPKSETPSRIRENAAIYDFELSEADMRQVERLNTGERVSHAPDVMYVRSEI

SEQ ID NO: 1738 - protein, 249 aa, Rosa rugosa
MAYENKPNTVLDSDAQRRLGRGKIEIKRIENTTNRQVTFCKRRNGLLKKAYELSVLCDAEVALIVFSNRGRLYEYSNNSSVRETIERYKKACADSSNNGSVSEATTQYYQQEAAKLRAQITTLQNSNRGYMAEGLSNMSIKELKGVETKLEKAISRIRSKKNELLFAEIEYMQKRELDLHNNNQLLRAKIAENERHQQSINAIAGGHGSYDIMQPTQPFHEARNYFQVNALQPNIHQYSRHDQISLQLV

SEQ ID NO: 1739 - protein, 867 aa, Yarrowia lipolytica CLIB122
MIPLALKTTESTDWSRAIHRYIASSYGPDYAEQFREEISSFQRLRQDIRGAGRDATGRDILFRYFAQLDSLERRINAAESGMKPDFTWSDSLSQEKVTQHSISFEKANVLYQLGAILSCMGEEMSRDDSCDPKASFHAFQNAAGVFAFIADKFLHAPLPDIGQDVVRAFNKLMLAQAQEMFCQDSIAKSVSVLTDVNQEQAGKVSALTAKLCAGVGALYKAAFESFTAIQEEQKWGDKNWPLECQGKNKYFTALGSLLYAKSLQNKPSTQKFGESIGYIQKSINEFNEASMLPLPNGANKKDFNKWYRDLVSTALDLARSTLKSSEHDNDLIYHSLVPAPATLGAVEPKEVVTATPLQDMYKEEDHVRVVGRDLFTRLVPMHVLQQTSVYSEEKASLLRSEGERIEVADQKLNSALEYMGLPGELYALKKDLQSGRDSGSSAQVPAVVLGYASEVKTLDLSPLKTSRDQILTQIRDSQALIASEETESTKMKDYYKDGWTQAPSAQVNASLLSDIRRVQESLVAAGASDEKLQAQYDGVKPDIELLSRGINNPELEKLFDADSSSSKSSSGPSESLIDLDFSQGAASRDPAASSTLDKLLPSCETSFRKLQNCQKDRQAIFYEFKDKVHRDDISGVLVNSKGADDNLIFEQELEKFQPYQQRLTATINTQALLIKDLADSWEKITRDPVVKNKVTDRKRALDHSHVIVERFRKAFESWKQVKTGLDKGLEFYRDLQNMADKVNVSATQFVNARRQEGKSILSAIQSNTTNELQSQLGRLSFGSGSSSAAPTSGGAPTLPPKPQQHTGDNYGQPSTYDPSVYGPNSPFMQQPPQHQQYGQPPHHQQYGQNPPPPPQGANQNQFWNQYR

SEQ ID NO: 1740 - protein, 250 aa, Rosa rugosa
MAYENKPNTVLDSDAQRRLGRGKIEIKRIENTTNRQVTFCKRRNGLLKKAYELSVLCDAEVALIVFSNRGRLYEYSNNSVRETIERYKKACADSSNNGSVSEATTQYYQQEAAKLRAQITTLQNSNRGYMAEGLSNMSIKELKGVETKLEKAISRIRSKKNELLFAEIEYMQKRELDLHNNNQLLRAKGQIAENERHQQSINAIAGGHGSYDIMQPTQPFHEARNYFQVNALQPNIHQYSRHDQISLQLV

SEQ ID NO: 1741 - protein, 231 aa, Sorghum bicolor
MGRGRVELKRIENKINRQVTFAKRRNGLLKKAYELSVLCDAEVALIIFSNRGKLYEFCSGQSITKTLERYEKHMRPDTAVQNKENELVQSSRNEYLKLKARVDNLQRTQRNLLGEDLGSLGIKELEQLEKQLDSSLRHIRSTRTQHMLDQLTDLQRREQMLCEANKCLRRKLEETSNQVHSKCGARCQLTRLRAATPPHSRPHHILAMDCSFIPWKLQQSQPCRSGSLLNI

SEQ ID NO: 1742 - protein, 434 aa, Neurospora crassa
MADFTQKKTSSPAAPGVPFYTPAQVPAAGTPLPSTPGDVPTLFTPLKIRGVELQNRFAVAPMCTYSADDGHMTDWHLVHLGSFALRGVPLTIFEATGVLPNGRITPECSGLWQDSQIAPLKRIVDYIHSQGQKAGIQLAHAGRKASTKAPWHYQRGKSELAGPEQGGWPENVWAPSAISYNEETFPFPKEMTVEQIHELVEAWKASAQRALKAGFDLIEIHAAHGYLISEFLSPISNQRTDQYGGSFENRTRVLREIISAVRSVIPEDMPLFVRVSATEWMEYTGQPSWDLQQTIELAKILPDLGVDLLDVSSGGNNKDQKINVHTYYQIDMAEQIRAAVHEAGKQLLVGAVGLVTSAEIAKETVQEKEDGRVTIQRENGAKTRADMVLVARQFLKEPEFVLTVADELGVDVKAPVQYLRGPLSSRPKKLTTVP

SEQ ID NO: 1743 - protein, 1123 aa, Lycopersicon esculentum
MSSSRPSQSSTTSSRSKHSARIVAQTSIDAKLHADFEESGDSFDYSSSVRVTSVAGDEEKPKSDKVTTAYLHQIQKGKFIQPFGCLLALDEKTLKVIAFSENAPEMLTMVSHAVPSVGEHPVLGIGTDIRTIFTGPSGAALQKALGFGEVSLLNPVLVHCKNSGKPFYAIVHRVTGSLILDFEPVKPYEVPMTAAGALQSYKLAAKAITRLQSLPSGSMERLCDTMVQEVFELTGYDRVMGYKFHEDDHGEVVSEITKPGLEPYLGLHYPATDIPQAARFLFMKNKVRMICDCRAKHVKVVQDEKLPFDLTLCGSTLRAPHYCHLQYMENMNSIASLVMAVVVNDGDEEGESSDSSQSQKRKRLWGLVVCHNTTPRFVPFPLRYACEFLAQVFAIHVNKELELENQFLEKNILRTQTLLCDMLMRDAPLGIVSQSPNIMDLVKCDGAALLYKNKIHRLGMNPSDFQLQDIVSWLCEYHTDSTGLSTDSLYDAGFPGALALGDAVCGMAAVRISDKDWLFWFRSHTAAEVRWGGAKHEPGEKDDGRKMHPRSSFKAFLEVVKTRSIPWKDYEMDAIHSLQLILRNAFKDAEVVNSNTNSIYKKLNDLKIDGMQELESVTAEMVRLIETALVPILAVDVDGQVNGWNTKIAELTGLPVDEAIGKHLLTLVEDSSVDTVNKMLELALQGKEEKNVEFEIKTHGPSRDSSPISLIVNACASKDVRDNVVGVCFMAHDITGQKSIMDKFTRIEGDYRAIIQNPHPLIPPIFGTDQFGWCSEWNTAMTKLTGWRRDDVMDKMLLGEVFGTQAACCRLKNQEAFVNFGVVLNNAITGQESEKIPFGFFARYGKYVECLLCVSKRLDKEGAVTGLFCFLQLASHELQQALYVQRLSEQTALKRLKVLAYIRRQIRNPLSGIIFSRKMLEGTSLGEEQKNILHTSAQCQRQLNKILDDTDLDSIIDGYLDLEMLEFKLHEVLVASISQVMMKSNGKNIMISNDMVEDLLNETLYGDSPRLQQVLANFLLVSVNATPSGGQLSISGRLTKDRIGESVQLALLEFRIRHTGGGVPEELLGQMFGSEADASEEGISLLVSRKLVKLMNGEVQYLREAGQSTFIISVELAVATNSS

SEQ ID NO: 1744 - protein, 348 aa, Gloeobacter violaceus PCC 7421
MDTTPLTPLTKGITLYQHILSQQALNPDATGEFSGLMVQISLAAKLISRQLAQAGLVENVLGFTGETNVQGEAVRHLDQYANETFIRVFQNTNLVCLLVSEELEDPLPLSNQCPIGSYALVIDPVDGSSNIDVNVSVASIFSVQRRNPRATDETSSLLQKGTGQVAAGYVLYGPNTMFVYTSSQGVHGFTLDAGLGEFVLSHPNIRIPERGDYYSINDAYSAEWQPGTRAFIDYLKQAKSRGEKAYSARYIGSLAADVHRTLLTGGIFLYPGTVAKPKGKLRLLYEAQPLALIAEQAGGKASTGTERILDIEPKTLHQRVPLVIGSPYEVDLAVAFARGEKQTVVAGS

SEQ ID NO: 1745 - protein, 192 aa, Sequoiadendron giganteum
DDHGEVISEIRRSDLEPYLGLHYPATDLPQASRFLFMKNKVRMICDCYATPVKVVEDNRLPRELILCGSTLRAPHGCHAEYMSNMGSIASLAIAVTINAKEEDGDTDGQQQQQKGRRLWGLVVCHHTSPRFVPFPMRYACEFLMQVFAIQLNKEVELADQLREKHILRTQTLLCDMLLRDAPMGIIRQKPNI

SEQ ID NO: 1746 - protein, 255 aa, Neurospora crassa
MSDSPQSNSKDVEQGAPSPGEEPQMNDPQDPHSSGLNQYEFEVKEQDRWLPIANEHFQNKRCAYSLYTSMSHHSSSKSPEAPRASSSSSKADRCDAYDANIRNFAPVARIMKNALPENAKIAKEAKECMQECVSEFISFITSEASEKCQQEKRKTVNGEDILFAMTSLGFENYAEALKIYLSKYREQQQNQTNRSENQQNRPSSQGYGAPQGQNQPGQGGFSSNDLGGQQESGDASGYNLYGAQTGHNGGGAEGY

SEQ ID NO: 1747 - protein, 251 aa, Salmonella typhimurium LT2
MNLNSIPAFQDNYIWVLTNDEGRCVIVDPGEAAPVLKAIAEHKWMPEAIFLTHHHHDHVGGVKELLQHFPQMTVYGPAETQDKGATHLVGDGDTIRVLGEKFTLFATPGHTLGHVCYFSRPYLFCGDTLFSGGCGRLFEGTPSQMYQSLMKINSLPDDTLICCAHEYTLANIKFALSILPHDSFINEYYRKVKELRVKKQMTLPVILKNERKINLFLRTEDIDLINEINKETILQQPEARFAWLRSKKDTF

SEQ ID NO: 1748 - protein, 474 aa, Streptococcus pyogenes MGAS10394
MGIFPKDFLWGGAVAANQVEGAFEADAKGLSVQDVLPNGGLGEWTDSPTSDNLTLEAIDFYHRYKEDIALFAEMGFKVFRTSIAWSRIFPNGDDDQPNEAGLQFYDDLFDELLNYGIEPLVTLSHYETPLHLAKAYNGWTDRRLIGFFERFAQTVMERYKGKVKYWLTFNEVNSILHMPFTSGGIMTEKEKLSLQDLYQAIHHELVASASVTKLAHEINPDVKVGCMILAMPAYPMTSDPRDILAAHAFENLNLLFSDIHVRGKYPSYIKSYFKENGIEIVFEDGDKELLAEHTVDFLSFSYYMSVTQAHNPEAYTSGQGNILGGLSNPYLESSEWGWQIDPIGLRLVLNQYYDRYQIPLFIVENGLGAKDQLVQTADGSMTVHDDYRIDYMSQHLVQVAKAIEDGVEVMGYTAWGCIDCVSMSTAQLSKRYGFIYVDRNDDGTGQLTRYKKKSFDWYRQVIQTNGRYLEDNFS

SEQ ID NO: 1749 - protein, 551 aa, Candidatus Legionella jeonii
MAKELRFGDDARQQMLAGVNALADRVKATMGPSGRNVVLERSFGAPTVTKDGVSVAKEIEFENRFKNMGAQMVKEVAAKTSDTAGDGTTTATVLARSIVVEGHKAVAAGMNPMDLKRGIDKAVTAITKELQKMSKPCKDGKAIAQVGTISANSDQAIGSIIAEAMEKVGKEGVITVEDGNGLENELSVVEGMQFDRGYISPYFINNQQNMSAELEHPFILLVDKKIATIRDMLSVLEAVAKSGRPLLIVAEDVEGEALATLVVNNMRGIVKVCAVKAPGFGDRRKAMLQDIAILTNGQVISEEIGTSLETASLESLGTAKRIVVTKENTTIIDGEGKATEINARIAQIRAQMEETSSDYDREKLQERVAKLAGGVAVIKVGAATEIEMKEKKARVEDALHATRAAVEEGIVAGGGVALIRAQKVLDGLKGDNADQDMGINILRRAIESPLRQIVANAGYESSVIVNKVAEHKDNFGFNAATGQYGDMVEMGILDPTKVTRTALQNAASVRSLMLTTECMVADLPKKDEGMAGAGDMGGMGGMGGMGGMGMM

SEQ ID NO: 1750 - protein, 341 aa, Arabidopsis thaliana
MDHAADAHRTDLMTITRFVLNEQSKYPESRGDFTILLSHIVLGCKFVCSAVNKAGLAKLIGLAGETNIQGEEQKKLDVLSNDVFVNALVSSGRTSVLVSEEDEEATFVEPSKRGKYCVVFDPLDGSSNIDCGVSIGTIFGIYTLDHTDEPTTADVLKPGNEMVAAGYCMYGSSCMLVLSTGTGVHGFTLDPSLGEFILTHPDIKIPNKGNIYSVNEGNAQNWDGPTTKYVEKCKFPKDGSPAKSLRYVGSMVADVHRTLLYGGIFLYPADKKSPNGKLRVLYEVFPMSFLMEQAGGQAFTGKKRALDLVPEKIHERSPIFLGSYDDVEEIKALYAEEEKKN

SEQ ID NO: 1751 - protein, 570 aa, Oryza sativa (japonica cultivar-group)
MGNQCQNGTLGSDYHNRFPREHAVGYVQGDSYLDLKKFDDTWPEVNNFKPTAASILRRGLDPTSINVLGRKTADLREHYIIGRKLGQGQFGTTYLCTEINTGCEYACKTIPKRKLITKEDVEDVRREIQIMHHLSGHKNVVAIKDVYEDGQAVHIVMELCAGGELFDRIQEKGHYSERKAAELIRIIVSIVAMCHSLGVMHRDLKPENFLLLDKDDDLSIKAIDFGLSVFFKPGQVFTELVGSPYYVAPEVLHKRYGPESDVWSAGVILYVLLSGVPPFWAETQQGIFDAVLKGHIDFQSDPWPKISDSAKDLIRKMLSHCPSERLKAHEVLRHPWICENGVATDQALDPSVISRLKQFSAMNKLKKLALRVIAERLSEEEIAGLREMFKAVDTKNRGVITFGELREGLRRFGAEFKDTEIGDIMEAAHNDNNVTIHYEEFIAATLPLNKIEREEHLLAAFTYFDKDGSGYITVDKLQRACGEHNMEDSLLEEIISEVDQNNDGQIDYAEFVAMMQGSNVGLGWQTMESSLNVALRDAPQCQAAEATDEPVKVKVKVKCSNQIRRRRRQV

SEQ ID NO: 1752 - protein, 83 aa, Arabidopsis thaliana
  misc_feature (53)..(53): Xaa can be any naturally occurring amino acid
AMYSFPQIRLPTGALQAAKQAGKVPDVFYCLKLLEATGISTVPGSGFGQKEGXDEMPEIMDSFKKFNDEFMTQYDNNFGYSKM

SEQ ID NO: 1753 - protein, 231 aa, Magnolia praecocissima
ENKINRQVTFAKRRNGLLKKAYELSVLCDAEVALIIFSNRGKLYEFCSSSSMLKTLERYQKCNYGAPELPVSTRETQSYHQEYLKLKARVEALQRSQRNLLGEDLGPLSGKELETLERQLDISLRQIRSTRTQCMLDQLGDLQRREHMLSEANKTLTRRLEEGAQANQNQVWEPNAHAVDSYNRQQPQQQGDGFFHPLECEPTLHIGYQPDQITIAAPGPSVNNYMPGWLV

SEQ ID NO: 1754 - protein, 485 aa, Arabidopsis thaliana
MSGVVRSSPGSSQPPPPPPHHPPSSPVPVTSTPVIPPIRRHLAFASTKPPFHPSDDYHRFNPSSLSNNNDRSFVHGCGVVDREEDAVVVRSPSRKRKATMDMVVAPSNNGFTSSGFTNIPSSPCQTPRKGGRVNIKSKAKGNKSTPQTPISTNAGSPITLTPSGSCRYDSSLGLLTKKFVNLIKQAKDGMLDLNKAAETLEVQKRRIYDITNVLEGIDLIEKPFKNRILWKGVDACPGDEDADVSVLQLQAEIENLALEEQALDNQIRQTEERLRDLSENEKNQKWLFVTEEDIKSLPGFQNQTLIAVKAPHGTTLEVPDPDEAADHPQRRYRIILRSTMGPIDVYLVSEFEGKFEDTNGSGAAPPACLPIASSSGSTGHHDIEALTVDNPETAIVSHDHPHPQPGDTSDLNYLQEQVGGMLKITPSDVENDESDYWLLSNAEISMTDIWKTDSGIDWDYGIADVSTPPPGMGEIAPTAVDSTPR

SEQ ID NO: 1755 - protein, 274 aa, Crocosphaera watsonii WH 8501
MTVAASKKLSYDWTIIIYMASIHLVALLAFLPGNFSWQAVGVTLLLYWVTGALGITLGFHRLVSHRSFKSPKWLEYLLVFFGTLACQGGPIQWVGLHRIHHKYSDTEPDPHDSNKGFWWSHMAWMLHQIPADNDVPRYTKDINEDPFYNFCQSFMIPIQIVLGLALYFLGGWSFVIWGIFVRLVMVFHFTWFVNSATHKFGYQSHESNDNSRNCWWVALLTFGEGWHNNHHAYQYSARHGLAWWEIDITWMTIQVLQFLGLAKNVKLAPVADKK

SEQ ID NO: 1756 - protein, 823 aa, Triticum aestivum
MATFAVSGATLGVARPASAGGGLLRSGSERRGGVDLPSLLLRKKDSSRAVLSRAASPGKVLVPDGESDDLAATPAQPEELQIPEDIEEQTAEVNMTGGTAEKLESSEPTQGIVETITDGVTKGVKELVAGEKPRVVPKPGDGQKIYEIDPTLKDFRSHLDYRYSEYKRIRAAIDQLEGGLEAFSRGYEKLGFTRSAEGITYREWAPGAHSAALVGDFNNWNPNADTMTRDDYGVWELFLPNNADGSPAIPHGSRVKIRMDTPSGVKDSISAWIKFSVQAPGEIPFNGIYYDPPEEEKYVFQHPQPKRPESLRIYESHIGMSSPEPKINSYANFRDEVLPRIKRLGYNAVQIMAIQEHSYYASFGYHVTNFFAPSSRFGTPEDLKSLIDRAHELGLLVLMDIVHSHSSNNTLDGLNGFDGTDTHYFHGGPRGHHWMWDSRLFNYGSWEVLRFLLSNARWWLDEYKFDGFRFDGVTSMMYTHHGLQMTFTGNYGEYFGFATDVDAVVYLMLVNDLIHGLYPDAVSIGEDVSGMPTFCIPVPDGGVGFDYRLHMAVADKWIELLKQSDESWKMGDIVHTLTNRRWLEKCVTYAESHDQALVGDKTIAFWLMDKDMYDFMALDRPSTPRIDRGIALHKMIRLVTMGLGGEGYLNFMGNEFGHPEWIDFPRGPQTLPTGKVLPGNNNSYDKCRRRFDLGDADFLRYRGMQEFDQAMQHLEEKYGFMTSEHQYVSRKHEEDKVIIFERGDLVFVFNFHWSNSFFDYRVGCSKPGKYKVALDSDDALFGGFSRLDHDVDYFTTEHPHDNRPRSFSVYTPSRTAVVYALTE

SEQ ID NO: 1757 - protein, 379 aa, Glycine max
MGKTAYKRLKGSQSFRQRLLLSTLSSTPILIEDIRADETWPGLRNHEISLLRLFETVCDDCHVEINETGTKLKYKPGTIMGGRQHSPHDCGVSRSIGYFLEPLIVLCLFAKQPLTIRLKGITNDSKDPSVDTFKSTTLPILKRFGVPSEGLEIKVESRGLPPNGGGEVLLSVPVVQSLTAVSWIDEGFVRKIRGTSFSTRVSVQFEYGMIKAARGIINPLVSDVHIFSDHRSGPEAGNSPGYGISLVAETTSGCFISVDTAVSQVRDDDTSGLADDAKRDLMPPDDIGVGIASALLGEIAQSGVVDSTHQGLLFLLCALCPQDVSKVRVGKLSQHGVETLRNLRDFLDLKFIIKPDPNSQSVFLKCIGYGMKNLSRKVS

SEQ ID NO: 1758 - protein, 816 aa, Arabidopsis thaliana
MASSSLSNLMLAIHEKKTSSVDLYRPLRNYVTFTYSEREAQLIDDDLETLKQLRSDIERVSDPSPAARRDLLISYYKVLCLVETRFPISPDKDHVNAVSFVWYDAFKQKHKATQQNIHLEKAAVLFNLGASYSQIGLGHDRTTVDGRRQASHAFMAAAGAFAHLRDNESIKATIGPSTTVDVSVECVGMLERLMVAQAQECVFENTIAKGSTPGVSAKIARQLKAALFYGEACFRYGKELHEKEEIAEEIARLRSGASRLAEAKKSSRGAPAQLIEAMNTLESSINGNLDRAVKENDRVYLMRVPSPSSLSPLPAFSMVKPMNMTDILDASKEKMFSILVPDSSAKALSRYTEMVDDVIRTQAERLQQASELTRVRLKEMDLPDSILAVDGNSALPVDLKEDVEAVQISGGPAGLEAELQQLRDLKRVNQELLVHTEELLQKEATEDSQFRSQFGTRWTRPQSSTLTKNLQDRLNRFAANLKQAGESDVKIERSVRDNSALMSILDRRPIESAVPTLARPIMSLDATEDAIVGTLKQSLRQLENLGAQRAGLEDMLKEMKRKDDILPKLMTITGSYEDMFRKEISKYDHICEDISQNIEVQEQLLMQIQAQNEEFSTIFNLEDYKASKEKCYKQIQAAIMKYREIKENINEGLKFYVTLQDAITNVKQQCSDFVMTRSIQCRDMIEDVQRQMSGLSFQDHRSSGPYPSVHQPTASSPPPPPETQNPSHPHPHAPYYRPPEQMSRPGYSIPPYGPPPPYHTPHGQAPQPYPPQAQQQPHPSWQQGSYYDPQGQQPRPPYPGQSPYQPPHQGGGYYRQ

SEQ ID NO: 1759 - protein, 282 aa, Saccharomyces cerevisiae
MVPKFYKLSNGFKIPSIALGTYDIPRSQTAEIVYEGVKCGYRHFDTAVLYGNEKEVGDGIIKWLNEDPGNHKREEIFYTTKLWNSQNGYKRAKAAIRQCLNEVSGLQYIDLLLIHSPLEGSKLRLETWRAMQEAVDEGLVKSIGVSNYGKKHIDELLNWPELKHKPVVNQIEISPWIMRQELADYCKSKGLVVEAFAPLCHGYKMTNPDLLKVCKEVDRNPGQVLIRWSLQHGYLPLPKTKTVKRLEGNLAAYNFELSDEQMKFLDHPDAYEPTDWECTDAP

SEQ ID NO: 1760 - protein, 405 aa, Mycobacterium avium subsp. paratuberculosis K-10
MPTPPDVFSPAKLGPITLRNRIIKSATFEARTPDALVTDDLIEYHRLPAVGGVGMTTVAYCAVSPGGRTEGNGIWMRPEAVPGFRRLTDAIHAEGAAVSAQIGHAGPVANARSNKAQALAPVRFFNPIGMRFAKKATRDDIDEVIAAHANAARLAIEAGFDAVEIHLGHNYLASSFLSPLINRRNDEFGGSLQNRAKVARGMVMAVRRAVEKEGTPIAVTAKLNMADGVRGGISTEESLTTAKWLESDGGLDAIELTAGSSLVNPMYLFRGDAPLKEFAGAFKPPLRWGMRMTGKKFLREYPYRDAYLLRDAKLFRAELKMPLILLGGITNRETMDLAMAEGFEFVAMARALLAEPDLINRIAADGAAHRVHSACTHCNQCMPTIYSRTHCVVTGAPDRHTSAAT

SEQ ID NO: 1761 - protein, 617 aa, Armoracia rusticana
MTTNKKTIVWFRRDLRIEDNPALAAAAHEGSVFPVFIWCPEEEGQFYPGRASRWWMKQSLAHLSQSLKALGSELTLIKTHNTVSAILDCIRITGATKVVFNHLYDPVSLVRDHTVKEKLVELGISVQSFNGDLLYEPWEIYFEKGKPFTNFSSYWKKCLDMSIESVMLPPPWRLMPISTAAEAVWACSIEELGLENETEKPSNALLTRAWSPGWSNADKILNEFIEKQLIDYAKNSKKVVGNSTSLLSPYLHYGEISIRRIFQCARMKQIIWARDKNSEGDESADLFLKGIGLREYSRYICFNFPFTHEQSLLSHLRFFPWDTDVDKFKAWRQGRTGYPLVDAGMRELWATGWMHNRLRVIVSSFAVKFLLLPWKWGMKYFWDTLLDADLECDILGWQYISGSLPDGHELDRLDNPAIQGAKYDPEGEYIRQWLPELARLPTEWIHHPWDAPLTVLKASGVELGTNYAKPIVDIDTARELLTKAISRTREAQIMIGAAPDEIVVDSFEALEGNTVKEPGLYPSVSSNDQQVPSAVRYNGSKRVKHVEEEERDMKKSRGFDEVMREERDLFSTAESSSSSTTVRFLVSHSCSLVSEGKSLEGIQDPSDQITTSLGKNC

SEQ ID NO: 1762 - protein, 570 aa, Euglena gracilis
TMNRAGVLARRGYSSKGKDILFGVDARVKMLAGVNRLSQAVSVTLGPKGRNVVIEQPFGAPKITKDGVTVAKAIEFKDSFENLGAQLVRQVANTTNEIAGDGTTTSTVLANAIFSEGYKAVTQGTSPVDMKRGIDRAVEVVLQSLTEQSKTIVSKEEVTQVATISANGDVEIGQLIGHAMEKVGKAGVITVSDGKTLDTELEVVEGMSLDRGYISPYFVTNAKTQKVEIEDAFILLCQKKVSTIQQILPVLEHIAKANRPLVIIADDVDSEALATLIINKINGKLKVCAVKAPGFGDNKTNMLHDVAIFTGGEVYNEELGMNLEQHFDHRILGFAKKVSVGKDQTIILNGAGDPKAVEERKELIQGMLGKTDSSYEKEKLNERLAKLSGGVAVIKVGGASDVEVGEKKDRVTDALNATRAAVSEGIVPGGGAALLYASSALAELAADPTLTEDQKTGVRIVMSAIKLPAITIVKNAGGEGAVVIHQLLAEKKMQQGYDAQQGKYVNMFEAGIIDPAKVVKTALVDAASVAGLMITTEAAITDIPAPAPAAGGGMDGMGGMGGMGGMGGMY

SEQ ID NO: 1763 - protein, 617 aa, Armoracia rusticana
MTTNKKTIVWFRRDLRIEDNPALAAAAHEGSVFPVFIWCPEEEGQFYPGRASRWWMKQSLAHLSQSLKALGSELTLIKTHNTVSAILDCIRITGATKVVFNHLYDPVSLVRDHTVKEKLVELGISVQSFNGDLLYEPWEIYFEKGKPFTNFSSYWKKCLDMSIESVMLPPPWRLMPISTAAEAVWACSIEELGLENEAEKPSNALLTRAWSPGWSNADKILNEFIEKQLIDYAKNSKKVVGNSTSLLSPYLHYGEISVRRIFQCARMKQIIWARDKNSEGDESADLFLKGIGLREYLGIYVSISRLLTSNLCGVIFVFSLGMADVDKFQGLETRQDWLSVGGCRNERALGYGCMHNRLRVIVSSFAVKFLLLPWKWGMKYFWDTLLDADLECDILGWQYISGSLPDGHELDRLDNPAIQGAKYDPEGEYIRQWLPELARLPTEWIHHPWDAPLTVLKASGVELGTNYAKPILDIDTARELLTKAISRTREAQIMIGAAPDEIVADSFEALEGNTVKEPGLYPSVSSNDQQVPSAVRYNGSKRVKHVEEEERDMKKSRGFDEVMREERDLFSTAESSSSSTTVRFLVSHSCSLVSEGKSLEGIQDPSDKITTSLGKNG

SEQ ID NO: 1764 - protein, 753 aa, Zea mays
HQLQTSEKRRVGGKLLLYDSCAHSSTVLGNLGGEEEESSGSQRTTHYSWLHGFLTSLCGGDPAMRIVVWFRRDLRVEDNPALAAAARAGGEVVPAYVWSPEEEGPYYPGRVSRWWISQSLNHLDASLRRLGAGKLVTRRSADAAVALLQLVRDTGATHVYFNHLYDPISLVRDRRLKEMLAAEGIVVQSFNSDLLYEPWEVVDDEGQPFTMFDPFWNRCLSMPYDPPAPLLPPKRINSGDLSMCPSEDLIFEDESERGSNALLARAWTPGWQNADKALTAFLNGPLADYSVNRKKADSASTSLLSPHLHFGELSVRKVFHLVRMKQLVWSNEGNHAAEESCTLFLRSIGLREYSRYLSFNHPSSHERPLLAHLRFFPWVVDESYFKIWRQGRTGYPLVDAGMRELWATGWLHDRIRVVVASFFVKVLQLPWRWGMKYFWDTLLDADLESDALGWQYITGSLPDGRELDRIDNPQFEGYKFDPHGEYVRRWIPELARLPTEWIHHPWDAPVSVLQAAGIELGSNYPLPIVELDAAKGRLQAALSEMWQLEAASRATMNNGTEEGLGDSSEVLFPQELQMEVDRQPAPAEAAANVHVHVHVPMPARRRGDQMVPTMTTSSLNRAGTEVSADLVVANSEEEDTRAQVPFHAHLHLHPRAEAPPAARRTNNGARQHDVFQQPRNHRRDALLAPSASEASSSWTGREGAVVPVWSPPAASGHSDAFAADEADVSSRSYLGRHPQSHRLMNWSQLSQSS

SEQ ID NO: 1765 - protein, 99 aa, Carica papaya
MEPGIVIGGLQDVEGDANNLEYQELARFAVDEHNKKTNAMLQFKRVVNVKQAVVEGLKYCITLEAVDGHKTKVYEAEIWLKLWENFRSLEGFKLLGDAH

SEQ ID NO: 1766 - protein, 389 aa, Acinetobacter sp. ADP1
MNPPLPQAPINWIAVFALIFLPVLAIIAIPLYAYHHDFSIGAWVSMFVLLGMSSLGITAGYHRLWAHRAYEATLPLKIMLMIMGTFAVQNSILFWASGHRTHHRHVDDIEKDPYSIKNGFWYAHFGWMLRNYPAAEPDFKNAPDLLNDKLVMFQHKYYVALVIATHVVILTAVGWAVGDIWGVVLLGGLLRLILSHHVTFFINSLCHMWGKRPYTDENTARDNFWLAIATWGEGYHNYHHIFQYDYRNGVKWWQYDPTKWLIWSCSKLGLAKNLRRIPSFNIKKAELAMKFKYAEQDLAIYGHDVNSDLAQMKQRIAQEYDAFTHTLNDWAKLKEQELQSKKAAVAEKLHQMDHKLKVDFQLLEHRLSHHRECLETLMRNVKKRNTVSE

SEQ ID NO: 1767 - protein, 617 aa, Armoracia rusticana
MTTNKKTIVWFRRDLRIEDNPALAAAAHQGSVFPVFIWCPEEEGQFYPGRASRWWMKQSLAHLSQSLKALGSELTLIKTHNTVSAILDCIRVTGATKVVFNHLYDPVSLVRDHTVKEKLVELGISVQSFNGDLLYEPWEIYCEKGKPFTSFSSYWKKCLDMSIESVMLPPPWRLIPITAAVEAVWACSIEELGLENDAEKPSNALLTRAWSPGWSNADKILNEFIDKQLIYYAKNSNKVVGNATSLLSPYLHYGEISVRRVFQCARMKQIIWARDKNSEGEESTDLFLKGIGLREYSRYICFNFPFTHEQSLLSHLRFFPWDADVDKFKAWRQGRTGYPLVDAGMRELWATGWMHNRIRVIVSSFAVKFLLLPWKWGMKYFWDTLLDADLECDILGWQYISGSLPDGHELDRLDNPAIQGAKFDPEGEYIRQWLPELARLPTEWIHHPWDAPLTVLKASGVELGTNYVKPIVDIDTARELLTKAISRTREAQIMIGAAPDEIVADSFGALEGNTVKETGLCPSVSSNDQQVPSAVRYNGSKRVKHVEEEERDMKKSRGFDEVMREERDLFSTAESSSSSTTVRFLVSHSCSLVSEGKNLEGIQDPSDQITTKLGKNG

SEQ ID NO: 1768 - protein, 495 aa, Medicago truncatula
MKKVSLYACLLLNLSLLVIFPYSKASQADKFNEFILSRKSQNPPKTLSWEEGDALKTHSFSAAYVAPPQEELRLADKIVTLPGQPYGVNFDQYSGYVTVDPEAGRELFYYFVESPHNSYTKPLILWLNGGPGCSSLGYGAFEELGPFRVNSDGKTLYRNPYAWNEVANVLFLESPAGVGFSYSNTSSDYDNSGDKSTAKDAYVFLINWLERFPQYKTRDFYITGESYAGHYVPQLASTILYNNKLYNNTIINLKGISIGNAWIDDATNLKGIYDNLWTHALNSDQTHELIEKYCDFTKENVSAICNNATDKAFVETGKIDIYNIHAPLCHDSSLKNGSSTGYVSNDFDPCSDYYVTAYLNRPEVQKALHAKPTNWTHCTHLLTTWKDSPATVLPTVKYLIDSGIKLWIYSGDTDVVVPTTSSRYLINTLKLPINSAWRPWYSGKEIGGYVVGYKGLTFVTVRGAGHLVPSWQPERALTLISSFLYGILPSGSPSN

SEQ ID NO: 1769 - protein, 647 aa, Bradyrhizobium sp. BTAi1
MCGLAGVWCWDTPIDRPAIARALGLLDHRGPDGNGLWISEDGKVALGHTRLSIIDLVTGEQPLSHPNGKLQLVVNGEFYDYERIRNDLTARGARFRTRSDSEIALWLYDESGTRCFADLNGEFAFILWDAGAGRLIAARDRFGIKPLFYAVQSGRILLASEIKALLAMGVPAQWDVEGYLDAAHVLQNGTLFSGIRQVPPGCYLSATRHGITIQRYWDAPFASALSPIEDEHGALDQIRAQMSRATRWRMRADVPVAAYLSGGIDSMSVLALAAATTNRAPDAFTIAYEDAAYDESHRAESFATQLGTRFHRVPVNGAALADHFATSLWHSETACFNPHGTAKFILSKAVRDAGYKVVLTGEGADEIFAGYAPSRVDALGGSAAMQAMIATRDRATYAVTPQHTATDQLPLIAQRFGTVPTWLRHQMAHLLGVADLLRDDLRTAWSTDRPLAAFLKYLEPWTVPALDTVDLGIALMLKTTLPNYVLVTLGDRMEMAHSIEGRLPFLDHQVVELAWRLPSHLKIRDGVEKFALRQAMRNLLPADAVDRQKHPFIAPPTATDAKHPFGAMIRDVLHGPALAALPFFEPRKVRKLIDRLTSLPPEDRLRLEPLLVEIASLCIIHDLFKMSSSSDPSAQLSIQMPSTEALA

SEQ ID NO: 1770 - protein, 446 aa, Triticum aestivum
SLQLSHTLRHQITVGSSIPINLPVVNQVFSSNRAIIIPHTSPLARIRPLAGRYVPPEVAAVRVPLLNLSNFQINDWPELSAKSYAIMVLMLPSDSARNWHVHELELVEVVADQVAVALSHAVILEESMRARDLLMEQNVALDLARREAEMAIRARNDFLAVMNHEMRTPMNAIIALSSLLLETELTPEQRLMVETVLKSSNLLATLINDVLDLSKLEDRSLELEIRAFNLHAVFKEVMGFIRPIAAIKRLSMSVMLTPDLPLCAIGDEKRLMQTILNISGNAVKFTKEGHITLLASVLKPDSLREFRTPDFHPAASDDHFYLKVQLKDTGCGISPQDLPHVFTKFAQTQPGGNQGYSGSGLGLAICRRFVTLMGGHIWLDSEGAGRGCTATFIIRLGVSDNTDAYQQQLAPLAWPGSANVESAGPKALHEETWPPSSLKPRYQRSV

SEQ ID NO: 1771 - protein, 345 aa, Oligotropha carboxidovorans
MAQGQTLHQHLTGFAATDPAHGPVADVVAAFAIAATEISELISGGLLSGITGEGQTRNSDGDVQKDLDIKADQIIRAALAGTSVAALASEEAEEIEICDPAGAVSVAFDPLDGSSNINTNMSVGTIFSIVRTPSHARAAFTQPGSAQLAAGFVVYGPQTSLVLTLGDGVDVFTLDRKAKVFQKVRSRVQIPAQTPEYAINASNRRFWDPLIVAFIEDCLAGKDGVMQADFNMRWIGSMVAEAYRILVRGGIFLYPGDTREGYGEGRLRLLYEAHPIAFIMEQAGGGATTGRQRILDITANTPHQRVPLIMGSIDSVRRIERMHGSPDIKFERNPPLFATRGLFRI

SEQ ID NO: 1772 - protein, 573 aa, Candida albicans SC5314
MCGIFAAYRQPEVEDFKSKALQYSKLIRHRGPDWSGNVVQNSTILCHERLAIVGLDSGAQPIVSPDGNFTLAVNGEIYNHIQLREQFPDYKFKSLSDCEPIIPLFTKYDIDAPKHLDGMFAWVLYDKKNDRIVAARDPIGITTLYMGKSSKSPKTRYFASELKCLIEECDEIFAFPPGHVYDSNTDEITRYFQPSWWDASKVPEQHVDFKKVRETLELAVRKRLMAEVPYGVLLSGGLDSSLIASIASRETKKAAQASFNPEGIDANKELSGVDDKGSLHSTGVFNQLHSFAIGLPGAPDLLAAEKVAHFIGTIHHSHTFTLEEGLDALDDVIYHLETYDVTTIRASTPMYLLSRKIKAQGVKMVLSGEGSDEIFGGYLYFANAPSAKEFHEECVKRVKNLHYADCLRANKSTMAWGLEARVPFLDKQFLEVCMNINPEDKLIQPGKIEKYILRKAFDTSDEPDVKPYLPEEILWRQKEQFSDGVGYSWIDGLKDTAEKMVSDEEFAHPKPEWGDDIPTTKEAYWYRCKFDKMFNGSKAAASTVMRWIPKAEWGCHADPSGRYAATHDHKVAQ

SEQ ID NO: 1773 - protein, 480 aa, Pseudomonas putida KT2440
MHLTWLRSDLRIDDNTALSASTERGPTIALWLVSPGQWQAHDDADCKVDFWLRNLHDLRQSLEKLNIPLLIRTIDTWDQAPQAVLDICRQHQVQSVHWNEEYGINEQRRDDATRAMLEKSAIQAHSHLDQLFFRPGTVLTRSGDYFQVFSQFKKTCLEHLHRSLPALARRVKRQAPLNIGSDPIPQHVEGFGKTTPALRDHWPAGEAEAQSRLSRFLDETIDDYHHLRDLPAKPGTSQLSPYLAAGVISPRQCLHGALAGNRGEFDSGSTGVQTWINELLWREFYKHILSGYPQVSRHRAFRAQTEALPWRDAPADLAAWEQGRTGFPIIDAAMRQLLHTGWMHNRLRMVVAMFLSKNLLIDWRKGERHFMRHLIDGDLAANNGGWQWSASTGTDAVPYFRIFNPVSQSQRFDPQGRFIRHWVPELQELDEKAIHQPIKSTDLFGNTSYLSPIVDLSSSRQRALEAFKGLPRRQNQGITS

SEQ ID NO: 1774 - protein, 222 aa, Triticum aestivum
MGQQSLIYAFVARGTVVLAEYTEFTGNFTTIASQCLVKLPASNNKFTYNCDGHTFNYLVEDGFTYCVVAVESVGQQMPIAFLVRVKDDFSKRYAGGKAATAAPSSLNREFGSKLKEHMQYCVDHPEEINKLAKVQAQVSEVKNVMMENIEKVLDRGEKIELLVDKTENLRSQAQDFRQQGTQVRRKMWLQNMKIKLIVLGIIVALILIIILSVCHGFNCGKK

SEQ ID NO: 1775 - protein, 705 aa, Pseudomonas fluorescens PfO-1
MRYQLSPRRISMKHLLPSTALALFIGIGLLPVSGTTFAANSWDKLQPDRDEVIASLNVVELLKRHHYSKPPLDDARSVIIYDSYIKLLDPSRSYFMASDIAEFDKWKTQFDDFLKSGDLNAGFTIYKRYLDRVKARLDFALAELNKGVDKMDFTTKETLLIDRKDAPWLKSTAELDDLWRKRVKDEVLRQKIAGKEPKQIQETLTKRYKNQLARLDQTRAEDIFQAYINTFAMSYDPHTNYLSPDNAENFDINMSLSLEGIGAVLQSDNDQVKVVRLVPAGPADKTKQVAPADKIIGVAQGNKEMVDVVGWRLDEVVKLIRGPKGTVVRLEVIPASNAPNDQTSKIVPITREAVKLEDQAVKKSVLNLKQDGKDYKLGVIEIPAFYLDFKAFRAGDPDYKSTTRDVKKLLTELQKEKVDGVVIDLRNNGGGSLQEATELTSLFIDKGPTVLVRNADGRVDVLEDENPGAFYKGPMALLVNRLSASASEIFAGAMQDYHRALIIGGQTFGKGTVQTIQPLNHGELKLTLAKFYRVSGQSTQHQGVLPDIDYPSIIDTKEIGESALPEAMPWDTIRAAIKPASDPFKPYLAQLKSEHDTRSAKDAEFVFIRDKLALAQKLLEEKTVSLNEAERRAQHADIDAKQLAMENIRRKAKGEEPLKELKKEDDDALAAAEPDKVKPEDDAYLSETGRVLLDYLKLSNQVAKK

SEQ ID NO: 1776 - protein, 88 aa, Kluyveromyces lactis
ARPAFVNKLWSMVNDKSNEKFIHWSTSGESIVVPNRERFVQEVLPKYFKHSNFASFVRQLNMYGWHKVQDVKSGSNDSRWEFENERHA

SEQ ID NO: 1777 - protein, 633 aa, Phalaenopsis hybrid cultivar
MEGCDCIEPQWPADELLVKYQYISDFFIALAYFSIPLELIYFVKKSSFFPYRWVLIQFGAFIVLCGATHLINLWTFTMHSRTLAIVMTVAKVSTAVVSCATALMLVHIIPDLLSVKTRELFLRNKAEELDKEMGLIRTQEETGRHVRMLTHEIRSTLDRHTILRTTLVELGRTLDLAECALWMPSRTGLNLQLSHTLNNQIPVGSVVSINLPVVNQVFNSSRAVRIPHTCQLARFQPHTGRYVPPEVVAVRVPLLHLSNFQINDWPELSAKNFAVMVLMLPSDSARKWHVYELELVEVVADQVAVALSHAAILEESMRARDQLMDQNVALDLARREAEMAIRARNDFLAVMNHEMRTPMHAIIALSSLLLETELTPEQRLMVETILKSSNLLATLINDVLDLSKLEDGSFELEVTVFNLHTVFREVVNLIKPIAAVKKLSLIVSLSPDLPSCAVGDEKRLMQTMLNVVGNAVKFTKEGSISITASIAKPDSLRDPRDPEFYPIPSDGHFYLRVQIKDTGCGISPQELPHLFTKFAHAQNGSDKGYNGSGLGLAICKRFVNLMKGHIWLESEGIGKGCTTIFIVKLGISEDPAHRYQHKLLPPIRAGQSEADAFGSKRMPTDLIPLKNRYQRSL

SEQ ID NO: 1778 - protein, 257 aa, Coxiella burnetii RSA 493
MPHNILAIPALNDNYIWTIVHPQKQAAVIIDPGEAKPVLDFLKQQKLNLAAILVTHHHWDHTNGIQGILQKHPAPVYGSVESAIPFCDHPIVDGQTFSIPYAELTFNVLAIPGHTLDHVAYYADQWVYTGDTLFAGGCGRIFEGSPDQFYHSLQKLASLGPTTRVYCGHEYTVKNLEFAETVEPDNPKLKQRIVETGQKASQNLPTLPSTLQVELDTNPFLRCHQKNIQRRVQEYCGYPLADTVAVFSALRRWKDEF

SEQ ID NO: 1779 - protein, 542 aa, Listeria monocytogenes EGD-e
MAKDIKFSEDARRAMLRGVDQLANAVKVTLGPKGRNVVLEKKFGSPLITNDGVTIAKEIELEDPFENMGAKLVSEVASKTNDVAGDGTTTATVLAQAMIQEGLKNVTAGANPVGVRRGIEKAVATAIEELKAISKPIESKESIAQVAAISSGDEEVGKLIAEAMERVGNDGVITIEESKGFATELDVVEGMQFDRGYTSPYMVTDSDKMEAVLEKPYILITDKKINNIQEILPVLEQVVQQGRPMLIIAEDVEGEAQATLVLNKLRGTFNVVAVKAPGFGDRRKAMLEDIAILTGGQVITEDLGLELKTATVDQLGTANKVVVTKDDTTIVEGAGDSTQISARVNQIRAQMEETTSEFDREKLQERLAKLAGGVAVVKVGAATETELKERKLRIEDALNSTRAAVEEGIVAGGGTALVSIYNKVAALEAEGDVETGINIVLRSLEEPVRQIAHNAGLEGSVIVERLKHEAVGVGFNAANGEWVNMIDAGIVDPTKVTRSALQNASSVAALLLTTEAVVADKPDENGPAAVPDMGMGGMGGMM

SEQ ID NO: 1780 - protein, 526 aa, Cyanidioschyzon merolae strain 10D
MSKRILYQEQARRALSQGMDILAEAVAVTLGPKGRNVVLEKKYSCPQIVNDGVTIAKEIDLANHMQNTGVCLIRQAASKTNEVAGDGTTTATVLAHAMIKQGLKYVASGANPMALKTGMSLATQWLVSQIRDLAQPISDHLAIKQVASLSAGNDDQVGEMISQAFEQVGADGVISLEEGKSSQTQLQITQGMRFEKGYISPYFATAGDTVVLDQPYILLTDKKITLVKQDLLPVLTLVSRTNRALLIIADDVEKEALATLILNKLRGIIQVVAVRAPGFGDRKKALLEDMAVLTGGQVITQEAGLSLETITLDLLGEARRIEVGKSYTTIVADSNKQQVKARCEQIKQQWARSDSSYEKQQLQERLAKLSSGVAVIQVGGATEAEMKDKKLRLDDAINATRAAIEEGIVAGGGSTLVHFIKPLIEWSHHLKPEEQLGAQIVAKALSAPLHRIATNAGQNGSLIVEQVQNQPNLGYDAANHRFVNMIEAGIIDPAKVTRCALQNATSIAAMVLTTECMIVDKPSGDK

SEQ ID NO: 1781 - protein, 617 aa, Armoracia rusticana
MTTNKKTIVWFRRDLRIEDNPALAAAAHEGSVFPVFIWCPEEEGQFYPGRASRWWMKQSLAHLSQSLKALGSELTLIKTHNTVSAILDCIRVTGATKVVFDHLYDPVSLVRDHTVKEKLVELGISVQSFNGDLLYEPWEIYCEKGKHFTIFSSYWKKCLDMSIESVMLPPPWRLRPITAAADAVWACSIEELGLENDAEKPSNALLTRAWSPGWSNADKILNEFIDKQLIYYAKNSKKVVGNSTSLLSPYLHYGEISVRRVFQCARMKQIIWARDKNSEGEESTDLFLKGIGLREYSRYICFNFPFTHEQSLLSHLRFFPWDTDVDKFKAWRQGRTGYPLVDAGMRELWATGWMHNRIRVIVSSFAVKFLLLPWKWGMKYFWDTLLDADLECDILGWQYISGSLPDGHELDRLDNPAIQGANFDPEGEYIRQWLPELVRLPTEWIHHPWDAPLTVLKASGVELGTNYAKPIVDIDTARELLTKAISRTREAQIMIGAAPDEIVADSFGALEGNTVKETGLCPSVSSNDQQVPSAVRYNGSKRVKHVEEEERDMKKSRGFDEVMREERDLFSTAESSSSSTTVRFLVSHSCSLVSEGKNLEGIQDPSDQITTKLGKNG

SEQ ID NO: 1782 - protein, 715 aa, Streptomyces coelicolor A3(2)
MTRARPNWKGSPVWSGHPYPLEAAYDGQGTNFALFSEVAERVDLVLVDDDGNHSTVPLPDVDGFVWHCYLPGVGPGQRYGYRVHGPWAPAVGHRCNPAKLLLDPYTRAVDGLVDNHASLFERARGKADPGDSAGHTMLGVVTDPFFDWGDDRPPRRPYSESVIYEAHVRGLSRTHPDVPEELRGTYAGLAHPAVVDHLTSLGVTAVELMPVHQFVHDGVLLDRGLSNYWGYNTIGFFAPHNGYAALGTRGQQVSEFKSMVKTLHEAGLEVILDVVYNHTAEGNERGPTLSFRGIDNASYYRLVDGDWQHYYDTTGTGNSLLMRHPYVLQLIMDSLRYWVTEMHVDGFRFDLAATLARQFHEVDRLSAFFDLIQQDPVISRVKLIAEPWDVGEGGYQVGNFPQLWSEWNGKYRDAVRDFWRAEDHSLGEFASRLTGSSDLYQHSRRRPRASVNFVTAHDGFTLRDLVSYNDKHNEANGEDNRDGESHNRSWNCGAEGGTKDPAVRELRGRQQRNFLATLLLSQGIPMICHGDELGRTQRGNNNAYCQDNEISWIDWRLDGEQRALLDFARRLIALRADHPVLRRRRFFHGETLTHADQPLPDLVWLLPDAREMTDDDWQRSDAHTVGVFLNGDAIAEPDPRGRPVVDDSFLLLLNSHWEPADFRLPDAGYGERWTALVDTGDPDGVPDEAEHKAGTRLTVEQRSLVLLSRPSRTGR

SEQ ID NO: 1783 - protein, 275 aa, Schizosaccharomyces pombe
MLGSFVKLNNGLKCPQFAYGSYMVNRTKCFDSVYAALQCGYRHIDSAQMYHNEADCGRAILKFMEETGTKREDIWFTSKLNDLSGYKSTLSSIDASVKACGLGYIDLFLLHSPYGDRIESWKALEKGVEEGKLRAIGVSNFGPHHIQELLDSHPKIIPCVNQIELHPFCSQQKVVDYCESKGIQLAAYAPLVHGEKFGNKQLLAIASKYNKSEAQIMIRYCLQRGFIVLPKSSTPRRIKENGDVFDFEISKEDMEKLYNLDEDYHSDWNPCVSPL

SEQ ID NO: 1784 - protein, 164 aa, Lupinus polyphyllus
MARPQQRYRGFRQRHWGSWVSEIRHSILKTRIWQGTFESAEDAARAYDEAARLMCGTRARTNFPYNPNASQSSSSKLLSATLIAKLHRCYMASLQMTRPSSLPEAPRIIASPNNAVKGIGADAMLLPKKREQEEQETGGNLDFKKVKVECSQQFKPLEEDHIAQ

SEQ ID NO: 1785 - protein, 263 aa, Burkholderia fungorum LB400
MNALEYVPVPAFDDNYIWVVSDGHSAVVVDPGEAAPVQAYLAKRGWRLSAILLTHHHQDHVGGVADLLNGQAVPVYGPAGEAIEHLTHRLKNGDHVSIAAPALELSVLDVPGHTSGHIAYFQAADPRGTPHVFCGDTLFACGCGRLFEGTPKQMLASLDALAALPGATEVHCAHEYTLSNIRFALACEPANAELQAWRDKAGELRARGVPTLPTTIAHERAVNPFLRAGNPAVQASLREQLHEKVPDRLTAFTLMREWKNRFR

SEQ ID NO: 1786 - protein, 308 aa, Neurospora crassa
MADHTEVDLDSIIDRLLEVRGSRPGKQVQLLEAEIRYLCTKAREIFISQPILLELEAPIKICGDIHGQYYDLLRLFEYGGFPPEANYLFLGDYVDRGKQSLETICLLLAYKIKYPENFFILRGNHECASINRIYGFYDECKRRYNIKLWKTFTDCFNCLPIAAIIDEKIFTMHGGLSPDLNSMEQIRRVMRPTDIPDCGLLCDLLWSDPDKDITGWSENDRGVSFTFGPDVVSRFLQKHDMDLICRAHQVVEDGYEFFSKRQLVTLFSAPNYCGEFDNAGAMMSVDESLLCSFQILKPAEKKQKFGRR

SEQ ID NO: 1787 - protein, 494 aa, Neisseria meningitidis Z2491
MSKPVFKKIALYTLGAISGVAVSLAVQGFAAEKDRRDNEVLPVQSIRTMAEVYGQIKANYYQDKPDADLFEGAMKGMVAGLDPHSEYMDKKGYAEIKESTSGEFGGLGMEIGQEDGFVKVVSPIEDTPAERAGVKSGDFIVKIDNVSTRGMTVSEAVKKMRGKPGTKITLTLSRKNADKPIVVNLTRAIIKVKSVRHHLIEPDYGYIRVSQFQERTVESVNTAAKELVKENKGKPLKGLVLDLRDDPGGLLTGAVGVSAAFLPSEAVVVSTKGRDGKDRMVLKAVPEDYVYGMGGDSLAGIPAELKTIPMTVLVNSGSASASEIVAGALQDHKRAVIVGTQSFGKGSVQTLIPLSNGSAVKLTTALYYTPNDRSIQAQGIVPDVEVKDKERIFESREADLVGHIGNPLGGEDVNSETLAVPLEKDADKPAVKEKGKKKKDEDLSSRRIPNPAKDDQLRKALDLVKSPEQWQKSLGLAAKKPVSNKDKKDKKDKK

SEQ ID NO: 1788 - protein, 146 aa, Magnetococcus sp. MC-1
MRFLHTMVRVADLEASLHFYRDLLGLVETQRKESQAGRFTLVYLAAPEDLERAKGEQAPEIELTYNWESECYSGGRNFGHIALLVEDIYAVCARMQQGGVTILRPPRDGHMAFFRSPDGISIELLQKGEALPMQEPWASMVNSGSW

SEQ ID NO: 1789 - protein, 185 aa, Brassica napus
RVIFHINYLGADQPTFTLNFSKGSSQIIAQYYQLIRLGFEGYKNVMQNCRENMLVLKEGIEKTERFNIVSKDVGVPLVAFSLKGQSFHSEFEISEMLRRFGWIVPAYTMPADAQHITVLRVVIREDFSRTLAERLVADILKVLHELDTLPSKISRKMGAEDFGNVKGKKVERDILMEVIVGWRKV

SEQ ID NO: 1790 - protein, 150 aa, Zea mays
PDQLNFLFRSSGLRFSNLYCDPLIIPGGHKITARQRWQPTPMQLQILESIFDQGNGTPSKQKIKEITAELSQHGQISETNVYNWFQNRRARSKRKQAAASLPNNAESEAEADEEPLADKKPKSDRPPPPPPPIQDNTKATGASSRIPSFV

SEQ ID NO: 1791 - protein, 594 aa, Frankia sp. CcI3
MCGLSGELRFDGRGANVDAVVRMTATMVPRGPDGVGVWSAGPVAFGHRRLKIIDLSECGAQPMVDNELGLTTVFNGCIYNYQELRDELIAAGYRFFSTSDTEVIGKAYHRWGRRCVDHFAGMFAFAIAERDSGRLILARDRLGIKPLYLTGNSERLRFASTLPALLAGGGVSSDIDLVAFHHYLSFHSVVPAPHTILAGVRKLPAATVRVVEPDGTSTDDLYWRPSFTRDPAHADWTARDWQDAIAERLRLAVRRRMVADVPVGVLLSGGLDSSLIVALLAEAGQKDLATFSVGFEAVGGEPGDEFVYSDVIARYFDTDHHQIRVPGTRLLPAVDAAVAAMSEPMVSHDCVAFYLLSQEVSRHVKVVQSGQGADEVFAGYSWYPPLAGVGRTDAVDAYLRVFADRPHRDLPAMVEPHHLIEADASRHFVASHFARPGAETAVDAALRIDSTIMLVDDPVKRVDNMTMAAGLEARTPFLDHELVELAAACPPELKLASGGKGVLKNIGRPLMPVDVIDRPKGYFPVPAIRHLDGPFLDRVREALTDPAAKARGLFRPVWVQTMLAAPNDNRTALGANALWQAALLEMWLQTHTVA

SEQ ID NO: 1792 - protein, 157 aa, Brassica oleracea var. alboglabra
MSLIPSFFGGRRTNVFDPFSLDLYDPFEGFLTPSGMTNTTSKDVAAFTNAKVDWRETAEAHVFKADLPGLKKEEVKVEVEDGNILKISGERSSENEEKSDKWHRVERSSGKFMRRFKLPENAKVDEVKASMENGVLSVTVPKMPERKPEVKSMDISG

SEQ ID NO: 1793 - protein, 250 aa, Arabidopsis thaliana
  misc_feature (64)..(64): Xaa can be any naturally occurring amino acid
  misc_feature (93)..(93): Xaa can be any naturally occurring amino acid
MGRGRVELKRIENKINRQVTFAKRRNGLLKKAYELSVLCDAEVALIIFSNRGKLFAVVNASDTXRGRVELKRIENQNNRQVPFAKRRNGLLKXRQQDLKLKERYDALQRTQRNLLGEDLGPLSTKELESLERQLDSSLKQIRALRTQFMLDQLNDLQSKERMLTETNKTLRLRLADGYQMPLQLNPNQEEVDHYGRHHHQQQQHSQAFFQPLECEPILQIGYQGQQDGMGAGPSVNNYMLGWLPYDTNSI

SEQ ID NO: 1794 - protein, 469 aa, Glycine max
KVYYARNIKTGEGVAIKVIDKEKILKGGLVAHIKREISILRRVRHPNIVQLFEVMATKSKIYFVMEYVRGGELFNKVAKGRLKEEVARKYFQQLISAVGFCHARGVYHRDLKPENLLLDENGNLKVSDFGLSAVSDQIRQDGLFHTFCGTPAYVAPEVLARKGYDGAKVDLWSCGVVLFVLMAGYLPFHDQNVMAMYKKIYRGEFRCPRWFSPDLSRLLTRLLDTKPETRIAIPEIMENKWFKKGFKQIKFYVEDDRLCNVVDDDGLMDNDDDTASIVSVASFSDYSVSESDSEIETRRRINAPLPRPPSLNAFDIISFSPGFNLSGLFEEKEDETRFVTAAPVNRIISKLEEIAQLVRFSVRKKDCRVSLEGTREGVRGPLTIAAEIFELTPSLVVVEVKKKGGDRAEYERFCNDELKPGLQNLMVEESATSSELSTPIQPSLLRGLSEPVPDISSDIETPLCIPSDD

SEQ ID NO: 1795 - protein, 332 aa, Dechloromonas aromatica RCB
MQRTQFTVPVLALAALIPHATMAADPTPDASQVVAAVEGVFGVTPGERRNHIKGTCAAGEFVGTKEAAKLSRSPLFSGKPVPVVARFSLSGGNPKAPDVAKSARGMALQFQLPKGQLHHITMLNTPMFGAANPQTFLDLMQALQPDPATGKPDPEKMKAFKASHPDNQAQAQYLASNNPPASYASSSYWGIHTFKFVDKKGKATLVRWQFVPQDGEKRLSDDELKTAGANFLESALIERAKQGAVRWDMMVSIGQPGDSETDPTVLWPAERPRIKAGTLTIRSAEAQKGAPCEPINFDPLVMAPGIQPTDDPVLRFRSPAYAVSFGKRLSER

SEQ ID NO: 1796 - protein, 119 aa, Brassica rapa subsp. pekinensis
EWVLCRIYKKRGAGKLLDEKEGFMDDVQIDETLAAVTNEADRRNEEEIMMMTSTKLPRTCSLAHLLEMDYMGPISHILTPFDLQHFDLNGMNESGWFGDLQVNQDEILNHHRQASMFQF

SEQ ID NO: 1797 - protein, 441 aa, Arabidopsis thaliana
MASNYVFSVLRSLLLLIHTVFLGQHHVSSATIIKSLPGFEGPLPFELETGYIGVGEEEEVQLFYYFIKSERNPKEDPLLLWLSGGPGCSSISGLLFENGPLAMKLDVYNGTLPSLVSTTYSWTKASSMIFLDQPVGAGFSYSRTQLLNKPSDSGEAKRIHEFLQKWLGKHQEFSSNPFYVGGDSYSGMVVPATVQEISKGNYECCNPPINLQGYVLGNPLTDFVYDYNSRIPFAHGMALISDELFESLKKTCKGDYRNVHPRNTECLKFIEEFNKCTNSICQRRIIDPFCETETPNCYIYRFLLAAYWANDETVRKALQIKKETIGEWVRCHYGIPYNYDIKSSIPYHMNNSINGYRSLIYSGDHDFEVPFLGTQAWIRSLNYSVIDDWRPWMIKDQIAGYTRTYANKMTFATIRGGGHTIEFKPEEASIMFQRWIKGQPL

SEQ ID NO: 1798 - protein, 185 aa, Brassica rapa subsp. pekinensis
FGFQLNMELQLALQMSEKRVLRTQTLLCDMLLRDSPAGIVTQSPSIMDLVKCDGAAFLYHGNYYPLGVAPTEAQIKDVVEWLLANHADSTGLSTDSLGDAGYPGAAALGDAVCGMAVAYITKRDFLFWFRSHTAKEIKWGGAEHHPEDKDDGQRMHPRSSFKAFLEVVKSRSQPWETAEMDAIHS

SEQ ID NO: 1799 - protein, 677 aa, Mycobacterium leprae TN
MDDRRLRTLPNEAYWIAVCGLLAFVVASARADSRGSGGTNNILQADHSMARAVHLMRHRGPDELSTWSDPDIDGFSGGVAFGFNRLSIIDIAHSHQPLRWGPPETPNRYILVFNGEIYNYLELRDELVIRHGAAFATDGDGESIVAGFHYWGTEILTRLRGMFAFALWDTIAHELFCARDPFGIKPLFMATGTNGTAVASEKKCLLELAEVIRFDTQIDTRALQHYTVLQYVPEPETLHRGVHRLESGCYARIRPEQLDPATTRYFVPQFAATPITSSTEQTRYGEITAVLADSVAKHMRADVTVGSFLSGGIDSTAIAALAIRHNPRLITFTTGFEHEGFSEIDVAAASAEAIGARHIVKVVTPNEFVAALPEIVWYLDEPIADPALVPLFFVAREARKHVKVVLSGEGADELFGGYRIYREPLSLKPFDYLPGPLRRSMGKVSKSLPEGMRGKNLLHRGSLTLEERYYGNARNFSEAQLQAVLPRFHTGWTHTDVTAAVYAESVGWDPVARMQHIDLFTWLRGDILAKADKMTMANSLELRVPFLDPEVFAVASRLPMQAKITRTTTKYALRRALESIVPAHVLHRPKLGFPVPIRHWLRAGELLEWAYALVNSSQAEHLVNLAAVHRMLDEHRGGISDHSRRLWTVLIFMLWHAIFIEHSVVPQISEPQYPVQP

SEQ ID NO: 1800 - protein, 466 aa, Bacillus pumilus
METNKQSYTLPEGFWWGSSASATQTEGSVPGDGKGPNIWDHWFEQEPTRFFDGVGPDVTSQFYRKYKEDIRLMKEIGHNSFRLSISWSRLLPEGTGAVNEEAVSFYNDVINELIAHDIEPFVNLYHFDMPMALQEKGGWVNRQVVDDYVSYAALCFQLFGDRVKKWFTHNEPIVPVEGGYMYSFHYPNEVDFQKAVQVGFHEILSNAKAIAAYKKLQQGGKIGIILNLTPSYPRSQHPRDVEAAEMADAFFNRSFLDPAVKGHFPEKLVEVLKKEGFMPSMEEGDLELIRENTIDLLGINYYQPRRVKAKEHMPHPQAPFMPNHYFDSFEMPGRKMNVYRGWEIYEKGIYDILKKVQTDYDNIECFISENGMGVEGEERFKDEEGMIHDDYRIDFISEHLKWVHRAIQEGSNVKGYHLWTFMDNWSWSNAYKNRYGFVSVDLQKDGKRTIKKSGYWFQSVSKNNGF

SEQ ID NO: 1801 - protein, 533 aa, Xylella fastidiosa Temecula1
MKGHMRIKTGIKKALILILSVVLVSLVAIAAHRFYIRLPQSRLFYAWKKVDEVYYDRTFAGFDWPAVLATYKKQLPRFDSDGQKTSPIINDMLSLLEVSHLQHFPAFLVPEEKKKTAVLASYFPELRDISGMVMVMDMLPRISRVLSLETWSPLYAHGVRVGDRILLDTLDTDISDKNKPVRLYCYHINTAGVKKEFEFDLPAPPLGAQQTAVPSGDHVLHIARFDQGEIQALKHVSEDRNSSITQLHYISLGAVTTALHLPKNKVIDVVKDSEADKAGVEIGSFIGNGTNIKAGPENIGGKKVIKTDSRYEVVLPDGRKVTFSINKIIPKLNDIEGIRSAQLIGKTLVITFNEMSDENTQWALQQIKNTPATAILLDLRYNTGGSGIAGEKLLAGFLASGTRIATEIRGKKTNEINVPAGYTPTDKPTAVLISLLSASGAELAARTLQFHHRARIYGAQSSGQVLTSRFYKLTDGTYMQIADTNLLDPAGKPIEWYGVMPDVKKWKTLSDVRAGRDPVLECALTDLSGGQCH

SEQ ID NO: 1802 - protein, 535 aa, Xylella fastidiosa Temecula1
MTGHMRIKTGIKKALILMLSVVLVSLVAIAAHRFYIRLPQSRLFYAWKKVDEVYYDRTFAGFDWPAVLATYKKHLPRFDWDGRETSPFIHNMLSLLEVSHLRHIPGFMAPEKIKEEAVLANYFPELRDISGMVLVQETLFKMSKVLSLETWSPLYAHGVRVGDRILLDTLDTDISDKNKPVRLYCYHINTAGVKKEFEFDLPAPPLGAQQTAVPAGDHVLHIARFARFDQGEIQALKHVIEDRNSPMTQLHYIPLGAVTTRPHLIRTKVIDVVKDSEADKAGVEIGSFIGDGTDPKTESKNIGGKTVVKSNGIYKMILPDGKKVTFSINKEITLSNFEGIRSAQLIGKTLVIAFNEMTDENTQWALQQIKNTPATAIVLDLRDNTGGSSIAVPKLLAGFLASGTRIATEIRGKKTNEINVPTGYTPTDKPMAVLIGLVSASGAEVTARTLQFHRRARIYGAQSSGQVLMSRFYKLTDGSYIQIPHANLLDPAGKPLEWYGVMPDVKKWKTLSDVRAGRDPVLECALTDLSGGQCH

SEQ ID NO: 1803 - protein, 231 aa, Zea mays
  misc_feature (198)..(198): Xaa can be any naturally occurring amino acid
  misc_feature (221)..(221): Xaa can be any naturally occurring amino acid
MVGFFRSGNLASRVFDRQFLSPRPGATVNTVRQFYENLVPSYTIYDIDCPDYSFRKFTDDGKYLVAFSRNHQDLIVYRPIWLTFSCHEECDSHDLPANAERFESFFKQLYSISLASSNEYICKDFFLYMECHQYGLFATSTAQSNDSSVTDGAIHGVPSIEKITFYLVRLEDGAILDEKAFCNDFINLAHSIGAYLYXDLVCIVSLRYQTIHVLQIRDSGXLVEVRRNWCI

SEQ ID NO: 1804 - protein, 372 aa, Arabidopsis thaliana
MSGESSSGSTEHCIKVVPTHGGRYVQYNVYGQLFEVSRKYVPPIRPIGRGACGIVCAAVNSVTGEKVAIKKIGNAFDNIIDAKRTLREIKLLRHMDHENVITIKDIVRPPQRDIFNDVYIVYELMDTDLQRILRSNQTLTSDQCRFLVYQLLRGLKYVHSANILHRDLRPSNVLLNSKNELKIGDFGLARTTSDTDFMTEYVVTRWYRAPELLLNCSEYTAAIDIWSVGCILGEIMTGQPLFPGKDYVHQLRLITELVGSPDNSSLGFLRSDNARRYVRQLPRYPKQQFAARFPKMPTTAIDLLERMLVFDPNRRISVDEALGHAYLSPHHDVAKEPVCSTPFSFDFEHPSCTEEHIKELIYKESVKFNPDH

SEQ ID NO: 1805 - protein, 315 aa, Glycine max
MGDTKERSGFCVWPDARQLCLGKGLLYGFMRLFSIPLKTLRGASRSLRVNQFCSVVNLSSSLQIELVPCLRDNYAYLLHDVDTGTVGVVDPSEAAPIIDALSKKDLNLTYIMNTNHHPDHTGGNAELKERYGAKVIGSEIDKERIPGIDIYLSDGDNWMFAGHEVHILATPGHTEGHVSFYFPGSGAIFTGDTLFSLSCGKLLEGTPKQMLSSLKRIMSLPDDTSIYCGHEYTSSNSKFALSIEPENEELQSYAAQVAYLRSKGLPTIPTTLKMEKACNPFLRTSSAAIRQSLNIAATANDAEALGGIRQAKDNF

SEQ ID NO: 1806 - protein, 545 aa, Aquifex aeolicus VF5
MAAKAIIYNEEARAKLKAGVDKLANAVKVTLGPKGREVILGKNWGTPVVTKDGVTVAKEIELKDKFENIGAQLVKEVASKTADVAGDGTTTATVLAQAIFHEGLRVAASGANVMEVKRGIDKAVKKIVEELKKLSKDVKERKEIEQVATISANNDPEIGKIIADAMEEVGKDGVITVEESKSAETTLEVVKGMQFDRGYLSPYFVTDPEKMECVLENPYILIYEKKITNVKELLPILEQVVRSGRPLLVIAEDVEGEALATLVVNHIKGVLKACAVKAPGFGQRRKDYLGDIAVLTGGQAITEDLGIKLESVTLDMLGQAEKVVVDKEHTTIIGGKGDPEQIKARIEQIKRQIQETTSDYDREKLQERLAKLSGGVAIIRVGAATEAELKEKKYRVEDAVHATKAAVEEGIVPGGGVALVRASEALEDLKGDNHDQQLGIDIIKKAVRTPLKQIAYNAGYDGSVVLEKVIELGKEKGVSWGFNAATGEYVDMYEAGIIDPTKVVRTAIENAASVAGTMLTAEALIADLPEEKKKDITPTDMPELD

SEQ ID NO: 1807 - protein, 394 aa, Pseudomonas syringae pv. syringae B728a
MLYNGLLDLSVWQLIAVTLVMTHITIIGVTVYLHRYSAHRSLELNAGLKHFFRFWLWLTTAQNTREWTAIHRKHHAKCETVDDPHSPVVKGLSTVLRKGAELYREEAQNQDTLRIYGKNCPEDWIERNLYSRYKLLGIALMAVIDVALFGVLGITVWAVQMMWIPFWAAGVVNGLGHAVGYRNFECRDAATNLVPWGIVIGGEELHNNHHTYPNSAKLSVKPWEFDMGWAWIKVFSFLRLAKVQRVAPIAHRVEGKGHMDMDTAMAILNNRFQIMAQYRKLVIAPLVAQELAKADESVRHQFRRAKRLLSRETSLLDDKHHLRIQTMLEHSHALKVIYEKRLALQQIWVKTSSNGHDMLSAMKEWIHEAEASGIQSLREFADQLKTYSLRPAHA

SEQ ID NO: 1808 - protein, 358 aa, Polaromonas sp. JS666
MLFEAFPLRATQLSNRTVMSPLTRSRASENNTPNSLMATYYAQRASAGLIITEGTSPSPNGLGYARIPGLFNDAQVQGWKLVTDAVHAKGGKIVVQLMHTGRVTHQANLPAGAEVLGPSPETCPGEMWTDAQGSQPHTPPRAMTEADIQAVIGEYTTAARLAIQAGFDGIELHAANGYLLEQFLNANVNRRTDSYGGTAEGRNRLVLEVARAAVKEIGAERVGIRLSPHGVVNSTGAFEGVDEQYLALVKELSALGLMYVHVLDHSAMGAPPVPAKLKSDLRAAFDGPFILAGGQNKASAQQALSEGRADLIAIGRPFIANPDLVERMRQDAPLIAPVPDTFYTPGAKGYTDYPMFAG

SEQ ID NO: 1809 - protein, 128 aa, Brassica oleracea var. alboglabra
DPFEGLLTPSSARDMAAFTNARVDWKETPEAHVFKADLPGLMKEEVKVEVEDKNILQISGERSKENEEKNDKWHRLERASGKFMRRFKLPENAKMEEVKATMENGVLTVTVPKAPEKKPEVKSIDISG

SEQ ID NO: 1810 - protein, 466 aa, Triticum aestivum
FRRWRDCRYRMPSGSIPKEAAYQIISDELMLDGNPRLNLASFVTTWMEPECGKLMMDSVNKNYVDMDEYPVTTELQNRCVNMIAHLFNAPIGEDETAIGVSTVGSSEAIMLAGLAFKRKWANKMKEQGKPCDKPNIVTGANVQVCWEKFARYFEVELKEVKLTEGYYVMDPKKAIEMVDENTICVAAILGSTLTGEYEDVKLLNDLLVEKNKKTGWNVPIHVDAASGGFIAPFLQPELEWDFRLPLVKSINVSGHKYGLVYPGVGWVIWRSKDDLPDELIFHINYLGTDQPTFTLNFSKGASQIIAQYYQLIRLGFEGYKHIMENCKLNAAVLKEGIDATGRFDVLSKADGVPLVAIRLKDSTNFSVFDISENLRRFGWIVPAYTMPADAEHVAVLRIVIREDFNRSLAQRLLADINKIVRELDAHAVHAIKLSNAAAAEGASQSTVDAVTEAFKGLAGNKKAGVC

SEQ ID NO: 1811 - protein, 193 aa, Oryza sativa (indica cultivar-group)
VNATLMNIADNPTNVQLPGMYNKEDNPRVPIIVTGNDFSTLYAPLIRDGRMEKFYWAPTRDDRVGVCKGIFRTDNVPDEDIVKIVDSFPGQSIDFFGALRARVYDDEVRKWVSDTGVENIGKRLVNSREGPPEFEQPKMTIEKLIEYGYMLVKEQENVKRVQLAEQYLSEAALGDANSDAMKTGSFYGSAPSS

SEQ ID NO: 1812 - protein, 339 aa, Sulfolobus tokodaii str. 7
MIEIDGSFGEGGGQILRTSLTLSALTKKPFRIYKIRANRPKPGLQRQHLTAVEAVKKLTNAKVKGDFVGSTELVFEPEDIVEKGDFEFDVGTAGSVTLILQTILPLLINRNIKVTIKGGTDVPKSPSIDYIRLTFLSLLEKIGIRVNLILIRRGHYPEGGGEIKITEVKGNPSSFSLMERGELLMIKGISHVSSLPSHIAERQAKSAKEFLLSKIKIPVEIEIDVRENERSKGSGIALTAIFEKTFLGSDSLGEKGKRAEIVGEEAAKSIYEEIISNATVDRHMSDMLMLYASLYYGEYIGSELTSHARTNSEIIKKFLNVNIQISGEKPFIFRAKKEL

SEQ ID NO: 1813 - protein, 197 aa, Raphanus sativus
MGRKKLEIKRIEKKSSRQVTFSKRRSGLIEKARQLSVLCDASVALLVVSSSGKLYSFSSGDNLVRILHRYEKQHADDLKALLDLQSKSLSYGSHNELLELVESKLVESNVGVSVDALVQLEGHLETALSLTRARKTELMLKLVDSLKEKEKLLKEENKVLASQMEKNNLAGAEADNMEIARAQISDINLPVTLPLLN

SEQ ID NO: 1814 - protein, 1005 aa, Staphylococcus epidermidis RP62A
MSKEIFDTFKFKCGAELKNRVLMAPMTIQAGYFDGSVTSEMIDYYQFRAGDASAIIVESCFVENHGRGFPGAIGIDNDDKIPGLKRLAEAIQAKGSKAILQLYHAGRMANPKFNEGEQPISASPIAALRPDAVPPREMTHAQINQMIDDFGEATRRAIEAGFDGVEIHGANTYLLQQFFSPHSNRRQDSWGGSREKRTRFPIEVLTKVQHVVAEKEASHFIIGYRFSPEEIEEPGIRFEDTMFLLNTLAEYEPDYFHISANSYQRTSIVNQEDTEPLINKYIKMQSAQLAKIPLIGVGSIAQRQDAEHALELGYDLLSVGKAYLVEPQWTDKISQNEEVEQFVDIHDQKVLHIPSPLWKVMDFMILDKEEEHRKYEKLKALQNKKVKFNKGTYHVYAKGHNGNLPMKVQLSEDKIVSIEVDDSGESEGIANPVFERLPQDIINGQTLNVDVISGATVTSEGIVQGIADAIEQAGEDPDILRARPKPVVQWSDEVVEETTDVVVIGTGGAGLSAAATVLDEGKEVIMLEKFAAIGGNTIRTGGQVNAAEPKWQNAFPALAGEKETLIQLLNHDENDIDEAYIEDFNTLKRQIKDYLENSSNEDEYLFDSVELHRIQTYLGGKRKDRNNVEISGDYDLVKTLTDNVLESVYWLKDKGVHFDRSFVDMPVGALWRRGHKPMKAQGLEYIENLGDYVKHNHGRIFTETTAEKLIKEGNQVVGIEARKANGAKVKIHTRHGVVLATGGFGANTKMLQQYNTYWDNIPDDIKTTNSPAITGDGIRLGVQAGADIVGMGFSQMMPISDPKTGALFTGLIVTPSNFVFVNKEGQRFVNEFESRDVLSKAALEQKDGIFYIIADANIKALAMNTTEDKINQELEDGTLVKADTLEALAQKLNIDTTTFVNTIERYNTFVEQGQDEDFNKNAFDLKIEKAPFYATPRKPAIHHTMGGLKINTHAQVIDVEGHIIEGLYAAGEVAGGIHAGNRLGGNALADIFTFGRIAGQSAVTK

SEQ ID NO: 1815 - protein, 197 aa, Brassica oleracea var. capitata
MGRKKLEIKRIENKSSRQVTFSKRRSGLVEKARQLSVLCDASIALLVVSSSGKLYSFSAGDNLVRILDRYGKQHADDLKALDLQSKALSYGSHNELLELVDSKLVESNVGGVSVDTLVQLEGVLENALSLTRARKTELMLKLVDSLKEKEKLLKEENQALASQKEKKNLAGAEADNMEMSPGQISDINLPVTLPLLN

SEQ ID NO: 1816 - protein, 221 aa, Cucumis sativus
MGRGKIEIKRIENTTNRQVTFCKRRNGLLKKAYELSVLCDAEVVLIVFSSRGRLYEYANNSVKATIDRYKKASSDSSNTGSTSEDNTQFYQQEAAKLRVQIGNLQNSNRNMLGESLSSLTAKDLKGLETKLEKGISRIRSKKNELLFAEIEYMRKREIDLHNNNQMLRAKIAVSERNVSMMGGEFELMQSHPYDPRDFFQVNGLQHNHQYPRQDNMALQLV

SEQ ID NO: 1817 - protein, 92 aa, Ambrosia artemisiifolia
MSILGGITEVKDNDNSVDFDELAKFAIAEHNKKENAALEFGKVIEKKQQAVQGTMYYIKVEANDGGEKKTYEAKVWVKLWENFKELQELKLV

SEQ ID NO: 1818 - protein, 146 aa, Treponema denticola ATCC 35405
MNSLSLFSPSFTDSVFDALDRSLGPNFGVFAPIKNASCGMPSVDIRETEKAYVMEVDLPGYSEKDVEISLKDRLMTISSSKKEEKEDKGAEYIIKERSSRHFMRRFTLPEDINSDEVSAKFENGVLVVNIPRKPDTQPKQIEIKTA

SEQ ID NO: 1819 - protein, 277 aa, Glycine max
  misc_feature (232)..(232): Xaa can be any naturally occurring amino acid
MEGSTTSSELPPGFRFHPTDEELIVYYLCNQATSKPCPASIIPEVDLYKFDPWELPDKTEFGENEWYFFSPRDRKYPNGVRPNRATVSGYWKATGTDKAIYSGSKNVGVKKSLVFYKGRPPKGAKTDWIMHEYRLAESKIPASRKIGSMRLDDWVLCRIYKKKSMVKALEHKEAHPEVQIANLAPANHDVEQKMMNLPRTWSLTYLLDMNYLGPILSDGSYCSTLDFQINNXGLDPFVKSQPVEMNNYVADSGKYQVKQSSTIDQPIYVKQMYDLLG

SEQ ID NO: 1820 - protein, 549 aa, Frankia sp. EAN1pec
MPKILTFNEDARRSLERGVNALADAVKVTIGPRGRNVVINKSYGAPTITNDGVTIAREVELDDPYQNLGAQLAKEVATKTNDVAGDGTTTATVLAQEMVRQGLRQVTAGAAPLSLKIGIEAAVAAVSSALLEAAIEIGSKETIAQVAAISAQDAQVGELIAEAMDKIGKDGVITIEESQTMGLDLELTEGMQFDKGYISPYFVTDQESMEAVLEDAYVLLHPGKISALNDILPILEQVVQERKPLLIIAEDVEGEALSTLVVNAVRKTFQVVAVKAPGFGDRRKAMLQDLAVLTGGQVVATEVGLKLDSITLAELGRARRIVVDKDLTTIVDGAGDADAVAERVRQMKAEIELSDSDWDREKLQERLAKLAGGVAVIRVGAATEVELKEKKHRLEDAVSATRAAVEEGIVAGGGSALVHAAKVLDGDLGLTGDERSGVRVVRAALDAPLTWIARNAGLEGAVIVSKVREGDVGRGFNAATGEYVDLVAAGVVDPVKVTRSAVANAASIAALLITTESLVAEKPEEAEAGHGHDHSHGGHGHGHSHGPGF

SEQ ID NO: 1821 - protein, 165 aa, Mesorhizobium loti MAFF303099
MGDEERRWPCSRKSEGVAGRLSEDETMIARMLFGADPYRNMRRLQDEVSRLEFPAVNAFVNQDGVIITAELPGVRSEDLDILIHRDSVTLSGERQAEAEDARRGYHRRERRQGRFVRTVSLPFLVDPNNVGANLINGLLTLGLPRAEEDKPKRIHVNASKEARHG

SEQ ID NO: 1822 - protein, 783 aa, Cryptococcus neoformans var. neoformans JEC21
MTTNLYAIAGPSKPTTPTSTPSPRSEPPSPLKSLTSLPTNPLNSHGTSTPNTLTNQLSSTGIGISKPGLSVDENGEVMKVPAFLNKLYTMVSDPEVDDLIYWGESGDSFFVPNAELFGRELLPRWFKHSNFSSFVRQLNMYGFHKVPHLQSGALKNETPIELWEFANPYFKRGQPQLLTKVTRKNNRPSNSGVGPSSSVGGSGAGGGMSTRSASAAAASGSASGQIQQAISQGHEAGNHSTSGKYLITDGTTPGSVPPSHTSAGPLIAPQTLDLSAINSGIAAIRQTQASIATDLRKLQASNEALWRQAYETQEKQRKHEETIDLIVSFLERLFGTEGEGLKGLKEAMRRGVGVRRDRDGREGRDSRDSRFAEDDDGGQKKRRRVGIDRMIEGGTGDGTGEHGEIESPTSDDRLVEIGSNSEYSIPSVKRTSSSSHPISLGQLGSSRFTALPSEDPSPSASGPGSTSYEGLHTTQTNARGAGADVNVTDPTLGMNHLSPLSDTDPLLPSSSNALAPYSSHLPFPSSNSNQSNSFNPSNPSSAWASNPSQPLLSPTSAAAAAHAYNLDPSLLQTTIGSLLQSPAAAQMFLNSLSASAQGQALASHSHPHNPSPLNPNPNGNASTSASASAHGMNTGGMGTGSGTKDVDPTLALFSPLPSHSSLTSQSNDLLKSYSDALTVGEGVDNLQESIDSLVRSMGLDLPNGGSSVGVDVGDGAGVGTETGEGDGEFNVDEFLQGLAKEGEEEGEREVEGDGGVSSSGAGAGAENGRKEDVIAQSGLKSES

SEQ ID NO: 1823 - protein, 159 aa, Zea mays
RKMARKPLDYEELNENVKRVQYAVRGELYLRASELQKEGKKIIFTNVGNPHALGQKPLTFPRQVVALCQAPFLLDDPHVGLMFPADAIARAKHYLAMAPGGLGAYSDSRGIPGIRKEVADFIHLRTTILPAEEDFPAIMSSFKKFNDSFMEQYEGYSRL

SEQ ID NO: 1824 - protein, 519 aa, Zea mays
DWVPRGRPGLFVLIHPQATVHSQLPRNGGGGDGGVSRPRRKMARKPLDYEELNENVKRVQYAVRGELYLRASELQKEGKKIIFTNVGNPHALGQKPLTFPRQVVAPCQAPFLLDDPHVGLMFPADAIARAKHYLAMAPGGLGAYSDSRGIPGIRKEVADFIHKRDGYPSDPELIYLTDGASKGVMQILNTIIRNEMDGILVPVPQYPLYSATISLYGGSLVPYYLEEEANWSLDFANIRQAVAEARSKGISVRAMVMINPGNPTGQCLSEANIRELLRYCYHENLVLLADEVYQQNVYQDERPFISARKVMFDMGPPISREVQLVSFHTVSKGYWGECGQRGGYFEMTNLPPKTVDEIYKVASIVLSPNVPGQIFMGVMVNPPKPGDISYPKFTAESKSILESLRRRARMMTDGFNSCRNVVCNFTEGAMYSFPQIQLPARAIEAAKRAGKAADVFYCLKLLEATGISTVPGSGFGQKEGVFHLRTTILPAEEDFPTIMSSFKKFNDSFMEQYEGYSRM

SEQ ID NO: 1825 - protein, 771 aa, Candida glabrata CBS138
MSEKDGGNTVFINKLYDLLENKDLDDLIWWAANGESFLIRPSESFSQNLAHYFKHTNITSFVRQLNIYGFHKISNDHFHNLKREKKQKSSTDNNTGVSNNNSGDENIKVWEFKHSGGLFKKGDLENLKLIKRRSSSRTIPSLSLASSNTNTSTLETNDGAEIDNVKVIASAVHNATEHLKKKDKVKKEGKKSSKKSTKLKNEPTVDISNTETTSAAITNESEQSSNKRATRVYKSVGTISNQDSKNPEKLTKKPKKNSNLKNKGKKSKSNSVDGQSIDNIQPNENQPINIQVNTTEIPTDNTLHHYNETLYEQSIQLNHQIAQMRNTNMDMLAILELMSKLAEMNKEVLNINNSEKIPELMANHYRFFDAQLTSLKNNILDRINNTNIHKFGMDSNDLRSASQTNIHLSHPIAQNMVYSSADQAIPKSVPYYLKQGQRTSPDNGTTTPAGAQNYSKNQVVQHPQAANDYFSSVHVQTANPFEKFQTEKNGIINVTARRHMSVLVDPLTPASMMSVPTTTQSSLSGPSLYNQQHAIIFPHDLNQAFNSRSEPTITPITGHHSNFTRASDSNLMNTKQTIVNSMKNRASYPSRRTESPLKYSSGMPIEEEQRWEYKITKDNGRNTDIPQLPSNQCQIDSPVPVRSPYNKFVSPHSFYAGGRNISPPMNGNVDMLAQRPSTEVVSLTSSDNKIDNAVVIKRSSTANPILRGSSSEKENKESSNKLIGSTVTEKTSRTKRNSSGVYSLLNGTIKEEKANETFIDTDSHVDKKIKL

SEQ ID NO: 1826 - protein, 123 aa, Dianthus caryophyllus
MITIHHPWVFAFGLLGNFISFMVFLAPLPTFIRVYKKKSTEGFQSFPYVVAIFSAMLWIYYALLKGNSLLLITVNVTGVIIETIYVIIFITYAPRQARISTMKLLLFMNFGGFCMIVPRPRPR

SEQ ID NO: 1827 - protein, 481 aa, Photobacterium profundum SS9
MTKSTLTQANGTPVVDNDNSLTAGPSGPILLQDTWLLEKLAHFDRERIPERVVHAKGSAAFGTFTVTHDISALTKANLFSEVGKETDVLLRFSTVAGEKGAADAERDVRGFALKFYTDEGNWDLVGNNTPVFFIRDPLKFPDFIHTQKRNPITNLRSATAAWDFWSRHPESLHQVTILFSDRGIPTDYRHVNGYGSHTYSFINSNNERSWVKFHFKTQQGHKHYTDEEAVNVVGKSRESSQVDLFMNIEEGNFPRWDVKVQIMTEQQAQEVSFHPFDLTKVWPHGEFPLIDVGVLELNRNPENYFAEVEQAAFSPANIVSGIGFSPDRMLQGRLFSYGDTQRYRLGVNHGQLPVNKPKSPVHTTHRDGSMRGDDNGGKEPNYAPNHYNAYVPTHEQEPALALEKAALHYDFREYDEDYYTQPGNLYRIMDAEQQQRFIQNLIASLSEVDCEQIKRNQIYHFYQADKSLGKALAEGLGVSIG

SEQ ID NO: 1828 - protein, 547 aa, Ralstonia eutropha JMP134
MAAKDVVFGDAARAKMVEGVNILANAVKVTLGPKGRNVVLERSFGGPTVTKDGVSVAKEIELKDKLQNMGAQMVKEVASKTSDNAGDGTTTATVLAQSIVREGMKFVAAGMNPMDLKRGIDKAVAAAVEELKKVSKPTTTSKEIAQVGAISANSDTSIGERIAEAMDKVGKEGVITVEDGKSLADELEVVEGMQFDRGYLSPYFINNPEKQVVQLDSPFVLLFDKKVSNIRDLLPVLEQVAKAGRPLLIIAEDVEGEALATLVVNNIRGILKTAAVKAPGFGDRRKAMLEDIAILTGGTVIAEEIGLTLEKATLNDLGQAKRIEIGKENTIIIDGAGDAAAIEGRVKQIRAQIEEATSDYDREKLQERVAKLAGGVAVIKVGAATEVEMKEKKARVEDALHATRAAVEEGIVPGGGVALLRARAAISALTGENPDQNAGIKIVLRAMEEPLRQIVLNAGEEASVVVAKVIEGKGNYGYNAASGEYGDLVEMGVLDPTKVTRTALQNAASVASLMLTTDCAVAETPKEESAPAMPGGMGGMGGMEGMM

SEQ ID NO: 1829 - protein, 255 aa, Xanthomonas campestris pv. vesicatoria str. 85-10
MRLIALPAFDDNYIWALIAADGRAIIVDPGQAEPVLAAAQHQGLVPSAVLLTHHHGDHIGGVAELQQRWPDLELFGPADERIPADAHQVGHGERLRLLDVEFQVLQVPGHTRSHIAFVADGYLFSGDTLFSLGCGRMFEGTAPQMFDSLQRLASLPGETLVCCGHEYTLANAAFALHVDPTNAALQRRQQEAQAMRHAARPTLPISLKSELATNPFLRTGRPEIRAAVAPRAAGELSSEVDVFAELRRWKDEFRS

SEQ ID NO: 1830 - protein, 499 aa, Glycine max
MVLTSTATHPDEQDQSLNYTFASRYVREPIPKFKMPEKSIPKDAAYQIINDELMLDGAPRLNLASFVTTWMEPECDKLIMASLNKNYVDMDEYPVTTELQNRCVNIIANLFHAPISDDETAVGVGTVGSSEAIMLAGLAFKRKWQTKRKAEGKPYDKPNIVTGANVQVCWEKFARYFEVELKEVKLKEGYYVMDPAKAVEMVDENTICVAAILGSTMTGEFEDVKLLDELLTKKNNETGWDTPIHVDAASGGFIAPFLYPDLEWDFRLPLVKSINVSGHKYGLVYPGVGWVVWRSKDDLPDELVFHINYLGSDQPTFTLNFSKGSSQIIAQYYQLIRLGFEGYKNIMENCWENARVLKEGIERTGRFNIISKDIGVPLVAFSLKDSSQHTVFEIADHLRKFGWIVPAYTMPPDAQHIAVLRVVIREDFSRGLAERLAADIEKVVKLLDTLPSPLTTKAVHITAITSETGEKIKKAAIETQKEIAFYWKRLVDGKRLGAC

SEQ ID NO: 1831 - protein, 213 aa, Brassica napus
  misc_feature (22)..(22): Xaa can be any naturally occurring amino acid
RRVGSFKKVARSMGYGEKDISXVSFQSISKGYYGECGKRGGYMEVTGFTSDVREQIYKVASVNLCSNISGQILASLVMSPPKPGDESYESYIAEKEGILSSMARRAKTLEEALNKLEGITCNRAEGAMYLFPCINLPQKAIAAAEAAKTAPDTFYCKRLLNATGIVLVPGSGFRQVPGTWHFRCTILPQEDKIPAIVNRLTEFHKSFMDEFRD

SEQ ID NO: 1832 - protein, 201 aa, Triticum aestivum
  misc_feature (164)..(164): Xaa can be any naturally occurring amino acid
MDPVTASIHGHHLPPPFNTRDFHHHLQQQQLHLKSEDDHGGGSPFGGHGTKHGHEDDENSGNGNGSGGELALISPSGGGLQDGGENGSRRPRGRPAGSKNKPKPPIIITRDSANTLRTHVMEVAGGCDISESITAFARRRQRGVCVLTGAGTVTNVTLRQPASXGAVVALHGRFEILSLSGSFLPPPAPPEATGLTVYLAG

SEQ ID NO: 1833 - protein, 744 aa, Hevea brasiliensis
  misc_feature (642)..(642): Xaa can be any naturally occurring amino acid
  misc_feature (645)..(645): Xaa can be any naturally occurring amino acid
  misc_feature (659)..(659): Xaa can be any naturally occurring amino acid
MEACNCIEPQWPADELLMKYQYISDFFIALAYFSIPLELIYFVKKSAVFPYRWVLVQFGAFIVLCGATHLINLWTFTMHSRTVAIVMTTAKVLTAAVSCATALMLVHIIPDLLSVKTRELILKNKAAELDREMGLIRTQEETGRHVRMLTHEIRSTLDRHTILKTTLVELGRTLALEECALWMPTRSGLELQLSYTLRQQNPVGYTVPIQLPVINKVFSCNRAVKISPNCPVARIRPFAGKYMPGEVVAVRVPLLHLSNFQINDWPELSTKRYALMVLMLPSDSARQWHAYELELVEVVADQVAVALSHAAILEESMRARDLLMEQNVALDLARREAETAIRARNDFLAVMNHEMRTPMHAIIALSSLLQETGLTPEQRLMVETILKSSNLLATLINDVLDLSRLEDGSLQLDLGTFNLRAVFREVLNLIKPIASVKKLPVTLNLAPDLPEYAIGDEKRLMQTILNVVGNAVKFSKEGNISITAFVARPESLRDLRFPDFFPVPSDDHFYLRVQVKDEGLGINLQDIPKLFTKFAQNQSLATRNSGGSGLGLAICKRFVNLMEGHIWIESEGLGKGCTAIFVVKLAILECSNESKHPFMQNGPKPNQGAKQTSFMGPESSLLMDDTGGYQDGNKRTFWGTLXCDXTTVSSSDECLRVVXLDHKVVFMDVCMPDGLELLSAYMKDFTKRHERPLIVALYWNANKVTKENCMKVGMDGVILKPVSVDKMRGVLSDLLEHRVLFEAM

SEQ ID NO: 1834 - protein, 275 aa, Geobacillus kaustophilus HTA426
MNGLQDCATLHNGVKMPWVGLGVYKVKEGEEVRSAVRTALEIGYRHVDTAAFYENEEGVGRAIRESGIPREQVFVTTKVWNTDQGYETTLKAFDKSLKKLGFDYVDLYLVHWPVKGKYKETYKALEKLYKDGYVRAIGVSNFHIHHLQDVLADCEIKPMVNQVEYHPRLTQKELLTFCRENGIQLEAWSPLMRGEILSEPTIIDIGRKYGKTPAQVVLRWDLQHGVVTIPKSVTPARIKENADIFDFSLTDEEMKQIDALNLNKRVGPDPDNFNF

SEQ ID NO: 1835 - protein, 424 aa, Xylella fastidiosa Temecula1
MSNSPQTPLVTRQRLSEVRYEIRGELARRARELEAEGRKLIKLNIGNPGAFGFRAPEHLQRAIADDMGRTDPYTHQQGLPIAREAIAAAYARRHYPDVDADRVFVGNGVSELIDLSLRALLNPGDEVLVPSPDYPLWSAATILNDGRPVYYRCAPENGFQPDAVEIETLVSSRTRAIVLINPNNPSGANYSQELLERIVAISVKHHLLLLVDEIYDQILYDGAVFVPVAPLAGTHPCITFSGLSKVHRACGWRVGWALLSGSSIQVDNLRNAMDLLGALRLCANVPGQYAIDAAVNGPDTITPLCSPGGPLYETRRAVIDACAASEHLSLVVPAGALYAFPSVVGPAARHFDDYAFALELMNEEGVLVVPGSSFNVPYRDHFRVTLLPDAGLIREVFSRIDRALSRRAEVAEKVVPLKSRSAAA

SEQ ID NO: 1836 - protein, 459 aa, Bacillus cereus ATCC 14579
MNEKYDKHRKELLEEDFNKHRELTEPAKFHSQTVGSRGPVLEQDSVLHESLQQFIHEKILERPVHVKGFGAFGYFQTIYSMSEHTKLSFLQNSNEKVPVMVRFSLAVSTKGTPDTARNVRGFSTKFYTKEGIFDLLCNHIPVFSVRDPMRFPETIQALLPSPKNNLIDPNRFWSFVAKAPESIHFVVRLYSNNGTAKSLRHIPGHSVNTYVWRNAEGNRKYVKYHWYPFEGVQYITSKEAIKLAAENPDYSGKDLYDAIENGKPVEYGLYVQLMDPKDETHLSYDPLDDTKVWDEQTYPLIPVGKMVLNKNPENFMEQVEKVAFSPSNLLEGAELSDDKMLQGRANIYSDSQRRRIGPEFRKLTINQQQDWTPANQITTGEGRYVEGKLERASITKQDDFTQAGEFYTKLQPIEKEHLAENLASDLKVISDDIREIVLGYFNQVSTDLKTSIETKMKEH

SEQ ID NO: 1837 - protein, 224 aa, Triticum aestivum
HASAGVEYCHRNMVVHRDLKPENLLLDSKYNVKLVDFGLSNVMHDGHFLKTSCGSLNYAAPELISGNLYAGPEVDVWSCGVILYALLCGKVPFEDDNIPKLFKKIKMRQNGGFYILPSYLSDLAMDLIPRILVVDPMKRITIREIRDHPWFQNRLPRYLAVPPPNTPQQAKMINEDTLQNVVNLGYDKDHVGGSLCNRLQNEATVAYYLLLDNRFRATSDYWGR

SEQ ID NO: 1838 - protein, 615 aa, Bacillus cereus ATCC 10987
MCGITGWVDYKRSLEGERDVVTKMAETLAKRGPDDNKVWIKGNVAFGHKRLIVVDPEGGKQPMTCLKGETNYAICYNGELYNTEDIRKELLRRGYTFKGHSDTEVLLASYMEWKEECVDHLNGIYAFAVWDEQKEQVFIARDRLGVKPLFYKYDSGRLLFGSELKAILAHPDVKAEVTLEGLSEIFGLGPSRTPGHGIYAGIKELRPGHAMTFSKNGLCIWRYWNVESKKHEDSFEETVEKTRFLLQDAITRQLVSDVPLCTFLSGGVDSSAITAIAAKEYERSGKGQLHTYSIDYEDNDKYFKANAFQPNSDAPFIHLMTETFQTIHHRCVISNEQLAQYLTEAVLVRDLPGMADIDSSLLWFCREIKQDFVVGLSGECADEIFGGYPWFYREDDLQSSAFPWMRSTEAREQLLKKEWRNKLNLQQYVQRRYEESIQEVPILEGESPIEAKRRQLFYLNMVWFMTTLLDRKDRMSMGASLEVRVPFADHRLVEYAWNIPWEMKMYKNREKGLLRKALEGLLPNDILYRKKSPYPKTHNPHYTKAVTVWLQDLLTDKGSILHELFDKEQLSGLIESGGSAFQTPWFGQLMTGPQLLAHLAQIHVWFKEYGVNIKE

SEQ ID NO: 1839 - protein, 314 aa, Ashbya gossypii ATCC 10895
MSMETPPVDIDNIIDRLLEVRGSKPGQQVDLEEHEIRYLCSKARSIFIKQPILLELEAPIKICGDIHGQYYDLLRLFEYGGFPPESNYLFLGDYVDRGKQSLETICLLLAYKIKYPENFFILRGNHECASINRIYGFYDECKRRYNIKLWKTFTDCFNCLPIAAIIDEKIFCMHGGLSPDLNTMEQIRRVMRPTDIPDVGLLCDLLWSDPDKDIVGWSENDRGVSFTFGPDVVSRFLQKLDMELICRAHQVVEDGYEFFSKRQLVTLFSAPNYCGEFDNAGAMMSVDESLLCSFQILKPAVKPSAGRGQPKKKK

SEQ ID NO: 1840 - protein, 449 aa, Bacillus cereus ATCC 10987
MNPNNRLTTNQGAPVGDNQNSRTAGRRGPVLLEDYHLVEKLAHFDRERIPERVVHARGAGAHGVFVTKNSMKQYTKAAFLQNEGTETPVFVRFSTVIHGQGSPETARDPRGFAVKFYTEEGNYDIVGNHLPVFFIRDAIKFPDMVHSLKPAPDTNIQTPDRYWDFMTLSPESTHMMTWVFSDYGTPASYREMEGFGVHSFKWINAEGKIVYIKYHWKPQQGVRNLSAKEVQEVQGKDFNHATRDLFDAIEKGNYPKWDLHVQVMQLEETDSLDFDPLDPTKVWPEDRFPLMEVGTMTLNRNPKNFFAEVEQVAFSPSATVNGIEPSEDKLLQGRLFSYPDTQRYRLGANYLQIPVNCPYAAVHNQQRDGAMQTNQNPSTINYEPSRHAENPVEDPAYRDSTMKVEGYVSREKIDKPNDFKQAGERYRSFSKEEQDNLIANLTNDLKRRK

SEQ ID NO: 1841 - protein, 471 aa, Vibrio sp. Ex25
MILVWFRRDLRTLDHTALKAALDSGQPVVACFIATPEQWREHHMAPMQADLIARRLEYLNDELESLNVPFLYKEVPSFSDCTEVISEWAKTLEATSVMANIHYEVNERELDAQVSEALASHDIDFELFHDKCVHPPTTVLNKQGEYFKVFTPFKRAWLTQFQMPAVTKPQEQAPLSSKLLEQLEPIRFSSDFTFSYPRESSEDWFASTNDVLKQLREFARERSDAYKEERDFPAIDGTSQLSPYLAIGALSPRQCIARLYAENQQNDLTEGKATWLSEIIWREFYQHLLVFEPKLVKGKGFIDWEDKIQWSYDEQAFERWKAGATGYPIVDAAMRQLNQTGWMHNRLRMVVASFLTKDLHIDWRWGEAYFMSKLVDGDFAANNGGWQWSASTGCDGQPYFRIFNPISQGEKFDSDGQFVRHWVPEIKSVPNKYIHKPWTWEGFSLLEYHKPMVDHKTEREITLRLFKSAKE

SEQ ID NO: 1842 - protein, 138 aa, Zea mays
  misc_feature (45)..(45): Xaa can be any naturally occurring amino acid
EGVQQIIRTELMLDANPRLNLGSLVPRWMEPKCDKLIMDSTTKNXVDMAEYPVPPEPQNPWVNIKAPLFNAPIKEDETAIGVGTVGSSEAIMLAGLAFKRKWQNKRKEQGKPCPPPNMVPGANVQDPGPPNNGCKCWV

SEQ ID NO: 1843 - protein, 137 aa, Brassica napus
  misc_feature (101)..(101): Xaa can be any naturally occurring amino acid
HASADSERDPHSPKEGFWFSHLLWIYDSAYLVTKCGRRTNVDDLKRQWFYRFLQKTVLFHILGLGIILFYLGGMSFVTWGMGVGAALEVHVTCLINSLCHXWGTRTWKTNDTSRNVWWLSVFSFGESWHNNHHAFES

SEQ ID NO: 1844 - protein, 238 aa, Triticum monococcum
MGRGKVVLQRIENKISRQVTFAKRRNGLLKKAYELSLLCDAEVALVLFSHAGRLYQFSSSSNMLKTLEKYQRYIFASQDAAVPTTDEMQNNYLEYMELKARVEVLQRSQRNLLGEDLAPLSTIELEQLEGQVGKTLRQIRSRKTQVLLDEMCDLKRKEQILQDANMTLKRKLGEIELEATPDPPQQPQQQQMWQGDRGVPPHTPPQPEHFFQALERYPSLQPVFRGMDVNQPPPAWMA

SEQ ID NO: 1845 - protein, 259 aa, Poa annua
MGRGRVELKRIENKINRQVTFSKRRNGLLKKAYELSVLCDAEVALIIFSSRGKLYEFGSAGTTKTLERYQHCCYNAQDSNSALSETQSWYQEMSKLKAKFEALQRTQRHLLGEDLGPLSVKELQQLEKQLECSLSQARQRKTQLMVEQVEELRRKERQLGEINRQLKHKLDAEGSSSNNYRAMQQLTWAAGTVVDEGAAAYHMQHQQQQQPNHSAAMDCEPTLQIGYPHQFAAPEQAANNIPRSSGQGGENNFMLGWVL

SEQ ID NO: 1846 - protein, 502 aa, Arabidopsis thaliana
MAQVLSTPLAIPGPTPIQFMAGLLARIVTKNTNKETSTPESPRSPRTPQGSILMDKYEIGKLLGHGSFAKVYLARNIHSGEDVAIKVIDKEKIVKSGLAGHIKREISILRRVRHPYIVHLLEVMATKTKIYIVMEYVRGGELYNTVARGRLREGTARRYFQQLISSVAFCHSRGVYHRDLKLENLLLDDKGNVKVSDFGLSVVSEQLKQEGICQTFCGTPAYLAPEVLTRKGYEGAKADIWSCGVILFVLMAGYLPFDDKNILVMYTKIYKGQFKCPKWFSPELARLVTRMLDTNPDTRITIPEIMKHRWFKKGFKHVKFYIENDKLCREDDDNDDDDSSSLSSGRSSTASEGDAEFDIKRVDSMPRPASLNAFDILSFSDLSGLFEEGGQGARFVSAAPMTKIISKLEEIAKEVKFMVRKKDWSVRLEGCREGAKGPLTIRVEIFELTPSLVVVEVKKKGGNIEEYEEFCNKELRPQLEKLMHYQADEVEEVMCLPPEIEQ

SEQ ID NO: 1847 - protein, 251 aa, Betula pendula
MGRGRVELKRIENKINRQVTFAKRRNGLLKKAHELSVLCDAEVALIIFSNRGKLCEFCSSPSMLKTLERYQKCNFGAPEPNVSAREALELSSQQEYLKLKARYEALQRTQRNLMGEDLGPLSSKELELLERQLNMSLKQIRSIRTQCMLDQLTDLQRKEHMLNEANRTLKQRLVDGYHIDTVLQLDQSANDVGYGRQPAQTQDDCFFHPLCEPTLQIGYQHDHPMTVVTAGSGSVVTAGPSVNNYMSGWMP

SEQ ID NO: 1848 - protein, 348 aa, Pyrobaculum aerophilum str. IM2
MAVRIDGSYGEGGGQILRTSIALSALLGRPVEIVNIRAKRANPGLQPQHLTGVKVAALLTDAEVKGAEKGSTRLYFEPKTLKCGNFSIDIGTAGSISLIVQTLAPILLYAPCPTQITVTGGTDVAWAPPIDYMRFVFTKVLERFGAKLSIELIRRGHYPRGGGRAVVRAEPVKRLKAVESEEFGNVVKISGISHAVNLPPHVAERQAKAAREELSKMGLDADIAIEVRNDGLGPGSGVVIWAVSDAGNVIGGDSLGERGKPAETVGKEAAQKLIAVLKTRASVDPHMADMAVLYMALAEGRSRISTSEETMHLKTNMYIIEQFLRVKFSTMEKAGRYTIEVEGVGYNR

SEQ ID NO: 1849 - protein, 242 aa, Betula pendula
MEFQNQSMSVSPQRKLGRGKIEIKRIENTTNRQVTFCKRRNGLLKKAYELSVLCDAEIALIVFSSRGRLYEYANNSSVKTTIERYKKACAESSNSGSVSEANTQFYQQEAAKLRGQIRSVQNSNRHLLGEALSELNFKELKNLEIKLEKGINKIRSKKNELLFAEIEYMQKREAELHNNNQILRAKIAENERNQQNLNVMPGGGNYELMQSQSYDSRTYFQVDALQPNHHYPRQDQIPLQLV

SEQ ID NO: 1850 - protein, 318 aa, Pachysolen tannophilus
MTLQYYTLNNGRKIPAIGMGCWKLENAADMVYAAIKEGYRLFDCACDYGNEKEVGEGINRAIKDGLVKRKDLFITSKLWNNFHAKENVKKALMKSLSDFNLDYFDLYLMHFPISFKFVPFEEKYPPGFYCGDGDKFIYEDVPIIETWRAMENLVDEGLVKSIGVSNVSGGLLEDLIKAARIKPASLQIEHHPYLQQNKLVEYAQLKGIVVTGYSNFGPLSFLELGNETAKKTQPLYENKTITTIAAKHGKTPFQVLLRWVNQRGIAIIPKSTFPNTLAVNLHVDEFDLTKEDFEEIAKLDRHLRFNDPWTWDKIPTFV

SEQ ID NO: 1851 - protein, 639 aa, Butyrivibrio fibrisolvens
MSQKVFISEDDEYLFGQGTHYDIYDKLGAHPSEEKGKKGFFFAVWAPNAADVHVVGDFNGWDENAHQMKRSKTGNIWTLFIPGVAIGALYKFLITAQDGRKLYKADPYANYAELRPGNASRTTDLSGFKWSDSKWYESLKGKDMNRQPIAIYECHIGSWMKHPDGTEDGFYTYRQFADRIVEYLKEMKYTHIELIGIAEHPFDGSWGYQVTGYYAPTARYGEPTDFMYLINQLHKHGIGVILDWVPAHFCPDEFGLACFDGTCIYEDPDPRKGEHPDWGTKIFNLAKPEVKNFLIANALYWIRKFHIDGLRVDAVASMLYLDYGKKDGQWVPNKYGDNKNLDAIEFFKHFNSVVRGTYPNILTIAEESTAWPKVTAPPEEDGLGFAFKWNMGWMHDFCEYMKLDPYFRQGAHYMMTFAMSYNDSENYILPLSHDEVVHLKCSMVEKMPGYKVDKYANLRVGYTYMFGHSGKKLLFMGQDFGQEREWSEKRELDWFLLENDLNRGMKDYVGKLLEIYRKYPALYEVDNDWGGFEWINADDKERSTYSFYRRASNGKDNILFVLNMTPMERKGFKVGVPFDGTYTKILDSAKECYGGSGSSVPDKIKAVKGLCDYKDYSIEFDLPPYGAEVFVFQTKKTKN

SEQ ID NO: 1852 - protein, 115 aa, Magnaporthe grisea 70-15
MSRVGKLAPEVNRALFVKNLSYNVTPEELFDLFGKFGPIRQVRQGIASNTKGTAFVVYEDVMDAKQACDKLNGFNFQNRYLVVLYHQPEKMARSKEDLEARKENLAQLKKQHGID

SEQ ID NO: 1853 - protein, 243 aa, Triticum aestivum
MVSADAARNVVGIIGNVISFGLFLSPTPVFWRIIKAKDVEEFKPDPYLATLLNCMLWVFYGLPIVHPNSILVVTINGIGLVIEGSYLIIFFLYSTNNKRLKMIGVLAAEAAFMVAVVLGVLLGAHTHEKRSMIVGILCVIFGTIMYASPLTIMGKVIKTKSVEYMPFTLSLVNFLNGCCWLAYALIKFDLYVTIPNGLGAFFGLMQLILYGCYYKRTPKEEKSVELPTSNPAGAGNVSVTVDR

SEQ ID NO: 1854 - protein, 711 aa, Pseudomonas putida KT2440
MPSKKTDAPKHSEAAGTQTPDRANTNAKLQSLEADRSDATGQALRTNQGVRIADNQNSLKAGDRGPSLLEDFIMREKITHFDHERIPERIVHARGTGAHGFFQSYGNHAELTKAGFLQDPEKITPVFVRFSTVQGPRGSGDTVRDVRGFAVKFYTDEGNFDLVGNNMPVFFIQDAIKFPDFVHAVKPEPHNEIPTGGSAHDTFWDFVSLVPESAHMVMWAMSDRAIPRSLRMMEGFGVHTFRLINAEGVASFVKFHWKPRQGVHSLLWDEAQKLAGKDTDFQRRDLWEAIETGDYPEWELGVQIVPEADEHKFDFDLLDPTKIIPEELVPVTPLGKMVLNRNPDNFFAEVEQVAFCPGHIVQGIDFTNDPLLQGRLFSYTDTQISRLGGPNFHQIPINRPVAPNHNNQRDALHQHVVHKGRASYEPNSIDGGWPKETPPAAQDGGFESYQERIDAHKIRQRSESFGDHFSQARLFFHSMSPTEQQHIIKAYSFELGKVEREHIRAREVNEILANIDLKLAAAVAANLGLPAPKAGTVKVKGSQLAQSPALSQMNHPGSVGIKGRKIAVLVADGVDAASVDKLVKALEAHSARPMLLGPTSAPVKAADGKQLPVAASMEGMPSIMFDGIVVPAGKASTDALAASGLAKHFVLEGYKHLKALVLTKELAKALGLKEDKGLLLGDEQKAVDAFVKAVEGHRVWEREAAAEAVPA

SEQ ID NO: 1855 - protein, 484 aa, Listeria monocytogenes str. 1/2a F6854
MEHNKLKPFPKDFLWGSASAAYQVEGAWDEDGKGPSVWDEFVRIPGTTFKETNGDVAVDNYHRYKEDVALMAEQGLKAYRFSVAWSRVIPHGNGEVNEAGLKFYDNLIDELLSYGIEPVVTLYHWDIPQGLQDEYGGWESRKVVEDFTNYAALLFERFNGRVKYWVTLNEQNVFISHGYKLAYHPPGVSNDKRMFAANHNANLANASAIAKFRELGTSGKIGPSFAYGPSYSIDANPANVLASENSEEFNAHFWMDVYTWGEYPTATWNWLEEHGLAPEILPGDTELLKKGKPDFMGVNYYRSMTHAFNGKDGVGSGKMNTTGEKGTSEETGVPGLYKNTNNPYLEKTNWDWDIDPTGLRIGLRRITNRYKLPIMITENGLGEYDSLTEDHKIHDEYRIEYIRAHALAIQEAITDGVEMLGYCTWSFTDLLSWLNGYQKRYGFVYVDRDENDEKELKRYKKDSFYWYKKTIEANGANLVEEQGK

SEQ ID NO: 1856 - protein, 144 aa, Aquifex aeolicus VF5
MDRRSMIVWRPFEEVERLRRDFERLLEEFVPRRAEQETLVPPVEVYETDKEVVIKMDLPGVKKEDIEITVKENAVHVRAERKEEKEEKTENIIRAERFYGVIERVIPLPVEVDPEKAEAKYENGVLEIRIPKVHVEKEKKIKLA

SEQ ID NO: 1857 - protein, 145 aa, Bacillus licheniformis ATCC 14580
MPLVPYEPFKHLNTIRREFDRVFADFPANFGGEHGFGDIRVDVHEAGNEIVASCDIPGLESKEDVHIEVENNMLHISGTINRSSEVKEENMHRKERFTGRFHRAVALPAPVSREGIRASYRNGVLEVRMPKDKPDEKKRIDVEFH

SEQ ID NO: 1858 - protein, 437 aa, Corynebacterium glutamicum ATCC 13032
MTTDKRKTSKTTDTANKAVGADQAARPTRRTTRRIFDQSEKMKDVLYEIRGPVAAEAERMELDGHNILKLNTGNPAVFGFDAPDVIMRDMIANLPTSQGYSTSKGIIPARRAVVTRYEVVPGFPHFDVDDVFLGNGVSELITMTTQALLNDGDEVLIPAPDYPLWTAATSLAGGKPVHYLCDEEDDWNPSIEDIKSKISEKTKAIVVINPNNPTGAVYPRRVLEQIVEIAREHDLLILADEIYDRILYDDAEHISLATLAPDLLCITYNGLSKAYRVAGYRAGWMVLTGPKQYARGFIEGLELLAGTRLCPNVPAQHAIQVALGGRQSIYDLTGEHGRLLEQRNMAWTKLNEIPGVSCVKPMGALYAFPKLDPNVYEIHDDTQLMLDLLRAEKILMVQGTGFNWPHHDHFRVVTLPWASQLENAIERLGNFLSTYKQ

SEQ ID NO: 1859 - protein, 544 aa, Arabidopsis thaliana
MDSFSYSSMKSMLIQARGSLNSRLSEFEPLVLLLVPLVSLFLAQIIGSVFGVVHEKGLKACLIGFIMGLLKMIPGVQNYIDAEKQKVVDQLQSGSSSKKKNKTEVLPVKGLGVEVLEKMENEKRNDAIWQGKCSGTVYIGGAESEGHFSLINQACSMFAHTNPLHIDVFQSVVRFESEVVAMTAALLGSKETASGGQICGNMTSGGTESIVLAVKSSRDYMKYKKGITRPEMIIPESGHSAYDKAAQYFKIKLWRVPVDKDFRADVKATRRHINRNTIMIVGSAPGFPHGIIDPIEELGQLALSYGICFHVDLCLGGFVLPFARKLGYQIPPFDFSVQGVTSISVDVHKYGLAPKGTSTVLYRNHEIRKHQFVAVTEWSGGLYVSPTIAGSRPGSLVAGAWAAMMSLGEEGYLQNTSKIMEASKRLEEGVREIHELFVIGKPDMTIVAFGSKALDIFEVNDIMSSKGWHLNALQRPNSIHICITLQHVPVVDDFLRDLREAVETVKANPGPITGGLAPIYGAAGKMPDRGMVNELLVSFMDSQY

SEQ ID NO: 1860 - protein, 226 aa, Oryza sativa
MAGHVLGGAHDAPSAANSVETDALARFAVDEHNKRENALLEFVRVVEAKEQVVAGTLHHLTLEALEAGRKKVYEAKVWVKPWLDFKELQEFRNTGDATTFTNADLGAKKVTHSCLVEFVICALLNLKGGHEPGWRDVPVHDPVVKDAADHAVKSIQQRSNSLFPYELLEIVRAKAEVVEDFAKFDILMKLKRGNKEEKFKAEVHKNLEGAFVLNQMQQEHDESSSQ

SEQ ID NO: 1861 - protein, 546 aa, Brucella melitensis 16M
MAAKDVKFGRTAREKMLRGVDILADAVKVTLGPKGRNVVIEKSFGAPRITKDGVSVAKEVELEDKFENMGAQMLREVASKTNDTAGDGTTTATVLGQAIVQEGAKAVAAGMNPMDLKRGIDLAVNEVVAELLKKAKKINTSEEVAQVGTISANGEAEIGKMIAEAMQKVGNEGVITVEEAKTAETELEVVEGMQFDRGYLSPYFVTNPEKMVADLEDAYILLHEKKLSNLQALLPVLEAVVQTSKPLLIIAEDVEGEALATLVVNKLRGGLKIAAVKAPGFGDCRKAMLEDIAILTGGQVISEDLGIKLESVTLDMLGRAKKVSISKENTTIVDGAGQKAEIDARVGQIKQQIEETTSDYDREKLQERLAKLAGGVAVIRVGGATEVEVKEKKDRVDDALNATRAAVEEGIVAGGGTALLRASTKITAKGVNADQEAGINIVRRAIQAPARQITTNAGEEASVIVGKILENTSETFGYNTANGEYGDLISLGIVDPVKVVRTALQNAASVAGLLITTEAMIAELPKKDAAPAGMPGGMGGMGGMDF

SEQ ID NO: 1862 - protein, 497 aa, Zea mays
MVLSHASSGRDDDDAVASTFASRYVRERLPRYRMPERSIPREAAQQIISDELMLDGNPRLNLASFVTTWMEPECDKLIMDSINKNYVDMDEYPVTTELQNRCVNMIAHLFNAPIKEDETAIGVGTVGSSEAIMLAGLAFKRKWQNKRKEQGKPCDRPNIVTGANVQVCWEKFARYFEVELKEVKLSEGYYVMDPVKAVEMVDENTICVAAILGSTLTGEFEDVKQLNDLLTEKNKETGWDVPIHVDAASGGFIAPFLYPELEWDFRLPLVKSINVSGHKYGLVYPGVGWVIWRSKDDLPEELIFHINYLGTDQPTFTLNFSKGSSQIIAQYYQLIRLGFEGYRNIMQNCQENAAILREGIAATGRFDVLSKDAGVPLVAFSLRDSSRFSVFDVSENLRRFGWIVPAYTMPADAEHVAVLRVVVREDFSRSLAERLVSDVRKILRELDARATHAVRVATATAEQSGDGVVAKKSVLEIEREVAARWMNAVNKKKTGVC

SEQ ID NO: 1863 - protein, 240 aa, Medicago sativa
RGKIQIKRIENTTNRQVIFSKRRNGLLKKAKELAILCDAEVGVMIFSSTAKLYDFASTSLRSVIGRYNKSKEEHNQLGSTASEIKFGQREAAVLRQQLHNLQESHRQIMGEELSGLTVKELQGLENQLEISLRGVRMKKEQLFMDEIQELNRKGDIIHQENVELYRKVYGTKDKNGTNRVLSLTNGVGIGDDSNRTCESPAQPATETRTTTALMHSLEISVLTCKQGKWTQILISYMNGI

SEQ ID NO: 1864 - protein, 608 aa, Streptomyces hygroscopicus
MCGITGWVSFHQDPRTQAPVIEAMTATLAPRGPDAAGVWLGPRAAIGHRRLAVIDLAGGVQPMTDRPDAPTTVLTYSGEIYNHHELRSQLSGLGHEFRTRSDTEVVLRGYAEWGEKVADHLDGMFAFAVWDERAQRLLLVRDRLGVKPLFWAEVDGGLAFASEPKALFAHPEIRPRVDADGLREAYSLLFNTGPTVWSGVREVEPGGLLLLDRDGIRERRYWQLEADAHPDDRDATIARVHDLVSTAARAQLEADVPLCSLLSGGIDSTVLTALLADELRLREGPGARIRSYAVDYSDQAESFTGDVLRTGHDTPYATEAGAFLGTDHSTVVLDPRALLDPEHRRAVVVARDSPIGVGDMDTSLHLLFGEIRKHSTVALSGEAADEVFGGYPWFHNPKALATATFPWLLVTGDEAAMPLNPELDLRIGEFRDDTYRTALAAVPHLDGETPTEHRQREMQHLSLTRWLRQLLHRKDRLSMAQGLEVRVPYCDHRLVEYAFTTPWALKNFDGREKSLLRAAGTGLAPDSVLHRPKNHYPATHHPDYNRGLQNMARDALADDTVRSLADETRLKPCLDTPPGQLEWGHRLRLERVVDLALWLDHYQPELAL

SEQ ID NO: 1865 - protein, 658 aa, Triticum aestivum
ALCSKVARQVGVFYEEAYAALCAPPLSQHFDRTWVSHVQLKAAQFYADACYRFSLDLHQQEEIAQEIARLRIGMNALADAKKAAKGVAAPLLDSVNKLESNMKTNLERAMKENNSVYLMRVPEAGTLGALPAASLVKSTSLAEVLDASNERLFSSLVPDGSMKALSKYTEMVDDIIRTQAEKLQQSSEITRVRLKEMDLPDSILSLEGNVSIPADLKEDVEAVQISGGPAGLEAELQQLRDLNRVNQELLVQTEEMLQKEASEDAQFRTQFGSRWTRPQSSTLTKNIQDRLNLFAGNLKKAAASDALIERDVKESYPLMSILDRRPIESALPSISRPIMSLDGNEDAIVGALKQSLRQLESLGAQRAGLEDHLKEMKRKDDILPKLMAGVGAHDDLFRKEIAKYDPICAEIADNIVAQEQLLLQIQEQNAQFAAVFNLDDYKVARERCYKQIAAAVAKYQAIKKNMNDGLNFYVSLQDATGKIQQQCSDFIMTRNIQCREMIEDVQRKLAGFNLSSSSHNTNTPRSSSVPPDQHSPSPPPHAPHAQSSYGAPPGGDPRPVYSQPESRPPYSQPYPTYGAPPQQPPYGAAHPGQYQQHPQQHQPPPGHDYGQPAYPGWRGPYYNGQQPQPQQPGPYPQAPYSAPGAYPPHHQSNYYRPQ

SEQ ID NO: 1866 - protein, 359 aa, Hortaea werneckii
MAEFVRAQIFGTTFEITSRYTDLQPVGMGAFGLVCSAKDQLTSQAVAVKKIMKPFSTPVLSKRTYRELKLLKHLRHENIICLSDIFISPLEDMYVVTELLGTDLHRLLTSRPLEKQFIQYFLYQILRGLKYVHSAGVVHRDLKPSNILINENCDLKICDFGLARIQDPQMTGYVSTRYYRAPEIMLTWQKYDVEVDIWSAGCIFAEMLEGKPLFPGKDHVNQFSIITELLGTPPDDVIATICSENTLRFVQSLPKRERQPLKNKFKNADPQAIELLERMLVFDPRKRVKAGEALADPYLAPYHDPTDEPEAQEKFDWSFNDADLPVDTWKIMMYSEILDFHNVDANAEQAAHNNDTVAG

SEQ ID NO: 1867 - protein, 541 aa, Psychrobacter arcticus 273-4
MSKTAAAIENNANNNDGNNHQPHYLMWFRRDLRVHDNTALAAICERANTDNAKLSAVFFLTPEQWQTHDMSLTQLDHIARTLPILAQKLQALNITLTVQICPSFTDCIAALSALCESNNISCVMANHEYEGNEIARDEQLTKQLAKTDIEFIRWHDQCILPPQTITTNDNSMYQVFTPFYKKWRHTLEVGDIQIHTAPAITNNEQINLISSEFSANTIQAIEALCKETVHDYQQYLQTHECYQYIDTDKQISQARTAYPAGEAEACHRLTQFISDDINHYDVSRDVPSLHATSHLSAYLTIGALSPRLCYLQATKALGELHRNDGDNFDSGDNNDINRWISELAWRDFYRHVLDYKPELIRHQAYKHETDKKINWSYDEDAFAAWREGKTGVPLVDAAMRCLNATGFMHNRLRMVTAMFLTKDLLIDWRWGERYFMQQLIDGDFASNNGGWQWSASTGTDSAPYFRIMNPFSQAKTHDSDGIFLKTWLPELEPIPASILHSEDKMRKALSKNGAFADIDYPIPMVEHKLARQLAIAEFKKE

SEQ ID NO: 1868 - protein, 546 aa, Xanthomonas campestris pv. phaseoli
MAAKDIRFGEDARTRMVRGVNVLANAVKATLGPKGRNVVLEKSFGAPTITKDGVSVAKEIELADKFENMGAQMVKEVASKTNDNAGDGTTTATVLAQALIREGAKAVAAGMNPMDLKRGIDQAVKAAVVELKNISKPTTDDKAIAQVGTISANSDESIGNIIAEAMQKVGKEGVITVEEGSGLENELDVVEGMQFDRGYLSPYFINNQQSQSADLDDPFILLHDKKISNVRDLLPVLEGVAKAGKPLLIVAEEVEGEALATLVVNTIRGIVKVVAVKAPGFGDRRKAMLEDMAVLTGGTVISEEVGLALEKATIKDLGRAKKVQVSKENTTIIDGAGDTAAIESRVGQIKTQIEDTSSDYDREKLQERVAKLAGGVAVIKVGASTEIEMKEKKARVEDALHATRAAVEEGVVPGGGVALVRALVAVGELKGANEDQTHGIQIALRAMEAPLREIVANAGEEPSVILNKVKEGSGNYGYNAANGEFGDMVQFGILDPTKVTRSALQNAASIAGLMITTEAMVADAPKKDEPVMPAGGGMGGMGGMDF

SEQ ID NO: 1869 - protein, 492 aa, Arabidopsis thaliana
MDPYKYRPASSYNSPFFTTNSGAPVWNNNSSMTVGPRGLILLEDYHLVEKLANFDRERIPERVVHARGASAKGFFEVTHDISNLTCADFLRAPGVQTPVIVRFSTVIHARGSPETLRDPRGFAVKFYTREGNFDLVGNNFPVFFIRDGMKFPDIVHALKPNPKSHIQENWRILDFFSHHPESLNMFTFLFDDIGIPQDYRHMDGSGVNTYMLINKAGKAHYVKFHWKPTCGVKSLLEEDAIRLGGTNHSHATQDLYDSIAAGNYPEWKLFIQIIDPADEDKFDFDPLDVTKTWPEDILPLQPVGRMVLNKNIDNFFAENEQLAFCPAIIVPGIHYSDDKLLQTRVFSYADTQRHRLGPNYLQLPVNAPKCAHHNNHHEGFMNFMHRDEEVNYFPSRYDQVRHAEKYPTPPAVCSGKRERCIIEKENNFKEPGERYRTFTPERQERFIQRWIDALSDPRITHEIRSIWISYWSQADKSLGQKLASRLNVRPSI

SEQ ID NO: 1870 - protein, 122 aa, Zea mays
  misc_feature (113)..(113): Xaa can be any naturally occurring amino acid
  misc_feature (116)..(121): Xaa can be any naturally occurring amino acid
MALKALDYDTLNENVKKCQYAVRGELYLRASELQKEGKKIIFTNVGNPHALGQKPLTFPRQVVALCQAPFLLDDPNVGMLFPADAIARAKHYLSLTSGRFCALCGACGRPGVXKEXXXXXXR

SEQ ID NO: 1871 - protein, 1081 aa, Candida albicans
MNPTKKPRLSPMQPSVFEILNDPELYSQHCHSLRETLLDHFNHQATLIDTYEHELEKSKNANKASQQALSEIGTVVISVAMGDLSKKVEIHTVENDPEILKVKITINTMMDQLQTFANEVTKVATEVANGELGGQAKNDGSVGIWRSLTDNVNIMALNLTNQVREIADVTRAVAKGDLSRKINVHAQGEILQLQRTINTMVDQLRTFAFEVSKVARDVGVLGILGGQALIENVEGIWEELTDNVNAMALNLTTQVRNIANVTTAVAKGDLSKKVTADCKGEILDLKLTINQMVDRLQNFALAVTTLSREVGTLGILGGQANVQDVEGAWKQVTENVNLMATNLTNQVRSIATVTTAVAHGDLSQKIDGHPKGEILQLKNTINKMVDSLQLFASEVSKVAQDVGINGKLGIQAQVSDVDGLWKEITSNVNTMASNLTSQVRAFAQITAAATDGDFTRFITVEASGEMDALKTKINQMVFNLRESLQRNTAAREAAELANSAKSEFLANMSHEIRTPLNGIIGMTQLSLDTELTQYQREMLSIVHNLANSLLTIIDDILDISKIEANRMTVEQIDFSLRGTVFGALKTLAVKAIEKNLDLTYQCDSSFPDNLIGDSFRLRQVILNLAGNAIKFTKEGKVSVSVKKSDKMVLDSKLLLEVCVSDTGIGIEKDKLGLIFDTFCQADGSTTRKFGGTGLGLSISKQLIHLMGGEIWVTSEYGSGSNFYFTVCVSPSNIRYTRQTEQLLPFSSHYVLFVSTEHTQEELDVLRDGIIELGLIPIIVRNIEDATLTEPVKYDIIMIDSIEIAKKLRLLSEVKYIPLVLVHHSIPQLNMRVCIDLGISSYANTPCSITDLASAIIPALESRSISQNSDESVRYKILLAEDNLVNQKLAVRILEKQGHSVEVVENGLEAYEAIKRNKYDVVLMDVQMPVMGGFEATEKIRQWEKKSNPIDSLTFRTPIIALTAHAMLGDREKSLAKGMDDYVSKPLKPKLLMQTINKCIHNINQLKELSRNSRGSDFAKKMTRNTPGSTTRQGSDEGSVKDMIGDTPRQGSVEGGGTSSRPVQRRSAREGSITTISEQIDR

SEQ ID NO: 1872 - protein, 246 aa, Triticum aestivum
MARGREGEVRNLVLGKYELGRMLGQGSFAKVYYGRDLRDGQSVAIKVIDKARLRQTDGMVEQLRREISIMRMVRHPNVVGIREVLASRQRVFVVMEYARGGELFAKVARGRLTEDAARKYFQQLVAAVAFCHSRGVAHRDLKPENLLLDEEGRLKVTDFGLAALPEQLRHDGLLHTQCGTPAYVAPEVLRKRGYDGARADMWSCGVVLYVLLCGFLPFQHDNYVKMYQKIFKGEYQMPPWVSGEAR

SEQ ID NO: 1873 - protein, 175 aa, Pseudomonas putida KT2440
MSLHDLQTLPGVTAQPDAATAQFVFNHTMLRVKDIEKSLDFYTRVLGFRLVDKRDFPEAAFSLYFLALVDPAQIPADDTARHQWMKSIPGVLELTHNHGTENDADFAYHNGNTDPRGFGHICISVPDVRAACARFEELEVPFQKRLQDGRMNHLAFVKDPDGYWVEVIQPTELEG

SEQ ID NO: 1874 - protein, 166 aa, Oryza sativa
  misc_feature (32)..(32): Xaa can be any naturally occurring amino acid
  misc_feature (100)..(100): Xaa can be any naturally occurring amino acid
  misc_feature (148)..(148): Xaa can be any naturally occurring amino acid
TKSSPTHPVELNEVKLIDGYYIMDPAKASGYXVDENTICIVAIPRSTLNGEYEDVKLLNDLLTKKNAETGWDTPIHVNAGSGWFIAPMLYPELKWDFRLXLANSMIISGHKYGLVYAGIGWCIWTSKEDLSEELMFHMNYLGADQPTXTLNLWKGCSHVIAHDYQL

SEQ ID NO: 1875 - protein, 710 aa, Methanosarcina mazei Go1
MDKKMINEKSKEEQLEKFHEDPEREFLTTNQGVRVNNTDISLKAGERGPTLLEDFHFREKLTHFDHERIPERVVHARGSGAHGFFQVYEPMTEYTSAKFLQDPNKKTPVFVRFSTVVGFRGSADTVRDVRGFAVKFYTEDGNYDLVGNNMPVFFIQDAIKFPDLVHAIKPEQDNQIPQASAAHDTFWDFVSCHHENAHMIMWVLSDRALPRSYRMMEGFGVNTFRFVNAEGKGRFIKFHWKPMLGIHSLVWDETQKIAGKDPDFNRRDLWDAIEMGAYPEFELGVQILEEEDEFKFDFDILDPTKLWPEEDVPIKWIGKMTLDRNPDNFFAETEQVAFCPANVVPGIDFSNDPLLQGRLFSYLDTQLIRLGGPNFQEIPVNRALAPVANNQREGYNRMTINKGKTSYFPNTVGDGKPRPASAEEGGYVHYMEKVEGKIIRSRSEKFKDFFSQAKLFWNSMSQPEKEHIIEAFHFEIGKVKDKKIRQAVVDMFNNVDGDLAVEIAKGVGVSAPAQKGGSPVAKESPNLSQERSERNVKNTIKTRKIAIIVADGYDHKDLSQVMQALEAGGARADIISKFQGMLKSSDGQEIEVDKNYRTTESVLYDAVYIPGGKENVETLKKHGDAIHFVNEAFRHCKPLGATGEGVELFKAAHLPDIKLAGKSSADKVVSDKGVVTARNEGDRSSFNESFTIAIAQHRHWNREKKEQVPA

SEQ ID NO: 1876 - protein, 477 aa, Kluyveromyces lactis NRRL Y-1140
MEQVDLVNANVLAAGANKKSVRVVNGLGSLMGSKQMADVDFENDSNMDYLLEQDKKEKEKYKNKRHISELPWTLNNWHLHLNWLNLILVVAIPLYGVYMALSGRVPLRHEILIFSMIYYCIGGISITGGYHRLWAHRAYSAHWPLRLFFAVFGAASVEGSIKWWSHSHRIHHRYTDTVRDPYDARRGLWYSHMGWMLLQPNPKHRARADIADLTDDWIVRWQHRNYIPLMLFSAFILPALFCHYMWNDFWGGLIYGGVLRVCAIQQATFCINSLAHYLGDQPFDDRRTPRDNWITALVTFGEGYHNFHHEFPTDYRNAIKWYQYDPTKVLIYLTSLFGLSYDLKKFSQNAIQQGLVQQQQKKLDRTRSKLNWGSPLSKLPVWDKDEFMEKLKSNNGLVVISGIVHDVSGYITEHPGGETLIQASLGKDATKAFNGGVYLHSNAAHNILATMRIAVVKDNVDQAAKFAARRGEVYEKK

SEQ ID NO: 1877 - protein, 580 aa, Pseudomonas putida KT2440
MHRHGAHLLDATSARFALWAPDARSVSVEVEQQPAIELLPDDEGWYSGVAPCQAGDRYHYRIDGELQVADPASRYQPDGVHGPSQVVDVAGYAWQHPWQGRPWHEAVIQEVHVGLLGGYAGVARQLPRLAELGISAIELMPLGQFPGERNWGYDGVLPYAPQNTYGSPEQLCALVDQAHGHGLMVLVDVVYNHFGPDGNYLHQYASPFFREDRQTPWGAAIDFRRPQVREYFIQNALMWLCDYRCDGLRLDAVHAIDQPDFLIELAQRVRAAVEPGRHVWLVLENEHNQAGLLEQGYDAQWNDDGHNALHVLLTGETEGYYADYQHRPIDQLARCLGEGFVFQGQANRHGKPRGEPSGHLPPSAFVLFLQNHDQIGNRALGERLTRLCPAPALRAATGLLLLAPMVPLLFMGDEAGSCQPFLFFTDFHDALADAVREGRRGEFAHFAAFADPKQREHIPDPNAEQTFASSRPQNKAVIAGWHGLYQQLLDLRRRHIIPHLPGSRALGAEVHADKALTARWQLGNGNTLRIDLNLADTPQAVELPAPSTRLFDSSDTRHPDTHLAAYSCVVSLLPPAQEHP

SEQ ID NO: 1878 - protein, 140 aa, Arabidopsis thaliana
MSLKALDYESLNENVKNCQYAVRGELYLRASELQKEGKKIIFTNVGNPHALGQKPLTFPRQVVSLCQAPFLLDDPNVGMIFPADAIARAKHYLSLTSGGLGAYSDSRGLSGVRKEVAEFIERRDGYPSDPELIFLTDGAS

SEQ ID NO: 1879 - protein, 238 aa, Stylosanthes hamata
MAPREKTPAVKVNGKSNAGVKEVHFRGVRKRPWGRYAAEIRDPGKKSRVWLGTFDTAEDAARAYDAAAREFRGPKAKTNFPFPDSDDINNNNIVVVKNNNRSPSQSSTVESSSRDRDSYSAAAATAVADSSPLDLNLAPQELDSPDPFGSHSTQPFAVFPGGMPAAKQALYLDAVLRASMASHGQFGFGYNRPAAAGAQSDSDSSSVIDLNQNEGDVAKNNGRGLVLDLNEPPPQEMA

SEQ ID NO: 1880 - protein, 736 aa, Pseudomonas putida KT2440
MNVTTRENGGLRQRDLDALARAEHADPFAVLGPHGDGAGGQVVRAFLPNALKVRIQARDDGRVLAEMEQGSLPGLFSAHLDKAQPYQLHIVWAGGEQVTEDPYSFGPQLGDMDLHLFAEGNHRDLSGRFGAQPTQVDGIDGVCFSVWAPNARRVSVVGDFNNWDGRRHPMRLRHGAGVWELFIPRLGVGETYKFEVLGKDGILPLKADPLARATELPPSTASKVAGELSHAWQDHDWMAQRAQRHAYNAPLSIYELHPGSWRCELDEAGEIGRFYNWRELAERLVPYVQELGFTHIELLPIMEHPFGGSWGYQPLSMFAPTSRYGSAEDFAAFIDACHQGGIGVLLDWVPAHFPTDEHGLARFDGTALYEYDNPLEGYHQDWNTLIYNLGRNEVRGFMMASALHWLKHFHIDGLRVDAVASMLYRDYSRKAGEWVPNRHGGRENLEAIDFIRHLNGVAAHEAPGALIIAEESTAWPGVSQPTQQGGLGFAYKWNMGWMHDTLHYIQNDPVHRTYHHNEMSFGLIYAYSEHFILPISHDEVVHGKHSLIDKMPGDRWQKFANLRAYLTFMWAHPGKKLLFMGCEFGQWREWNHDAELDWYLLQYPEHQGVQRLVGDLNRLYREEPALHEQDCQPQGFQWLIGDDAQNSVYAWLRWSSSGEPVLVVANFTPVPREGYRIGVPFGERWQELLNSDAELYAGSNVGNLGAVASDEVASHGQPLSLALNLPPLGVLIMKPA

SEQ ID NO: 1881 - protein, 649 aa, Lactobacillus acidophilus NCFM
MCGIVAFYDPKINDKQAVIGKMMATIKHRGPSSDGYYTNDEVALGFRRLSIIDLRGGSQPIYNEDKTRAIIFNGEIYNFKPLREELIKAGHTFTTKADTEVLLHGYEEWGMDGLLKRVRGMFAFLIWDDNNKTLYGARDFFGIKPMYYSNQDGHLLVGSELKSFLEYPKFKRELNVEAVKPYLMNQYNDLEETFFKGVYRFPAGHWFEYKDGEMKTHQYWDAEYKENSLSFEETLKRINDDLKETVDLYRNADVKVGAFLSEGIDSSYLTSLLNPDDVFSVSFDDSTYDEASKAKALADINHWKFFSEKVDADEAMRDFPEMQYHMDEPDANPSIIPLWYLCKLARKHVTVALSGEGADELFAGYVNYGMHTHNDVIKVFTSELKKLPKNKQVKLAHKIKKMPNFPGKVHMYTNLAEPSEFYVGQSVIYDMDYPTIFTSKDANSILQPTYRNKLTVNGIYQKDFKKVKGIDNVKQMQYIDLHHFMLNDIEQKADKISMAHSLEVRVPYLDKKIAELANSIPTKYLVNRHDTKYALRKASEKVLPDEWAKRPKLGFPTPIKQWLKEPRFYKQVRSLFEEEFVNDIFDQKKIIKLLDDNYEGDGSHRRQIWAIYTFLVWYKLFFVDYENTVKKYQHVQPEVANLISQGKLL

SEQ ID NO: 1882 - protein, 456 aa, Pediococcus pentosaceus ATCC 25745
MILGVLITIVSGLVFFVGILGHTDGEKNDFNRVASVYNQINSDYYKKVDTSKLATGAIDGMLSTLNDPFSDYLTDSDATSLNDSVSGAFGGVGIQVVKKNHQIEVMTTIDGTPAKKAGLKAGDVILEVDGKKLTNQSLSKATTLMRGKVGTKVKVKLQRGNDTFDKVLTRSKIPVETVTAKMLKNKVGYITISTVAEKTSSELKRALKRLDKQGAKSYIIDVRNNPGGLMQEALKMSSMFLKNGKTIMQVKARTGKAEVYKASKKYDGGYKVTKPTTVVINGESASAAEIFAAALHQSANVPLVGSKSYGKGTVQNITQYTDSDELKLTIAKWLTPNGTWIHGKGLKPDYQADYPAMAYITEFDQKKTYSVGESNSDIKNIQIALKGLGYYDDKISKEYTEKVKQAVEAYQEKNQLAVTGKVDAKTMRSIEQNVIKTLAKNDPALEKAQKVMNDEK

SEQ ID NO: 1883 - protein, 681 aa, Arabidopsis thaliana
MSGSVSGCGSGGCSIVWFRRDLRVEDNPALAAAVRAGPVIALFVWAPEEEGHYHPGRVSRWWLKNSLAQLDSSLRSLGTCLITKRSTDSVASLLDVVKSTGASQIFFNHLYDPLSLVRDHRAKDVLTAQGIAVRSFNADLLYEPWEVTDELGRPFSMFAAFWERCLSMPYDPESPLLPPKKIISGDVSKCVADPLVFEDDSEKGSNALLARAWSPGWSNGDKALTTFINGPLLEYSKNRRKADSATTSFLSPHLHFGEVSVRKVFHLVRIKQVAWANEGNEAGEESVNLFLKSIGLREYSRYISFNHPYSHERPLLGHLKFFPWAVDENYFKAWRQGRTGYPLVDAGMRELWATGWLHDRIRVVVSSFFVKVLQLPWRWGMKYFWDTLLDADLESDALGWQYITGTLPDSREFDRIDNPQFEGYKFDPNGEYVRRWLPELSRLPTDWIHHPWNAPESVLQAAGIELGSNYPLPIVGLDEAKARLHEALSQMWQLEAASRAAIENGSEEGLGDSAEVEEAPIEFPRDITMEETEPTRLNPNRRYEDQMVPSITSSLIRPEEDEESSLNLRNSVGDSRAEVPRNMVNTNQAQQRRAEPASNQVTAMIPEFNIRIVAESTEDSTAESSSSGRRERSGGIVPEWSPGYSEQFPSEENGIGGGSTTSSYLQNHHEILNWRRLSQTG

SEQ ID NO: 1884 - protein, 107 aa, Oryza sativa
MAEEAQSHAREGGRHPRQPAGRENDLTTVELARFAVAEHNSKANAMLELERVVKVRQQVVGGFMHYLTVEVKEPGGANKLYEAKVWERAWENFKQLQDFKPLDDATA

SEQ ID NO: 1885 - protein, 480 aa, Pyrococcus horikoshii OT3
MCLIAGGFKLYTDEIIRIIELGKHRGPDSFGVWSEREVIKSSDFSALEEVKGGDKVLIQCRLAMTGSKEYTQPFYNEIALVHNGEIYNHEKLRAYLVERGISFESDVDSEVILRLLEYLLFDRNLSPWNAIKKLMWMLRGDYAVAFHYNGKFYLFRDPLGIRPLYYSSQGHFGSEKKVLWGLGEEATPVMPGEAVEISKFGINRVRLYDVTAIKSFGSEYFDGLRNLLIDSVKIRSSKKIGILFSGGLDSTLIAFIASRYSNVTLYVSGTEDSKDVEWARKVSQELGLKLKEYIFSKEEVEKELKRIMFAIEEPNPMNLSIAIPLYFSTKLAREDGVKILLSGQGADELFGGYAKYLENPNLMISDVANLGERNLARDDKVSMINGVEVRYPYLDLPFAVLALNTPLQHKIKDGKRKIILREIAKSLGLPEWIAEREKKAAQYGSNAQKILEKIAKSRGIRLKELASLLFSEVFRGIHNR

SEQ ID NO: 1886 - protein, 640 aa, Francisella tularensis subsp. tularensis SCHU S4
MKNKNSEQNTHSTIGEQDIHYFHEGKHIYAYEFMGAHKACEEGIEGIRFTTWAPNAKSICVIGDFNYWQVEDKNYMEPITDAGLWSVFIPNAKNGDKYKFVVTNKDTNHYVYKSDPYAFFSELRPNTASIITTETQYTWSDDKWLEKRAKTNYYDNPMNVYELHLASWKTKNGKFLTYDELSETLPQYIKEMGYTHVEFMPLHEHPLDASWGYQPTGFYSVNSRHGDIIGLKRLVDKLHNNDIGVILDWVPGHFCKDQHGLIYFDGSPCYEYQEPTKAINKGWGTHNFDLGRNEVKCFLISNAMYWINEFHIDGLRVDAVSNILYLNYDREDGQWIPNIYGGHENLEGIAFLKELNGVLKHTCKGVITIAEESSSWPDISTPVEKGGLGFDFKWNMGWMNDTLRYISLDPVYRKYHHNLITFSMVYHYSEKFILSISHDEVVHGKKSLINKMWGDLWNKYAGLRLYMSYMIGHPGKKLIFMGSEFVQFVEWREYEQLQWQVVDQYESHKQTLHFFKKLNDFYHNETALWQCDYNHHGFRWIDADNSQQSILSFIRSSKDNKQKLIFICNFTPVTYYDYHLGVPDAGSYKEVFNSDNLEFGGSGQVMATEIFSSLQSSHGFEQRITIKIPPMATLVLKLIK

SEQ ID NO: 1887 - protein, 172 aa, Pyrococcus horikoshii OT3
MRGGERMVRRRRWDIWDPFDLIREIQEEIDAMFDEFFSRPRLWTYRRWKEPELYEEGTGEVWREPFVDIFDRGDELVVIAELPGVRKEDIKVRVTEDSVYIEAIVRREKELEEEGAVRVERYYSGYRRVIRLPEEVIPEKAKAKYNNGVLEIRIPKKNPTKKEGEGFEVKIE

SEQ ID NO: 1888 - protein, 531 aa, Neurospora crassa
MGNSSSKDAGASSKNRGDDDLKSYPSFSKSDTKDSSRSFRGLRSKIPGGSKTDSPRNSTILSSEEVAEKMNALSGKNGRPSVHTRPSRRDMSPSPASPSTSSPSSPSLDTATLASPTGEPLPPPSPVHNATGGHHDVRAAQESGEVDHISDQPPSGGGGANSNQQPGQSILVKRENTINPVYDTPNQDPQNEQAVSGVAMSDIKDIDLDDFIKRLLDAAYAGKVTKSVCLKNAEIVAICHRARELFLSQPALLELDAPVKIVGDVHGQYTDLIRMFEMCGFPPNSNYLFLGDYVDRGKQSLETILLLMCYKLKYPENFFLLRGNHECANVTRVYGFYDECKRRCNVKIWKTFVDTFNCLPIAAIVAGKIFCVHGGLSPALGHMDDIRNIARPTDVPDYGLLNDLLWSDPADMDQDWEANERGVSYCFGKKVISDFLATHDFDLVCRAHMVVEDGYEFYTDRILVTIFSAPNYCGEFDNWGAVMAVSTELLCSFELLKPLDSAALKTHIKKGRHRRNNMLNSPPAHFNPQSV

SEQ ID NO: 1889 - protein, 240 aa, Petunia x hybrida
MGRGKVELKRIENKINRQVTFAKRRNGLLKKAYELSVLCDAEVALIIFSNRGKLYEFCSSSSMSTTLEKYHRYCYGALEGSQPSTDSQNIYQEYLKLKTRVEALQQSQRHMLGADLGQLGTKDLEQLERQLDSSLRQIRSTRTQNMLDQLSELQEKQEQSLIEMNKSLRMKLEELGVAFQTSMHSGEESVQYRQQPAEPEGLFHPVECNNSLPIRYNTLPREHVVPSAQDSTGVLPGWML

SEQ ID NO: 1890 - protein, 121 aa, Ustilago maydis 521
MASQSSIGAARQHSRILFVKNLNYNTTGADLYQVFGRYGAIRQIRLGDATGTKGTAYVVYEEMADVKRALDHLNGFHLNERYIVVLYHMPARLAAKADLARREAELADLKALHNITDEVLH

SEQ ID NO: 1891 - protein, 543 aa, Arabidopsis thaliana
MRRFVIGQAKNLIDQSRRRQLHHHKNLSFVSLIPPFSAPSDSSSRHLSSSSSSDMSASDSSSSLPVTLDTINPKVIKCEYAVRGEIVNIAQKLQEDLKTNKDAYPFDEIIYCNIGNPQSLGQQPITFFREVLALCSYTALLDESATHGLFSSDSIERAWKILDQIPGRATGAYSHSQGIKGLRDAIADGIEARDGFPADPNDIFMTDGASPGVHMMMQLLITSEKDGILCPIPQYPLYSASIALHGGTLVPYYLDEASGWGLEISELKKQLEDARSKGITVRALAVINPGNPTGQVLSEENQRDVVKFCKQEGLVLLADEVYQENVYVPDKKFHSFKKVARSMGYGEKDLALVSFQSVSKGYYGECGKRGGYMEVTGFTSDVREQIYKMASVNLCSNISGQILASLIMSPPKPGDDSYESYIAEKDGILSSLARRAKTLEEALNKLEGVTCNRAEGAMYLFPCLHLPQKAIAAAEAEKTAPDNFYCKRLLKATGIVVVPGSGFRQVPGTWHFRCTILPQEDKIPAIVDRLTAFHQSFMDEFRD

SEQ ID NO: 1892 - protein, 404 aa, Vibrio parahaemolyticus RIMD 2210633
MQNIGMSSKLDNVCYDIRGPVLKHAKRMEEEGHKILKLNIGNPAPFGFDAPDEILVDVIRNLPTSQGYCDSKGIYSARKAVVQHYQRKGIRSLDVEDVYVGNGVSELIVMAMQALLNNGDEMLIPAPDYPLWTASVALSGGNPVHYLCDEQSDWYPDLDDIKKKITPKTRGIVLINPNNPTGAVYSRDFLLEVIEIARQHKLIIFADEIYDKVLYDGATHTSVATLTEDVLVMTFNGLSKAYRVCGFRGGWMFLTGPKHLAQGYVNGLELLSSMRLCANVPMQHAIQTALGGYQSINELILPGGRLLEQRNRAFELINQIPGVSCVKPKGAMYLFPKIDTKMYNIKNDQQMVLDFLKQEKVLLVQGSGFNWPKPDHFRIVTLPHVEDLETAIGRFERFLSTYSQ

SEQ ID NO: 1893 - protein, 246 aa, Petunia x hybrida
MGRGRVELKKIENKINRQVTFAKRRNGLLKKAYELSVLCEAEVALIIFSNRGKLYEFSSTSNMVKTLDRYQKCSYGTLEVNHRSVKDNNEERIYREYLKLKAKYESLQRYQRQLLGDELGPLNIDELEHLELQLDSSLKLIKSTRTQLMLDQLSDLQTKEKLWVEANKVLERKLEQIYAENNIQQSWGGGEQSGAYGQQHAQTQGFFQPLECNSTLQIGYDPATSSQITAVTSGQNVNGIIPGWML

SEQ ID NO: 1894 - protein, 505 aa, Helicobacter pylori
MVNKDVKQTTAFGAPVWDDNNVITAGPRGPVLLQSTWFLEKLAAFDRERIPERVVHAKGSGAYGTFTVTKDITKYTKAKIFSKVGKKTECFFRFSTVAGERGSADAVRDPRGFAMKYYTEEGNWDLVGNNTPVFFIRDAIKFPDFIHTQKRDPQTNLPNHDMVWDFWSNVPESLYQVTWVMSDRGIPKSFRHMDGFGSHTFSLINAKGERFWVKFHFHTMQGVKHLTNEEAAEIRKHDPDSNQRDLFDAIARGDYPKWKLSIQVMPEEDAKKYRFHPFDVTKIWYTQDYPLMEVGIVELNKNPENYFAEVEQAAFTPANVVPGIGYSPDRMLQGRLFSYGDTHRYRLGVNYPQIPVNKPRCPFHSSSRDGYMQNGYYGSLQNYTPSSLPGYKEDKSARDPKFNLAHIEKEFEVWNWDYRADDSDYYTQPGDYYRSLPADEKERLHDTIGESLAHVTHKEIVDKQLEHFKKADPKYAEGVKKALEKHQKMMKDMHGKDMHHTKKKK

SEQ ID NO: 1895 - protein, 1453 aa, Ralstonia metallidurans CH34
MNGVRLLTRRIRWIDLLGLLRCVGFLLLMSIWHDAVAQQPIATTAQTIRVGVVQNDWPPFAIVQDGQVSGIGVDFLRAALGDRPVRIVTTTFASMPALLAAACANQVDVVLNVGETAERARCLRFSEAYFDATAAIVGRAGAAGQDAVALEQARIAVEPGSFMDERLRARFPNARFVPVKDAEGGLRAVRDNQADYYPTRQPVADYYLGRPEYKGLAVQAGYREPGGGLHFAFSPAAAALQTTVNQGLATMPQDARRAIIGRWVTPPIVASSPAGEFFLTPEERAFLQSLPVLKVAFDAGSAPYSYVDDRGRPGGMAADYLSYLGRTLGVRFQRERAAPFAQTVEALRQGKLDLMAVAVAEDPALAGLPVTRPYASFPMVIVGRQLDVAVEGLNDLTGKRVVVCEASGVEGLLRAAVPHLQLSVVSSVHAGMEAVANGKADAYVDDLATVDVELQRYFAGTLRIIGSGRQTLDMGFGLSPELGARLLPLIDRAMEYMPQVERLAIQSRYIAASYALEPSWQQVLRRIAPYLVAVIVIIGILLRSQYRLRREASARRLAKQQLQAQLDFQRTLIDAVPIPITVKDAQGRYVEVNAAFQSRAGMTRQQMVGHLPTELNVPGNRAAEALEAGSRRALETQQLQQFAVDYVDADGKQRYYLCWAQPIKRVGPEFAGVISAAVDVTEIRNAEAKAQAAEAMLVDATRHLPATAFRMRERDGVFSYEWVSGNAQQLLGRSSESLIGPANPLLGMANVEDRIAALAAAEEAKTTGRPLSADMRLLIRGQTRWIRIHAVPKTEPDGGVLWHGYYVDLTEERERANALAQAKDAAEAASRAKDSFLAMMSHEIRTPMNGILGLIELLQRTPLTAEQQRMVALAGESGQALGRILDDILDYAKLEAGRLAILRAPVDLRELFDGVLGSLLPQAFQKGLRLKQRVSAEVAAIVQADGIRLRQILFNLLGNAIKFTDHGSVMLRATMEPGATGLPMLVVVVEDTGIGIARTDLARLFAPFMQSERSTARRFGGTGLGLTIVRTLAELMDGEITLKSEAGVGTTAVLRVPCEVVSQGYDLPNLRGRALSVLVSDDSRRAALIAYGEAAGMRCVSPEDETPDDGIAITDRMERAGRKGQFAIHLTDELLPLGYSQDESGVSLGSNPLRWTAFVGALEALLKGIAPASPQASRAGEGKADDLVPQGARILVVEDHPINREVIGQQLRLLGYRSTVCTNGQEAVTALRADTYDLVLTDCHMPVMDGFDLTRSIRASDRPSVRALPVVGLTATVAREEHVLCMEVGMNAFLVKPATLASLQQTIETALQGGPEAPSPKTEVRSREASPARRTPESGGFRPECIDTVGLRSQLEPMLAERDVRQIFLRSLEQDRDALRAQLAAPTPAGLGKWCHRAGGAISVMEQPYLHELLDRLDGLLETGSPAQIQSAGASLSAMYDYLIDWLEKLDVA

SEQ ID NO: 1896 - protein, 681 aa, Ralstonia metallidurans CH34
MRIQHAFRLITLAMVATIVGFGSYLWTEEWRAYAVAQHSEAMLQAFRATLVAAEKVSAERGPSNAALGAAPGVAAGALLRAREQSDASLTAAIAMLHGANCPECGAAKGSLEHARAQLAAARSQIDRLIARPLSERHDVQRAVSGMFTIVDEILRVADGPLSRLQRSAPVAAQHAVSARFAAELREYAGRAGSEFTSALVSNRPMHSEERERLAGDLGRVQTLGDQIQQRVSFQLASKPGLRDADTALHKRFFGDGLAYLQKVEAIGPAEPRPTTAELASTYVPLMAPIVAMRDAVLDVAQAEVQADTTRAKRRLGGLLAILAIITSFVAATFWLFAKRVLRPLTLATEATVELAEGRYDGPTHVWPKTDEIGAIFVALEQLRAGLLRKVALEHERTTLIARLQAAVTHERAQMMALAQARDAAEASARTKSSFLAMMSHEIRTPLQGILGLLELVEYSPLSAEQRRQVRLASEAGQALRQILDDVLDYAKMDAGRLRLALAPLDLRGLFANVLSLLAPRAQAKGLQLQQWVQPDVPVQLVADGARLRQILLNLVGNAIKFTECGSVDLLASVEPTSAGEDVLVVSVADTGIGIAPEDIARLFTPFVQGESGPARRFDGTGLGLAISRQLAQLMGGELMLDSTLGVGTQVMLRVPMPGCPDAGSPLSNSERREHRAEFRLA

SEQ ID NO: 1897 - protein, 239 aa, Stylosanthes hamata
MAPREKTPAVKVNAGVKEVHFRGVRKRPWGRYAAEIRDPGKKSRVWLGTFDTAEDAARAYDAAAREFRGPKAKTNFPFPDSDDINSNNNNIVVVKNNNRSPSQSSTVESSSRDRDSYSAAAAATAVADSSPLDLNLAPAGAGFAGSIRFPFQQPFAVFPGGMPAAKQALYLDAVLRASMASHGQFGFGYNRPAAAAAGAQSDSDSSSVIDLNQNEGDVAKNNGRGLVLDLNEPPPQEMA

SEQ ID NO: 1898 - protein, 255 aa, Xanthomonas axonopodis pv. citri str. 306
MRLIALPAFDDNYIWALVAADGRAIIVDPGQAEPVLAAAQRQGLVPSAVLLTHHHGDHIGGVAELQQRWPDLALFGPADERIPTNAHHVGRGERLRLLDVEFQVIKVPGHTRSHIAFLADGHLFSGDTLFSLGCGRMFEGTAPQMFDSLQRLASLPGETLVCCGHEYTLANAAFALHVDPTNAALQRRQQEAQAMRHAARPTLPISLKSELATNPFLRTSHPEIRAAVAPRAASALSSEVDIFAELRRWKDEFRA

SEQ ID NO: 1899 - protein, 294 aa, Brucella melitensis 16M
MWWPAPRKTAQKISGKGYIMTVPTVKLNDGNHIPQLGYGVWQISNDEAVSAVSEALKAGYRHIDTATIYGNEEGVGKAINGSGIARADIFLTTKLWNSDQGYESTLKAFDTSLKKLGTDYVDLYLIHWPMPSKDLFMETWRAFIKLKEEGRVKSIGVSNFRTADLERLIKESGVTPVLNQIELHPQFQQDELRLFHGKHDIATEAWSPLGQGKLLEDPTLKSIAEKHAKSVAQIILRWHIETGNIVIPKSITPARIKENFDIFDFTLNGTDHDAITKLDMADGRIGPNPSVFSA

SEQ ID NO: 1900 - protein, 370 aa, Triticum aestivum
PTRPREGNWDLLGNNFPVFFIRDGIKFPDVIHAFKPNPKSHVQEYWRVFDFLSHHPESLHTFFFLFDDVGIPTDYRHMDGFGVNTYTFVSRAGKSHYVKFHWRPTCGVSCLMDDEATLVGGKNHSHATQDLYDSIDAGNFPEWKLFVQVIDPDDEDRFDFDPLDDTKTWPEDLVPLQPVGRLVLDRNVDNFFNENEQLAFGPGLVVPGIYYSDDKMLQCRVFAYADTQRYRLGPNYLMLPVNAPKCGFKNNHYDGAMNFMHRDEEVDYYPSRHAPLRQAEPASFPVPTRPVVGKREKTRIKKENDFVQPGERYRSWAPDRQDRFVRRFADALAHPKVSHELRVIWIDFLSKCDKSCGMKVANRLNVKPSM

SEQ ID NO: 1901 - protein, 507 aa, Zea mays
SQNGVQMLSPSEIPQRDWFPSDFTFGAATSAYQIEGAWNEDGKGESNWDHFCHNHPERILDGSNSDIGANSYHMYKTDVRLLKEMGMDAYRFSISWPRILPKGTKEGGINPDGIKYYRNLINLLLENGIEPYVTIFHWDVPQALEEKYGGFLDKSHKSIVEDYTYFAKVCFDNFGDKVKNWLTFNEPQTFTSFSYGTGVFAPGRCSPGLDCAYPTGNSLVEPYTAGHNILLAHAEAVDLYNKHYKRDDTRIGLAFDVMGRVPYGTSFLDKQAEERSWDINLGWFLEPVVRGDYPFSMRSLARERLPFFKDEQKEKLAGSYNMLGLNYYTSRFSKNIDISPNYSPVLNTDDAYASQEVNGPDGKPIGPPMGNPWIYMYPEGLKDLLMIMKNKYGNPPIYITENGIGDVDTKETPLPMEAALNDYKRLDYIQRHIATLKESIDLGSNVQGYFAWSLLDNFEWFAGFTERYGIVYVDRNNNCTRYMKESAKWLKEFNTAKKPSKKILTPA

SEQ ID NO: 1902 - protein, 436 aa, Nocardia farcinica IFM 10152
MTAIALFTRDLRVHDNPVLAAARDAGDAVVPLFVIDAHLVPDRCPPNRARFLAAAVRELDAELRTRGGRLIVRRGVVADEVARVVDETGARTVHLADDVSGYSAARADALRERLDRRGVRLEPHPASITTVDGDVLRPATGRDHFAVFTPYFRRWSEVPRRAPLPPPEDLEVPDLPSAALPTPESLNRGEPSPQLSVGGETTGRALLDSWLAGPVDDYVETGDDLAADATSHLSPYLHFGCLSPTELLHRVDVGSAGGQAFARQLAWRDFHHQLLAARPAVARHDYRPRPIRWRDDPQALAAWRSARTGYPIVDAALRQLHTEGWLPNRARLIAAAFLTKTLGLHWRAGAGHFLHWLVDADLANNQLNWQWVAGTGSDTRPNRGFNPLRQADRYDPDGVYVRRWIPELADLDGGRIHRPWRAEVDYPSPIAECPGM

SEQ ID NO: 1903 - protein, 686 aa, Pseudomonas syringae pv. tomato str. DC3000
MAFEAMFQPIQIGKLTIRNRVLSTAHAEVYATDGGMTTDRYVKYYEEKAKGGIGLAICGGSSSVAIDSPQGWWKSVNLATDRIIPHFQNLADAMHKHGAKIMIQITHMGRRSRWDGDHWPTLMSPSGIREPVHRATCKTIEPEEIWRVIGNYASAAARAKAGGLDGVELSAVHQHMIDQFWSPRVNKRTDEWGGSFENRMRFGLEVIKAVRKEVGPDFCVGLRICGDEFHPDGLSHEDMKQIAKYYDDTGLIDFLGVVGSGCDTHNTLANVIPNMSYPPEPFLHLAAGIKEVVKAPVLHAQNIKDPNQATRILEGGYVDMVGMTRAHIADPHLIAKIKMGQIDQIKQCVGANYCIDRQYQGLDVLCIQNAATSREYMGVPHIIEKSAGPKRKVVVVGAGPAGMEAARVSAERGHDVTLFEKKAFIGGQITTASKAPQRDQIAGITRWFQLELARLKVDLRLGTAADAATILDLRPDIVVLAVGGHPFLEQNEHWGAAEGLVVSSWDVLDGKVAPGKNVLVYDTICEFTGMSVADFLADKGCQVEIVTDDIKPGVAIGGTSFPTYYRSMYPKEVIMTGDMMLEKVYREGDKLVAVLENEYTGAKEERVVDQVVVENGVRPDEAIYYALKEGSRNKGQIDIDALFAIEPQPSLSQPGDGYLLFRIGDCVAQRNTHAAIYDGLRLCKDF

SEQ ID NO: 1904 - protein, 351 aa, Glycine max
MDKYEAVKDLGAGNFGVARLMRNKETKELVAMKYIERGQKIDENVAREIINHRSLRHPNIIRFKEVVLTPTHLAIVMEYAAGGELFERICNAGRFSEDEARYFFQQLISGVHYCHAMQICHRDLKLENTLLDGSPAPRLKICDFGYSKSSLLHSRPKSTVGTPAYIAPEVLSRREYDGKLADVWSCGVTLYVMLVGAYPFEDQDDPRNFRKTIQRIMAVQYKIPDYVHISQDCRHLLSRIFVANPLRRISLKEIKSHPWFLKNLPRELTESAQAVYYQRGNPSFSIQSVEEIMKIVGEARDPPPVSRPVKGFGWDGEEDEGEEDVEEEEDEEDEYDKRVKEVHASGEFQIS

SEQ ID NO: 1905 - protein, 245 aa, Petunia x hybrida
MGRGRVELKRIENKINRQVTFAKRRNGLLKKAYELSVLCDAEVALIIFSSRGKLYEFCSTSSMMKTLEKYQQCSYASLDPMQSANDTQNNYHEYLRLKARVELLQRSQRNLLGEDLGSLNSKELEQLEHQLDSSLKQIRSKKTQHMLDQLADLQQKEQMLAEANKQLRRKLEESAARIPLRLSWDNGGQPMQHNRLPPQTEGFFQPLGLNSSSPQFGYSPMGANEVNNAVSTAQNMNGFIPGWML

SEQ ID NO: 1906 - protein, 366 aa, Rhodopseudomonas palustris CGA009
MSNSKLFEPTKLGPITLANRVVMAPLTRNRAVPEGLVPSPLAAEYYGQRASAGLLITEASQVSQQGQGYQDTPGIYSQAQVEGWRKVTGEVHKRGGKIFIQLWHVGRISHVDLQPNHGAPVAPSAIRANTKTFVGGQFADVSEPRALELSEIPGIIEDFRKAAANAIAAGFDGVEIHGANGYLLDQFARDSSNKRTDEYGGSIQNRARLMLEVAAAVAKEIGPERTGIRISPVTPANDVSDSNPQALFDYIVDELNKLKLVYIHVIEGATGGPRDIAPFDYASLRKRFSGSYIGNNAYDLALANKQLDAGAADLIAFGKPFISNPDLVERLKRNAPLNEPDKSTFYGGGAKGYTDYPTLESAQAAQ

SEQ ID NO: 1907 - protein, 488 aa, Listeria monocytogenes str. 1/2a F6854
MTDRKNLTTNQGVPVGDNQNSMTAGRKGPTLIEDYVLIEKLAHFDRERVPERVVHARGAGAHGKFVTKKSMKKYTMAKFLQEEGTETEVFARFSTVIHGQHSPETLRDPRGFSVKFYTEEGNYDFVGNNLPVFFIRDAIKFPDVIHSLKPDPRTNIQDGNRYWDFFSLTPEATTMIMYLFSDEGTPASYREIRGSSVHAFKWINEEGKTVYVKLRWVPKAGIVNLSTEQASQIQAKEFNHASRDLYEAIENGDYPEWDLYVQVLDPKDLDSFDFNPLDATKDWFEDVFPYEHVGTMTLDRNPDNIFAETESVGFNPGVLVRGMLPSEDRLLQGRLFSYSDTQRHRVGPNYLQLPINSPKAPVANNQRDGHMPFKQQTSSINYEPNSYDTEPKENPAFIEPEQEIRGDVAGRLIAEKPNNFGHAKEVWDRYSDAERAALVKNIVDDWSAVREDIKIRNLRNFYQVDPEFASRVAARTGINLEEHVTDLK

SEQ ID NO: 1908 - protein, 482 aa, Lactobacillus acidophilus NCFM
MYSAKMPNNFLWGGAVAAHQLEGAWKEGGKGTSVADVMTVGSATKPREITDGVLPGKNYPNHSAIDFYHHYKEDIKLMAEMGFKAFRTSIAWTRIFPNGDETEPNEEGLKFYDDLFDTCHEYGIEPVITLSHFEIPFNLAKNYSGFTNRKVIDFFVRFAEVCFKRYKNKVKYWMTFNEIDNQSAFNDDFLMATNSGILFKDGMTDKDKEAAMYQAGHYELVASALAVKIGHKINPDFQIGCMINYSPVRPLTPSSDDVLLADKWEQRRDWFSDVHVFGEYPNAVEAYIERNGYRPDITDEDRIVLKEGTVDYVGFSYYQSTTVSSKKVMPDDLTDLAKAIAKNPTLKRSDWGWEIDPEGLRIALNQLQDRYHKPLFIVENGLGAYDKVEADGSIHDDYRIDYLRSHISEMEKAVELDGVDLMGYLPWGCIDLVSAGTGQMDKRYGFIYVDKNDAGEGTLDRSRKDSFFWYKNVIESNGKNLG

SEQ ID NO: 1909 - protein, 134 aa, Zea mays
MRKHRIVSLVAALLILLALAVSSTRNAQEDSMADNTGTLAGGIKDVPGNENDLHLQELARFAVDEHNKKANALLGFEKLVKAKTQVVAGTMYYLTIEVKDGEVKKLYEAKVWEKPWENFKELQEFKPVEEGASA

SEQ ID NO: 1910 - protein, 363 aa, Pseudomonas putida
MSALFEPYTLKDVTLRNRIAIPPMCQYMAEDGMINDWHHVHLAGLARGGAGLLVVEATAVAPEGRITPGCAGIWSDAHAQAFVPVVQAIKAAGSVPGIQIAHAGRKASANRPWEGDDHIAADDARGWETIAPSAIAFGAHLPKVPREMTLDDIARVKQDFVDAARRARDAGFEWIELHFAHGYLGQSFFSEHSNKRTDAYGGSFENRSRFLLETLAAVREVWPENLPLTARFGVLEYDGRDEQTLEESIELARRFKAGGLDLLSVSVGFTIPDTHIPWGPAFMGPIAERVRREAKLPVTSAWGFGTPQLAEAALQANQLDLVSVGRAHLADPHWAYFAAKELGVEKASWTLPAPYAHWLERYR

SEQ ID NO: 1911 - protein, 188 aa, Arabidopsis thaliana
MTNYGAIPTSSHASPLVDVESLSRAKHRIKAGLATRRAWRVMFDFHSMGLPHGVSDAFTRIKTNLAYFRMNYAIVVLIVIFFSLIWHPTSLIVFTVLVVVWIFLYFLRDEPIKLFRFQIDDRTVLIVLSVLTVVLLLLTNATFNIVGALVTGAVLVLIHSVVRKTEDLFLDEEAATTETSGLTSYPST

SEQ ID NO: 1912 - protein, 380 aa, Zea mays
MRDDVAFQIINDELYLDGNARQNLATFCQTWDDENVHKLMDLSINKNWIDKEEYPQFAAIDLRCVNMVADLWHAPAPKNGQAVGTNTIGSSEACMLGGMAMKWRWRKRMEAAGKPTDKPNLVCGPVQICWHKFARYWDVELREIPMRPGQLFMDPKRMIEACDENTIGVVPTFGVTYTGNYEFPQPLHDALDKFQADTGIDIDMHIDAASGGFLAPFVAPDIVWDFRLPRVKSISASGHKFGLAPLGCGWVIWRDEEALPQELVFNVDYLGGQIGTFAINFSRPAGQVIAQYYEFLRLGREGYTKVQNASYQVAAYLADEIAKLGPYEFICTGRPDEGIPAVCFKLKDGEDPGYTLYDLSERLRLRGWQVPAFTLGGARY

SEQ ID NO: 1913 - protein, 337 aa, Desulfovibrio vulgaris subsp. vulgaris str. Hildenborough
MPEVTVTEHLLLHQKKSPAATGQFTTLLNDLVLSAKIISRSVTKAGLLDVLGGTGEVNVQGELVQKLDEFANRVLIYRMERSGAVCAMASEENADIIKVPEKLHRGDYVLIFDPLDGSSNIDVNINVGTIFSILRRKSPASDDVCIDDVLQPGYEQVAAGYILYGPSTMLVFSTGQGVHGFTLDPSVGEFLLSHPDMSIPERGRIYSINESYWNYWDEPTREIVSYFKGDHNERGKPYSLRYVGSLVADFHRTLLYGGIFMYPMDYRHPDKPQGKLRLMCEASPLAFLAEQAGGRAIDGSRRILDVCPGTLHERIPLFIGSARDVDKVEEIYARHRA

SEQ ID NO: 1914 - protein, 398 aa, Methanosarcina mazei Go1
MNEQGLSEREIFSYLENAKSEDTDYYRVFSSMCTRPHKIAIEANRLFIEANLGDLGLFAGAHKLEQEVVRMLGNLLHASSIDVPSGGLCQSSVCGYLTTGGTESNIQAVRGMKNLVTAGKKEFKGTPNIVIPASAHFSFDKVADMMGIEVRRASLDSEFRVDMASVEKLINENTIGLVGIAGNTEFGQIDPIDKLSEVALENELFLHVDAAFGGFVIPFLEKPQPFDFKVPGVTSIAIDPHKMGLSTIPSGALLFRSPSFLDSLKVSTPYLTTKSQFTLTGTRSGASAAATCAVMKYLGYEGYRKNVQYCMELTSKIVEEARKLGFEPLIEPVMNVVALKVPNPDLVRERLLKKFGWNVSITRTPRALRLVLMPHNSPEDIELFLEDLKKVTAEIKSP

SEQ ID NO: 1915 - protein, 227 aa, Eucalyptus grandis
MAREKIQIKKITNATARQVTFSKRRRGLFKKAEELSVLCDADVALIVFSSSGKLFEYCSSSMKEILERHHSHSENLGKLDQPSLKLQLVENGDYSRLSKEVAEKGHQLRQMRGEELQGLNIDELQQLEKSLEAGLNRVIEKKGEKIMKEITDLQQKGAKLMEETKRLKQQVTEISGRKTTATDSETIINEEGLSSESITNVCSSSSGPPQEDDSSDISLKLGLPYNG

SEQ ID NO: 1916 - protein, 109 aa, Glycine max
  misc_feature (17)..(17): Xaa can be any naturally occurring amino acid
  misc_feature (31)..(31): Xaa can be any naturally occurring amino acid
  misc_feature (38)..(38): Xaa can be any naturally occurring amino acid
  misc_feature (42)..(42): Xaa can be any naturally occurring amino acid
KEDVEAVHISGGPCWLXAQLHPLNDLTMVNXELLTLTXELLXQKEAREDSYFRIHFGTKWTMPQSSTLTMNLHDMLNRLAGNSEQAAESDGMIERSVREHSDVMSILDA

SEQ ID NO: 1917 - protein, 207 aa, Hypocrea lixii
VAVKKIMKPFSTPVLAKRTYRELKLLKHLRHENVISLSDIFISPLEDIYFVTELLGTDLHRLLTSRPLEKQFIQYFLYQIMRGLKYVHSAGVVHRDLKPSNILVNENCDLKICDFGLARIQDPQMTGYVSTRYYRAPEIMLTWQKYDVEVDIWSAGCIFAEMLEGKPLFPGKDHVNQFSIITELLGTPPDDVINTIASENTLRFVKS

SEQ ID NO: 1918 - protein, 171 aa, Candida albicans SC5314
MCLCLSDLFLIILSVLFPPLPVWIRRGCCSCDSLINIALCMLGYFPGLIHSWYIIAKYSSYYYQQQQQQRKDTIYYVYRSDLENQTPRRDGRDGRDECHHDHHHHHHHHHNQAESQSAGLIVSNNHNNNNNNYGSVVEGSSSSNLTPVAPIPVENGAPPPAYTEIDNKTQH

SEQ ID NO: 1919 - protein, 200 aa, Fusarium proliferatum
VAVKKIMKPFSTPVLAKRTYRELKLLKHLKHENVISLSDIFISPLEDIYFVTELLGTDLHRLLTSRPLEKQFIQYFLYQIMRGLKYVHSAGVVHRDLKPSNILVNENCDLKICDFGLARIQDPQMTGYVSTRYYRAPEIMLTWQKYDVEVDIWSAGCIFAEMLEGKPLFPGKDHVNQFSIITELLGTPPDDVINTIASEN

SEQ ID NO: 1920 - protein, 265 aa, Triticum aestivum
  misc_feature (232)..(232): Xaa can be any naturally occurring amino acid
  misc_feature (253)..(253): Xaa can be any naturally occurring amino acid
  misc_feature (259)..(259): Xaa can be any naturally occurring amino acid
HYRTSLYKKAGWYRSGIPGISSTHASETNMQENWRIVDFFSHHPESLHMVTFLFDDVGIPLNYRHMDGFGVNTYTLISRDGKAHLVKFHWKPTCGVKCLLDDEAVTVGGTCHTHATKDLTDAIAAGNYPEWKLFIQTIDADHEDKFDFDPLDVTKTWPEDIIPLQPVGRMVLNKNIDNFFAENEQLAFCPAVTVPGIHYSDDKLLQTRIFSYADTQRHRLGPNYLMLPVNSXECAHHNNHHDGLMNFMHRDEXVNYFPXRFDPTR

SEQ ID NO: 1921 - protein, 434 aa, Geobacter sulfurreducens PCA
MRNELVTPGAGELTYEIRNIVNVAEKLQKHGVKINWENIGDPIVKKEEIPRWMKEIVAAAVMENDTWGYCHTRGVLETREFLCGLTNNRGGAQITPDDIIFFNGLGDAISTVYGNLRHESRILMPSPTYTTHSIGEAAHAQAAPVCYRLKPEDNWFPDVEDLENHVKYNPQISGILLINPDNPTGMVYPREILEQIVAIARRYDLFIIADEVYNNITYNGQTTVPISDVIGEVPAIAMKGISKEIPWPGSRCGWIEVYNGNRDEQFHKFLNSILTAKMNEVCSTTLPQKCIPAIMKHPEYQTYLRERIACYERMSTITYDCLKQVPGLMVNRTNGAFYMSVAFRDGLLTDRQSLPIESVEVRELVEKLVNAPGVSPDKRFVYYILASTGICIVPLSSFNTPLQGFRVTLLEKDENECMRIYRTLAERIKEYLNS

SEQ ID NO: 1922 - protein, 595 aa, Corynebacterium glutamicum ATCC 13032
MCHSISHLSSPTGSIFTSLVAMLTSQSFSVWAPLPHDVHLILNGETLPMHKTEGSWWRAEIAPKAGDRYGFSLFDGSSWSKTLPDPRSTSQPDGVHGLSEVSDDSYLWGDQQWTGRILPGSVLYELHVGTFSEDGTFEGVVDKLPYLRDLGVTAIELLPVQPFGGNRNWGYDGVLWHAVHAGYGGPAGLKKLIDASHQAGIAVYLDVVYNHFGPDGNYNGQFGPYTSGGSTGWGDVVNINGHDSDEVRNYILDAARQWFEDFHVDGLRLDAVHSLDDRGAYSLLAQLTMVAEDVSAQTGIPRSLIAESELNDPKFVTSREAGGFGLDAQWVDDIHHALHALVSGERNGYYSDFGSVDTLAKTLREVFEHTGNYSTYRGRNHGRPVHPDITPASRFVTYTTTHDQTGNRAIGDRPSTTLTPEQQVLKAAIIYSSPYTPMLFMGEEFGATTPFAFFCSHTDPELNRLTSEGRKREFARLGWNADDIPSPELESTFTSSKLDWEFTAEQRRINDAYKQLLHLRHTLGFSQPNLLTLEVEHGENWLSMANGRGRILANFSDDTITVPLGGELIYSFTSPTVTDTSTTLQPWGFAILTRN

SEQ ID NO: 1923 - protein, 153 aa, Rubrobacter xylanophilus DSM 9941
MLSPFRGFWDVRSELDRMFDDVVRDAFRLWRGEGRAARTAEWAPAIDVYSKDGDLVIKAELPGMKPEDVDITLQEGVLTISGERKAEEEREGAGYFVRERRYGSFRRSMRLPEGVDESKIHARFEDGVLEVVVEGAGAVTEPRRIQIEAPKGS

SEQ ID NO: 1924 - protein, 403 aa, Glycine max
MASDGFTDKNTVFRKLKAKSENKMCFDCNAKNPTWASVTYGIFLCIDCSAVHRSLGVHISFVRSTNLDSWSPEQLKTMSFGGNNRAQVFFKQHGWNDGGKIEAKYTSRAADLYRQILSKEVAKSMAEDGGLPSSPVASQSSQGVNGLPEVKTNEVPKENILEKPEKPESTSSPRASHTVISSTVKKPIGAKKAVKSGGLGARKLTKKPSESLYEQKPEEPPAPVSSSTNNMPAGPSPTSRFEYAENVQSSELNTGGSHLLSHVSPPKSSSFFADFGMDSGFPKKSGPSSSKVQIQETDEARRKFSNAKSISSSQYFGDQNKAADVDSQATLSKFSGSSAISSADLFGDSRDNNIDLTAGDLINRLSFQAQQDLSSLKNIAGETGKKLSSLASTLMTDLQDRIL

SEQ ID NO: 1925 - protein, 313 aa, Rhizobium sp. TAL1145
MTDIREWTSTVGLENELGEVLSGLANACATIARTLRTAPLAQLSGSAGSLNVQGEAQKPLDIISNEVFVNACRELAQISLAVSEEEEDPIPISATGSYAVVFDPLDGSSNLDVNVTVGSIFSVVSATTPKHILPGGRPQHIAGFASYGPSTDLTVLAKGRVARFTLDASDTWRLVELDMRLPDRFPEIAINAARADSWDDVIRGFVNDAFHGNEIRYNARWVASLVAETQRILSRGGLFLYPADSSGRGRLRLLYEARPIAAIVEAAGGRCSTGFMPILEVNAETLHDRVPLIFGGASQVEALEAAYRADKEN

SEQ ID NO: 1926 - protein, 366 aa, Dioscorea elephantipes
SGKPFYAIVHRVTGCLIFDFEPVKLSDIPTSTTASGALQSYKLAAKAIARPQSLPGGSMDTLCETLVEEVFQFTGYDRVMVYKFHEDDHGEVYQEITKPGMVPYLGLHYPATDIPQAARFLFIKNKVRMICDCRAKHVNIHQDETLLFDITFCGSTLRAAHNCHLQYMSNMNSIASLTMAVVVNEGEEEDDHLEPGQSSQQQQQQQQQQQQQQQKRKHLWGLVVCHNESPRFLPFPMRYACQFLMQVFSVHVTKELELENQIREKNILRTQTLLCDMLLRDTAPVGIITQSPNIMDLVKCDGAALLYDDRIWRLGLTPTKEQIRSIAHWLAEHHMAPTALSTDSLQDAGYPDAQALGDLVCGMAAA

SEQ ID NO: 1927 - protein, 546 aa, Helicobacter pylori J99
MAKEIKFSDSARNLLFEGVRQLHDAVKVTMGPRGRNVLIQKSYGAPSITKDGVSVAKEIELSCPVANMGAQLVKEVASKTADAAGDGTTTATVLAYSIFKEGLRNITAGANPIEVKRGMDKAAEAIINELKKASKKVGGKEEITQVATISANSDHNIGKLIADAMEKVGKDGVITVEEAKGIEDELDVVEGMQFDRGYLSPYFVTNAEKMTAQLDNAYILLTDKKISSMKDILPLLEKTMKEGKPLLIIAEDIEGEALTTLVVNKLRGVLNIAAVKAPGFGDRRKEMLKDIAILTGGQVISEELGLSLENAEVEFLGKAGRIVIDKDNTTIVDGKGHSDDVKDRVAQIKTQIASTTSDYDKEKLQERLAKLSGGVAVIKVGAASEVEMKEKKDRVDDALSATKAAVEEGIVIGGGAALIRAAQKVHLNLHDDEKVGYEIIMRAIKAPLAQIAINAGYDGGVVVNEVQKHEGHFGFNASNGKYVDMFKEGIIDPLKVERIALQNAVSVSSLLLTTEATVHEIKEEKAAPAMPDMGGMGGMGGMGGMM

SEQ ID NO: 1928 - protein, 463 aa, Dioscorea elephantipes
SGKPFYAIMHRIDVGLVIDLEPVNPADVPVTAAAALKSYKLAAKAISRLQSLPSGNIPLLCDVLVKEVSELIGYDRVMAYKFHEDEHGEVIAECRRSDLEPYLGLHYPATDIPQASRFLFMKNKVRMICDCSAPPVKVIQDKRLPQPLSLGGSTLRAPHGCHAQYMANMGSIASLVMSVTINEDDDETGSGDQQQNGMKLWGLVGCHHTSPRFVPFPLRYACEFLLQVFGIQLNKEVELATQQREHILRTQLSCDMLLRDAPIGYLLNSPNVMDLVKCDGAALYYKNQFWLLEITPTEAQIRDIFAWLLEYHNSTTGLSTNSLTEAGYPGAVELGDAVCSMAATKITSKDFIFWFRSHTSKEIKWGGAKHDPGDRTDEGRKMHPRSSFKAFLEVVKRRSLPWEDVDMDAIHSLQLILRGSLQDEPVTDNSKTIVNATPDDAKQIQHMDELRIVTTEMVRLMET

SEQ ID NO: 1929 - protein, 547 aa, Pseudomonas syringae pv. tomato str. DC3000
MAAKEVKFGDAGRKKMLAGVNVLADAVKATLGPKGRNVIIEKSFGAPLITKDGVSVAKEIELKDRFENMGAQLVKDVASRANDDAGDGTTTATVLAQAIVNEGLKAVAAGMNPMDLKRGIDKATIAIVAELKKLSKPCTDTKAIAQVGTISANSDHSIGDIIAEAMEKVTKDGVITVEEGSGLENELSVVEGMQFDRGYLSPYFINKPDTMVAELDSPLLLLVDKKISNIREMLPVLEAVAKAGRPLLIVAEDVEGEALATLVVNNMRGIVKVAAVKAPGFGDRRKAMLQDIAVLTGGTVISEEIGLSLETTTLEHLGNAKRVILNKENTTIIDGAGVKTDIDSRISQIRQQIGDTSSDYDKEKLQERLAKLSGGVAVIKVGAGSEVEMKEKKARVEDALHATRAAVEEGVVPGGGVALVRSLQAIEGLKGDNADQDVGIALLRRAVEAPLRQIVANSGDEPSVVVDKVKQGSGNFGYNAASGEYGDMIEMGILDPAKVTRSALQAASSIASLMITTEAMIADVADEKAAGGGMPDMGGMGGMGGMM

SEQ ID NO: 1930 - protein, 235 aa, Musa acuminata
RIENKINRQVTFAKRRNGLLKKAYELSVLCDAEVALIVFSNRGKLYEFCSSSSMLRTLERYQKCNYGAPETNIISRETQSSQQEYLKLKARVDGLQRSQRNLLGEDLGPLNIKELEQLERQLDASLRQIRSTRTQYMLDQLGDLQRLGTNAMWSLIKPWKIRLEESSEADQQQLWDPNTHAVAYGRQQPQPQGDGFFQFIDCEPTLQIGYHPDQMAIAAAAAAAPGPSYMPGWLA

SEQ ID NO: 1931 - protein, 187 aa, Ginkgo biloba
DEHGEVVAEIRRSDLEPYLGLHYPATDISQASRFLFMQNRVRMICDCCATPVKVIQDEELRQPLCLVGSTLRAPHGCHAQYMANMGSIASLVMAVIINGTDEEGLSGRNSMKLWGLVVCHHTSPRAVPFPLRYACEFLMQAFGLRLNMELQLGAQLHEKHILRTQTLLCDMLLRDAPIGIVTQSPSI

SEQ ID NO: 1932 - protein, 466 aa, Hedyosmum sp. SM-2000
SGKPFYAIIHRVTASFIIDFEPVKPYEVPMTAAGALQSCKLAAKAISRLQSLPGGSMERLCETVVQEVFELTGYDRVMAYKFHEDDHGEVFSEITKPGLEPYLGLHYPATDIPQAARFLFMKNKVRMICDCHAKPVKVFQDEKLTFDLTLCGSTLRAPHSCHLQYMANMSSIASLVMAVVVNEGEDEGENVDSGQQQQQKRKRLWGLVVCHNTTPRFVPFPLRYACEFLIQVFAIHVNKEIELESQIREKNIFRTQTLLCDTLMRDAPLGIISQNPNILDLVKCDGAALLYKSKVWRLGLTPNEPQIHDISLWLSEYHMDSTGFSTDSLHEAGYQGAVALGNIVCGMAAVWITSKDMLFWFRSHTAAEVRWGGAKHDPDDTDDNRRMHPRSSFKAFLEVVKKRSIPWKDYEMDAIHSLQIILRGNFSDSEKTHANTTFDSRLNDLKLEGMEELQAVTNEMVRLIET

SEQ ID NO: 1933 - protein, 493 aa, Arabidopsis thaliana
MVLSKTVSESDVSIHSTFASRYVRNSLPRFEMPENSIPKEAAYQIINDELMLDGNPRLNLASFVTTWMEPECDKLMMESINKNYVDMDEYPVTTELQNRCVNMIARLFNAPLGDGEAAVGVGTVGSSEAIMLAGLAFKRQWQNKRKAQGLPYDKPNIVTGANVQVCWEKFARYFEVELKEVNLREDYYVMDPVKAVEMVDENTICVAAILGSTLTGEFEDVKLLNDLLVEKNKQTGWDTPIHVDAASGGFIAPFLYPELEWDFRLPLVKSINVSGHKYGLVYAGIGWVVWRTKTDLPDELIFHINYLGADQPTFTLNFSKGSSQVIAQYYQLIRLGFEGYRNVMDNCRENMMVLRQGLEKTGRFKIVSKENGVPLVAFSLKDSSRHNEFEVAHTLRRFGWIVPAYTMPADAQHVTVLRVVIREDFSRTLAERLVADFEKVLHELDTLPARVHAKMANGKVNGVKKTPEETQREVTAYWKKLLETKKTNKNTIC

SEQ ID NO: 1934 - protein, 245 aa, Petunia x hybrida
MGRGRVELKRIENKINRQVTFAKRRNGLLKKAYELSVLCDAEVALIIFSNRGKLYEFCSTSSMTKTIEKYQRCSYATLEANQSATDNQNNYHEYLRLKARVELLQRSQRNLLGEDLGTLSTKDLEQLENQLESSLKQIRSRKTQFMLDQLADLQQREQMLAESNKQLRQKLEESVAGIPHRLCWEDGLQAMQHNSRLPQTEGFFQPLGLNSSNSPQFGYNPAGTDVENAAATTHNMNGFIHGWML

SEQ ID NO: 1935 - protein, 188 aa, Arabidopsis thaliana
MTNYGAIPTSSHASPLVDVESLSRAKHRIKAGLATRRAWRVMFDFHSMGLPHGVSDAFTRIKTNLAYFRMNYAIVVLIVIFFSLIWHPTSLIVFTVLVVVWIFLYFLRDEPIKLFRFQIDDRTVLIVLSVLTVVLLLLTNATFNIVGALVTGAVLVLIHSVVRKTEDLFSFEEAATTETSGLTSYPST

SEQ ID NO: 1936 - protein, 394 aa, Arabidopsis thaliana
MKRYIGVGEEEEVQLFYYFIKSERNPQEDPLLLWLSGGPGCSSISGLLYENGPVNVKIEVYNGTLPSLVSTTYSWTKVSSIIYLDQPVGTGFSYSRTKLVNKPSDSGEAKRIHEFLHKWLGKHQEFSSNPFYVGGDSYCGMVIPALVQEISKGNYVCCKPPINLQGYILGNPSTENEVDINYRIPYAHGMALISDELYESMKRICKGKYENVDPRNTKCLKLVGEYQKCTKRINKALIITPECVDTSPDCYMYRYLLTTYWANDENVQRALHVNKGSIGEWVRCYFEIPYNHDIKSSVPYHMNNSIDGYASLIFSGDHDMEVPYLGTQAWIRSLNYSLIDDWRPWMIGDQIAGYTRTYANKMAFATIKGGGHTPEYKPEESYIMFQRWISGQPL

SEQ ID NO: 1937 - protein, 468 aa, Geobacillus kaustophilus HTA426
MNVIQRWAAALLLFAAPFLAWSPPAEAAPASTKVLEEVRELVRQYYVEPVSDRVLKASTPQDIVKQLDPYSAYMTKQEYEEFLKWIDMESVGIGVMVEEDEDGVHILSVLDNGPAARAGLQPGDVIRAVDGQPVTNETMEKVLSLIAGEEGTTVAVTVWRPSTEETVSVTIKREKIDWPNVEFKRLAGNIGYIQLYSFDETAPGEIERAIRSLSGVKGWIFDLRDNQGGYVETAQKIAGFFPNVKQAFQLRDRSNHPEVYAAVKQPVQMTGPIRLLVNASSASASEMLAAAVKEQKAAVLYGQRTFGKGSMQEMFELSDGSMLKLTVAHFFSPKGTPIHNVGVKPDVPTVVGKELYAAHRDLLIGQLKGYQSLGKLRNAPVDKTFVVRFSRPLANTAVSGVKLYQLGGQEVAVTAQIRRGTELLIKPAAKLAKGQSYLLVIPPVLKSKDGVAMKKGAYMEIQTAASTK

SEQ ID NO: 1938 - protein, 397 aa, Hedyosmum sp. SM-2000
DLEPVNPAEVPVIAAGALKSYKLAAKAISKLRSLPSGNISLLCDVLVREVSELTGYDRVMAYKFHEDEHGEVIAECRRSDLEPYLGLHYPATDIPQASRFLFMKNKVRMICDCSAPPVKVIQDKRLGQPLSLCGSTLRAPHGCHAQYMTNMGSIASLVMSITINEDDEETDNEQQLQQEKPKKLWGLVVCHHTSPRFIPFPLRYACEFLIQVFGIQLNKEVELAAQVREKHTLKTQTVLCDMLLRDAPMGILTQSPNVMDLVKCDGAALNYKNQFWLLGTTPTEAQIKDLAEWLLECHDGTTGLSTDSLTEAGYPGSYVLGDAVRGMAAVKITSKDFLFWFRSHSAKEIKWGGAKHDPIDKDDDGRKMHPRSSFKAFLEVVRQRSVPWEDIEMDAIQ

SEQ ID NO: 1939 - protein, 442 aa, Arabidopsis thaliana
MVDSDPVEFPPENRRGQLFGKYEVGKLVGCGAFAKVYHGRSTATGQSVAIKVVSKQRLQKGGLNGNIQREIAIMHRLRHPSIVRLFEVLATKSKIFFVMEFAKGGELFAKVSKGRFCEDLSRRYFQQLISAVGYCHSRGIFHRDLKPENLLLDEKLDLKISDFGLSALTDQIRPDGLLHTLCGTPAYVAPEVLAKKGYDGAKIDIWSCGIILFVLNAGYLPFNDHNLMVMYRKIYKGEFRIPKWTSPDLRRLLTRLLDTNPQTRITIEEIIHDPWFKQGYDDRMSKFHLEDSDMKLPADETDSEMGARRMNAFDIISGSPGFNLSGLFGDARKYDRVERFVSAWTAERVVERLEEIVSAENLTVAKKETWGMKIEGQKGNFAMVVEINQLTDELVMIEVRKRQRAAASGRDLWTDTLRPFFVELVHESDQTDPEPTQVHTTS

SEQ ID NO: 1940 - protein, 465 aa, Heuchera canadensis
SGKPFYAIVHRVTGSLIIDFEPVKPYEVPMTAAGALQSYKLAAKAITRLQALPSGSVERLCDTMVQEVFELTGYDRVMAYKFHDDDHGEVVSEITKPGLEPYLGLHYPATDIPQAARFLFMKNKIRMICDCRAKHVKVLQDEKLPFDLTLCGSTLRAPHSCHLQYMENMNSIASLVMAVVVNDGDDESESSNPAQPSKRKRLWGLVVCHNTTPRFVPFPLRYACEFLAQVFAIHVSKELELENQILEKNILRTQTLLCDMLMRDAPLGIVSQSPNIMDLVKCDGAALLYKDKIWRLGVVPTDSQLQDIASWLSKYHMDSTGLSTDSLYDAGFSRALSLGDVVCGMAAVKINSNDILFWFRSHTAAEIRWGGAKHETGEKDDNRKMHPRSSFKAFLEVVKTRSLPWKDYEMDAIHSLQLILRNTFKDIETVDANTNKIHTKLSDLKIEGMQELEAVTSEMVRLIET

SEQ ID NO: 1941 - protein, 408 aa, Rickettsia rickettsii
MATKLIKHGSKAREQMLEGIDILADAVKVTLGPKGRNVLIEQSFGSPKITKDGVTVAKSIELKDKIRNAGAQLLKSAATKAAEVAGDGTTTATVLARALAREGNKLVAAGYNPMDLKRGMDLAVNAVVEEIKKSSKKINSQEEIAQVGTISSNGDKEIGEKIAKAMEEVGKEGVITVEEAKNFSFDVEVVKGMMFDRGYLSPYFVTNSEKMVAELENPFILLFEKKLSNLQPMLPILEAVVQSQRPLLIIAEDVEGEALATLVVNRLRGGLKVAAVKAPGFGDRRKAMMEDIAILTKGELITEDLGMKLENVSIKSLGTAKRVTISKENTVIVDGNGDKKNIEDRVLQIKSQIAETTSDYDKEKLQERLAKLSGGVAVLKVGGATEVEVKERKDRVEDALAATRAAVE

SEQ ID NO: 1942 - protein, 193 aa, Zea mays
MSKYGTIPTSSSAGGGPVPLGGASPLDFISRAKARGASALATRRPWRELVDVHAVGLPPSLGDAYLRVRANLAHFAMNYAIVVLVVVFLSLLWHPVSLIVFLVCMLAWLVLYFLRDEPLVLFGRVVADGYVLAVLAVVTLVLLLLTDATANILSSLLIGLVLVLVHAALHKAEDNAADEADRWYAPVSQQPSH

SEQ ID NO: 1943 - protein, 252 aa, Gnetum parvifolium
MGRGRVQLRRIENKINRQVTFSKRRNGLLKKAYELSVLCDAEVALIIFSTRGKLYEFASSSMSKTLERYEKCSYSMQENASTDRDAQNWHHEVTKLKAKLESLHKAQRNLMGEDLGPLNIKELQSLEQQLEVALGHVRNRKTQLLIQTIDELRDKERTLQEVNKSLQKKLSETEGRNVIPALPHATTGSGEWESSTLTTTYALQTQQPSGIHHVDCEPTLHIGPYHQAVHHEAIPGPPATHSEPHNQYIWWV

SEQ ID NO: 1944 - protein, 247 aa, Oryza sativa (japonica cultivar-group)
MAVEAVLEASRSSSEEEAEVIVTHGGGGGGGGGGGQVEGWGKRKRSRRRRPQLPPSEEEYLALCLLMLARGRRDGDDVAASASAAAAAVEHRCSVCGKAFASYQALGGHKASHRKPPPPAMVDDDEVVVETKPAAIATPSSSASGVSGGGGGRAHECNVCGKAFPTGQALGGHKRCHYDGTIGSAAGAGASKPAAKTTVAVAASRGFDLNLPALPDVAAAADQRCAAEDDEVLSPLAFKKPRLMIPA

SEQ ID NO: 1945 - protein, 404 aa, Salmonella enterica subsp. enterica serovar Typhi Ty2
MSPIEKSSKLENVCYDIRGPVLKEAKRLEEEGNKVLKLNIGNPAPFGFEAPDEILVDVIRNLPTAQGYCDSKGLYSARKAIMQHYQARGMRDVTVEDIYIGNGVSELIVQAMQALLNSGDEMLVPAPDYPLWTAAVSLSSGKAVHYLCDESSDWFPDLDDIRAKITPRTRGIVIINPNNPTGAVYSKELLMEIVNIAREHNLIIFADEIYDKILYDDAEHHSIAALAPDLLTITFNGLSKTYRVAGFRQGWMVLNGPKKHAKGYIEGLEMLASMRLCANVPAQHAIQTALGGYQSISEFILPGGRLYEQRNRAWELINDIPGVSCVKPRGALYMFPRIDAKRFNIHDDQKMVLDFLLQEKVLLVQGTAFNWPWPDHFRIVTLPREDDLEMAINRFGRFLSGYHQ

SEQ ID NO: 1946 - protein, 371 aa, Candida albicans SC5314
MSSVASKKIITFEGHRNFRLRLVLATLSGKPIKITKIRSQDLNPGLKDHEVSFLRLLEAVTNGSHIEISYTGTTIIYRPGIIIGGDLTHNCPDTKSIGYFIEPMLMLAPFSKKKFSIIFKGLTNIAGNDTGVDAIKWGLLPVMEKFGVREVSLHILKRGSAPLGGGEVHLLCSSLIPQPLTIHALDIPKFSAIRGVAYCTRVSPSIVNRMIDSARAVLKPPGCEVNITADVWRGENSGKSPGFGITLVAESKRGWRIVTENVGSAGSLPEDSGELTAYQLLEEISNSGVVGRYQLPLALVYMTIGKEDIGRLKLQKSEIDENLVSVLRDIQEVFGTEAFFKDDAEELDSDDKFMTVSIKGVGFTNVSKKIA

SEQ ID NO: 1947 - protein, 668 aa, Vibrio parahaemolyticus RIMD 2210633
MNCRSKVTLIAASLWLAASAQALEAKLHKDDLPVLAPEVQHETASKRVTSRFTRSHYKHFNLNDDFSKAIFERYVEMLDYNRNIFTQADIDSFKDWSIELDDQLKAGNNKIAFDVYNLSMQKRFERFAYAMTLLDKEIKFDNADEIELDRSEAAWPKDEAELNELWRKRVKYDALNLKLTGKEWPEIKEVLEKRYNNAMKRITQTNNEDAFQLYMNAFARQVDPHTSYLSPRNAEQFQSEMNLSLEGIGAVLQLTDDYTVIRSLVAGGPASKSKQLGEGDRIIGVGQDGEEIVDIIGWRLDDVVQLIKGPKGTKVNLQILPEGAGAKSYVVTIVRDKVRLEDRAVKSEIIEKDGKKIGVLEVPSFYVGLSQDTDKLLNDLKAKNVDGIIVDLRNNGGGALTEATALTGLFIKEGPVVQVRDSYGRIKVNADTDGLVSYDGPLTVLINRYSASASEIFAAAMQDYNRAVILGENSFGKGTVQQHRSLNHIYDLFDKELGYVQYTIQKFYRIDGGSTQNRGVAPDIAYPTPIDPSETGESVEDNALPWDSIDKATYQTFPDNDKLIANLTELHNKRIADEMEFRFINEDIEKYRKEKDDNMLSLNEKVRKDESDKAEALRLKRINERQTALGKKTFKSLDDVPKDYEAPDVYLDESVAIMVDMLKAPKQS

SEQ ID NO: 1948 - protein, 672 aa, Bordetella bronchiseptica RB50
MHPYRNLLEPYDFGFLALRNRMVMGAMHTRIETLDQPVARLAQFFRERARGEVGLILTGGFAPDQAGRMEDDAPVLEHAGQLAPHQAITQAVHEEGGRIVLQILHAGRYAKHPLCVGPTAQRAPINPHVPRAMTPEDIARTVRAIAHTASLARQAGYDGVEIMGSEGYLLNEFASARTNTRDDAYGGSFDNRIRLPIETVRAVRAAAGPDFLLIYRISAIDLVEDGMTGAESAQLARRLQEAGVDMLNTGIGWHESAIPTIAASVPRAGWEFAVRNIKDAVSIPVIASNRINTPEVGERLLADGAADFVSMARPLLADPEFAAKTRLGQPERINSCIACNQACLDRIFTERTASCLVNPRAGRELDYPRGRAATPRRIAVAGGGAAGMAFAVYAAERGHAVTLYEAADTLGGLLNLARRIPGKREFDETLRYFHGRLAELDIAVRLGTRVTADQLRQAQYEAVVVATGVTPRLPAIDGLDHPKVAFYDEVLSGRREIGQRVAIIGTGGIAFDTAEFLLGDAAESQSPERFQRHWGIDASLRQPGGLADPALPPPRRLIHMLQRGHDKPGARLGKSTGWILKSRLRRAGVRMITGVTYHGVSDAGLAYACDGVAHVLPVDDVIVCAGQLALDELSQALAGSGMRVAAIGGARHAAELDAARAIEEALQLAHAF

SEQ ID NO: 1949 - protein, 245 aa, Houttuynia cordata
MGRGRVQMKRIENKINRQVTFSKRRMGLLKKAHEISVLCDADVALIVFSTKGKLYEYATDSSMTKILERYERYSFAEREFALADNESEGAWSLEFGKLKARVEALQKTHRHYLGEDLDSLKVKELQHLEQQLDSALKHVRLRKNQVIQETISELQKKEKALQEQNNMLEKKVQEKQKAKAQQTRWENQSQNQNSAPFLFSLPLPNLNMGTYHQENGTEIREQEAARPLAHSNSQMPAWMLRHASE

SEQ ID NO: 1950 - protein, 148 aa, Triticum aestivum
IRVKDKDASLSFYQDVMGMKLKRTSESPNAGFNLYFLGYGVDAPETTANGVNPVSDSEGLLELTWNYGTEKDAEFKYHNGNDEPQGFGHICIAVDDLDAACARFEEKKVNWKKRLTDGRMKNIAFVLDPDNYWIEVVQNEKLKTRSNW

SEQ ID NO: 1951 - protein, 446 aa, Thermotoga maritima
MNVKKFPEGFLWGVATASYQIEGSPLADGAGMSIWHTFSHTPGNVKNGDTGDVACDHYNRWKEDIEIIEKLGVKAYRFSISWPRILPEGTGRVNQKGLDFYNRIIDTLLEKGITPFVTIYHWDLPFALQLKGGWANREIADWFAEYSRVLFENFGDRVKNWITLNEPWVVAIVGHLYGVHAPGMRDIYVAFRAVHNLLRAHARAVKVFRETVKDGKIGIVFNNGYFEPASEKEEDIRAVRFMHQFNNYPLFLNPIYRGDYPELVLEFAREYLPENYKDDMSEIQEKIDFVGLNYYSGHLVKFDPDAPAKVSFVERDLPKTAMGWEIVPEGIYWILKKVKEEYNPPEVYITENGAAFDDVVSEDGRVHDQNRIDYLKAHIGQAWKAIQEGVPLKGYFVWSLLDNFEWAEGYSKRFGIVYVDYSTQKRIVKDSGYWYSNVVKNNGLED

SEQ ID NO: 1952 - protein, 279 aa, Bacillus cereus ATCC 10987
MKNLQSTTTLHNGVEMPWFGLGVFKVEDGPELVEAVKSAIKAGYRSIDTAAIYGNEKAVGEGIRAGIKEAGISREDLFITSKVWNSDQGYETTLAAYEESLKKLELDYLDLYLVHWPVEGKYKDTWRALETLYKEERVRAIGVSNFQIHHLQDVMKDAEIKPMINQVEYHPRLTQKELQAFCKEQGIQMEAWSPLMQGQLLDNETLQAIAEKHGKTTAQVILRWDLQNGVITIPKSTKEYRIIANADVFNFELTKEDMEKIDALNQNHRVGPDPDNFDF

SEQ ID NO: 1953 - protein, 427 aa, Oryza sativa
MSLCCKATRRSSGGLTTGHPISALPRAIKRILSSYPSLLTSLGGNLARGYKAAKPFLSIGFGRVVLGMVLVMSVSAATYTAPSSLALTEENLLFLEAWRAVDRAYYDKSFNGQSWFRYRENALRNEPMNTREETFSLLEHNCISDAAIKKMLSTLDDPFTRFLEPEKFKSLRCYLSKLFPYIFARGPEGSSVDLDIRSGSNTRHVVLKRQTVTLNPVRSRMCEIPGAKDNSKVGYIKLTTFNQNAAGSVKEALQKLRENNVKSFVLDLRNNSGGLFPEGIEIAKIWMDKGVIVYICDSQGVRDIYEADGISTVAASEPLVVLVNKGTASASEILAGALKDNKRAVIYGEPTYGKGKIQSVFALSDGSGLAVTVARYETPAHTDIDKVGVIPDRPLPASFPTDEDGFCSCLRDSNSACNLNAAQLFTR

SEQ ID NO: 1954 - protein, 170 aa, Triticum aestivum
  misc_feature (140)..(140): Xaa can be any naturally occurring amino acid
AARDPIGITSFYQGRSSTLPGAIFFASELKCLSSVCDEIIAFPPGHVYDSKTNETTRYFKPSWWDPHRQPAAPVDYRLLRTTLEKSVKKRLMAEVPFGVLLSGGLDSSLIASIAQRETLRLKAASLEQSSKLFDSKGTVXKQCRGKGKQLVGIDEDNNLSTLANYSAKPF

SEQ ID NO: 1955 - protein, 239 aa, Zea mays
MVVSVAATGPGTDAEPVSSTFFASRYVRDPLPRYRMPERSIPREAAQQIISDELMLDGNPRLNLASFVTTWMEPECDKLIMDSINKNYVDMDEYPVTTELQNRCVNMIAHLFNAPIKEDETAIGVGTVGSSEAIMLAGLAFKRKWQNKRKEQGKPCERPNIVTGANVQVCWEKFARYFEVELKEVKLSEGYYVMDPVRAVEMVDENTICVAAILGSTLTGEFGDVKQLNDLSTDKNKET

SEQ ID NO: 1956 - protein, 243 aa, Houttuynia cordata
MGRGRVELKRIENKINRQVTFAKRRNGLMKKAFELSVLCDAEVALIVFSSRGKLYEFCSSSGMMKTIERYQKCNYGAPEATVSTKEIQSSYQEYMKLKARVESLQRSQRNLLGEDLGPLTGKELEQLERQLDMSLKQIRSTRTQCMLDQLSDLQRREQMLSEANKALRRRLLQLDDGSQTNPHHSWDPNAHGVGYSRHPGQPQGEVIFDPLDCEPTLHIGYQPDQITIAAPGPNGNYMQGWLP

SEQ ID NO: 1957 - protein, 148 aa, Listeria monocytogenes
IMYLFSDEGTPASYREVRGSSVHAFKWINEEGKTVYVKLRWVPKAGIVNLSTEQASQIQAKEFNHASRDLYEAIENGDYPEWDLYVQVLDPKDLDSFDFNPLDATKDWFEDVFPYEHVGTMTLDRNPDNIFAETESVGFNPGVLVRGM

SEQ ID NO: 1958 - protein, 1123 aa, Solanum tuberosum
MSSSRPSQSSATSSRSKHSARIIAQTSIDAKLHADFEESGDSFDYSSSVRVTSVAGDEERPKSDKVTTAYLHQIQKGKFIQPFGSLLALDEKTLKVIAFSENAPEMLTMVSHAVPSVGEHPVLGIGTDIRTIFTGPSGAALQKALGFGEVSLLNPVLVHCKNSGKPFYAIVHRVTGSLIIDFEPVKPYEVPMTAAGALQSYKLAAKAITRLQSLPSGSMERLCDTMVQEVFELTGYDRVMGYKFHDDDHGEVVSEITKPGLEPYLGLHYPATDIPQAARFLFMKNKVRMICDCRAKHVKVVQDEKLPFDLTLCGSTLRAPHYCHLQYMENMNSVASLVMAVVVNDGDEEGESSDSSQSQKRKRLWGLVVCHNTTPRFVPFPLRYACEFLAQVFAIHVNKELELENQFLEKNILRTQTLLCDMLMRDAPLGIVSQSPNIMDLVKCDGAALLYKNKIHRLGMNPSDFQLHDIVSWLCEYHTDSTGLSTDSLYDAGFPGALALGDAVCGMAAVRISDKDWLFWYRSHTAAEVRWGGAKHEPGEKDDGRKMHPRSSFKAFLEVVKTRSIPWKDYEMDAIHSLQLILRNAFKDADAVNSNTNSIHTKLNDLRIDGMQELEAVTAEMIRLIETASVPIFAVDVDGQVNGWNTKVAELTGLPVDEAIGKHLLTLVEDSSVDTVNKMLELALQGKEERNVEFEIKAHGPSRDSSPISLIVNACASKDVRDSVVGVCFIAQDITGQKSIMDKFTRIEGDYRAIIQNPHPLIPPIFGTDQFGWCSEWNSAMTKLTGWRRDDVMDKMLLGEVFGTQAACCRLKNQEAFVNFGVILNNAITGQESEKIPFGFFGRYGKYVECLLCVSKRLDKEGAVTGLFCFLQLASHELQQALHVQRLSEQTALKRLKVLAYIRRQIKNPLSGIIFSWKMLEGTSLGEEQKNILHTSAQCQRQLNKILDDTDLDSIIEGYLDLEMLEFKLHEVLVASISQVMMKSNGKNIMISNDMVEDLLNETLYGDSPRLQQVLANFLLVSVNSTPSGGQLSISGRLTKDRIGESVQLALLEFRIRHTGGGVPEELLSQMLGSEVDASEEGIFLLVSRKLVKLMNGEVQYLREAGRSTFIISVELAVATKSC

SEQ ID NO: 1959 - protein, 148 aa, Listeria monocytogenes
IMYLFSDEGTPASYREIRGSSVHAFKWINEEGKTVYVKLRWVPKAGIVNLSTEQASQIQAKEFNHASRDLYEAIENGDYPEWDLYVQVLDPKDLDSFDFNPLDATKDWFEDVFPYEHVGTMTLDRNPDNIFAETESVGFNPGVLVRGM

SEQ ID NO: 1960 - protein, 229 aa, Arabidopsis thaliana
MGQQSLIYSFVARGTVILAEYTEFKGNFTSVAAQCLQKLPSSNNKFTYNCDGHTFNYLADNGFTYCVVVIESAGRQIPMAFLERVKEDFNKRYGGGKASTAKANSLNKEFGSKLKEHMQYCADHPEEISKLSKVKAQVTEVKGVMMENIEKVLDRGEKIELLVDKTENLRSQVNNNHISNTAQDFRTQGTKMKRKLWFENMKIKLIVFGIIVALILIIILSVCHGFKCT

SEQ ID NO: 1961 - protein, 513 aa, Hordeum vulgare subsp. vulgare
MDGNNRGGGHSEVLKNYNLGKTLGLGTFGDVKVAEHKLTGQRVAIKILNRRKMETMEMEEKANREIKIMRLFIDFIHPHIIRVYQVIETPKDIFIVMEYCNNGELLDYIIENGRLQEDEARRIFQQILAGVEYCHRIMVVHRDLKPENLLLDSKYNVKLADFGLSNVMRDGHFLKTSCGSLNYAAPEIISSKLYAGPEVDVWSCGVILYALLCGSVPFDDDNIPSLFRKIKGGTYILPSYLSDSARDLIPKLLNIDPMKRITIHEIRVHPWFKNHLPCYLAVPPPYKAPKAKMIDEDILRDVVNLGYDKDHVCESLWNRLQNEETVAYYLLLDNRFRSTSGYLGADHQHLMDRSFNEFTLSESASPSTRNYLPGINDSQGGGLRPYYPVQRKWAIGLQSGAHPRDIMIEVLKALKELNVCWKKNGLYNMKCRWCPGFPQVSAMLLDSNHNFVDDSTIMDNGNADGRLPAVVKFEIQLYKTKDNKYLLDIQRVTGPQLLFLEFCGAFFTNLRVL

SEQ ID NO: 1962 - protein, 468 aa, Streptococcus mutans UA159
MSKTLPKDFIFGGATAAYQAEGATHADGKGPVAWDKYLEDNYWYTAEPASDFYHQYPVDLKLAEEFGVNGIRISIAWSRIFPKGYGAVNPKGLAFYHNLFAECHKRHVEPFVTLHHFDTPEALHSNGDFLNRENIEHFVNYAEFCFKEFPEVNYWTTFNEIGPIGDGQYLVGKFPPGIQYDLAKVFQSHHNMMVAHSKAVKLFKDGGYSGEIGVVHALPTKYPYDPNNPADIRAAELEDIIHNKFILDATYLGKYSEKTMEGVNHILAVNGGQLDLREEDFAALEAAKDLNDFLGINYYMSDWMRAFDGETEITHNAKGEKGSSKYQIKGVGRREAPVNVPKTDWDWIIYPQGLYDQIMRVKQDYPNYKKIYITENGLGYKDEFVNHTVYDDARIDYVKKHLEVLSDAIADGANVKGYFIWSLMDVFSWSNGYEKRYGLFYVDFDTQERYPKKSAYWYKKLAETQIID

SEQ ID NO: 1963 - protein, 435 aa, Heuchera canadensis
SGKPFYAIIHRIDVGLVIDLEPVNPADVPITAAGALKSYKLAAKAISRLQSLPNGNITLLCDVLVKEVSDLTGYDRVMVYKFHEDEHGEVIAESCRPDLEPYLGLHYPATDIPQASRFLFMKNKVRMICDCLASSVKVIQDKRLPQPLSLCGSTLRSPHGCHTQYMANMGTIASLVMSVTINEEDDEMVTDQPKGRKLWGLVVCHHTSPRFVPFPLRYACEFLIQVFGVCINKEVELASQTREKHILQTQTVLCDMLLRNAPVGIVTQSPNVMDLVKCDGAALYYKKKAWLLGSTPTDAQIRDITDWLLEYHGGSTGLSTDSLVEAGYPDALNLGDAVCGMAAIKITSNDFLFWFRSHTAREIKWGGAKHDPDEKDDGRKMHPRSSFKAFLEVVKRRSLPWEDVEMDVIHSLQLILRGSLQDETVDDSKTIVNES

SEQ ID NO: 1964 - protein, 513 aa, Hordeum vulgare subsp. vulgare
MDGNNRGGGHSEVLKNYNLGKTLGLGTFGDVKVAERNVTGQRVAIKILNRRKMETMEMEEKANREIKIMRLFIDFIHPHIIRVYEVIETPKDIFVVMEYCNNGELLDYIIENGRLQEDEARRIFQQILAGVEYCHRIMVVHRDLKPENLLLDSRYNVKLADFGLSNVMRDGHFLKTSCGSLNYAAPEIISSKLYAGPEVDVWSCGVVLYALLCGSVPFDDDNIPSLFRKIKGGTYILPSYLSDSARDLIPKLLNIDPMKRITFHEIRVHPWFKNHLPCYLAVPPPYKEQQAKMIDEDILREVVNLGYDKDHVCESLWNRLQNEETVAYYLLLDDRFRSTSGYLGADHQHLMDRSFNEFTLSESASPSTRNYLPGINDSQGGGLRPYYPVQRKWAIGLQSGAHPRDIMIEVLKALKELNVCWKKNGLYNMKCRWCPGFPQVSDMLLDSNHNFVDDSTIMDNGNADGRLPAVVKFEIQLYKTKDNKYLLDIQRVTGPQLLFLEFCGAFLTNLRVL

SEQ ID NO: 1965 - protein, 366 aa, Chlamydomonas sp. W80
MMATAGSSAAGARVSMRAASGIRASSSSRRAAVVVKAANVNIGDSLAEFLAVATPDTKLRQLMTSMSEATRTIAHKVRTASCGGTACVNSFGDEQLAVDMVADGILFEALKYSHVCSYACSEEVPEPVAMGGSGYSVAFDPLDGSSIVDTNFSVGTIFGVWPGDKLTGITGRDQAAAGMGVYGPRTVFVIAINGFPGTHEFLLQDDGKWLLVKSTEEIGEGKLFAPGNLRAIFDNPEYSKLVSYYLEEQYTLRYTGGMVPDVFQILVKEKGVFTNVTSPSTKAKLRLLFEVAPLALLIENAGGASSCDGLVCRALDVEVTAHEQRTQICYGSKGEVARFEKYMLGESSASLTLSRPSKRPCAERAR

SEQ ID NO: 1966 - protein, 578 aa, Houttuynia cordata
  misc_feature (481)..(481): Xaa can be any naturally occurring amino acid
  misc_feature (504)..(504): Xaa can be any naturally occurring amino acid
  misc_feature (574)..(574): Xaa can be any naturally occurring amino acid
SGKPFYAIVHRVTGSLIIDFEPVKPFEVPMTAAGALQSYKLAAKAISRLQSLPSGSMERLIDTMVQEVFELTGYDRVMAYKFHEDDHGEVISEVTIPHLDPYLGLHYPATDIPQAARFLFMKNKVRMICDCRAKPVKVYQDDKLSFDLTLCGSTLRAPHSCHLQYMENMGSIASLVMAVVVNEGGEEDRGGPADSSQQQLGRYRRKKLWGLVVCHNTRPRFVPFPLRYACEFLTQVFAIHVSKELELEETNSRKEILRTQTLLCDMLLRDAPMGIVNQTPNIMDLIKCDGAALFYKDKVFRLGIAPSETDIREIAQWLSAYHMDSTGLSTDSLHDAGYPKAAFLGDLVCGMAAVKITCSDMLFWFRTHTAAEIRWGGAKHDHSDRDDGKRMHPRSSFRAFLDVVKTRSLPWKDYEMDGIHSLQLILRTSVKEPEQVDSNKVIHAQLGDLKLDEMNELHAVTTEVVRLIETATVPILAVDVXGLINGWNAKISELTGMSLEQVMXKHLLTLVEDCSINVVRRMLCLALKGEEEQNIEFQVKTHGTRSDHGPVVLVVNACASRDVHGNVVGVCFVXQDVT

SEQ ID NO: 1967 - protein, 418 aa, Glycine max
QIEYDEEKQTSKDRWGGLAYDTSDDQQDITRGKGMVDTLFQAPMESGTHYAVMSSYDYISAGLRQYNLDNTMDGFYIAPAFMDKIVVHITKNFLNLPNIKVPLILGIWGGKGQGKSFQCELVFAKMGINPIVMSAGELESGNAGEPAKLIRQRYREAADIIRKGKMCCLFINDLDAGAGRLGGTTQYTVNNQMVNATLMNIADNPTNVQLPGMYNKEENPRVPIIVTGNDFSTLYAPLIRDGRMEKFYWAPTRDDRIGVCQGIFRTDGVLKEDIIKLVDTFLGQSIDFFGALRARVYDDEVRKWISGVGVENIGKKLVNSKEGPPTFEQPKMTLSKLLEYGNMLVQEQENVKRVQLADKYLNEAALGDANDDAIKTGNFYGQGAQQVHVPVPEGCTDPTAENYDPTARSDDGSCTYKF

SEQ ID NO: 1968 - protein, 140 aa, Glycine max
  misc_feature (54)..(54): Xaa can be any naturally occurring amino acid
  misc_feature (69)..(69): Xaa can be any naturally occurring amino acid
  misc_feature (86)..(86): Xaa can be any naturally occurring amino acid
LPLPANLFPPLRLLNTIRLHPSALEISPLDYSPADHPVPKLTVVLDLDENTGMXAYETSGLPTALRTHXIERGLNWCELECVSMDXGRRTLINHLCDSMLNPALNELLEQLSEFADMVLITAGLVRYARHHVDRVDVKNR

SEQ ID NO: 1969 - protein, 415 aa, Hypecoum imberbe
SGKPFYAIVHRVTGSLIVDFEPVKPYEVPMTAAGALQSYKLAAKAIAKLQSLPSGSMERLCNTVVQEVFELTGYDRVMAYYFHEDDHGEVIAEVTKPGLEPYLGLHYPATYIPQAARFLFMKNRIRMICDCRAKHVKVLQDEKLPADLTLCGSTLRAPHTCHLQYMENMGSIASLVMAVVVNESNDEEESSEPPSQAPKKKKLWGLVVCHNTSPRFVPFPLRYACEFLIQVFAVHVNKEFELDNQIHEKRILRTQTLLCDMLMRDAPFGIISQSPNVMDLVKCDGAALLYKNKIYRLGLTPSEFQINDIASWLTEYHMDSTGLSTDSLYDAGFPGALSLGDAVCGMAAVRITCKDMLFWFRSHTAAEVRWGGAKHDPDERDDGRKMHPRSSFKAFLEVVKTRSLPWKDYEMDAIH

SEQ ID NO: 1970 - protein, 492 aa, Manihot esculenta
MDPCKFRPSSSNNTPFWTTDAGAPVWNNNSSMTVGTRGPILLEDYHMIEKLANFTRERIPERVVHARGMSAKGFFEVTHDVSHLTCADFLRAPGVQTPVIVRFSTVIHERGSPETLRDPRGFATKFYTREGNFDIVGNNFPVFFIRDGIKFPDVIHAFKPNPKSHIQEYWRIFDFLSHHPESLSTFAWFFDDVGIPQDYRHMEGFGVHTFTFINKAGKVTYVKFHWKPTCGVKCLMDDEALKIGGANHSHATQDLYDSIAAGNYPEWRLFIQTMDPADEDKFDFDPLDMTKIWPEDIFPLQQIGRLVLNRNIDNWFAENEMLAFDPGHIVPGIHYSNDKLFQLRTFAYADTQRHRLGPNYKMLPVNAPKCAYHNNHYDGFMNFMHRDEEVDYFPSRYDPVRHAERSPIPNAICSGRREKCVIEKENNFKQPGERYRSWAPDRQERFLCRLVNALSEPRITFEIRSIWVSYWSKCDASLGQKLASRLNVRPNI

SEQ ID NO: 1971 - protein, 392 aa, Hypecoum imberbe
DLEPVNPSDVPITAAGALKSYKLAAKAISRLQSLPSGNIPLLCDVLAREVRELTGYDRVMVYKFHEDEHGEVIAECRELDLEPYLGLHYPATDIPQASRFLFLKNKVRMICDCSAQPVKVIQDEKLAQPLSLCGSTLRAPHGCHSQYMTNMGSVASLVMSLTINEDDDEMETSTQKGRKLWGLVVCHHTSPRFVPYPLRYACEFLIQVFGIQLNKEVELASQLMEKHILKMQTVLCDMLLRDAPVGIVAQSHNVMDLVKCDGAALYYRNKLWLLGVTPTEAQVRDIARWLLECHYGTTGLSTDSLMEAGYPGASGLGDAVCGTAAISITSKDFLFWFRSQTAKEIKWGGAKHDPMDKDGLRKMHPRSSFKAFLEVVKCRSVPWEDIEMDAIQ

SEQ ID NO: 1972 - protein, 672 aa, Salmonella enterica subsp. enterica serovar Paratyphi A str.
MSYPSLFAPLDLGFTTLRNRVLMGSMHTGLEEHPDGAERLAAFYAERARHGVALIVTGGIAPVPSGVVMTGGAMLNDASQLKPHRVVTDAVHAQGGKIALQILHTGRYSYQPHLVAPSAIQAPINRFMPHELTHDEILQLIDDFAHCAQLAREAGYDGVEVMGSEGYLINEFLTRRTNHRDDEWGGDYTSRMRFAVEVVRAVRQRVGNDFIIIYRLSMLDLVENGGTFDETVQLAQAIEAAGASLINTGIGWHEARIPTIATPVPRGAFSWVTRKLKGHVSVPLIATNRINDPQVAETILTRGDADMVSMARPFLADAEFLTKAQSGRADEINTCIGCNQACLDRIFIGKVTSCLVNPRACHETHMPITPAIRKKNLAVVGAGPAGLAFAINAASRGHHVTLFDAQSEIGGQFTIARQIPGKEEFYETLRYYRRMIDITGVTLKLNQRVNAEDLQPFDEAILACGIVPRRPPIDGIDHPKTLTYLEVLRDKAPVGKRVAIIGCGGIGFDTAMYLSQHGESTSQNIAEFCTEWGIDTSLQQAGGLRPEGPRLARSPRQIVMLQRKASKPGEGLGKTTGWIHRATLLARGVKMIPAVSYQKIDDDGLHLLIGGEPQLLEVDHVVICAGQEPRRELADPLRAAGKTVHLIGGCDVAMELDARQAIAQGTRLALEI

SEQ ID NO: 1973 - protein, 459 aa, Illicium oligandrum
SGKPFYAIMHRIDVGLVIDLEPVNPADVPITAAGALKSYKLAAKAISRLQSLPSGNIGILCDVLVREVSELTGYDRVMAYKFHEDEHGEVIAEYRRTDLEPYLGLHYPATDIPQASRFLFMKNKVRMICDCYAPPVKVIQDKKLAQPLSLGGSTLRAPHGCHAQYMANMGSIASLVMSVTINEDYDETSSNQQKGRKLWGLVVCHHTSPRFVPFPLRYACEFLLQVCGIQLNKEVELVAQMKEKHILKTQTLLCDMLLRDAPIGIMTKSPNVMDLVKCDGAALYYGKQLWLLGITPTEAQIRDITEWLLECHDSTTGLSTDSLMEAGYPGATTLGDTVCGMAAIKVASKDFLFWFRSHTAKEIKWGGSKHDPADKDGKKMHPRSSFKAFLEVVKRRSLPWEDVEMDAIHSLQLILRGSLQQVLESETKAIVDARLDDEQIQGPDELRIVTNEMVRLIET

SEQ ID NO: 1974 - protein, 684 aa, Desulfitobacterium hafniense DCB-2
MENQQTNQKSLDLDAARVSHNKGYLTTNQGVGVSNTDDSLKAGKRGPTLMEDFIFREKVTHFDHERIPERVVHARGSGAHGYFQVYENLSHLTKAHFLSDPNLITPVFVRFSTVAGFRGSSDTVRDVRGFAVKFYTQEGNYDIVGNNMPVFFIQDAIKFPDLIHSLKPEPNNEMPQAASAHDTFWDFVVNTPETMHNVMWLMSPRAVPKSFRMMEGFGINTFRLVNAKGEFKFVKFHWKPVLGVHSLVWDEAQKVAGKDPDFNRRDLWETIEHGQAVEFELGIQVLKPEDEFRFDFDILDPTKLWPEELIPVQKIGKMTLNQNPDNFFAETEQVAFCPANVVPGIDFSNDPLLQGRLFSYLDTQLSRLGGPNFHQLPINRPLPKVNNNQRDGMHRMTIDEGQTSYYPNSLNKGEPHAARAGESHFEHYQEKVDGHVIRERSESFRDHYTQPAMFWNSMSDWERQHIIDAFRFELGKCKHKHTHQKLVDMLGNVDPELAQKVAEGLGATPPANGANPTTASSPALSMANTAKSPKTRKVAVLLESGFDKAQFDALTATLIAAGACFDVVSCKLGPVTAGDNGRVEGNQTYATTASVFYDAVYIPGGSHTEALKGSADVKGFLLDTFNHYKTIGLSGEASALLGLLPSGQKPAPGIVCESAGNMEIYANNFLAALTTGRHFERNVH

SEQ ID NO: 1975 - protein, 505 aa, Methanosarcina barkeri str. fusaro
MGEKNSSKVLTTGFGIPVGDDQNSLTAGNRGPVLMQDVHLLDKLSHFDHERIPERVVHAKGAGAGGYFEVTADVTKYTKAKFLSEIGKRTEVFVRFSTVGGEKGSADSARDPRGFAVKFYTEDGNYDLVGNNTPVFFIRDPLKFPDFIHTQKRNPATNCKDPDMFWDFLSLTPESIHQVTILFSDRGTPATYRNMNGYSSHTYKWYNEKGEYFWVQYHFKTDQGIKNLTLEEAEKIGGSDPDHATRDLYEAIKKGDYPSWTLEMQIMTPEQAEDYRFDIRDITKVWPHGDFPTMKIGKLVLNRNPTNYFAEVEQAAFSPANLVPGIGISPDKMLQGRVFSYHDTHIHRLGPNYNLIPVNAPKYSPENSYQRDGFMRVDANGGSGPNYWPNSFGGPSPDSVYLEPPFGVSGLAARTLYTHPNDDFVQAGNLYRDVMTDYDRENLVGNIVSHLSAAQKRIQLRQTALFFKADRDYGSRVAKGLELDIKEVERLANMTNEERARATER

SEQ ID NO: 1976 - protein, 710 aa, Oryza sativa (japonica cultivar-group)
MSASPSSMSGAGAGEAGVRTVVWFRRDLRVEDNPALAAAARAAGEVVPVYVWAPEEDGPYYPGRVSRWWLSQSLKHLDASLRRLGASRLVTRRSADAVVALIELVRSIGATHLFFNHLYDPLSLVRDHRVKALLTAEGIAVQSFNADLLYEPWEVVDDDGCPFTMFAPFWDRCLCMPDPAAPLLPPKRIAPGELPARRCPSDELVFEDESERGSNALLARAWSPGWQNADKALAAFLNGPLMDYSVNRKKADSASTSLLSPYLHFGELSVRKVFHQVRMKQLMWSNEGNHAGDESCVLFLRSIGLREYSRYLTFNHPCSLEKPLLAHLRFFPWVVDEVYFKVWRQGRTGYPLVDAGMRELWATGWLHDRIRVVVSSFFVKVLQLPWRWGMKYFWDTLLDADLESDALGWQYISGSLPDGRELDRIDNPQLEGYKFDPHGEYVRRWLPELARLPTEWIHHPWDAPESVLQAAGIELGSNYPLPIVELDAAKTRLQDALSEMWELEAASRAAMENGMEEGLGDSSDVPPIAFPPELQMEVDRAPAQPTVHGPTTAGRRREDQMVPSMTSSLVRAETELSADFDNSMDSRPEVPSQVLFQPRMEREETVDGGGGGGMVGRSNGGGHQGQHQQQQHNFQTTIHRARGVAPSTSEASSNWTGREGGVVPVWSPPAASGPSDHYAADEADITSRSYLDRHPQSHTLMNWSQLSQSL

SEQ ID NO: 1977 - protein, 123 aa, Glycine max
  misc_feature (23)..(23): Xaa can be any naturally occurring amino acid
  misc_feature (45)..(45): Xaa can be any naturally occurring amino acid
  misc_feature (48)..(48): Xaa can be any naturally occurring amino acid
  misc_feature (67)..(67): Xaa can be any naturally occurring amino acid
  misc_feature (81)..(81): Xaa can be any naturally occurring amino acid
  misc_feature (87)..(87): Xaa can be any naturally occurring amino acid
  misc_feature (100)..(100): Xaa can be any naturally occurring amino acid
EARVSLLGTEFIKVATNIDPDCXMIINEKGRNAKCAMRKAFVDEXKSXLPKHILYKEHQQITDRDGXVETDSLKAHAEKPXPDRMIXNAANIFPFNTPTXRETYHYTMIIDRFFPQKSPRLTV

SEQ ID NO: 1978 - protein, 217 aa, Glycine max
MGSEGPRAITIHVTGFKKFQGVPENPTEAIVNNLKEYVERRGLPAGVTLGSCTVLDVAGDGALPQLYQTMESAISKTDSVSNANVVWLHLGVNSGAVRFAIEHQAANEATFRCPDELGWQPQQLPIVLEDGGISQTRKTSMHVDAILKSLKKGAYDVMISGNAGRFVCNYVYYHSLRFAEQKGNKSLFVHVPLFARIDQETQMRFTASLLDAIASAC

SEQ ID NO: 1979 - protein, 246 aa, Houttuynia cordata
MGRGRVELKRIENKINRQVTFAKRRNGLLKKAYELSVLCDAEVTLIIFSNSGKLYEFCSSSSMMKTLERYQKCSYSMPEATGPSRETEKSYQEYLKLKGKVEHLQRIQRNLLGEDLGPLSSKELEQLENQLEQSLRQIRSTKTQSLLDQLSDLRRKEQQLLESKKILNKKLAEHGPENPLQLSWQSCGQSNPYSSQPAHSEAFFQPLDCNPTLQIGYPSVGQEQIMAAPATAAPQNANGFIPGWLV

SEQ ID NO: 1980 - protein, 547 aa, Ralstonia metallidurans CH34
MAAKDVVFGDAARAKMVEGVNILANAVKVTLGPKGRNVVLERSFGGPTVTKDGVSVAKEIELKDKLQNMGAQMVKEVASKTSDNAGDGTTTATVLAQSIVREGMKFVAAGMNPMDLKRGIDKAVGAAVEELKKLSKPTTTSKEIAQVGAISANSDASIGERIAEAMDKVGKEGVITVEDGKSLADELEVVEGMQFDRGYLSPYFINNPEKQVVQLDSPFVLLFDKKVSNIRDLLPVLEQVAKAGRPLLIIAEDVEGEALATLVVNNIRGILKTAAVKAPGFGDRRKAMLEDIAILTGGTVIAEEIGLTLEKATLQDLGQAKRIEIGKENTIIIDGAGDASAIEGRVKQIRAQIEEATSDYDREKLQERVAKLAGGVAVIKVGAATEVEMKEKKARVEDALHATRAAVEEGIVPGGGVALLRARAAIAGLHGENPDQNAGIKIVLRAMEEPLRQIVLNAGEEASVVVAKVIEGKGNYGYNAASGEYGDLVEMGVLDPTKVTRTALQNAASVASLMLTTDCAVAESPKEESAPAMPGGMGGMGGMEGMM

SEQ ID NO: 1981 - protein, 344 aa, Synechococcus elongatus PCC 7942
MAQSTTSETHTRDLDRDCTTLSRHVLEQLQSFSPEAQDLAALMQRIGLAAKLIARRLSHAGLVDDALGFTGEINVQGEAVKRMDVYANQVFISVFRQSGLVCRLASEEMEKPYYIPENCPIGRYTLLYDPLDGSANVDVDLNVGSIFAVRRQEFYDESHEAKDLLQPGDRQIAAGYVLYGASTLLVYSMGQGVHVFVLDPSLGEFVLAQSDIQLPNSGQIYSVNEGNFWQWPEGYRQYIREMHRREAYSGRYSGALVADFHRILMQGGVFLYPETVKNPTGKLRLLYEAAPMAFLAEQAGGKASDGQKPILLRQPQALHERCPLIIGSAADVDFVEACLAESVP

SEQ ID NO: 1982 - protein, 247 aa, Houttuynia cordata
MGRGRVELKRIENKINRQVTFSKRRNGLLKKAYELSVLCDAEVALIIFSNRGKLYEFCSSSSMMTTLERYQECSYSMPEATGPTRETEKSYQEYLKLKGKVELLQRTQRNLLGEDLGPLSSKELEQLENQLEHSLRQIRSTKTQALLDQLSDLRRKEQQMLESNKILKKKLAEHGPENLLQLAWQSCGQSNPYSRQPAHSEAFFQPLDCNPTLQIGYHPVGQEEITMAAPAIAPPQNVNGFIPGWMV

SEQ ID NO: 1983 - protein, 148 aa, Listeria monocytogenes
IMYLFSDEGTPASYREIRGSSVHAFKWINEEGKTVYVKLRWIPKAGIVNLSTEQASQIQAKEFNHASRDLYEAIENGDYPEWDLYVQVLDPKDLDNFDFNPLDATKDWFEDVFPYEHVGTMTLDRNPDNIFAETESVGFNPGVLVRGM

SEQ ID NO: 1984 - protein, 494 aa, Zea mays
  misc_feature (324)..(324): Xaa can be any naturally occurring amino acid
TDTFAIHKYGHGRGGKPLNSDCRHPPASHPAQPRSSAREVVRENYPVAPDHYNGAGRANAAATMPPATGAVASAAGTVLLGRYELGGLLGHGASAKVYLARDLRTGRSVAIKSFPNPRAASDRPVAIEREAGILRRLRHRHVVRLHEILATRTKVHFVLDLAAGGELLSLVDASGRMTEDLARHYFRQLVCAVRYCHARGVCHRDIKPENLLLDGAGALKVADFGLGAVAGAGGDLLRHTTCGTPAYVAPEILSRKGYEYDPAKVDIWSCGVVLFVLAAGYLPFNDASLVNMYRKIYAGRFRCPACFSPALRGLLRRVLHPDPXARADADSIVAHPWFRHGASDEEMGRQLMHGGGGDEDEEAWVGAAADEDDAGREPTAFDILSFSPGCDLSALFLGGGCKERVFVGEAAAGVLGRVEAAGRKGGYRVRKEGKRGVRVEGEEGGVVAKVSVVRLADAVSVVEVVKDDGADAALFWTELLEPAVCVPATALCHV

SEQ ID NO: 1985 - protein, 148 aa, Listeria monocytogenes
ITYLFSDEGTPASYREIRGSSVHAFKWINEEGKTVYVKLRWVPKAGIVNLSTEQASQIQAKEFNHASRDLYEAIENGDYPEWDLYVQVLDPKDLDNFDFNPLDATKDWFEDVFPYEHVGTMTLDRNPDNIFAETESVGFNPGVLVRGM

SEQ ID NO: 1986 - protein, 464 aa, Lardizabala biternata
SGKPFYAIIHRVTGSLIIDFEPVKPYEVPMNAAGALQSYKLAAKAIARLQSLPNASMDRLCDTVVQEVFELTGYDRVMAYKFHDDDHGEVVSEITKPGLELYLGLHYPATDIPQAARFLFMKNKIRMICGCNATHVKVFQDEKLPLDLTLCGSTLRAPHSCHLQYMDNMGSIASLVMAVVVNEGDEENDGSGPAQPQKRKRLWGLVVCHNTTPRFVPFPLRYACEFLIQVFAIHINKELELENQVLEKTFYVPQTLLCDMLMRNAPLGIVSQSPNIMDLVKCDGAALLYKNKIWRLGLSPSEFHIRDIASWLYEYHMDSTGLSTDSLHDAGFPGALSLGDGVCGMAAVRITSKDMIFWFRSHIATEVRWGGAKHDPSEKDDGRKMHPRSSFKAFLEVAKTRSLAWKDYEMDAIHSLQLILRNAFKDGDTADLNSSVIHSRLDNLKIDGMEELEAVTNEMVRLME

SEQ ID NO: 1987 - protein, 394 aa, Lardizabala biternata
DLEPVNRADVPVTAAGALKSYKLAAKAISKLQSLPSGNISLLCDVLVHEVSDMTGYDRVMVYKFHEDEHGEVVSECLRSDLEPYLGLHYPATDIPQASRFLFLKNKVRMICDCSARSVEIIQDKRLTQPLSLGGSTLRAHHGCHTQYMSNMGSVASLVMSITINDDDDDDETETTKRKGRKLWGLVVCHHTSPRFVPFPLRYACEFLIQVFGIQLTKEVELATQLREKHILQIQTVLCDLLLRNAPVGIFTQSPNVMDLVKCDGAALYYKNKFWLLGVTPTEAQIREIAAWILEYHDGSTGLSTDSLMEAGYPGASVLGNAVCGMAAINITSKDFIFWFRSHTAKEIKWGGAKHDPVDKDDGRKMHPRSSFRAFLEVVQWRSLLWEDIEMDAIQ

SEQ ID NO: 1988 - protein, 141 aa, Lactobacillus acidophilus NCFM
MANDMMNRRNDMMDAMNDWFGFPRNFFDDSEIENIMQSDVAETDKDYVVKIDMPGMNKDDIKLNYKDGVLSVAGTRKAFKDTNDKERNIIHKERSEGSISRSYRLPNVVANEIHAKYDNGVLTITLPKQTAGDDDNSIQID

SEQ ID NO: 1989 - protein, 466 aa, Lilium superbum
SGKPFYAIVHRVTNCLIIDFEPVNHTESPTTAAGALQSYKLAAKAIAKLQSLPGGSVRRLCETVVQEVFELTGYDRVMAYRFHEDDHGEVFTEVTKPGLEPYVGLHYPATDIPQAARFLFMKNKVRMICDCRARPVKIHQDDKLPAEITFCGSTLRAPHSCHLQYMENMNSIASLVMAVVVNDDDEVLDEQGAPSRQQSGRKKLWGLVVCHHLSPRFVPFPLRYACEFLMQVFAIHVNKEFELENQIREKNILKTQTLLCDMLLRDGDPIGIVSQSPNIMDLVKCDGAALLYNNRIWQLGMAPTGSQIHDIAFWLAESHMDSTGLSTDSLLDAGYPGALALGDTVCGMAAARITTKDIVFWFRSHTASEIKWGGEKHDPEEEDDGRRMHPRSSFNAFLQVVKNRSLPWNDYEMDAIHSSQLILRGTLDDNGKSKKGSLDSGMGDMRLDGMVELQAVTNEMVRLIIT

SEQ ID NO: 1990 - protein, 453 aa, Bacillus halodurans
MPCMTKDTVTYRFPEGFWWGSATSATQTEGATHRDGKGKNIWDHWYEVEPSRFFQGVGPQDTSQFYERYKEDIQLMKEVGHNSFRFSISWSRLIPDGRGEVNPKGVEFYNNVIDELLGQGIEPFVNLFHFDMPMELQKIGGWANREVVDAYEAYAKTCFERFGDRVKKWFTHNEPIVPVEGGYLYDFHYPNEVDFEKAIQVGYHTVLSSAKAIRAYKQLNQGGKIGIILNLTPSYPRSNHPADLKAAKIADAFFNRSFLDPSVKGEFPEELVQILKEEGFMPIIEEEDLEIIRQHTVDLLGVNYYQPRRVKAKETLPNPDAPFMPERYFDHYAMPGRKMNVHRGWEIYEKGIYDILINLKEHYGNIECFISENGMGVEGEEKFRDENGVIHDDYRIEFIQDHLKWVHRAIQEGSNVKGYHLWTFMDNWSWANAYKNRLWVGVCQFRQEWGTDN

SEQ ID NO: 1991 - protein, 394 aa, Lilium superbum
DLEPVNPDDIPVATAGALKSYKLAAKAISRLQSLPSGNISLLCDAMVREVSELTGYARVMAYKFHEDEHGEVIAECKRPDLEPYIGLHYPATDIPQASRFLFMKDKVRMICDCTAPSVRVIRDRQLLQPPSLCGSTLRAPHGCHAQYMANMGSIASLVMAVTVNEDDDETDSNNQPKARKLWGLVVCHHTSPRFVPYPLRYACEFLLQVFGIQINKEVELAAQAKEKHIFRIQTVLCDMLLRDAPIGIFKKSPNVMDLVKCDGAALYYKNQFWRLGTTPTEAQIKDIVNWLLECHDGTTGLSTDSLTEAGYPDASSLGDEVCGMATISITLKDFIFWFRSHTAKEIKWGGAKHEPTDKDDDGRKMHPRSSFKAFLEIVKLRSLPWEDMEMDAIQ

SEQ ID NO: 1992 - protein, 465 aa, Pachysandra americana
  misc_feature (232)..(232): Xaa can be any naturally occurring amino acid
SGKPFYAIVHRVTGSLIIDFEPVKPYEVPMTAAGALQSYKLAAKAIARLQSLPSGSMERLCDTMVQEVFELTGYDRVMAYKFHEDDHGEVVSEITKPGLEPYLGLHYPATDIPQAARFLFMKNKVRMICDCNAKHVKVLQDEKLPFDLTLCGSTLRAPHSCHLQYMDNMGSIASLVMAVVINEGDEDGEGSDPAQPQKRKRLWGLVVCHNTSPRFVPFPLRYACEFLAQVFXIHVNKEIGLENQILEKNILRTQTLLCDMLMRDAPLGTVSQSPNIMDLVKCDGAALLYKNKIWRLGMAPGDFQINDISSWLSEYHMDSTGLSTDSLYDAGYPGALALGDVVCGMAAVRITTKDMLFWFRSHTAGEVRWGGAKHERGEKDDGRRMHPRSSFKAFLEVVKTRSLPWKDYEMDAIHSLQLILRNAFRDVETMDLDTNTIRMQLNDLKIKGMEELEAVTNEMVRLMET

SEQ ID NO: 1993 - protein, 146 aa, Catharanthus roseus
RTLRELKLLRHMDHENVVAIRDIIPPPQRESFNDVYIAYELMDTDLHQIIRSNQALSEEHCQYFLYQILRGLKYIHSANVLHRDLKPSNLLLNANCDLKICDFGLARVTSETDFMTEYVVTRWYRAPELLLNSSDYTTAIDVWSVG

SEQ ID NO: 1994 - protein, 246 aa, Zea mays
  misc_feature (235)..(235): Xaa can be any naturally occurring amino acid
MCGILAVLGCADDTQGKRVRVLELSRRLKHRGPDWSGMHQVGDCYLSHQRLAIIDPASGDQPLYNEDKSIVVTVNGEIYNHEQLRAQLSSHTFRTGSDCEVIAHLYEEHGENFIDMLDGVFSFVLLDTRDNSFIAARDAIGVTPLYIGWGIDGSVWISSEMKGLNDDCEHFEIFPPGHLYSSKQGGFKRWYNPPWFSEVIPSVPYDPLALRKAFEKAVIKRLMTDVPFGGLLSGXLDSSLGAAVTV

SEQ ID NO: 1995 - protein, 265 aa, Triticum aestivum
  misc_feature (106)..(106): Xaa can be any naturally occurring amino acid
  misc_feature (234)..(234): Xaa can be any naturally occurring amino acid
HYRTSLYKKAGWYRSGIPGISSTHASAENSIPKETAYQMITDELMLDGNPRLDLASFVTTWMEPECNKLIMDSINKNYVDMDEYPVTTELQNRCVNMIAHLFNAPXNEDEKAIGVSTVGSSEAIMLAGLAFKRKWANKRKEEGKPYDKPNIVTGANVQVCWEKFARYFEVELKEVKLTEGYYVMDPLKAVEMVDENTICVAAILGSTLTGEYEDVKLLNDPSVGKNRETGWNVXIHVDAASGGLSLLSTSELEWDSGYIGEDIKG

SEQ ID NO: 1996 - protein, 199 aa, Arabidopsis thaliana
MVQTKKFRGVRQRHWGSWVAEIRHPLLKRRIWLGTFETAEEAARAYHEAAVLMSGRNAKTNFPLNNNNTGETSEGKTDISASSTMSSSTSSSSLSSILSAKLRKCCKSPSPSLTCLRLDTASSHIGVWQKRAGSKSDSSWVMTVELGPASSSQETTSKASQDAILAPTTEVEIGGSREEVLDEEEKVALQMIEELLNTN

SEQ ID NO: 1997 - protein, 800 aa, Arabidopsis thaliana
RSSLTPRFTLPSRPLNTGFNAGNSTLSFFFKKHPLSRKIFAGKQSAEFDSSSQAISASEKVLVPDNLDDDPRGFSQIFDLESQTMEYTEAVRTEDQTMNVVKERGVKPRIVPPPGDGKKIYEIDPMLRTYNNHLDYRYGQYKRLREEIDKYEGGLEAFSRGYEKLGFSRSDAGITYREWAPGAKAASLIGDFNNWNSNADIMTRNEFGVWEIFLPNNTDGSPAIPHGSRVKIRMDTPSGIKDSIPAWIKFSVQAPGEIPFNGIYYDPPEEEKYVFKHPQPKRPKSLRIYEAHVGMSSTEPMVNTYANFRDDVLPRIKKLGYNAVQIMAIQEHSYYASFGYHVTNFFAPSSRCGTPEELKSLIDRAHELGLVVLMDIVHSHASKNTLDGLNMFDGTDAHYFHSGPRGYHWMWDSRLFNYGSWEVLRYLLSNARWWLEEYKFDGFRFDGVTSMMYTHHGLSVGFTGNYTEYFGLETDVDAVNYLMLVNDMIHGLYPEAITVGEDVSGMPTFCIPVQDGGVGFDYRLHMAIADKWIEMLKKRDEDWQMGDIIYTLTNRRWSEKCISYAESHDQALVGDKTIAFWLMDKDMYDFMAVDRPSTPLIDRGIALHKMIRLITMGLGGEGYLNFMGNEFGHPEWIDFPRGEQRLSDGSVIPGNNFSYDKCRRRFDLGDADYLRYRGLQEFDQAMQHLEENYGFMTSEHQFISRKDEADRVIVFERGDLVFVFNFHWTSSYFDYRIGCSKPGKYKIVLDSDDPLFGGFNRLDRKAEYFTYDGLYDERPCSFMVYAPCRTAVVYALANHD

SEQ ID NO: 1998 - protein, 730 aa, Haemophilus influenzae R2846
MTTAVTQAIIDGFFDASNGDPFATLGMHETERGIEIRTLLPEANRVVVIERESGKEITELDCVDERGFFVGVIPNCRQFFAYQLQVFWGNEAQIIEDPYRFHPMIDDLEQWLLSEGSMLRPYEVLGAHFMECDGVSGVNFRLWAPNARRVSIVGDFNYWDGRRHPMRFHLKSGVWELFLPKASLGQLYKFELIDCHGNLRLKADPFAFSSQLRPDTASQVSALPNVVEMTEARKKANQGNQPISIYEVHLGSWRRNLENNFWLDYDQIADELIPYVKEMGFTHIEFLPLSEFPFDGSWGYQPLGLYSPTSRFGSPEAFRRLVKRAHEAGINVILDWVPGHFPSDTHGLSAFDGTALYEHADPCEGYHQDWNTLIYNYGRNEVKNFLSSNALYWLERFGVDGIRVDAVASMIYRDYSRAEGEWIPNQYGGRENLEAIEFLKHTNWKIHSEMAGAISIAEESTSFAGVTHPSENGGLGFNFKWNMGWMNDTLAYMQLDPIYRQYHHNKMTFGMVYQYSENFVLPLSHDEVVHGKYSLLGKMPGDTWQKFANLRAYYGYMWGYPGKKLLFMGNEFAQGREWNYEESLDWFLLDENIGGGWHKGVLKLVKDLNQIYQKNRPLFELDNSPEGFDWLVVDDAANSVFAFERRSSNGERIIVVSNFTPVPRHNYRIGVNVAGTYEEILNTDSMYYQGSNVGNFGCVASEKIESHGRENSISVSIPPLATVYLRLKTK

SEQ ID NO: 1999 - protein, 548 aa, Buchnera aphidicola (Schizaphis graminum)
MAAKDVKFGNEARIKMLRGVNVLADAVKVTLGPKGRNVVLDKSFGAPSITKDGVSVAREIELEDKFENMGAQMVKEVASKANDAAGDGTTTATLLAQSIVNEGLKAVAAGMNPMDLKRGIDKAVISAVEELKNLSVPCSDSKAITQVGTISANADEKVGALIAEAMEKVGNDGVITVEEGQVFKNEREVVKGMQFDRGYLSPYFINKPETGIVELENPYILMADKKISNVREMLPILESVAKSGKPLLIISEDLEGEALATLVVNSMRGIVKVAAVKAPGFGDRRKAMLQDISILTGGSVISEELAMDLEKSTLEDLGQAKRVVINKDTTTIIGGSGEKQAIQSRIGQIRQEIQEATSDYDKEKLNERLAKLSGGVAVLKVGAATEVEMKEKKARVEDALHATRAAVEEGVVAGGGVALVRVAGKISNLRGHNEDQNVGIRVALRAMEAPLRQIVSNSGEEPSVVTNNVKDGKGNYGYNAATDEYGDMIDFGILDPTKVTRSALQYAASVAGLMITTECMVTDLPREDKSSDVASSPAGGMGGMGGMM

SEQ ID NO: 2000 - protein, 492 aa, Triticum aestivum
MDPYKHRPTSGANSGYWTTNSGAPVWNNNNALTVGQRGPILLEDYHLIEKLAQFDRERIPERVVHARGASAKGFFEVTHDVSQLTCADFLRAPGVQTPVIVRFSTVVHERGSPETLRDPRGFAVKFYTREGNFDLVGNNMPVFFIRDGMKFPDMVHAFKPSPKTNMQENWRIVDFFSHHPESLHMFTFLFDDVGIPLNYRHMDGFGVNTYTLISRDGKAHLVKFHWKPTCGVKCLLDDEAVTVGGTCHTHATKDLTDSIAAGNYPEWKLFIQTIDADHEDKFDFDPLDVTKTWPEDIIPLQPVGRMVLNKNIDNFFAENEQLAFCPAITVPGIHYSDDKLLQTRIFSYADTQRHRLGPNYLMLPVNAPKCAHHNNHHDGLMNFMHRDEEVNYFPSRFDPTRHAEQYPIPPRVLSGCREKCIIEKENNFKQAGERYRSFDPARQDRFLQRWVDALTDARVTHEIQGIWVSYWSQCDTSLGQKLASRLKIKPSM

SEQ ID NO: 2001 - protein, 186 aa, Arabidopsis thaliana
  misc_feature (117)..(117): Xaa can be any naturally occurring amino acid
MASEARESPANNPGLSTNRDEATKGYIMQQTMFRIKDPKASLDFYSRVLGMSLLKRLDFSEMKFSLYFLGYEDTTTAPTDPTERTVWTFGQPATIELTHNWGTESDPEFKGYHNGNXSEPRGFGHIGVTVDDVHKACERFEELGVEFAKKPNDGKMKNIAFIKDPDGYWIEIFDLKTIGTTTVNAA

SEQ ID NO: 2002 - protein, 323 aa, Gibberella zeae PH-1
MASTTETNNYKFNHSMIRVKDPKASTKFYEFLGMSLVKKLEFPDNKFDLYFFGYDSPNALSHNKSTFDRQGLIELTHNYGTENDPEYKVNNGNQDPHRGFGHTCIAVDNIQAACQRIEDAGYKFQKKLTDGRMRNIAFVLDPDGYWVEVVARNDYKETENVKETDVSTYTMNHTMLRVKDAEKSLKYYQEVLGMSRLRTLENPEAGFNLYFLGYPGDQPFPEGQDDKAITHREGLLELTWNYGTEKEENFKYHDGNSEPQGFGHICVSVDNLEAACKRFEDMDVSWKKRLTDGRMKNVAFLLDPDGYWIEIVQNEKFSGKENF

SEQ ID NO: 2003 - protein, 279 aa, Streptococcus pyogenes MGAS315
MVTTVKMTSGYEIPVLGFGTYQAADGEEAYQSTLAAIKADYRHIDTAAIYKNEESVGRAIKDSGVLREDLFITTKLWNDAHSYEGAKDALAASLDRLGLDYVDLYLIHWPNPKALRNTWKEANAQAWQYMEEAVEAGLIKSIGVSNFMVHHLEALQETAKITPAINQIRLAPGCYQKEVVDYCKANEILLEAWSPLGQGEIFDNETMQQLANKYDKTVAQVALAWSLAEGFIPLPKSVHDERIKENMAIFDVSLTPEDKKTIRYLSGMSAISNPDTTSF

SEQ ID NO: 2004 - protein, 380 aa, Mannheimia succiniciproducens MBEL55E
MNAKFSPLFQSYTLNNGVEIKNRLVVAPMTHFGSNPDGTLGENEREFISNRANDMGMFILAATLVQDGGKAFHGQPEAIHASQLASLKETADIIKAQGAKAILQLHHGGKQAVTELLNGKDKITASDDEATGTRAATVEEIHSLINAFANAADLAIQAGFDGVEIHGANNYLIQQFYSGHSNRRTDEWGGSRENRMRFPLAIVDEVLAVKAKHQANDFIVGYRFSPEEPEELGLTMEDTLALIDTLKGKALQYLHISLHEFFKKARRGADTNAFRMQLVHDRIGGKLPLIGVGSLFTAEQILEAYNTGWAEFIALGKTVMINPTIATLIKEGKENEIVTTLDPEKADQYGIKGILWDLCKNGGAWLPPLKGKDDWHPVDV

SEQ ID NO: 2005 - protein, 325 aa, Vitis vinifera
GGGNFGVARLVSDKRTRELFAVKFIERGQKIDEHVQREIMNHRSLMHPNIVRFKEVLLTPTHLAIVMEYAAGGELFGRICNAGRFSEDEARFFFQQLISGVSYCHSMRICHRDLKLENTLLDGSTAPRVKICDFGYSKSSVLHSQPKSTVGTPAYIAPEVLSRKEYDGKLSDVWSCGVTLYVMLVGAYPFEDPDDPRNFRKTIGRILSVHYSIPDYVRVSIECRHLLSRVFVANPDKRITIPEIKTHPWFLKNLPIEMMDGGSWQKNDVNNPSQSVEEILSIIQEARKTTGVRKAGGPFMEGSMDLDDIDADEDIETSGDFVCPL

SEQ ID NO: 2006 - protein, 412 aa, Pachysandra americana
SGKPFYAIMHRIDVGLVIDLEPVNPADVPVTAAGALKSYKLAAKAISKLQSLPSGNISLLCDVLVKEVNELTGYDRVMVYKFHEDEHGEVVAECRRTDLEPYLGLHYPATDIPQASRFLFLKNKVRMICDCLAPPIRVIQDKRLEQPLSLCGSTLRAPHGCHAQYMENMGSIASLVMSVTINEDDDDDDVESDQQKGRKLWGLVVCHHTSPRFVPFPLRYACEFLIQVFGIQINKEVELAAQTKEKHILRNQTMLCDMLLRESPVGIVTKSPNVIDLVKCDGAALYYKNKFWLLGVTPTEAQIRDISEWLIEYHNGSTGLSTDSLMEAGYPGASVLGDAVCGMAAIKITSKEFLFWFRSQTAKEIKWGGAKHEPFNKDDARKMHPRSSFKAFLEAVKQRCLPWEDVEMDAIQ

SEQ ID NO: 2007 - protein, 554 aa, Pleea tenuifolia
  misc_feature (346)..(346): Xaa can be any naturally occurring amino acid
DLEPVNPADVPVTAAGALKSYKLAAKAISKLQSLPTGNISLLCDVLVREVSDLTGYDRVVAYKFHEDEHGEVIAECRRSELEPYLGLHYPATDIPRASRFLFMKNKVRMICDCSAAPVKVIQDKRLAQPLSLCGSILRAPHGCHAQYMASMGSVASLVMSVTIIEDDNETGSDQQEKGRKLWGVVVCHHTSPRFIPFPLRYACEFLIQVFCMQLTKEVELADQMREKHILQTQTVLCDMLLRDAPVGIFTQSPNVMDLVKCDGAALYYRNQFWLLGISPREAQIRDIAGWLLEYHDGTTGLSTDSLLDAGYPGASALGDEVCGMAAIRITDKDFLFWFRSHTAKEXTWGGAKHDLVEKDSDGRKMHPRSSFKAFLEVVEGRSLPWEDVEMDAIHSLQLILRDSLQGERASIDSKAIVNAPLDDAKKIQGMDELSLVTNEMIRLIETAAVPILAVDVLGNVNGWNIKAAELTGLVVQQAIGMPLIDLVEGDSIDVAKNMLFLALQGKEERDVEIKLKTFGHQEKNGPKILVVNACCSRDMKEDIVGVCFVAQDVT

SEQ ID NO: 2008 - protein, 467 aa, Pseudowintera axillaris
SGKPFYAIIHRVTGSLIVDFEPVKPYESPMAAAGALQSYKLTAKAISRLQSLPGGSLKRLIDTVVQGVFELTGYDRVMAYKFHEDDHGEVISEVTKPDLEPYLGLHYPATDIPQAARFLFMKNKVRMICDCNAKPMKVYQDEKLTFDLTLCGSTLRAPHSCHLQYMENMGSIASLVMAVVINEREEKDENSGSEQQQEQPKRKRLWGLVVCHNTTPRFVPFPLRYACEFLAQVFAIHVNKELELENQIQEKNILRTQTLLCDMLMRAAPLGIVTQSPSILDLVKCDGAVLLYQNKIWRLGIAPTESQILDIALWLSEYHMDSTGLSTDSLHDAGYPGALSLGDVVCGMAAVRINSKDTLFWFRSHTAAEIRWGGAKHDPNQKDDGRKMHPRSSFKAFLDVVKTRSSPWADYEMDATHSLQLILRGSLKEAEKVDTGTMIHSRLNDLKLEGVVELQAVTNQMVRLMET

SEQ ID NO: 2009 - protein, 499 aa, Cryptococcus neoformans var. neoformans JEC21
MSIVVSLPVLCTPPHTHDGPGPVLEETGPHLLQAAPPAGPRRLLRPHLHRRQRPQPPPARRRQAQEQRTRPPPPRPRLAPQPCARPQQRPARQNTPPSPAAVPTTQNIIAAPSQPSKSFLASSPPPPSAMPVSPAGTTRARSSSPPPSSSPAAASHLSRDSASSLSPGFALTQTVSRGSLGAGGAGFQILDVDNMIQRLLEAGYSGKVTKSPPLKNAEITSVCAAAREVFLSQPTLIELSPPVKIVGDVHGQYADLLRMFEMCGFPPAANYLFLGDYVDRGKQSLETILLLLCYKIKYPENFFLLRGNHECANVTRVYGFYDECKRRTNIKIWKTFIDVFNTLPIASIVASKIFCVHGGLSPSLKSMDDIRRIQRPTDVPDYGLLNDLVWSDPSDTALDWEDNERGVSFCYGKSVINAFLATHDMDLICRAHMVVEDGYEFYNDRTLVTVFSAPNYCGEFDNFGAVMSVSEDLLCSFELLKPLDGAALKKEMTKSKRKS

SEQ ID NO: 2010 - protein, 253 aa, Nicotiana benthamiana
MALEALNSPTTTTPPTFQFENNGPLRYLENWTKGKRSKRPRSMERQPTEEEYLALCLIMLARSDGSANREQSLPPPPVPVMKIHAPPEEKMVYKCSVCGKGFGSYQALGGHKASHRKLVAGGGGGDDQSTTSTTTNATGTTSSANGNGNGSGKTHECSICHKRFPTGQALGGHKRCHYDGGNSNGGVSVSASVGLTSSEGVGSTVSHRDFDLNIPALPEFWPGFGSGEDEVESPHPTKKSRLSLPPKFELFRE

SEQ ID NO: 2011 - protein, 395 aa, Pseudowintera axillaris
  misc_feature (154)..(154): Xaa can be any naturally occurring amino acid
DLEPVNPADVPVTAAGALKSYKLAAKAISKLQSLPSGNISLLCDVLVREVSELTGYDRVMTYKFHEDEHGEVIAECRRNDMEPYLGLHYPATDIPQASRFLFMKNKVRMICDCTARPVEVIQDKKLAQPLSLCGSTLTAPHGCHAQYMANMGSXASLVMSVTISEDDDEASSEEHRQKGRKLWGLVVCHHMTPRFVPFPLRYACEFLIQVFGIQLNKEVELAAQLREKNMLRTQTMLCDMLLRDAPVGIVTQSPNVMDLVKCDGAALYYRNQFWLLGTTPTEVQIRDIAEWLLEYHNNTTGLSTDSLMEAAYPGASILGDAVCGMAAVKITNKDFLFWFRSHTAKEIKWGGAKHDPSDKDGDGRKMHPRSSFMAFLDVVKRRSLPWEDVEMDAIQ

SEQ ID NO: 2012 - protein, 496 aa, Nicotiana tabacum
MVLSKTASESDVSIHSTFASRYVRTSLPRFKMPENSIPKEAAYQIINDELMLDGNPRLNLASFVTTWMEPECNTLMMDSINKNYVDMDEYPVTTELQNRCVNMIAHLFNAPLGDGETAVGVGTVGSSEAIMLAGLAFKRKWQNKMKAQGKPFDKPNIVTGANVQVCWEKFARYFEVELKEVKLSDGYYVMDPEKAVEMVDENTICVAAILGSTLNGEFEDVKRLNDLLIEKNKETGWDTPIHVDAASGGFIAPFLYPELEWDFRLPLVKSINVSGHKYGLVYAGIGWAIWRNKEDLPDELIFHINYLGADQPTFTLNFSKGSSQVIAQYYQLIRLGFEGYKNVMENCQENARVLREGIEKSGRFNIISKEIGVPLVAFSLKDNSQHNEFEISETLRRFGWIVPAYTMPPNAQHVTVLRVVIREDFSRTLAERLVIDIEKVLHELDTLPARVNAKLAVAEANGSGVHKKTDREVQLEITTAWKKFVADKKKKTNGVC

SEQ ID NO: 2013 - protein, 441 aa, Pteridophyllum racemosum
  misc_feature (157)..(157): Xaa can be any naturally occurring amino acid
PYEVPMTAAGALQSYKLAAKAIAKLQPLHSGNMERLCDTVVQEVFDLTGYDRTMAYKFHDDDHGEVISEVTKPGLEPYLGLHYPATDIPQAARFLFMKNKIRMICDCNAKQVKVLQDEKIPFDLTLCGSTLRAPHTCHLLYMKNMGSAASLVMAIVXNEGDEEEEASGPSQPQKKKRLWGLVVCHNTTPRFVPFPLRYACEFLLQVFAIHVNKEFELENQILEKNILRTQTLLCDMLMRDAPLGILSQSPNIMDLVRCNGAALLYKNKIHRLGLTPSDFQIHDIASWLSEHHMDSTGLSTDSLYDAGFPGALSLGDQVCGMAAVRITSKDMLFWFRSHTAAEVRWGGAKHNPSEEDDGRKMHPRSSFKAFLEVVKTRSSPWRDYEMDAIHSLQLILRNAFKDAETADLNATVIHSGLNNLKIEGMEELEAVTNEMVRLIET

SEQ ID NO: 2014 - protein, 361 aa, Oryza sativa (japonica cultivar-group)
MERAAAGPLGMEMPIMHDGDRYELVKEIGSGNFGVARLMRNRASGDLVAVKYIDRGEKIDENVQREIINHRSLRHPNIIRFKEVILTPTHLAIVMEYASGGELFERICSAGRFSEDEARFFFQQLISGVSYCHSMQVCHRDLKLENTLLDGSTAPRLKICDFGYSKSSVLHSQPKSTVGTPAYIAPEVLLKKEYDGKIADVWSCGVTLYVMLVGAYPFEDPEDPKNFRKTIQKILGVQYSIPDYVHISPECRDLITRIFVGNPASRITMPEIKNHPWFMKNIPADLMDDGMVSNQYEEPDQPMQNMNEIMQILAEATIPAAGTSGINQFLTDSLDLDDDMEDMDSDLDLDIESSGEIVYAM

SEQ ID NO: 2015 - protein, 2351 aa, Arabidopsis thaliana
MLGRDEDLVRTMSGRGSLGSTSHRSLAGAASKSFRDVFAPPTDDVFGRSDRREEDDVELRWAALERLPTYDRLRKGMLPQTMVNGKIGLEDVDVTNLAPKEKKHLMEMILKFVEEDNEKFLRRLRERTDRVGIEVPKIEVRYENLSVEGDVRSASRALPTLFNVTLNTIESILGLFHLLPSKKRKIEILKDISGIIKPSRMTLLLGPPSSGKTTLLQALAGKLDDTLQMSGRITYCGHEFREFVPQKTCAYISQHDLHFGEMTVRESLDFSGRCLGVGTRYQLLTELSRREREAGIKPDPEIDAFMKSIAISGQETSLVTDYVLKLLGLDICADTLVGDVMRRGISGGQRKRLTTGEMLVGPATALFMDEISTGLDSSTTFQICKFMRQLVHIADVTMVISLLQPAPETFELFDDIILLSEGQIVYQGSRDNVLEFFEYMGFKCPERKGIADFLQEVTSKKDQEQYWNRREHPYSYVSVHDFSSGFNSFHAGQQLASEFRVPYDKAKTHPAALVTQKYGISNKDLFKACFDREWLLMKRNSFVYVFKTVQITIMSLIAMTVYFRTEMHVGTVQDGQKFYGALFFSLINLMFNGMAELAFTVMRLPVFFKQRDFLFYPPWAFALPGFLLKIPLSLIESVIWIALTYYTIGFAPSAARFFRQLLAYFCVNQMALSLFRFLGALGRTEVIANSGGTLALLVVFVLGGFIISKDDIPSWLTWCYYTSPMMYGQTALVINEFLDERWGSPNNDTRINAKTVGEVLLKSRGFFTEPYWFWICIGALLGFTVLFNFCYIIALMYLNPLGNSKATTVVEEGKDKHKGSHSGTGGSVVELTSTSSHGPKKGMVLPFQPLSLAFNNVNYYVDMPAEMKAQGVEGDRLQLLRDVGGAFRPGVLTALVGVSGAGKTTLMDVLAGRKTGGYVEGSINISGYPKNQATFARVSGYCEQNDIHSPHVTVYESLIYSAWLRLSADIDTKTREMFVEEVMELVELKPLRNSIVGLPGVDGLSTEQRKRLTIAVELVANPSIIFMDEPTSGLDARAAAIVMRTVRNTVDTGRTVVCTIHQPSIDIFESFDELLLMKRGGQVIYAGTLGHHSQKLVEYFEAIEGVPKIKDGYNPATWMLDVTTPSMESQMSVDFAQIFVNSSVNRRNQELIKELSTPPPGSNDLYFRTKYAQPFSTQTKACFWKMYWSNWRYPQYNAIRFLMTVVIGVLFGLLFWQTGTKIEKEQDLNNFFGAMYAAVLFLGATNAATVQPAVAIERTVFYREKAAGMYSAIPYAISQVAVEIMYNTIQTGVYTLILYSMIGYDWTVVKFFWFYYYMLTCFVYFTLYGMMLVALTPNYQIAGICLSFFLSFWNLFSGFLIPRPQIPIWWRWYYWASPVAWTLYGIITSQVGDRDSIVHITGVGDMSLKTLLKNGFGFDYDFLPVVAVVHIAWILIFLFAFAYGIKFLNFQRRFYSFKLFRSSLSLPKVLCKTLSPSSMVYTISGVRFPHLPSIKKKNSSLHSFNEDLRRSNAVSFSLRKDSRSSGKVFARKPSYDSDSSSLATTASEKLRGHQSDSSSSASDQVQSRDTVSDDTQVLGNVDVQKTEEAQETETLDQTSALSTSGSISYKEDFAKMSHSVDQEVGQRKIPPPGDGKRIYDIDPMLNSHRNHLDYRYGQYRKLREEIDKNEGGLEAFSRGYEIFGFTRSATGITYREWAPGAKAASLIGDFNNWNAKSDVMARNDFGVWEIFLPNNADGSPAIPHGSRVKIRMDTPSGIKDSIPAWIKYSVQPPGEIPYNGVYYDPPEEDKYAFKHPRPKKPTSLRIYESHVGMSSTEPKINTYANFRDDVLPRIKKLGYNAVQIMAIQEHAYYASFGYHVTNFFAPSSRFGTPDDLKSLIDKAHELGLVVLMDIVHSHASKNTLDGLDMFDGTDGQYFHSGSRGYHWMWDSRLFNYGSWEVLRYLLSNARWWLEEYKFDGFRFDGVTSMMYTHHGLQVVEFTGNYNEYFGYSTDVDAVVYLMLVNDLIHGLYPEAIVVGEDVSGMPAFCVPVEDGGVGFDYRLHMAVADKWIELLKYVLRTSWLFSEIIKKRDEDWQVGDITFTLTNRRWGEKCVVYAESHDQALVGDKTIAFWLMDKDMYDFMAVDRQATPRVDRGIALHKMIRLITMGLGGEGYLNFMGNEFGHPEWIDFPRTDQHLPDGRVIAGNNGSYDKCRRRFDLGDAEYLRYHGLQEFDRAMQNLEETYGFMTSEHQYISRKDEGDRVIVFERGNLLFVFNFHWTNSYSDYRIGCSVPGKYKIVLDSDNSLFGGFNRLDDSAEFFTSDGRHDDRPCSFMVYAPCRTAVVYAAVDDDDDDERSSLVPIGLLPEDV

SEQ ID NO: 2016 - protein, 376 aa, Ralstonia eutropha JMP134
MALAVVPKHCCALLPPIRKYARPDLMPTLFDPIRIGDLDLPNRVIMAPLTRSRAVGGKRVPNALMAEYYVQRASAGLIISEATAVTPQGVGYADTPGIWTDEQVAGWKHVTDAVHAAGGRIFMQLWHVGRISDPIFLDGELPVAPSAIAAQGHVSLVRPKRAYVTPRALETEEIAGVIAAYRHGAENAKKAGFDGVEIHGANGYLLDQFLQDSTNQRTDAYGGPIENRARLLLEITDACIDVWGADRVGVHLSPRGDVHSMGDSDLAATFGYVARELGKRRIAFICAREALGDNRLGPALKAAFGGVYIANEKMTKQTAEHVLAAGEADAVAFGQLFIANPDLPRRLALDASLNEPRPETFYHPGAEGYTDYPALV

SEQ ID NO: 2017 - protein, 710 aa, Saccharomyces cerevisiae
MGNSGSKQHTKHNSKKDDHDGDRKKTLDLPPLTKSDTTHSLKSSRSLRSLRSKRSEASLASNVQAQTQPLSRRSSTLGNGNRNHRRSNNAPITPPNNHYLTSHPSSSRRLSSSSRRSSMGNNNNSELPPSMIQMEPKSPILKNSTSMHSTSSFNSYENALTDDDDDRGDDGGESPSMAKVTRINTSSSADRGSKRTPLRRHNSLQPEKGVTGFSSTSSKLRRRSDNTLPASYPLNAEAGGNGSDYFSNRSNSHASSRKSSFGSTGNTAYSTPLHSPALRKMSSRDNDDSGDNVNGRGTSPIPNLNIDKPSPSASSASKREYLSAYPTLAHRDSSSSLSPRGKGQRSSSSSSSSQRIYVSPPSPTGDFVHGSCADGDNGSRTNTMVEMKRKKPVRPVDIDEIIQRLLDAGYAAKRTKNVCLKNSEIIQICHKARELFLAQPALLELSPSVKIVGDVHGQYADLLRLFTKCGFPPMANYLFLGDYVDRGKQSLETILLLLCYKIKYPENFFLLRGNHECANVTRVYGFYDECKRRCNIKIWKTFVDTFNTLPLAAIVTGKIFCVHGGLSPVLNSMDEIRHVSRPTDVPDFGLINDLLWSDPTDSSNEWEDNERGVSFCYNKVAINKFLNKFGFDLVCRAHMVVEDGYEFFNDRSLVTVFSAPNYCGEFDNWGAVMTVSEGLLCSFELLDPLDSTALKQVMKKGRQERKLANR

SEQ ID NO: 2018 - protein, 242 aa, Antirrhinum majus
MGRGRVELKRIENKINRQVTFAKRRNGLLKKAYELSVLCDAEVALIIFSNRGKLYEFCSSTSMLNTLERYQKCNYGPPETNVSTREALELSSQQEYLKLKARYEALQRSQRNLLGEDLGPLNSKELESLERQLDMSLKQIRSTRTQAMLDTLTDLQRKEHALNEANRSLKHRLMDGSQISLQWNPNAEDHVGYGRQPSQPSADGFYHPLECEPTLHIGFQSDQITVAGAGPSVNNYISGWLP

SEQ ID NO: 2019 - protein, 547 aa, Haemophilus ducreyi
MAIKDVKFGNDARVKMLKGVNILADAVKVTLGPKGRNVVLDKAYGAPTITKDGVSVAREIELEDKFENMGAQMVKEVASKANDVAGDGTTTATVLAQSIVSEGLRAVAAGMNPMDLKRGIDKAVAAVVEELKAISKPCETSKEIEQVGTISANSDETVGKLIAQAMEKVGKEGVITVEDGTGLDDALDVVEGMQFDRGYLSPYFINKPEAGTVELDNPYIILVDKKISNIREILPVLEAVAKAGKPLLIIAEDVEGEALATLVVNTMRGIVKVAAVKAPGFGDRRKAMLQDIAILTAGTVISEEIGMELEKATLEELGQAKRVVITKDNTTIIDGIGDEAQIKARVVQIRQQIEDSTSDYDKEKLQERVAKLAGGVAVIKVGAATEVAMKEKKDRVDDALHATRAAVEEGIVPGGGVALVRAANKVSATLTGDNEEQNVGIKLALRAMEAPLRQIVENSGEDASVVARDVKDGSGNFGYNATTEEYGDMLEMGILDPTKVTRSALQFAASIAGLMITTECMITDLPKEDKLDAQAAMGGMGGMGGMM

SEQ ID NO: 2020 - protein, 823 aa, Zea mays
MLCLVSPSSSPTPLPPPRRSRSHADRAAPPGIAGGGNVRLSVLSVQCKARRSGVRKVKSKFATAATVQEDKTMATAKGDVDHLPIYDLDPKLEIFKDHFRYRMKRFLEQKGSIEENEGSLESFSKGYLKFGINTNEDGTVYREWAPAAQEAELIGDFNDWNGANHKMEKDKFGVWSIKIDHVKGKPAIPHNSKVKFRFLHGGVWVDRIPALIRYATVDASKFGAPYDGVHWDPPASERYTFKHPRPSKPAAPRIYEAHVGMSGEKPAVSTYREFADNVLPRIRANNYNTVQLMAVMEHSYYASFGYHVTNFFAVSSRSGTPEDLKYLVDKAHSLGLRVLMDVVHSHASNNVTDGLNGYDVGQSTQESYFHAGDRGYHKLWDSRLFNYANWEVLRFLLSNLRYWLDEFMFDGFRFDGVTSMLYHHHGINVGFTGNYQEYFSLDTAVDAVVYMMLANHLMHKLLPEATVVAEDVSGMPVLCRPVDEGGVGFDYRLAMAIPDRWIDYLKNKDDSEWSMGEIAHTLTNRRYTEKCIAYAESHDQSIVGDKTIAFLLMDKEMYTGMSDLQPASPTIDRGIALQKMIHFITMALGGDGYLNFMGNEFGHPEWIDFPREGNNWSYDKCRRQWSLVDTDHLRYKYMNAFDQAMNALDERFSFLSSSKQIVSDMNDEEKVIVFERGDLVFVFNFHPKKTYEGYKVGCDLPGKYRVALDSDALVFGGHGRVGHDVDHFTSPEGVPGVPETNFNNRPNSFKVLSPPRTCVAYYRVDEAGAGRRLHAKAETGKTSPAESIDVKASRASSKEDKEATAGGKKGWKFARQPSDQDTK

SEQ ID NO: 2021 - protein, 542 aa, Lactococcus lactis
MSKDIKFSSDARTAMMRGIDILADTVKTTLGPKGRNVVLEKSYGSPLITNDGVTIAKEIELEVHFENMGAKLVSEVASKTNDIAGDGTNTATVLTQAIVREGLKNVTAGANPVGIRRGIELAAETAVASIKEMAIPVHDKSAIAQVATVSSRSEKVGEYISDAMERVGSDGVITIEESKGMQTELDVVEGMQFDRGYLSQYMVSNTEKMVAELDNPYILITDKKISNIQEILPLLEQILKTNRPLLIVADDVDGEALPTLVLNKIKGVFNVVAVKAPGFGDRRKAQLEHLAILTGGTVITEELGLDLKDATLEALGQAAKATVDKDHTTIVEGAGSADAISDRVAIIKAQIEKTTSDFDREKLQERVAKLAGGVAVVKVGAATETELKAMKLLIEDALNATRAAVEEGIVSGGGTALVNAIAALDKLSEEGDIQTGINIVRRALEEPVRQIAANAGYEGSVIIDKLRSEEVGTGFNAATGQWVNMIEEGIVDPAKVTRSALQNAASVAGLILTTEAVVANKPEPAAPAMPPMDPSMGMGGMI

SEQ ID NO: 2022 - protein, 868 aa, Gibberella zeae PH-1
MASNILYLPFRKSTQLSLASTIRQYINTKYDQHPDMFKHDLEVIDALRRDAVNVREPHPSGIKKLQAYAGQLVWVGGKFPIDIGAEFSWYPALGYNTERPMVRNNLKYELMNVLYNLASLYSQLAINTPRGNTEGLKSAANYFSLAAGVLTHMQKEILPELRMSDPPEDMDHDTLESLTQLLLAQSQECFWQKAVMDGYKDASIAKLAARVSDLYNFAGEAAMKSEAISSAWIHHMSAKHHHFAAAAQYRAACDCLEKRKYGEEVARLRDAVSCAAEGLKEARNGYLGKVVVDDLNGLKRKVEEDLKRAEKDNDVIYLIAVPPKSELKILDRANMAVARVPPQIGNPYDYFGDRAEFGPALFSRLVPFSVHVATSIYEERRDRMVNQNIIQELESLTQKIHELLASLGLPGSLQALEKPLGLPPSLVQHAEEIRQADAINRVQKSFADIDKLRLGDMDIFEEGKRALASEEEEDQRLRMRYGTDRWIRPESREDPQGQKLWQHASEIETYFQSSVSSDGVVREKFIAIQDLLAILSGPDRDLMDSVPSSRRVDIPETLKPAIGRLRSAYNDVLRLESRRRKKVEALRDNARRDDIKPDILKEAARLERTYPNTALVPAHFEEFFDQRLDKLYEPEVEAIEKEAQDQDRLLQDVQRVNREFEAQKRQMGERGNREREVALQRLDNAYFKYKEIINNLEVGRKFYNDLNKIVGQGFRDVIRNWVAQRRMEARALEEYVFTSSKNDAMLMKCREINMPTLSNLNISNQQVQAQAQAQAHAHAQAQSPMPSYQEPAHSYAPPQQPPQPVQSPAQASIQSWGETVQQPKPVQPQQAAPMWNPGMGIKFGQPSGGSGQPPAPGTWNPNAGIKFG

SEQ ID NO: 2023 - protein, 1017 aa, Leptospira interrogans serovar Copenhageni str. Fiocruz L1-130
MTSLRSDSNFLILNSSGEVITWNFYKPLQEFGSNLEKEIHPSQWNWAISDSWASVWKKVKSPRKKTSFLKVGYITQKKEPLDLEVKIVSLENDHILLLFFTNFESYFSETPSIFLQDSELRSTIFQKSANAILLLDPDKDLILEINQTASRYFEIQNQSEILNLPFSNLLAQDFTHFEYTSRKKKILSGETPSWDLEFKTFRGKKFWGNTSCRMISTHLNKIILVQIKDITEKVNTRKSLLEQAGTIAEHEANLNAIIENSEAMIWSIDKNYKLLIFNSQFQNVMQNFYHSEISTGFNLFQKELPPEIAKYWKEFYDRALSGEKVSVARKRPNQDGTFIFSELSFQPIRNTEYEITGVSAISVDITDKKLAEEKFRLLFERSSEPHVLYDDFGILECNPATLKMLRCSDKKLVLGKHPIHFSVETEKEKTNELESIALEKGSYTFEWVYKRFNDEEFSVEVTLIPIIIHQKRVFLSVWHEITERKVYEDSLKRAKEIAEAASKAKTDFLAMMSHEIRTPLNGVIGTVSLLEGTFLNTEQKEYLDIIKSSGQNLLILLNDILDLSRIESGQLKLEIQPVSPEKLTNEVVNLFRPMAEEKGLVVESEVSFNVPNWIISDPYRLRQVLTNLIGNSIKFTEKGKIHLSVEAEKFPNDKLRLIFHVKDTGIGIAEEKLELLFRAFSQVDSSTTRKYGGSGLGLTISKKLAELMKGEITVKSQVNSGSEFSLSILTEKLEYEIPAGVQELHSKNLATSAVISIQEFQFKEQIKKFCERNGFLVKMARTAKETIRIIGEEERIGVFLTDLNFPDMNLSEMLNELKKQNPSLKLTVILFMEKELKDSYYLVTNSLFNRPGFQIFMMFKPILLEELSKNFEKAFPIKVLKKEKQNENKKLLSEKIPLQILLVEDNVINQKIALRLLTKLGYNADSALNGLEGIEKLKTKNYDLIFMDIQMPEIDGYETTFQIRKDFGKSKPVIVAMTANAMEGDREKCLEAGMNAYISKPIQIQDIESTIVLLFQS

SEQ ID NO: 2024 - protein, 80 aa, Oryza sativa
ARDHKGVLSSKGSGKPPLLLGLSVHCPIREAIRAARKEFPGAGGFPLTFQMDVPATMPIVKELCGLDVVEKYFESFAAKA

SEQ ID NO: 2025 - protein, 205 aa, Nicotiana tabacum
MPSPANVLKVIILGDSGVGKTSLMNQYVNKKFSNQYKATIGADFLTKEVQFEDRLFTLQIWDTAGQERFQSLGVAFYRGADCCVLVYDVNSMKSFENLNNWREEFLIQASPSDPENFPFVVLGNKVDIDGGNSRVVSEKKARAWCASKGNIPYFETSAKEGTFVEEAFQCIAKNALKSGEEEEIYLPDTLDVGTSSQPRTGGCEC

SEQ ID NO: 2026 - protein, 290 aa, Oryza sativa (japonica cultivar-group)
MAAGRAAAVAACASPAVPRRWAKSDNRRLLHVVYRVGDIDRTIKFYTECLGMKLLRKRDIPEEKYTNAFLGYGAEDNHFVVELTYNYGVDKYDIGAGFGHFGIAVDDVAKTVELIRAKGGKVTREPGPVKGGKTVIAFVEDPDGYKFEILERPGTPEPLCQVMLRVGNLDRAISFYEKACGMELLRKRDNPEYKYTVAMMGYGPEDKNAVLELTYNYGVTEYDKGNAYAQIAIGTDDVYKTAEVVKLFGGQVVREPGPLPGINTKITSILDPDGWKSVFVDNIDFAKELE

SEQ ID NO: 2027 - protein, 225 aa, Glycine max
MGQDQNQRSLIYAFVSRGTVILAEYTEFSGNFNTIAFQCLQKLPASNNKFTYNCDGHTFNYLVDNEFTYCVVADESIGRQVPVAFLERAKDDFVAKYGGGKATTAAANSLNKEFGSKLKEHMQYCVEHPEEISKLAKVKAQVSEVKDVMMENIEKVLDRGEKIELLVDKTENLHHQAQDFRNSGTKIRRKMWLQNMKIKLIVLAILIALILIIVLSVCRGFNCGK

SEQ ID NO: 2028 - protein, 168 aa, Oryza sativa (indica cultivar-group)
SSNIDCGVSIGTIFGIYMIKDKENVTLEDVLQPGKNMVAAGYCMYGSSCTLVLSTGNGVNGFTLDPSLGEFILTHPDIKIPKKGKIYSVNEGNAKNWDEPTAKFVEKCKFPKDGSSPKSLRYIGSMVADVHRTLLYGGVFLYPADKKSPNGKLRVLYEVFPMSFLMEQ

SEQ ID NO: 2029 - protein, 461 aa, Pteridophyllum racemosum
SGKPFYAILHRIDVGFVIDLEPVNPLDVPVTAAGALKPYKLAAKAISRLQSLPSGNISLLCDVLAREVSELTGYDRVMVYKFHEDEHGEVVSECRKIDLESYRGLHYPATDIPQASRFLFMKNRARIICDCSATPVKVIQDEKLAQPLSLCGSTLRAPHGCHAQYMANMGSIASLVMFVTINDDDDDIKIETHKGRKLWGLVVCHHTSSRFVPYPLRYACEFLIQVFGIQLNKEVELAVQSREKRILRTQTLLCDMLLRDSPVGIVTQSPNVMDLVRCDGAALYFRNKFWLLGVPPTEKQIRDIVGWLMEHYVGTTGLSTDSLMEAGYPDSSVLGDAVCGMAAINFTSKDFLFWFRSQTAKELKWGGAKHDPVDMDDVRKMNPRSSFNAFLEVVKWRSLPWEDVEMDAIHSLQLILRESMKNEIVNDVKTIVNTTPVIDARLRGMDQLCVVTGEMVSLMET

SEQ ID NO: 2030 - protein, 451 aa, Arabidopsis thaliana
MSGSRRKATPASRTRVGNYEMGRTLGEGSFAKVKYAKNTVTGDQAAIKILDREKVFRHKMVEQLKREISTMKLIKHPNVVEIIEVMASKTKIYIVLELVNGGELFDKIAQQGRLKEDEARRYFQQLINAVDYCHSRGVYHRDLKPENLILDANGVLKVSDFGLSAFSRQVREDGLLHTACGTPNYVAPEVLSDKGYDGAAADVWSCGVILFVLMAGYLPFDEPNLMTLYKRICKAEFSCPPWFSQGAKRVIKRILEPNPITRISIAELLEDEWFKKGYKPPSFDQDDEDITIDDVDAAFSNSKECLVTEKKEKPVSMNAFELISSSSEFSLENLFEKQAQLVKKETRFTSQRSASEIMSKMEETAKPLGFNVRKDNYKIKMKGDKSGRKGQLSVATEVFEVAPSLHVVELRKTGGDTLEFHKVCDSFYKNFSSGLKDVVWNTDAAAEEQKQ

SEQ ID NO: 2031 - protein, 431 aa, Thermus caldophilus
MTENAEKFLWGVATSAYQIEGATQEDGRGPSIWDTFARRPGAIRDGSTGEPACDHYHRYEEDIALMQSLGVGVYRFSVAWPRILPEGRGRINPKGLAFYDRLVDRLLAAGITPFLTLYHWDLPQALEDRGGWRSRETAFAFAEYAEAVARTLADRVPFFATLNEPWCSAFLGHWTGEHAPGLRNLEAALRAAHHLLLGHGLAVEALRAAGAKRVGIVLNFAPAYGEDPEAVDVADRYHNRYFLDPILGRGYPESPFQDPPPTPILSRDLELVARPLDFLGVNYYAPVRVAPGTGPLPVRYLPPEGPVTAMGWEVYPEGLYHLLKRLGREVPWPLYITENGAAYPDLWTGEAVVEDPERVAYLEAHVEAALRAREEGVDLRGYFVWSLMDNFEWAFGYTRRFGLYYVDFPSQRRIPKRSALWYRERIARAQL

SEQ ID NO: 2032 - protein, 618 aa, Moorella thermoacetica ATCC 39073
MTYSVSLGANYLGDGRCRFHLWAPLAESVAVQIVAPEERLEPLTRKERGYFQGEVAGVVPGSLYYYLLDGQQLPDPASRYQPRGVHGPSQVVDAKAFSWSDRCWPGPKGEDLIFYELHVGTFTPEGTFEAIIAHLDDLRTLGVTAIELMPVAQFPGCRNWGYDGVFPFAVQNSYGGPEGLRRLVDTCHRYGLAVFLDVVYNHLGPEGNYLAKFGPYFTDRYRTPWGQALNFDGPGSDEVRRFFIENALYWLTEFHLDGLRLDAIHAIMDKSALPFLEELAAAVKLQAERLDRRVYIVAESDLNDPRVIRPQELGGYGLDAQWCDDFHHALHALLTGERNGYYRDFGTLGNLARAFREGYVYTGQYSAYRQRRHGRRPHPCKGNQFVVFTQNHDQVGNRARGERLSTLVPFVKLKLAAAVVLLSPFVPLLFMGEEYGETAPFQYFTSHSDPRLIAAVRRGRREEFAGHNWTGEVPDPQDEATFRRSRLNHGLSLQGQHRVLWEFYRQLIQLRRELPSLTELNLENMEVITCEEDLVLFVRRWSRDSEVGIIFSFSNTATAPTLPLPAGRWRKRLDAAEERWLGDGSTIPALLVSQGKMQVPLTPGACLLFERIKEAQAD

SEQ ID NO: 2033 - protein, 464 aa, Sarcandra glabra
SGKPFYAIIHRVTASLIIDFEPVKPYEVPMTAAGALQSYKLAAKAIARLQSLPGGSMEKLCDTVVQEVFDLTGYDRVMAYKFHEDDHGEVISAITKPGLEPYLGLHYPATDIPQAARFLFMKNKVRMICDCDAKPVKVFQDEKLVFDLTLCGSTLRAPHSCHLQYMANMNSIASLVMAVVVNEGEEDDSLEPGQQQQRKRKRLWGLIVCHNTTPRFVPFPLRYACEFLMQVFAIHVNKELELESQIQEKNIFRTQTLLCDMLMRDTPLGIVSQNPNVMDLVKCDGAALLYKKKIWRLGLTPSETQIHDISFWLSEYHMDSTGFSTDSLNDAGYPGALAIGDAVCGMAAVWITSKDMLFWFRSHTAAEVRWGGAKHDPDDKDDNRGMHPRSSFKAFLEVVKTRSLPWKDNEMDAIHSLQLILRGTFKDVENSHTKTMIYSQLNDLKLEGMEELQAVTNEMVRLIE

SEQ ID NO: 2034 - protein, 475 aa, Lactobacillus acidophilus NCFM
MTESIFPKKFLWGGAVAAHQLEGGYNEDGKGISIADLMTLGSHEYPRELTATIEEGKYYPNHKAIDFYHHYQEDIKLMAEMGFKAFRTSIAWTRIFPNGDETQPNEEGLAFYDKVFDECLKYNIEPVVTLSHFEMPYHLVTKYGGWSNRKLIDFFTRLAHVCFEKYHTKVKYWMTFNEINNQANYESDISVYENSGIKFNEDDDKQKIMYQAAHYEMVASAEAVQIGHAIDPSLRIGCMLAFCPIYPASPKPEDILFAQRAMDSRLYFGDVQVNGEYPSWLKQYFKNNNYNLDITDNDLQILKQGTVDYIGFSYYMSFTTKYTDHLDYREYQDLVENPFIKANDWGWPIDPVGLRYALNWMSTRWHKPLFIVENGLGAYDKLTEDHEVHDQYRINYLHDHILEIKKAITEDGIDVIGYLPWGCIDLVSASTGEMKKRYGFIYVDEDDHGNGSMKRYKKDSFYWYQNVIKTNGQEL

SEQ ID NO: 2035 - protein, 465 aa, Sarcandra glabra
SGKPFYAIMHRIDVGPVIDLEPVNPADVPVTAAGALKSYKLAAKAISRLQSLPSGNISLLCDVLVREVSELMGYDRVMAYKFHEDEHGEVIAECRRSDLEPYLGLHYPATDIPQASRFLFMKNKVRMICDCSAAPVKVIQDKRLGQPMSLCGSALRAPHGCHAQYMANMGSIASLVMSVTINEDDDETESDPQQQQEKPRKLWGLVVCHHTGPRFVPFPLRYACEFLIQVFGIQLNKEVELAAQLREKHMLKTQTVLCDMLLRDAPMRIVTQSPNVMDLVKCDGAALYYRNQFWLLGTTPTEAQIRDIAEWLLDYHDGSTGLSTDSLMEAGYPGASVLGDAVCGMAAVKITSKDFLFWFRSHSAKEIKWGGAKHDPINKDDDGRKMHPRSSFKAFLEVMKQRSLRWEDVEMDAIHSLQLILRGSLQEESENDSKAIVNASLDVAKIQGMDELRFVTNEMVRLIET

SEQ ID NO: 2036 - protein, 497 aa, Oryza sativa
MVLSHASSGRDDAVRCTFATRYACETLPRFRMPEQSIPREAAYQIINDELMLDGNPRLNLASFVTTWMEPECDKLIMDSVNKNYVDMDEYPVTTELQNRCVNMIAHLFNAPIKEDETAIGVGTVGSSEAIMLAGLAFKRKWQNKRKEQGKPCDKPNIVTGANVQVCWEKFARYFEVELKEVKLSEGYYVMDPVKAVEMVDENTICVAAILGSTLTGEFEDVKLLNNLLTEKNKETGWDVPIHVDAASGGFIAPFLYPELEWDFRLPLVKSINVSGHKYGLVYPGVGWVIWRSKEDLPEELIFHINYLGTDQPTFTLNFSKGSSQIIAQYYQLIRLGFEGYKNIMQNCMENTAILREGIEATGRFEILSKEAGVPLVAFSLKDSGRYTVFDISEHLRRFGWIVPAYTMPANAEHVAVLRVVIREDFSRSLAERLVSDIVKILHELDAHSAQVLKISSAIAKQQSGDDGVVTKKSVLETEREIFAYWRDQVKKKQTGIC

SEQ ID NO: 2037 - protein, 423 aa, Smilax rotundifolia
SGKPFYAIVHRVTGCLIIDFEPVTPTEVPMPAAGALQSYKLAAKAIAKLQSLPGGSMEGLCSTVVQEVFELTGYDRVMAYKFHEDDHGEVFAEITKPGLEPYRGLHYPATDIPQAARFLFMKNKVRMISDCRAKPVKVYQDEKLPFDITFCGSTLRAPHSCHLQYMENMNSIASLVMVVVINEGEEDEEQGQQQHNRKRLWGLVVCHHESPRFVPFPLRYACEFLMQVFAIHVNKEFELENQIREKNILRTQTLLCDMLLRDSDPLGIVTQSPNIMDLVKCDGAALLYENEIWQIGLTPTESQIREIAFWFAEFHADSTGLSTDSLYDAGYPGAVALGDTVSGMAAARITSTDILFWFRAHTAAEIRWGGAKHDPSDKDDGKRMHPRSSFNAFLEVVKGRSLPWNNYEIDAIHSLQLILRGTL

SEQ ID NO: 2038 - protein, 326 aa, Aspergillus nidulans FGSC A4
MALKRTFKLNTGYEIPAVGLGTWQSKPSEVEEAVTAALNIGYRHIDAAAVYGNERDVGNGIKASGVPRGEIFLTSKLWNTHHDPENVEAAVDRSLSDLQTDYLDLYLIHWPVAFRYSTTTIQPVDEKTGLIDVIDVPIKDTWAAMEALVAKGKVRSIGVSNFNRRRIEELLKTAKIPPAVNQIEAHPYLQQRELLEWSKEKGILITGYSPLGNNIYNIPRTVDDPLVIEVAKFLNRTPAQVLISWAVQRGTAVLPKSVTPERIKSNFRDFILPEDAFQAIQSLERHQRMNFPARLGVDIFDEVGEESARRSALEWAEGQRLSKSQA

SEQ ID NO: 2039 - protein, 478 aa, Geobacillus kaustophilus HTA426
MEHRHLKPFPPGFLWGAASAAYQVEGAWNEDGKGLSVWDVFAKQPGRTFKGTNGDVAVDHYHRYKEDVALMAEMGLKAYRFSVSWSRVFPDGNGAVNEKGLDFYDRLIEELRTHGIEPIVTLYHWDVPQALMDAYGAWESRRIIDDFDRYAVTLFQRFGDRVKYWVTLNEQNIFISLGYRLGLHPPGVKDMKRMYEANHIANLANAKVIQSFRHYVPDGKIGPSFAYSPMYPYDSRPENVLAFENAEEFQNHWWMDVYAWGMYPQAAWNYLESQGLEPTVAPGDWELLQEAKPDFMGVNYYQTTTVEHNPPDGVSEGVMNTTGKKGTSTSSGIPGLFKTVRNPYVDTTNWDWAIDPVGLRIGLRRIANRYRLPILITENGLGEFDTLEPDDIVNDDYRIDYLRRHIQEIQRAITDGVDVLGYCVWSFTDLLSWLNGYQKRYGFVYVNRDDESEKDLRRIKKKSFYWYQRVIATNGAEL

SEQ ID NO: 2040 - protein, 445 aa, Mortierella alpina
MATPLPPSFVVPATQTETRRDPLQHEELPPLFPEKITIYNIWRYLDYKHVFGLGLTPLIALYGLLTTEIQTKTLIWSIIYYYATGLGITAGYHRLWAHRAYNAGPAMSFVLALLGAGAVEGSIKWWSRGHRAHHRWTDTEKDPYSAHRGLFFSHIGWMLIKRPGWKIGHADVDDLNKSKLVQWQHKNYLPLVLIMGLVFPTVVAGLGWGDWRGGYFYAAILRLVFVHHATFCVNSLAHWLGDGPFDDRHSPRDHFITAFVTLGEGYHNFHHQFPQDYRNAIRFYQYDPTKWVIAICAFFGLATHLKTFPENEVRKGQLQMIEKRVLEKKTKLQWGTPIADLPILSFEDFQHACKNDNKKWILLEGVVYDVADFMTEHPGGEKYLKMGVGKDMTAAFNGGMYDHSNAARNLLSLMRVAVVEYGGEVEAQKKNPSMPIYGTDHVKAE

SEQ ID NO: 2041 - protein, 394 aa, Smilax rotundifolia
DLEPVNPADVPVTAAGALKSYKLAAKAISRLQSLPSRNISLLCDVLVREVSELTGYDRVMAYKFHEDEHGEVISECRRSDLEPYLGLHYPATDIPQASRFLFMKNKVRMICDCSAASVKVIQDKKLAQPLSLGGSTLRAPHGCHAQYMANMGSIASLVMSVTINEDDEEMDGDQQQKGRKLWGLVVCHHTSPRFVPFPPRYACEFLLQVFGIQLNKEVELAAQAKGKHIFWMQTLLCDMLLRDAPIGIFTQSPNVMDLVKCDGAALYYRKQFWLLGITPTEAQIKDIVAWLLECHDGTTGLSTDSLTEAGYPGSSALGNAICGMAAIKITSKDFIFWFRSHTSKDIRWGGAKHEPADRDDESQKMHPRSSFKAFLEVVKLRSLPWEDMEMDAIQ

SEQ ID NO: 2042 - protein, 247 aa, Antirrhinum majus
MGRGRVELKRIENKINRQVTFAKRRNGLLKKAYELSVLCDAEVALIIFSNRGKLYEFCSSSNMLKTIERYQKSSYGSLEVNHQAKDIEASSYKEYLKLKSKYESLQGYQRHLLGDDLGPLNMNDLEHLEHQLETSLKHIRSTRTQVMLDQLSDLQTKEKMMVDANKALERKLEEIYAANHLQQSWGGGGDHSNAYNDHQHAQSQGFFQPLECNSTLQIGFNDPVASSQMTAPTDAQNMHGLVPGWML

SEQ ID NO: 2043 - protein, 243 aa, Antirrhinum majus
MGRGRVELKRIENKINRQVTFAKRRNGLLKKAYELSVLCDAEVALIIFSNRGKLYEFCSNSGTMLKTLERYQKCNYGAPEANVSTREALELSSQQEYLKLKARYEALQRSQRNLLGEDLGPLNSKELESLERQLDMSLKQIRSTRTQAMLDTLTDLQRKEHALNEANRSLKHRLMEGSQISLQWNPNAHDMGYGRQAAAQPQGDGFFHPLECEPTLQMGFQSEITVGAAGPSVNNYNMTGWLP

SEQ ID NO: 2044 - protein, 408 aa, Chlamydophila felis
TVAKEIELEDKHENMGAQMVKEVASKTADKAGDGTTTATVLAEAIYSEGLRNVTAGANPMDLKRGIDKAVKVVVDEIKKISKPVQHHKEIAQVATISANNDAEIGNLIAEAMEKVGKNGSITVEEAKGFETVLDVVEGMNFNRGYLSSYFTTNPETQECVLEESLVLIYDKKISGIKDFLPVLQQVAESGRPLLIIAEDIEGEALATLVVNRLRAGFRVCAVKAPGFGDRRKAMLEDIAILTGGQLISEELGMKLENTTLSMLGKAKKVIVSKEDTTIVEGLGNKEDIEARCENIKKQIEDSTSDYDKEKLQERLAKLSGGVAVIRVGAATEIEMKEKKDRVDDAQHATLAAVEEGILPGGGTALVRCIPTLEAFIPILTNEDEQIGARIVLKALSAPLKQIAANAGK

SEQ ID NO: 2045 - protein, 740 aa, Cucumis sativus
METCYCIEPQWPADELLMKYQYISDFFIALAYFSIPLELIYFVKKSAVFPYRWVLVQFGAFIVLCGATHLINLWTFTMHSRTVAVVMTTAKVLTAVVSCATALMLVHIIPDLLSVKTRELFLKNKAAELDREMGLIRTQEETGRHVRMLTHEIRSTLDRHTILKTTLVELGRTLALEECALWMPTRTGLELQLSYTLHQQNPVGYTVPINLPVISQVFSSNRAVKISPNSPVASLRPRAGRYVAGEVVAVRVPLLHLSNFQINDWPELSTKRYALMVLMLPSDSARQWRVHELELVEVVADQVAVALSHAAILEESMRARDPLMEQNVALDLARREAETANHARNDFLAVMNHEMRTPMHAIIALSSLLQETELTPEQRLMVETILKSSNLLATLINDVLDLSRLEDGSLQLDIGTFNLHAVFKEVLNLIKPVTLVKKLSLTLHLGLDLPVFAVGDEKRLMQAILNVVGNAVKFSKEGSISISAIVAKAETFREIRVPDFHPVPSDSHFYLRVQVKDTGSGISPQDIPKLFTKFAQTTVGPRNSCGSGLGLAICKRFVNLMEGHIWLESEGLGKGCTATFIVKLGIAEQSNESKLPFTSKIHENSIHTSFPGLKVLVMDDNGVSRSVTKGLLVHLGCEVTTAGSIEEFLRVVSQEHKVVFMDICTPGVDGYELAIRIREKFAKCHERPFMVVLTGNSDKVTKESCLRAGMDGLILKPVSIDKMRSVLSELIERRVLFETS

SEQ ID NO: 2046 - protein, 637 aa, Cucumis sativus
MMESCDCIDAQWPPDELLVKYQYISDVLIALAYFSIPLELIYFVQKSAFFPYRWVLMQFGAFIVLCGATHFINLWTFSMHSKAVAVVMTVAKVACAIVSCATALMLVHIIPDLLSVKTREMILKNKAEQLDREMGLILTQEETGRHVRMLTHEIRSTLNRDTILKTILVELGKTLGLEECALWMPSRNGLSLQLSHALNYQIPVGTNIPINLPVVNEVFNSNRAICVPYTCQLARVRTSVGGRYLPPEVVAVRVPLLNLSNFQMNNWPDGSSRSYAIMVLILPTDSARKWRDHELELVDVVADQVAVALSHAAILEESMRARDQLVDQNVALDLARREAETAIHARNDFLAVMNHEMRTPMHAIIALSSLLLETELTPEQRVMIETILKSSNLLATLINDVLDLSRLEDGSLVLDMGSFNLHAIFKEALDLVKPIASVKKLSMALILASDLPICAVGDEKRLMQIILNIVGNGVKFTKEGHVSIIASVAKLDSLRDWRPTEFYPMQSDGQFYLRVQVKDSGCGIPPQDIPHLFTRFTQLQTRSNKTNSGVGLGLALCKRFINLMGGHIWIESEGPDKGTTAVFIVKLGICNANPNDLSVKQVVPIVNHRSADLHGQRPIFRETGQVSFSSSRYQRSL

SEQ ID NO: 2047 - protein, 249 aa, Arabidopsis lyrata subsp. petraea
MGRGRVELKRIENKINRQVTFAKRRNGLLKKAYELSVLCDAEVALIIFSNRGKLYEFCSSSNMLKTLDRYQKCSYGSIEVNNKPAKELENSYREYLKLKGRYENLQRQQRNLLGEDLGPLNSKELEQLERQLDGSLKQVRSIKTQYMLDQLSDLQNKEQMLLETNRALAMKLDDMIGVRSHHMGGGWEGGEQNVTYAHHQAQSQGLYQPLECNPTLQMGYDNPVCSEQITATTQAQAQQGNGYIPGWML

SEQ ID NO: 2048 - protein, 355 aa, Triticum aestivum
  misc_feature (139)..(139): Xaa can be any naturally occurring amino acid
  misc_feature (189)..(189): Xaa can be any naturally occurring amino acid
  misc_feature (207)..(207): Xaa can be any naturally occurring amino acid
  misc_feature (211)..(211): Xaa can be any naturally occurring amino acid
  misc_feature (237)..(237): Xaa can be any naturally occurring amino acid
  misc_feature (244)..(245): Xaa can be any naturally occurring amino acid
  misc_feature (259)..(259): Xaa can be any naturally occurring amino acid
  misc_feature (273)..(273): Xaa can be any naturally occurring amino acid
SLRSTNPRTQPYSLPSSAPPIRPIGRGAYGIVCAAVSSDTGEEVAIKKIGNAFDNHIDAKRTLREIKLLRHMDHENILAIKDLIRPPRRDDFKDVYIVTELMDTDLHQIIRSNQSLTDDHCQYFLYQLLRGLKYVHSAXNVLHRDLKPSNLFLNANCDLKIADFGLARTTSETDLMTEYVVTRWYRAPXELLLNCSQYTAAIDVWSXGCIXGEINTRQPLFPGRDYIQQLKLITELXGSPDDSXXLDFFRSDNARRYMXKQLPQYPRQDFRLXFRNKSDGGVDLLERMLVFDPSRRITVDEALHHPYLASLHDINEEPTCPAPFSFDFEQPSFTEEHMKELIWRETLAFNPDPPY

SEQ ID NO: 2049 - protein, 609 aa, Streptomyces aureofaciens
MCGIVGVVDYDAPAEHRRDLLQAMTDTMACRGPDAEGLWFGRAAGLGHRRLSVIDPEHGRQPMTAEHEGRGAAITFSGEIYNFRELRAELTSHGHRFRTSCDTEVVLRGYLQWGAALVERLNGMFAFAVWDEHSEELLLVRDRMGVKPLYYWPTAAGVRFGSEPKAVLADRTLSRRVGPDGLCEVLDMVKTPEAAVFSGLVEVRPGQLVRVGRGGVRRQTYWRLEAREHTDDLPTTIGTVRDLLADTVTRQLVSDVPLGTLLSGGLDSSAVTALAARSGPVRSFSVDFRGAADAFASDAVRREADAPYVRELAGHVGADHLEVLLDSPGLSDPAVRSAVLRATDLPPAYWGDMWPSLYLFFRAVRENVTVALSGEAADELFGGYRWFRNPLALRAATFPWLTPGSARYFGGSSLFQAGLLDKLDLDGYRAARYAEALAEVPVLPGESAPERRMREIGHLNLTRFVQTLLDRKDRMSMAVGLEVRVPFCDHRLVEYVFNVPWEMKSFDGREKSLLRAAVADLLPRSVVERVKTPYPATQDPGYEGALRAELAGVLADPDAPVLPLLDRERALAAAARPTGAVSRPYDRGSLELVLWLNSWLAEYEVTLDL

SEQ ID NO: 2050 - protein, 506 aa, Acinetobacter calcoaceticus
MNDDTKKCPFSQLTTDFGAPVVDNQNSMTAGARGPLLAQDLWLNEKLANFVREVIPERRMHAKGSGAFGTFTVTHDITQYTRAKIFSEIGKKTEMFARFTTVAGERGAADAERDIRGFALKFYTEEGNWDMVGNNTPVFFLRDPRKFPDLNKAVKRDPKTNLRSATNNWDFWTLLPEALHQVTIVMSDRGIPASYRHMHGFSSHTYSFINSVNERFWVKFHFRTQQGIKNLTDAEAGELVGHDRESHQRDLFDAIERKDFPKWTLYVQVMPEQDAEKVPYHPFDLTKVWPHGDYPLIEVGEFELNRNPENFFLDVEQSAFAPSNLVPGISASPDRMLQARLFNYADAQRYRLGVNYQQIPVNAARCPVHSNHRDGQGRIDANYGGLPHYEPNSFGQWQEQPQYKEPPLKINGDADFWNYREDDNDYFSQPRALFELMTPEQQQALFDNTERAMGDALDFIKYRHIRNCYACHPAYGEGVAKALGLTVENAQAARETDPARGLPSFI

SEQ ID NO: 2051 - protein, 249 aa, Brassica napus
RAPRPPVFDQLMALEALSSPRLASPVPPLFEDSSRFHGVEHWTKGKRSKRSRSDFNQQNLTEEEYLAFCLLLLARDGNRSNRQPLPPVTAAEKSSSSSYKCSVCDKSFSSYQALGGHKASHRKNSSQTQSGGGDDQSTSATTTSAVTTGSGKSHVCTICHKSFPSGQALGGHKRCHYEGNNNNTSSVSNSEGAGSTSHVSISHRGFDLNIPPIPEFSLVNGDDEVMSPMPAKKPRFDFSENSTLSCYMF

SEQ ID NO: 2052 - protein, 573 aa, Cucurbita pepo
MGNTCVGPSISKNGFFESVSAAMWRSKTPENSVSNHTNGENVREVVASEPESPLPVQNQPPEKVTMPESVAKPEPPMEPKVRPVMKRVGSAGLRGGSVLQTKTGNFKEYYSLGKKLGQGQFGTTYMCVEKATGKEYACKSIAKRKLVNEDDVEDVRREIQIMHHLSGHPNVISIKGAYEDAVAVQVVMELCAGGELFDRIIQRGHYTERKAAELTRTIVGVLEACHALGVMHRDLKPENFLFVSKEEESLLKTIDFGLSMFFKPGEKFNDVVGSPYYVAPEVLRKRYGPEADVWSAGVIVYILLSGVPPFWAESEEGIFEEVLHGDLDFSSDPWPSISDSAKDLVRRMLVRDPRKRLTAYEVLCHPWVQVDGVAPDKPLDSAVLTRLKQFSAMNKLKKMAIKVIAESLSEEEIAGLKEMFKMIDTDNSGQITFEELKAGLKKFGANLKESEIYDLMQAADIDNNGTIDYGEFVAATLHLNKIEKEDHLLAAFSYFDKDGSGFITHDELQQACKEFGIEDLQMEEMMREVDQNNDGSIDYNEFVAMMQKGNVVNTGKKGLQSSFSIGFREALKL

SEQ ID NO: 2053 - protein, 367 aa, Carica papaya
QMGLAENQLCFNLIHEWLLKNPEASICTAQGAAEFRDIAIFQDYHGLAELREAVAKFMGKVRRNRASFDPDRIVMSGGATGAHEMIAFCLADPGDAFLVPTPYYPGFDRDLRWRTGVKLIPVVCESSNDYQITIEALEAAYETAQEADIKVKGLLITNPSNPLGTIITKDTLEALVTFTNHKNIHLVCDEIYAATVFSQPEFTSIAEIIEEDKICCNRDLIHIIYSLSKDMGFPGFRVGIVYSYNDAVVSCARKMSSFGLVSSQTQYLIASMLADDEFVDKFIVESRKRLAMRHSFFTQRLAQVGINCLKSNAGLFVWMDLRRLLKEQTFEAEMVLWRVIINEIKLNVSPGSSFRCSEPGWFRVCFA

SEQ ID NO: 2054 - protein, 953 aa, Bacteroides fragilis NCTC 9343
MKYLTFPFLLLLLPLIGSGCSSEEKETDSLILSSDSEIFFEQGIDFAATSGTRNLSFSSGRPWRISLTTDTDTRRAADWCTVSPSSGTAGDASVTISIQENADYDSRSVKLTLVAGGIEKSFTVSQKQKDALTLTASRFEVGKEGGTVQVEVKANITFEVEIPEVDRSWISQANTRGLVVTNLAFTVAPNEGVAGREGEIVIRSGSLSEKIRITQEGRCDDGLSFRPETPDADRQLTLYFKATKTSPLYGYAGDVYVHTGVVSEGTWMYVPAEWNTNVDKCKMVRVADNIWSITLAPSIRQWFGSNETPVRQLGVVIRSADGSKKGTDGDSFVSVTDHLYKPFEPAAVRYASMPGGLQEGINLIDASTVTLVLYDKDKKGGHKDFAHVVGDFNDWKLSNESNSQMNRDDAAGCWWITLTGLQPTREYAFQYYVGTRAGEILRLADAYSRKILDPDNDKYIPSSTYPDAKEYPKGAVGIASVFKIQRDSYEWKVKNFRIPDKNNLMIYELLLRDFTATGDLNGAMEKIGYLKSLGFNAVELMPVQEFDGNDSWGYNPCFHFALDKAYGTDHMYKAFIDKCHEVGMAVLFDVVYNHASGSHPFARLYWDTKNNRTAADNPWFNVKEPHPYGVFHDFNHDSPLVRAFVKRNLKFLLEEYRIDGFRFDMTKGFTQNSSTEATAGSYDASRIAILKDYNETVREVNPEAVVILEHFCDEKEESELAEEGMQLWRNLNNAYCQSAMGYPSNSDFTPLVTFGTTMPYGGWVGFMESHDEERTAFKQIAYGEGPLKSDINVRMKQLAANASFFFTAPGPKMVWQFGEMGYDVSIEEGGRTGRKPLHWEYLDNEARKGLCNTYAKLLKLRREHSELFNPGSTFSWLVKTANWTGGRFLTLAATNGKRLVVVGNFTAKPIEAITSFPVTGVWTNYLDGTKLHVTSIPTGLMIPAHECRVYINF

SEQ ID NO: 2055 - protein, 206 aa, Glycine max
  misc_feature (78)..(78): Xaa can be any naturally occurring amino acid
TSSPSKAKFSFHSVSKGYYGECGQRGGYFEMTNIPPETVDEIYKVASISLSPNVPAQIFMGVMLNPPQPGDISYDKLXRESTGILESLRRRARIMTDGFNSCRNVVCNFTEGAMYSFPQIRLPPRALEAAKQAGKVPDVYYCLKLLEATGISTVPGSGFGQKKGVFHLRTTILPAEEDMPDIMDSFKKFNDEFMEQYEDDRGYSRL

SEQ ID NO: 2056 - protein, 367 aa, Carica papaya
QMGLAENQVSFDLLEEYLEQHSEASTWGKGAPRFRENALFQDYHGLKSFRQAMASFMEQIRGGRAKFDPERIVLTAGATAANELLTFILANPGDALLVPTPYYPGFDRDLRWRTGVKIVPIHCDSSNNFQITPEALESAYNEAESMNMRVRGILITNPSNPLGITIPRHVLEQLLDFVTLKNIHLISDETYSGSVFTSPDFTSVAEILHSRNNVAECAERVHIVYSLSKDLGLPGFRVGTIYSYNDKVVTTARRMSSFTLIFSQTQHLLASMLSNQKFTENYINTNRDRLRRRYEMIVEGLRSAGIECLKGNAGLFCWMNLSSFLDEPTREAELNLWDSILHRVKLNISPGSSCHCSEPGWFRVCFA

SEQ ID NO: 2057 - protein, 487 aa, Oryza sativa
MMLKDLAEIQQQQLLAAAEENMSNLTSASGDQASVSSHPAPPPAKKKRSLPGNPDPEAEVIALSPRTLMATNRYVCEICGKGFQRDQNLQLHRRGHNLPWKLKQRNPKEVVRKKVYVCPEPGCVHHDPARALGDLTGIKKHFSRKHGEKKWKCDKCSKRYAVHSDWKAHSKVCGTREYRCDCGTLFSRRDSFITHRAFCDALAEESARAVTAAAAVAGQQQHGGGMLFSQVADVLDHQAAMAMGGHGLMQELCLKREQQQQQQQFAPSWLTAQQQQQQLEAMAGAGNPAAMYGSARLDQEFIGSSTPESGGAQQAGLSFGFSSTSSAPPHPAASSAHMSATALLQKAAQMGATLSRPSSHAHMAAAAAASTHNSSSSAATTNAPPPPPTSNVSSTCVGAGGYGLAFEASHFIAADESSRGARSDRDTGNGVAGAGNDGLTRDFLGLRAFSHGNIMSMAGFDPCMSTTSASSAAPYDHHHHSNKPWHS

SEQ ID NO: 2058 - protein, 484 aa, Xylella fastidiosa Ann-1
MRVVGLSLAISVVLLSFSLSAKNPSGVVMSPPVEEMEMPESNDVNVPLDEIRRFVSVYNAIKQAYVDPVNDRKLMHSAVRGLLSDLDPHSTYFDKEDADAFDEQTSGVYDGIGVELQEQSDNTLKVIAPIDDTPAARAGLRPGDLIVAINGKPLANVDAMKPLRGAPGSQVTLTIVRDKNGKPFDMTIKRETIHIASVRSRMLEPGYGYIRISVFQADTGNDFHKHLGQLKQQAGGRLRGLLLDLRSNPGGLLTAAVQVADALLDKGNIVSTRGRISASDTRFDATPGDLLDGLPLVVLVDAGSASASEVLVGALSDNHRARVIGSCTFGKGSVQTLLPLDNGDSVKLTTARYYTPSGRSIQARGIVPDLLLKPDGVGAADLSGSGIDRSEAGLPGHLRGTDEGVPGCTSSDPLPGDTPIMTALLELKQPGSAVQAKKAIPVKVVSDVKSATKSPLSVFGKDRAVKRVPVVSPTSEQVDGQPSK

SEQ ID NO: 2059 - protein, 392 aa, Spathiphyllum wallisii
PYEVPMTAAGALQSYKLAAKAISRLQSLPGGSMQKLTDTVVQEVFELTGYDRVMAYKFHEDDHGEVVSEITKPGLEPYLGLHYPATDIPQAARFLFMKNKVRMICDCHAKPVKVYQDEKLTFDLTFCGSTLRAPHSCHLLYMKNMNSIASLVMAVVVNEGDEEDEPLEHGQQLQQKRKRLWGLVVCHNTTPRFVPFLLRYACEFLMQVFAIHVNKEFELENQIREKNILRTQTLLCDMLLRDAPLGIISRSPNIKDLVKCDGAALLYQNKIWRLGSTPTESHIRDIASWLSEYHMDSTGLSTDSLYDAGYPGALTLGDAVCGMAAARITSKDILFWFRSHTAAEIRWGGAKHDPADEDDGRRMHPRSSFKAFLEVVKTRCLPWKDYEMEAIH

SEQ ID NO: 2060 - protein, 1356 aa, Oryza sativa (japonica cultivar-group)
MGSEAAAAARAVVVAVNGERYEAVGVDPSTTLLEFLRTRTPVRGPKLGCGEGGCGACVVVVSKYDAVADEVTEFSASSCLTLLGSLHHCAVTTSEGIGNSRDGFHAVQRRLSGFHASQCGFCTPGMCMSIYSALAKADKASGRPAPPTGFSKITAAEAEKAVSGNLCRCTGYRPIVDACKSFAADVDLEDLGLNAFWKKGVDDEHADINKLPAYSGGAAVCTFPEFLKSEIRSSMGQANGDTSAVVVTGDGWFHPKSVEEFHRLFDSNLFDERSVKIVASNTGSGVYKDQDLHDKYINISQIPELSAINRSSKGVEIGAVVSISQAIDILSDGGAVFRKIADHLSKVASPFVRNTATIGGNIIMAQRLSFSSDIATVLLAAGSTVTIQVAAKRMCITLEEFLKQPPCDSRTLLVSISIPDWGSDDGITFQTFRAAPRPLGNAVSYVNSAFLARSSVDGSSGSHLIEDVCLAFGPFGAKHAIRAREVEKFLKGKLVSAPVILEAVRLLKGVVSPAEGTTHPEYRVSLAVSYLFKFLSSLTNGLDEPENANVPNGSFTNGTANGIVDSSPEKHSNVDSSYLPIKSRQEMVFSDEYRPIGKPIEKTGAELQASGEAVYVDDISAPKDCLYGAFIYSTHPHAHIKGVNFRSSLASQKVITVITLKDIPTNGKNIGSCSPMLGDEALFVDPVSEFAGQNIGVVIAETQKYAYMAAKQSVIEYSTENLQPPILTVEDAVQHNSYFQVPPFLAPTPIGEFNQAMSEADHKIIDGEVKLESQYYFYMETQTALAIPDEDNCITLYVSAQLPEITQNTVARCLGIPYHNVRIITRRVGGGFGGKAMKAIHVATACAVAAFKLRRPVRMYLDRKTDMIMAGGRHPMKVKYSVGFKSDGKITGLHVDLRINCGISPDCSPALPVAIVGALKKYNWGALSFDIKLCKTNVSSKSAMRAPGDAQGSFIAEAIVEHIASTLSVDTNAIRRKNLHDFESLKVFYGNSAGDPSTYSLVTIFDKLASSPEYQQRAAVVEHFNAGSRWKKRGISCVPITYDVRLRPSPGKVSIMNDGSIAVEVGGVEIGQGLWTKVKQMTAFALGQLCDDGGEGLLDKVRVIQADTLSMIQGGFTGGSTTSETSCEAVRKSCAALVERLKPIKEKAGTLPWKSLIAQASMASVKLTEHAYWTPDPTFTSYLNYGAAISEVEVDVLTGETTILRSDLVYDCGQSLNPAVDLGQVEGAFVQGIGFFTNEEYTTNSDGLVINDGTWTYKIPTVDTIPKQFNVELINSARDHKRVLSSKASGEPPLLLASSVHCAMREAIRAARKEFAGAGGSSLTFQMDVPATMPIVKELCGLDVVERDLESFAAKA

SEQ ID NO: 2061 - protein, 423 aa, Debaryomyces hansenii CBS767
MTGIQISSLKNTDLFKSLKVGQNTLSNKVVYPPTTRMRALEDHTPSDLELEYYGSRSKYPGSLLIAEATFVSEQAGLNGSVPSTWNSEPAGYVPGIWNEKHVKGWKKITDRVHENDSFISSQFWFLGRVGDPQLLKDHGLDYVAPSAIYPDQDFRNKAEAAENPLRALTEEEIHELIYETYTNAAKNAIAAGFDYIELHAAHGYLLDQFLNPATNQRTDKYGGSIENRARLVLELVDHLTTLVGASKLAIRISPWAKFQGMDAEKDSTHPITTLSYVLHELQKRADNGKGLAYVSVVEPRAQGGDDVEKSQQVGDNTFVGQIWKGVILKSGNYTYDAPNFKTLLNDISDNRTMVGFARYYTSNPDLVKRLYEGWDLTPYDRLTFYGSSNWGYNTFNSYNENREFTKDVESDILPEAIEEIDVK

SEQ ID NO: 2062 - protein, 465 aa, Spathiphyllum wallisii
SGKPFYAIMHRIDMGLIIDLEPVNPADVPVTAAGALKSYKLAAKAISRLQSLPSGNISLLCDVLVREVRELTGYGRVMAYKFHEDEHGEVVSECRRPDLEPYLGLHYPATDIPQASRFLFMKNKVRMICDCSAQPIKVIQDKRLAQPLSLCGSTLRAPHGCHAQYMANMGSIGSLVMSVTINEDEDDDSSGEQQQKGRKLWGLVVCHHTSPRFVPFPLRYACEFLMQVFAIQLNKEVELAAQTREKHILRTQTLLCDMLLRDTPVGIFTQSPNVMDLVKCDGAALYYQNQFWLLRVTPTEAQIRDIAAWLIDCHNSTTGLSTDSLSEAGYPSASTLGDAVCGMAAIKITSRDLIFWFRSHTAKEIKWGGAKHDPVDRDDDGRKMHPRSSFKAFLEVVKRRSLPWEDVEMDAIHSLQLILRSSLQDENVRDNSKGIVNVISDDAKKIQGVDELRTVANEMVRLMET

SEQ ID NO: 2063 - protein, 1355 aa, Oryza sativa (japonica cultivar-group)
MGSEAAAARPVVVTVNGERYEAVGVDPSTTLLEFLRTRTPVRGPKLGCGEGGCGACVVVVSKYDAVADEVTEFSASSCLTLLGSLHHCAVTTSEGIGNSRDGFHAVQRRLSGFHASQCGFCTPGMCMSIYSALAKADRCSSRPSPPPGFSKLTAAEAEKAVSGNLCRCTGYRPIVDACKSFAADVDLEDLGLNAFWKKGADDERADVGKLPAYSGGAAVCTFPEFLKSEIRSSMGQANGGAPAVAVTGDGWFHPKSVEEFHRLFDSNLFDERSVKIVASNTGSGVYKDQDLHDKYINISQILELSAINRSSKGVEIGAVVSISKAIEILSDGGAVFRKIADHLSKVASSFVQNTATIGGNIIMAQRLSFPSDIATVLLAAGSTVTIQVAAKRMCITLEEFLKQPPCDSRTLLVSISIPDWGSDDGITFESFRAAPRPLGNAVSYVNSAFLARSSVDGSSGSHLIEDVCLAFGAFGAEHAIRAREVEEFLKGKLVSAPVILEAVRLLKGVVSPAEGTTHPEYRVSLAVSYLFRFLTSLANGLDEPENANVPNGSCTNGTANGSANSSPEKHSNVDSSDLPIKSRQEMVFSDEYKPVGKPIEKTGAELQASGEAVYVDDIPAPKDCLYGAFIYSTHPHAHIKDINFRSSLASQKVITVITAKDIPTGGENIGSCFPMLGDEALFVHPVSEFAGQNIGVVIAETQKYAYMAAKQAVIEYSTENLQPPILTIEDAVQHNSYFPVPPFLAPTPIGDFNQAMSEADHKIIDGEVKLESQYYFYMETQTALAIPDEDNCITLYVSAQLPEITQNTVARCLGIPYHNVRIITRRVGGGFGGKAMKAIHVAAACAVAAFKLRRPVRMYLDRKTDMIMAGGRHPMKVKYSVGFKSDGKITGLHFDLGMNGGISPDCSPVLPVAIVGALKKYNWGALSFDIKVCKTNVSSKSAMRAPGDAQGSFIAEAIVEHIASTLSVDTNAIRRKNLHDFESLKVFYGNSAGDPSTYSLVTIFDKLASSPEYQQRAAMVEHFNAGNRWKKRGISCVPITYDVRLRPTPGKVSIMNDGSIAVEVGGVEIGQGLWTKVKQMTAFALGQLCDDGGEGLIDKVRVIQADTLSMIQGGFTGGSTTSETSCEAVRKSCAALVERLKPIKEKAGTPPWKSLIAQASMASVKLTEHAYWTPDPTFTSYLNYGAAISEVEVDVLTGETTILRSDLVYDCGQSLNPAVDLGQVEGAFVQGIGFFTNEEYTTNSDGLVINDGTWTYKIPTVDTIPKQFNVELINSARDHKRVLSSKASGEPPLLLASSVHCAMREAIRAARKEFAGAGGSPLTFQMDVPATMPIVKELCGLDVVERYLESFAAKA

SEQ ID NO: 2064 - protein, 467 aa, Tacca chantieri
SGKPFYAIIHRVTACLIVDFEPVKPSELPMTAAGALQSYKLAAKAIARLQSLPGGSMERLCDTVIEEVFELTGYDRVMVYKFHEDDHGEVFREITKPGLEPYQGLHYPATDIPQAARFLFMKNKVRMICDCRAKPVKIYQDDKLPLDLTFCGSTLRAPHSCHLQYMENMNSIASLVMAEVVNEGEEDDENLEPGQTQQQKKKRLWGLVVCHHESPRFVPFPLRYACEFLMQVFAIHVNKEFELENQIREKNILRTQTLLCDMLLRDTTPVGIMNQSPNIMDLVKCDGAALLYQNKVWRLGLTPTEAQIRDIAYWLAEYHMDSTGLSTDSLHDAGYPGALGLADVVCGMAAARITSKDMLFWFRSHIAAEIRWGGAKHDPADKDDGRRMHPRTSFKAFLEAVKMRSLPWKDYEMDAIHSLQLILRGTFSDSRNVNSRASLDARVNDLKLEGMVELQAVTNEMVRLMET

SEQ ID NO: 2065 - protein, 465 aa, Tetracentron sinense
SGKPFYAIVHRVTGSLIIDFEPVKPYEVPMTAAGALQSYKLAAKAIARLQSLPSGSIERLCDTVVQEVFELTGYDRAMVYKFHEDDHGEVVSEITKPGLEPYLGLHYPATDIPQAARFLFMKNKVRMICDCRAKHVKVLQDEKLPFDLTLCGSTLRAPHSCHLQYMENMNSIASLVMAVVVNEEDEEGESSSSEQSQKRKKLWGLLVCHHTTPRFVPFPLRYACEFLAQVFAIHVNKELELENQILEKNILRTQTLLCDMLMRDAPLGIVSQSPNIMDLVKCDGAVLLYKNRIWQLGSTPSEFHIHDITSWLSEYHMDSTGLSTDSLYDAGFPGALALGDGVCGMAAVRITSKDMLFWFRSHTAAEVRWGGAKHEPGEKDDGRKMHPRSSFKAFLEVVKTRSLPWKDYEMDAIHSLQLILRNAFKDVENEGLNTSTIRTQLNDLSIEGTEELEAVTNEMVRLMET

SEQ ID NO: 2066 - protein, 682 aa, Cryptococcus neoformans var. neoformans JEC21
MTAVSLSDGTAVLKTDPWLEPFSGALRERYAAYQKQRTIIEEHEGGLAEFSKGYKSMGFQIDKNGGVRYREWASNATEARLIGEFNNWSHTANPMTKSPFGVWECYVPPVSPGVCAIPHDSMVKISMTLPGGESIDRIPTWITRVTQDLNISPIYDGRFWNPPKEQQYQFKHGHSTRPVEGLKIYEAHVGISSPNMRVTTYKEFEVDVLPKIKQLGYNCIQMMAIMEHAYYASFGYQVTNFFAASSRFGTPEELKSLVDKAHELGLTVLLDVVHSHASKNILDGINMYDGSDHLYFHEGGRGRHDQWDSRLFNYGQHEVLRFLLSNLRFWMDIYMFDGFRFDGVTSMMYKHHGIGSGFSGGYHEYFGDSVDLEAMVYLMLANAMLHETYPHVVTIAEDVSGMPTLCRPVAEGGVGFDYRLSMAIPDMWIKLLKEYTDDQWEMGQIVHNLTNRRHLEKSVAYAESHDQALVGDKTLAFWLMDKEMYDFMSDLSPLTPIIDRGLALHKMIRFIVHTLGGEAYLNFEGNEFGHPEWMDFPREGNGNSFAHARRQFNLVDDKLLRYKYLYEFDVAMNWLEDKYKWLNSPQAYVSLKHEGDKMIVFERAGLLFIFNFHPTQSFTDYRVGVDTAGEYKVILTSDETRFGGHNRIDMGGRYFTTPMEWNGRKNWLQVYSPSRTVLVLGL

SEQ ID NO: 2067 - protein, 390 aa, Tetracentron sinense
DLEPVNPADVPVTAAGALKSYKLAAKAISRLQSLPSGNLSLLRDVLVQEVSDLTGYDRVMVYKFHEDEHGEVVAECLISDLEPYLGLHYPATDIPQASRFLFMKNKIRMICDCLAPPVKVIQDKRLVQPLSLCGSTLRAPHGCHAQYMENMGSIASLVMSVTINDDDDEIESDKRGRKLWGLVVCHHTSPRFVPFPLRYACEFLIQVFGIQLNKEVELVAQLREKQTLRTQTVLCDMLLRDAPVGIVTQSPNVMELVKCDGAALYYRSTFWLLGVTPTEAQIRDIAEWLLEYHNGSTGLSTDSFMEAGYPGAAVLGDAVCGMSAVKITSKDFLFWFRSHTAKEIKWGGAKHDPFDKDDGKKMHPRSSFKAFLEVVKWRSLPWEDMEMDAI

SEQ ID NO: 2068 - protein, 305 aa, Arabidopsis thaliana
YSFINVYTHLFTSTTLPSIFHFLQLLQISYFPENHFPKKNKTFPFVLLPPTAITAYQSELGGDSSPLRKSGRGKIEIKRIENTTNRQVTFCKRRNGLLKKAYELSVLCDAEVALIVFSSRGRLYEYSNNSVKGTIERYKKAISDNSNTGSVAEINAQYYQQESAKLRQQIISIQNSNRQLMGETIGSMSPKELRNLEGRLERSITRIRSKKNELLFSEIDYMQKREVDLHNDNQILRAKIAENERNNPSISLMPGGSNYEQLMPPPQTQSQPFDSRNYFQVAALQPNNHHYSSAGRQDQTALQLV

SEQ ID NO: 2069 - protein, 221 aa, Ginkgo biloba
MGRGKIEIKRIENTTNRQVTFCKRRNGLLKKAYELSVLCDAEVALIVFSSRGRLYEFANNSVKRTIDRYKKTCADNSQGGAISECNSQYWQQEAGKLRQQIDILQNANRHLMGDALTSLSVKELKQLEIRLERGISRVRSKKNEMLLEEIEIMQRREHILLAENQFLRTKIAECESSQNANMLPGPEFDALPGFDSRHFLHASIMDAHHYAQQDQTALQLG

SEQ ID NO: 2070 - protein, 372 aa, Malus x domestica
  misc_feature (21)..(21): Xaa can be any naturally occurring amino acid
  misc_feature (23)..(23): Xaa can be any naturally occurring amino acid
RIRPLVGRYVPPEVVALRVPXLXLSNFQINDWPDVSAKSYAIMVLILPTDGTRKWREHELELVDVVADQVAVALSHAAILEESMRARKQLTEQNDALDLAWREAEMAIHARDDFLAVMNHEMRTPMHAIIALSSLLLETELTPEERLMIETALKSSNLLETLVNDVLDLSRLEDDSLELDTERFNLHGVFREVMNLVQPVASVKKLSMTLIQSPDLPVYAVGDENRLLQTILNVAGNAVKFTKQGYISITASVAKSESSRDWQPPEFYPASTDGYFYLRVQVKDSGCGVLPEDIPHLFTKFSQPRNGSNQININNGAGLGLAICKRFVNTMGGHIWIESEGIDRGSIVAFIVQLGICDNHSDTTTHQVQIAT

SEQ ID NO: 2071 - protein, 354 aa, Hordeum vulgare subsp. vulgare
RRSRPWSPELWMQRKQDILQGSIKSRSRAHDIITKMLASLGDPYTRFLSSSDFSKMSKYDMTGIGLNIREIPDDNGSLRLVVLGLILDGPANSAGVRQGDELLSVNGSDVRGKSAFDVSSMLQGPKETFVTIKVKHGNCGPVESMKVQRQMAARTPIFYRLEKRDNENSSVGYIHIKEFNAVAKKDLVSALKRLQNSGASYFVLDLRDNLGGLVQAGIEIAKLFLNKGDTVIYTTAGDRQVQNTIVADSGPLVTTPVMVLVNNRTASASEIVASALHDNCKSCVSSARRTFGKGLIQSVFELHDGSGIVVTVGKYVTPNHKDINGDGIKPDYRRLPDLNEARDYLLRCQSKKLS

SEQ ID NO: 2072 - protein, 551 aa, Oryza sativa
MLTRTITYCMVSVTHRIHHPSIMNKLFSTAWILRHVLRWFKVKMDGNAKGGGHSEALKNYNLGRTLGIGSFGKVKIAEHKLTGHRVAIKILNRRQMRNMEMEEKAKREIKILRLFIHPHIIRLYEVIYTPTDIYVVMEYCKFGELFDYIVEKGRLQEDEARRIFQQIISGVEYCHRNMVVHRDLKPENLLLDSKYNVKLADFGLSNVMHDGHFLKTSCGSPNYAAPEVISGKLYAGPEVDVWSCGVILYALLCGTLPFDDENIPNLFKKIKGGIYTLPSHLSALARDLIPRMLVVDPMKRITIREIREHQWFQIRLPRYLAVPPPDTAQQAKMIDEDTLQDVVNLGYGKDHVCESLRNRLQNEATVAYYLLLDNRFRATSGYLGADYQESLERNFNRFASSESASSNTRHYLPGSSDPHASGLRPHYPVERKWALGLQSRAQPREIMIEVLKALQDLNVSWKKNGQYNMKCRWSVGTQATDMLDVNNSFVDDSIIMDNGDVNGRLPAVIKFEIQLYKTRDEKYLLDMQRVTGPQLLFLDFCADFLTKLRVL

SEQ ID NO: 2073 - protein, 135 aa, Zea mays
MRRHRIVSLLAALLVLLALAAVSSTRSAQEESVADNAGMLAGGIKDVPANENDLQLQELARFAVNEHNKKANALLGFEKLVKAKTQVVAGTMYYLTIEAKDGEVKKLYEAKVWEKPWENFKQLQEFKPVEEGASA

SEQ ID NO: 2074 - protein, 445 aa, Desulfotalea psychrophila LSv54
MPLRKKQWGEDMRTDIVHIGAGELTYEIRNIVEVGQRLQRLGVEVNWENIGDPIAKGEEVPSWMKALVAEAVQDDASYGYSPTKGVLATRRFIAAETNKKGAVQISAEDIIFFNGLGDAISKIFGFLKRTARVLVPTPSYTTHSSAEAAHSGDKPLTYKLDPHNDWYPDIADIERRVKYNPMVAGILIINPDNPTGAVYPVEILRAIVDIARRYDLFLICDEVYQNIIYNGKKTASLAEVIGEVPGFAMRGASKEMPWPGARCGWIEVYNADRDPMFQRYIDSIFNAKMLEVCSTTLPQIVYPRVVTHAEYPGYLQSRIARYQRFSKIAYDCLKDIEGILVNQANGAFYMSVCFEDGVLNSGQSLAIARDEVRTMVEDLVFSADTALDKRFVYYLLGATGVCVVPLTSFASDINGFRVTLLERDEAEFIRIFTVIAAAIRTYLKS

SEQ ID NO: 2075 - protein, 490 aa, Hordeum vulgare
MVVTVAATGPDTAETLHSTTFASRYVRDQLPRYRMPENSIPKEAAYQIISDELMLDGNPRLNLASFVTTWMEPECGKLIMDSVNKNYVDMDEYPVTTELQDRCVNMIAHLFNAPIGEDETAIGVSTVGSSEAIMLAGLAFKRKWANKMKEQGKPCDKPNIVTGANVQVCWEKFARYFEVELKEVKLTEGYYVMDPKKAVEMVDENTICVAAILGSTLTGEYEDVKLLNDLLVEKNKETGWNVPIHVDAASGGFIAPFLQPELEWDFRLPLVKSINVSGHKYGLVYPGVGWVIWRSKDDLPEELIFHINYLGADQPTFTLNFSKGQQIIAQYYQLIRLGFEGYKHIMENCKLNAAVLKEGIDATGRFDVLSKADGVPLVAIRLKDSTNFSVFDISENLRRFGWIVPAYTMPADAEHVAVLRIVIREDFNRSLAQRLLADINKIIGELDAHAVHAIKLSTAAAGGDGASKSAVDAATEAFKDLAGKKKAGVC

SEQ ID NO: 2076 - protein, 119 aa, Glycine max
  misc_feature (96)..(96): Xaa can be any naturally occurring amino acid
MAASPSSSAAANIMLAIFEKKTNSVDLYRPLRNYVAFHYSEREAQNLEDDLQTLKQLRSDVERHSDPSLPTRRDLLQTYYKSLCLVETRFPISFDXDHVNALPLSGSTAFKAQQNALQQ

SEQ ID NO: 2077 - protein, 528 aa, Aspergillus nidulans FGSC A4
MVTTAQSQCRHATEVRPPEACLWPQTRFFFRNSSTSTGRSCWSAWFILANSSGGSGAFGHFEVTKDVSDLTKAHFLRSPGIKTPVFIRFSTVTLGREYPDLARNPRGFAVKFYTGEGNYDIVGLNFPVFFCRDPIQGPDVIRSQYRNPQNFLLDHNSLFDLLANTPEGNHAGMMFFSDHGTPAGWQNIHGYGCHTFKWVNAEGKFVYIKYHFLADHGQKQFNADEALRYGGEDPDYSKRELWRTIENGKELSWTAYVQVMKPEDADPEKLGFDPFDVTKVWPKKQFPLQEFGKLTLNKNPENFHRDVEQAAFSPGSMVPGIEDSPDPLLQFRMFFYRDAQYHRIGVNLHQVPVNCPFMASSYSSLNFDGQLRVDANHAMNPQYAPNSFVHKFRTDTAEAPYQLADGTVSRKSHFFHEGKASEYDQPRELYERVMDEKARQHLHTNTARLLKLVEYPKIQAKYLGQLLRISEKYARGVYDLLPEKKFGFDEVQSFAKGAEVAGKEAKFRPNMPTDKLLGLCPAMAVYGP

SEQ ID NO: 2078 - protein, 637 aa, Adiantum capillus-veneris
MACTIVWFRRDLRVEDNPALVAAVRAGTVVPLFIWTPEEEGQFLPGRVSRWWLKQSLIQLHQSLTSLGSPLIMRRAQSAISVLSQIIKQTGATQVFFNHLYDPVSLVRDHKVKQELLQAGVTVTTFNADLLYEPWEINDEQGRPFTTFAGFWSLCMDMAIEPEAPLLPPKRITKWPGIAATSPIEDLELENESEKGSNDLLARAWAPGWANADRALEAFVSGPLMEYASNRQKVDSATTSLLSPHLHYGELSVRKVFHSVRMKQVLWVKEGNADAEESVNLFLRSIGLREYSRYLCFNFPFTHERSLLSNLKFFPWRNDEGYFKVWRQGRTGYPLVDAGMRELWATGWLHNRIRVIVSSFFVKFLQLPWRWGMKYFWDTLLDADLESDVLGWQYISGSLPDGHELYRIDNPQLEGYRYDPCGEYVRRWLPELSRLPSEWIHHPWDAPPNVLRAAGIELGSNYPRPIVEVAAARERLEQALAEMMEKEAAATRAAFEGSLQGVGLEPSQADNMDIDRGPSDAPGRNLSDRSPHDQMVPSMFMETGRPAADGVGSHASERGANVQEAHDNGSAPVASREGGSCRRNWQPFKVGTVTPTLLRSHHLRTGITLSLPLQVYQLGRAIGHLIQLCIRMTLRYL

SEQ ID NO: 2079 - protein, 679 aa, Adiantum capillus-veneris
MAAHTIVAHTIVWFRRDLRIEDNPALVAAVRAGPVLPVFIWSPEEEGQFLPGRVSRWWLKQSLVHLNESLTILGAPLVMRRASNVLAALLEIKKATGATQVFYNHLYDPVSLVRDHRVKQGLSQAGIIVNSFNADLLYEPWEVNDDNGQAFTTFSGFWAKCMDMPAEPEAQILPPKRILKFPGPSLSCSIEDLDLEDELEKGSNALLARAWQPGWANADRALESFINGSLMEYAANRQKVDSATTSLLSPHLHYGEVSVRKIFHNVRMKQVLWVKEGRVEAEESVNLFLRSIGFREYSRYLSFNFPFTHERSLLYNLKFFPWRVDESYFKAWRQGRTGYPLVDAGMRELWATGWLHNQIRVIVSSFCVKFLQLPWRWGMKYFWDTLLDADLESDVLGWQYISGSLPDGHELDRIDNPQIEGYKFDPYGEYVRRWLPELSRLPTEWIHHPWDAPPSVLRAAGIELGSNYPRPIVEIAAARERLEQALAEMWANEAADKATLANGLEEGLGDTVEVQGMRNGFPANMDIDRGPGEKALLVRSPHDQMVPNVGVRRSTTGAVQGGAANQGSALQAVLREVPANGHVQAVQAQSQRMAAPPMAMQNGYDDTHSTAESTSARHWSLAIGLPVWSQYVPVCLHMRQDDSQVPLVPDLHHGVMSRRLPHAPPMVNFEATKTSSLSV

SEQ ID NO: 2080 - protein, 605 aa, Caulobacter crescentus CB15
MAPSKGEDSRLVRIALTEAYVPIARGYLLAAAIYNSLIAIAHPFYEKGLAFVMLTSLTGATAIYAFSAWFLLRRRRIVGGHLEWLVLGMNALFLGHVTAFHLFHLEPQKLIYFVLLALVFATSAPSRRVANVSVGAALVSLVFIARGAPGDMVNQYLFVGLAGAFAAVGMSTLMRGVVGREVRARLASQALNDELERELTENRRLRTEAQALALAAEKANRAKSEFLATMSHEIRTPLNGVLGMAQIMASGKLQVDQRRRLETITASGQSLLGLINTILDVSRIEDGKMEIVEGPFDLTAQMHTLSLLYGGLARDKHLDFSLEVSPTVAGCRQGDGERLRQVLSNLISNAIKFTDSGAVRVTLDGDDQGLVARVLDTGVGIPEAQRERLFTKFAQLDSSSTRRVGGSGLGLAICKSLAELMGGEIRFLAPAEGGACFELTLPMARIDPPPAVAAPPAPALAPASADEDAAPRILVVDDNQTNRAVLLTLLGHLGADAHFAVDGRDAVAMWEQDRWDVILMDIHMPEMDGLQACQVIREGERQGGRLRTPVVAVTASVLPHERSLYVEAGMDAVVPKPVEVPKLLEVLANVLADADEAAVETRGAA

SEQ ID NO: 2081 - protein, 718 aa, Adiantum capillus-veneris
MAKSCTVVWFRRDLRLEDNPALAAAARAGAVVPVFIWSPDEEGQFRPGRVSRWWLKQSLIQLDISLRSLGVSLVMINANDTVSALLELVKTTGASQVVYNHLYDPVSLVRDHRVKQSLVQNGIQVQSFNGDLLYEPWEVLDDHGKPFTYFESYWAKCLTMPFEPESPLLPPRRLTAAPAGIVHSLTPDELGLEDEADKSSNALLARAWAPGWSNADKALEAFLAGPFLNYSRNRHEIDGPTTSLLSPHLHFGEVSVRKVFHSVRRLQVLWAKDGSMLGEESINYFMRSIGFREYSRYLCFNFPFTHERSLLSNLKSFPWRVDEGLFKAWRQGRTGYPLVDAGMRELWATGWLHNRVRVIVSSFCVKFLQLPWRWGMKYFWDTLLDADLESDILGWQYISGSLPDGHELDRMDNPQTEGYKHDPLGEYVRRWLPELVRLPTEWIHHPWDAPPGVLRAAGVELGSNYPRPVVEVAAARERLRDAVTHMWEQEAALKAAGDKGIEEASVGDSIAKVNCQPEVAAQPCKIPKASVSQATNGDMEVSSAGSSRRDQMVPTFAKELKTQADALCGDYGSIALPLPSQQNLPCPSTNFSAIRGVSKLSPGNRGDMVDTTEALRNTHSEPLPPVSDTNPMTESSSSSSPREQISSIKDDPPMIWVPAIAHQRPSSDFGCVPYAGDAEQLRKHLLILQNARTDDKVEDGVQLNGSQWARGSKRKAKS

SEQ ID NO: 2082 - protein, 610 aa, Pseudomonas aeruginosa UCBPP-PA14
MCGITGWTDWSRDLGEQRSILERMTRTLAPRGPDAEGLWLSRHALLGHRRLAIIDLENGAQPMLAEAGGRVALTYSGEVYNFRELRAELETLGQVFRTRSDTEVVLRAYLQWGEASFARLRGIYGFALWDEREQSLWLVRDRFGVKPLYYYPTAGGVLFASEPKAIFANPEANPVLDASGIAELFALTTAPTPGHGLYKGLRQVRPGQALRFDRNGVRELVYWALRAERHEEGAEDSAERAGQLLREAVAEQLVADVPLGSLLSGGLDSSAISAFAVAALDGDARRLPTFSVDFPGEGRGFVPTPWQSSWDEPYAQLAANFLGTPHRTVLVAPEEVLEQDEAVLQARDLPGWGELDASLYLLFRQVREHTTVALSGESADEVFGGYPFFHDPSALAHDGFPWLAGKSGPWQLLRREVAERVAAPEYIRARYREALAEVPRLDGEDAAQRRQREVAYLALSRWLPAMLERKDRMSMAVGLEVRVPFCDHRLVEYVWNLPWALKSVAGESKSLLRRALRGHLPQAILERRKSGFPANPDPRYLALLRERVGRLLADGRSPLFELVDAGRVRQALEQGTPLPSPRASASPTAGLAYLLNLDRWLTRHGVDISL

SEQ ID NO: 2083 - protein, 481 aa, Bradyrhizobium sp. BTAi1
MSFSPIVVWFRESLRLSDHPALHAAATSGAPVICCYVYDTESAALRPLGGASRWWLAQSLRALQDELDALGVKLVIRRGPSAKAISELAREASTSAVYWNDVAQTGPRAVAAEVEAALDAIGVKSRVFADDLLIDPAELRGKDGRGPRVFTPFWKRVLALGDPPKPLPVPVRLSSPSGVASLTVDKLALEPTSPDWAGGLRTTWRAGERAAQARLAKFLETTVRGYAADRDRPDIEATSRLSPHLRFGEISPRQIWHAARFAAEQQPAFARGIDKFLSELGWREFSRHLLFNNPDLATRNLQPSFDAFPWSQDAAALRAWQRGQTGYPIVDAGMRELWHTGSMHNRVRMVAASLLVKHLLIDWRLGEQWFWDTLVDADPGSNPASWQWVAGSGADAAPYFRVFNPVLQGEKFDSSGTYVRRWVPELARLPAALIHQPWAAKPLELAEAGVVLGRSYPAPVVDHRHGRERALAAYASLRTSD

SEQ ID NO: 2084 - protein, 276 aa, Bacillus subtilis subsp. subtilis str. 168
MPTSLKDTVKLHNGVEMPWFGLGVFKVENGNEATESVKAAIKNGYRSIDTAAIYKNEEGVGIGIKESGVAREELFITSKVWNEDQGYETTLAAFEKSLERLQLDYLDLYLIHWPGKDKYKDTWRALEKLYKDGKIRAIGVSNFQVHHLEELLKDAEIKPMVNQVEFHPRLTQKELRDYCKGQGIQLEAWSPLMQGQLLDNEVLTQIAEKHNKSVAQVILRWDLQHGVVTIPKSIKEHRIIENADIFDFELSQEDMDKIDALNKDERVGPNPDELLF

SEQ ID NO: 2085 - protein, 482 aa, Vibrio fischeri ES114
MSKKLTTAAGCPVAHNQNVQTAGKRGPQLLQDVWFLEKLAHFDREVIPERRMHAKGSGAYGTFTVTHDITKYTKAKLFSEIGKQTELFARFTTVAGERGAADAERDIRGFALKFYTEEGNWDLVGNNTPVFFLRDPLKFPDLNHAVKRDPRTNMRSAKNNWDFWTSLPEALHQVTIVMSDRGIPATYRHMHGFGSHTFSFINSDNERFWVKFHFKSQQGIKNLSDAEAAQVIGQDRESHQRDLLESIDNQDFPKWTLKVQIMPEADAATVPYNPFDLTKVWPHKDYPLIEVGEFELNRNPQNFFAEVEQSAFNPANVVPGISFSPDKMLQGRLFAYGDAQRYRLGVNHQHIPVNAPRCPVHSYHRDGAMRVDGNFGSTLGYEPNNEGQWAEQPDFAEPALNLDGAAAHWDHREDEDYFSQPGDLFRLMTAEQQAILFDNTARNLNGVPKEIQLRHLRHCYKADPAYGEGIGKLLDIDVSEFN

SEQ ID NO: 2086 - protein, 465 aa, Xanthorhiza simplicissima
SGKPFYAIVHRVTGSLIIDFEPVKPYEVPMTAAGALQSYKLAAKAIARLQSLPSGSIERLCDTVVQEVFELTGYDRAMVYKFHEDDHGEVVSEITKPGLEPYLGLHYPATDIPQAARFLFMKNKVRMICDCRAKHVKVLQDEKLPFDLTLCGSTLRAPHSCHLQYMENMNSIASLVMAVVVNEGDEEGESSSSEQSQKRKKLWGLLVCHHTTPRFVPFPLRYACEFLAQVFAIHVNKELELENQILEKNILRTQTLLCDMLMRDAPLGIVSQSPNIMDLVKCDGAVLLYKNRIWQLGSTPSEFHIHDITSWLSEYHMDSTGLSTDSLYDAGFPGALALGDGVCGMAAVRITSKDMLFWFRSHTAAEVRWGGAKHEPGEKDDGRKMHPRSSFKAFLEVVKTRSLPWKDYEMDAIHSLQLILRNAFKDVENEGLNTSTIRTQLNDLSIEGTEELEAVTNEMVRLMET

SEQ ID NO: 2087 - protein, 391 aa, Xanthorhiza simplicissima
DLEPVNPADVPVTAAGAMKSYKLAAKAISRLQSLPSGNITVLCDVLVQEVSDLTGYDRVMVYKFHEDDHGEVVAECRVPELEPYLGLHYPATDIPQASRFLFMKNKVRMICDCSAAPVKVIQDNKLAQPLSLGGSALRAPHGCHALYMANMGSVASLVMSVTINEDDDQMETDQQKGRKLWGLLVCHHTRPRFVPYPLRYACEFLIQVFGMQINKEVELATQFREKHILQTQTVLCDMLLRDAPIGIVTQSPNIMDLVKCNGGALYYRSRFWLLGVTPTEAQIKDIAEWLLQYHNASTGLSTDSLMEAGFPGASVLGNEVCGMAAIKITTKDFLFWFRSHTAKEVKWGGAKHNPTEKDDGWKMHPRSSFKAFLEVVKHRSLPWEDVEMDAI

SEQ ID NO: 2088 - protein, 463 aa, Zea mays
MARSGREADPGEEERKLVLGKYELGRLLGQGTFAKVYYARDLSAGAGTGHSCSVAIKVIDKARLRRTEGMVEQLRREISIMRMVRHPNVVGIREVLASRSRVFVVMEYARGGELFAKVARGRLPEDHARRYFQQLVAAVGFCHRRGVAHRDLKPENLLLDEAGRLKVTDFGLAALPEQLRHDGLLHTQCGTPAYVAPEVLRKRGYDGARADLWSCGVVLYVLLCGFLPFQHDNYVKLYQKIFKADYQVPPWVSGDARRLIARLLVVDPAKRASIAEIMCTPWFRKGFVPPVLSPPVTPKKQQLDEGAALFDNDDDDDNSNHSGATSPRSCNAFQLISSMSSGFDLSGLFESEQKTATVFTARAPAATVVEKLESVARALGFEVTRGKGWKVRMEAKAEGTNGRLAATAEVLEVAVDVAVVEFVHDAGDALDFNKFCAVDVRPGLTEIVWAWQGDSPAAAVGTA

SEQ ID NO: 2089 - protein, 753 aa, Escherichia coli
MSQHNEKNPHQHQSPLHDSSEAKPGMDSLAPEDGSHRPAAEPTPPGAQPTAPGSLKAPDTRNEKLNSLEDVRKGSENYALTTNQGVRIADDQNSLRAGSRGPTLLEDFILREKITHFDHERIPERIVHARGSAAHGYFQPYKSLSDITKADFLSDPNKITPVFVRFSTCQGGAGSADTVRDIRGFATKFYTEEGIFDLVGNNTPIFFIQDAHKFPDFVHAVKPEPHWAIPQGQSAHDTFWDYVSLQPETLHNVMWAMSDRGIPRSYRTMEGFGIHTFRLINAEGKATFVRFHWKPLAGKASLVWDEAQKLTGRDPDFHRRELWEAIEAGDFPEYELGFQLIPEEDEFKFDFDLLDPTKLIPEELVPVQRVGKMVLNRNPDNFFAENEQAAFHPGHIVPGLDFTNDPLLQGRLFSYTDTQISRLGGPNFHEIPINRPTCPYHNFQRDGMHRMGIDTNPANYEPNSINDNWPRETPPGPKRGGFESYQERVEGNKVRERSPSFGEYYSHPRLFWLSQTPFEQRHIVDGFSFELSKVVRPYIRERVVDQLAHIDLTLAQAVAKNLGIELTDDQLNITPPPDVNGLKKDPSLSLYAIPDGDVKGRVVAILLNDEVRSADLLAILKALKAKGVHAKLLYSRMGEVTADDGTVLPIAATFAGAPSLTVDAVIVPCGNIADIADNGDANYYLMEAYKHLKPIALAGDARKFKATIKIADQGEEGIVEADSADGSFMDELLTLMAAHRVWSRIPKIDKIPA

SEQ ID NO: 2090 - protein, 259 aa, Brassica oleracea var. gemmifera
LDRTIQFYTECFGLKVLRKRDVPEEKYSNAFLGFGPETSNFVVELTYNYGVSSYDIGTGFGHFAISTQDVSKMVEAVRAKGGNVTREPGPVKGGGSVIAFVKDPDGYTFELIQRGPTPEPLCQVMLRVGDLDRAIKFYEKALGMRLLRRIERPEYKYTIGMMGYAEEYESIVLELTYNYGVTEYTKGNAYAQIAIGTDDVYKSAEVVKIANQELGGKITREAGPLPGLGTKIVSFLDPDGWKTVLVDNEDFLKELNEEE

SEQ ID NO: 2091 - protein, 1112 aa, Arabidopsis thaliana
MESLPQPQNQSSPATTPAKILLGKYELGRRLGSGSFAKVHLARSIESDELVAVKIIEKKKTIESGMEPRIIREIDAMRRLRHHPNILKIHEVMATKSKIYLVMELASGGELFSKVLRRGRLPESTARRYFQQLASALRFSHQDGVAHRDVKPQNLLLDEQGNLKVSDFGLSALPEHLQNGLLHTACGTPAYTAPEVISRRGYDGAKADAWSCGVILFVLLVGDVPFDDSNIAAMYRKIHRRDYRFPSWISKQAKSIIYQMLDPNPVTRMSIETVMKTNWFKKSLETSEFHRNVFDSEVEMKSSVNSITAFDLISLSSGLDLSGLFEAKKKKERRFTAKVSGVEVEEKAKMIGEKLGYVVKKKMMKKEGEVKVVGLGRGRTVIVVEAVELTVDVVVVEVKVVEGEEDDSRWSDLITELEDIVLSWHNDIIDQRDALLEVQKELHVPTTTWNKNVDCCSWDGVTCDAILGELVLSRCKLQGEIPSSIGNLSHLTYLDLSNNQLVGEVPASIGNLNQLESMRLWDNDLKGNIPTSFANLTKLSELYLFGNQFTGGDTVLANLTSLSIIDLSLNYFKSSISADLSGLHNLERFSVYNNSFSGPFPLSLLMIPSLVHIDLSQNHFEGPIDFRNTFSLSRLRVLYVGFNNLDGLIPESISKLVNLEYLDVSHNNFGGQVPRSISKVVNLTSVDLSYNKLEGQVPDFVWRSSKLDYVDLSYNSFNCFAKSVEVIDGASLTMLNLGSNSVDGPFPKWICKVKDLYALDLSNNHFNGSIPQCLKYSTYFHTLNLRNNSLSGVLPNLFIKDSQLRSLDVSSNNLVGKLPKSLINCERIEFLNVKGNKIMDTFPFWLGSLPYLKVLMLGSNAFYGPVYNPSAYLGFPSIRIIDISNNNFVGSLPQDYFANWLEMSLVWSGSDIPQFKYMGNVNFSTYDSIDLVYKGVETDFDRIFEGFNAIDFSGNRFSGHIPGSIGLLSELRLLNLSGNAFTGNIPPSLANITNLESLDLSRNNLSGEIPISLGKLSFLSNTNFSYNHLEGLIPQSTQFATQNCSSFLGNLGLYGFREICGESHHVPVPTTSQQPEEPLSESEDQLLNWIAAAIAFGPGMFCGLVIGHIFTS

SEQ ID NO: 2092 - protein, 375 aa, Bacillus thuringiensis serovar konkukian str. 97-27
MTSSNKKSASIYEGTNVNAWGSFENVAETKLFNSIQIGSWPLRNRIAMAPMTRCFADNETGAVGADVVEYYRKRAADGVGLIITEGIVISPRAKGNPGVPGIYTQEQIDSWKPVTEAVHKEGGTIIAQIWHVGRMSHHEIIGGQMPQAPSAIAAEGNVPRFRKPFDTPEAMTLEEIQEVIGQYAQAAKNAIEAGFDGVEIHGAHGYLIDQFTYEFANKRTDKYGGDLKQRLTFMKEVTEAVIEAIGADKTLLRFSAFKGDNPTYMWENPELAIETFVNMFKEVGLTMIHPSTMNYTQVIADGKNFHQLVRKYWDGAIVGVGNLNPKEAEEALQEGTIDVAAFGRPLIANPDFVHRIKSAESLVEYDAKEHLATLI

SEQ ID NO: 2093 - protein, 447 aa, Triticum aestivum
  misc_feature (358)..(358): Xaa can be any naturally occurring amino acid
MYKARRQASLKVRRRVGKYELGRTIGEGTFAKVRFAKDTESGDPVAIKILDKAKVHKHGLVEQIRREICTMKLIQHPNVVRLHEVMGSKARIFIVLEYVTGGELHDIIAARGSLKEDEARRYFQQLINAVDYCHSRGVYHRDLKLENLLLDTAGNLKVSDFGLSAISEQAKADGLLHTTCGTPNYVAPEVIQDKGYNGALADLWSCGVILFVMLAGYLPFEDDNVSALYKKISGAQFTCPSWFSDGAKRLIPRILDPNPSTRITIPQLLKDPWFKKGYKPPVFDEKHQTSLDDVDAAFGDSEEKQVEEEMEGQPASMNAFELISLNKGLKLDNFFEADKKYRRETRFTSQCPPEEIIXRIEEAAKPLGFDIQKKNYKMRMKNLEAGRKGNLNVATEVFQVAPSLFVVELKKAKGDTLEFQKFYITLSAQIKDAVWVCESEAEERGST

SEQ ID NO: 2094 - protein, 391 aa, Hordeum vulgare subsp. vulgare
MTRSRPTTTMGGSVPDQHHQQQQHDGEVDGGQLQHGGEHVETVMPGFRFHPTEEELIEFYLRRKVDGKRFNIDLIASVDLYRYDPWDLPALASIGDKEWFFYVPRDRKYRNGDRPNRVTPSGYWKATGADRMVKVVEGNRSIGLKKTLVFYVGKAPKGLRSSWIMNEYRLPHGETERYQKEISLCRVYKRPGIDDNLHLTGTTTRSSGSRAAATRHSTAAHRTSAVATHRQQPPVFVEGAGHHSSSALKAYNAHTTQGTNAASTMTSLSAAGVTPPAMFRSTASVASLSSTNSTEEDGTSLYHHHLKGHNNPAVMQLHSSTHAALLNTNSSAMATIPIDELSRAIGSYSQASNPNQPTAPMQGPLLNFPSLEKIWDWNPLLESPKVCTSFK

SEQ ID NO: 2095 - protein, 137 aa, Thermus thermophilus HB27
MMRFDPFKELEELQERLVRAFGAPQQGPRVYAPPVDVWEDEEGLHLLVYLPGVEPEKVEVVAEEGVLSVKAERPFERKENAAYHRLEGTYGTFVRSFNVPSTYDLSKVQARFRHGVLHLLVPRAEATKPKKIQVQVE

SEQ ID NO: 2096 - protein, 80 aa, Triticum aestivum
PAWYKTEKQVTDEMLKNPKPEWGNDIPDTKEAYWYRCMFDEHLPPHCASTVMRWTPTWSKQTDPSGRAIATHNAKYDSAA

SEQ ID NO: 2097 - protein, 173 aa, Pseudomonas putida
MSLNDLNTLPGVTAQADPATAQFVFNHTMLRVKDIEKSLDFYTRVLGFKLVDKRDFVEAKFSLYFLALVDPATIPADDDARHQWMKSIPGVLELTHNHGTERDADFAYHHGNTDPRGFGHICVSVPDVVAACERFEALQVPFQKRLSDGRMNHLAFIKDPDGYWVEVIQPTPL

SEQ ID NO: 2098 - protein, 395 aa, Pleurotus djamor
MPLSSNAPVPGAKEFYPLNDPEIGTDEKIPLLFQPVTIGGTTFKNRIFVSPMCQYSSSNGHATDWHLVHIGGFATRGAAAIIMEATAVVPEGRISPEDAGIWTDSQIEPLRRIVQFCHAQGTKIGIQLAHAGRKASTLALWVKNNYAAASVEQGGWPDDVYGPSTIPFADKFATPKEMDEAHLTYVENAFVEAIERCEEVGFDFIEIHSAHGYLFHSFLSNLSNVRTDSYGGQPLENRLRFPLRVIKSCREAWSKPLFVRISASDWAEGPEKADDGTWKQWGIEQSKVLAGELVKIGVDLVDCSSGGNWAQQKIPFSHGYQVPFAESLKKAYPSLNVGAVGLISDPEKAEGYLQEGKADIILLARELLRNPHWPLTAAKALGVSMKVANQYERAA

SEQ ID NO: 2099 - protein, 252 aa, Vibrio fischeri ES114
  misc_feature (159)..(159): Xaa can be any naturally occurring amino acid
MLSVKSIPAFNDNYIWLIHNNDNHCVVVDPGDATPVLECIKEHDFILDAILITHHHHDHIGGVPELVRQFPNVNVVGPENEPIPTLTHPVGDGDFVELFDEQFMVLGVPGHTNGHVAYIGDEKLFCGDALFSAGCGRLFEGTAEQMFNSLQKMAALPDXTEVYCAHEYAASNLAFALAVEPDNDYLLRYREKVLHLRAHGKSTIPSTLQREKLINPFLRTSEANVKKSVASKVQDSTEVEIFTALRRWKDEF

SEQ ID NO: 2100 - protein, 115 aa, Glycine max
DKKEDQKKKEKQMAALGGFTDITGAQNSIDIENLARFAVDEHNKKENAVLEFVRVISAKKQVVSGTLYYITLEANDGVTKKVYETKVLEKPWLNIKEVQEFKPITVAVNPLSVTV

SEQ ID NO: 2101 - protein, 282 aa, Brassica oleracea var. gemmifera
MAENADLVEWPKKDKRRFLHVVYRVGDLDRTIQFYTECFGMKVLRKRDVPEEKYSNAFLGFGPETSNFVVELTYNYGVSSYDIGTGFGHFAISTQDVSKMVEAVRAKGGNVTREPGPVKGGGSVIAFVKDPDGYTFELIQRGPTPEPLCQVMLRVGDLDRAVKFMEKALGMRLLRRIERPEYNTIGMMGYAEEYESIVLELTYNYGVTEYTKGNAYAQIAIGTDDVYKSAEVVKIVNQELGGKITREAGPLPGLGTKIVSFLDPDGWKQVLVDNEDFLKELE

SEQ ID NO: 2102 - protein, 462 aa, Zea mays
MPSYAHHHSSPLVRNGAGRVVRRRLRGTERDSLDVFLCFLYLYREINKKKNPETKKLFFLNRPASPLVLGICDFDIRPVWVFFRPVKDDTRMDALKCNNNCAPPEETAEDADAAGALVEKDGFSVEDLLDLEEFGEPDKDGAEHEDDDAPPVPAAAEERSKDDSQPLSVVTYDLPSPPPEMVDLPSHDVEELEWVSRIMDDSLSELPPQAQPPPAVVASLAGRPPLAQQRRPFAHDGAYRAVAPPPGPLRTPTICALSTEAMIPVKAKRSKRSRGPAWWRSGAPFLSDSASSSSTTTTSSCSSSGSFSPFLRLDSPPFGGLELGEGYYGHLLPRPPSKKSKHGAKGSKHKPKKRGRKPKHLPTNSSGAGAAASQPGPSDRRCSHCGVQKTPQWRAGPEGAKTLCNACGVRYKSGRLLPEYRPACSPTFVSSIHSNSHRKVLEMRRKKEGDMVATAAPAVASF

SEQ ID NO: 2103 - protein, 401 aa, Arabidopsis thaliana
  misc_feature (146)..(146): Xaa can be any naturally occurring amino acid
MGLFGTKKIGKYEIGRTIGEGNFAKVKLGYDTTNGTYVAVKIIDKALVIQKGLESQVKREIRTMKLLNHPNIVQIHEVIGTKKKICIVMEYVSGGQLSDRLGRQKMKESDARKLFQQLIDAVDYCHNRGVYHRDLKPQNLLLDSKXGDMLSTACGSPCYIAPELIMNKGYSGAAVDVWSCGVILFELLAGYPPFDDHTLPVLYKKILRADYTFPPGFTGEQKRLIFNILDPNPLSRITLAEIIIKDSWFKIGYTPVYHQLSDSIKDNVAEINAATASSNFINAFQIIAMSSDLDLSGLFEENDDKRYKTRIGSKNTAQETIKKIEAAATYVSLSVERIKHFKVKIQPKEIRSRSSYDLLSAEVIEVTPTNCVIEISKSAGELRLYMEFCQSLSSLLTAEVS

SEQ ID NO: 2104 - protein, 492 aa, Solanum tuberosum
MDPSKYRPSSAYDTPFLTTNAGGPVYNNVSSLTVGPRGPVLLEDYYLIEKLATFDREKTPERVVHARGASAKGFFEVTHDISHLTCADFLRAPGAQTPVICRFSTVVHERGSPESIRDIRGFAVKFYTREGNFDLVGNNVPVFFNRDAKSFPDTIRALKPNPKSHIQENWRILDFFSFLPESLHTFAFFYDDVCLPTDYRHMEGFGVHAYQLINKEGKAHYVKFHWKPTCGVKSMSEEEAIRVGGTNHSHATKDLYDSIAAGNYPEWKLFIQTMDPEDVDKFDFDPLDVTKTWPEDLLPLIPVGRLVLNRNIDNFFAENEQLAFNPGHIVPGIYYSEDKLLQTRIFAYADTQRHRIGPNYMQLPVNAPKCGHHNNHRDGAMNMTHRDEEVDYLPSRFDPCRPAEQYPIPACVLNGRRTNCVIPKENNFKQAGERYRSWESDRQDRYITKWVESLSDPRVTHEIRSIWISYLSQADKSCGQKVASRLTVKPTM

SEQ ID NO: 2105 - protein, 491 aa, Oryza sativa (indica cultivar-group)
MDPCKFRPSSSFDTKTTTTNAGAPVWNDNEALTVGPRGPILLEDYHLIEKVAHFARERIPERVVHARGASAKGFFECTHDVTDITCADFLRSPGAQTPVIVRFSTVIHERGSQETIRDPRGFAVKFYTREGNWDLLGNNFPVFFIRDGIKFPDVIHAFKPNPRSHVQEYWRVFDFLSHHPESLHTFFFLFDDVGIPTDYRHMDGFGVNTYTFVTRDAKARYVKFHWKPTCGVSCLMDDEATLVGGKNHSHATQDLYDSIAAGNFPEWKLFVQVIDPEEEERFDFDPLDDTKTWPEDEVPLRPVGRLVLNRNVDNFFNENEQLAFGPGLVVPGIYYSDDKMLQCRVFAYADTQRYRLGPNYLMLPVNAPKCAHHNNHYDGAMNFMHRDEEVDYYPSRHAPLRHAPPTPITPRPVVGRRQKATIHKQNDFKQPGERYRSWAPDRQERFIAVRRRVAHPKVSPELRAIWVNYLSQCDESLGVKIANRLNVKPSM

SEQ ID NO: 2106 - protein, 673 aa, Burkholderia pseudomallei K96243
MTFYPHLTAPLELGFTSLKNRVLMGSMHVGLEEAANGFERMAAFYAERARGEAGLIVTGGIAPNERGRMMPGGSMLTTEEEAERHRIVTRAVHDAGGRIAMQILHFGRYAYHPALVAPSALKAPINTFTPHALSASEVDATIDDFARCAALAQYAGYDGVEIMGSEGYLINEFIAAHTNHREDEWGGAYENRIRFPVEIVRRVRERVGTNFIIIYRLSMLDLVEGGSTLDEVIRLAQAIEAAGATILNTGIGWHEARIPTIATKVPRAAYAWVTKRLVGRVGIPLVATNRINTPEIAEQLLAEGYCDMVSMARPFLADAQFVRKAREGRADEINTCIGCNQACLDHIFSGRITSCLVNPRACHETELVIEPAERRKRIAVVGAGPAGLSFAVTAAERGHDVELFEASPEIGGQFNIAKKVPGKEEFHETLRYFRRQLELRGVTLHLNTRADVARLAGGGFDEIVLATGVTPRRPDIEGIGHARVMGYLDVLRDGKPVGASVAVIGAGGIGFDVSEYLTHTGESASVAPSTFYAQWGIDIDYGARGGVRMPHVEAAPRNVHLLQRKASKVGDGLGKTTGWIHRTSLKARRVAMSSGVSYERIDDAGLHVRIDGEPRTLAVDSVVVCAGQEPQRELYDGLRAAGCSVHLIGGAHVAAELDAKRAILQGTTLAASI

SEQ ID NO: 2107 - protein, 705 aa, Picrophilus torridus DSM 9790
MIKLYNTCMDFKCLNDVECSHPEKILGPHLEDAYIIRAYIPIARAAFILIDNKKYQMIDNGKVFEYRSDNEINDYKILYIDDSGYEKTIDDPYRFRPEISDYDIYLYGTGRLFEAYKTFGAHLKTIKDVSGCNFVVWAPSALSVSVVGNFNHWTPGMHPMINVNDSGIWALFIPGIKENEVYKFAIKTKNNEIKMKTDPFAFYTEKRPRTGSIVINDDFHWTDNSFKRSENALSIYEMHLGSWKRNNGDYYNYREIADMLIDHLKKTGFNCVEIMPVMEHPLDISWGYQVVNYFAPTSRYGKPDDFKYLVNRLHENNIMVILDFVPAHFPDDDYGLYMFDGTHLYDYEDPRMGRTPDWGTNIFDFGRNGVRSFIASAAVFWIDKYHVDGLRFDAVTSMIYLDFGRKPGEWIPNINGGNINLEAVSLLKEINDYIHNKYYNVITVAEESSTYPGITSESGLNFNYKWNLGWMHDTLDFFHEDPLYRKYRINNLTFSVMYMYSENFILPVSHDEVVYGKGSLYRKMPGNKNEKISNVKLFLSYMFSYPGKKLLFMGNEFAQKNEWNVLSQLSWNDLDDGKYVMELIHDLNNLYKNDFNFYNDKNFSWIDFNDKTNTVISFNRGNAVCIFNFTPVERENYAIGVDYPSRYIEIINTDSKKYNGGNILNESIYACKYPMHGRRYSIEIDLPPLAAVIMEPEDLNGSSGN

SEQ ID NO: 2108 - protein, 657 aa, Caulobacter crescentus CB15
MFCRATLLSDGSEALGTFRHTLAKSEVLGAMSENRNHNVSSHAPLQARIAGVALATTVLALVAACLCFMLQQWSVARQEARANHEVLVQMAAAGAAAPLADHNMVGVYRALEAVAKAPGVAGVRIIDAKGRAVAQLGEANPSNADTLQRPIKLSSQTVGTLVLVAKRPGLAQTLARDLALTGALFFGAAGMAILLANSLARRLAQPMERLSEAMHETAVGGRFKALEETADDDVFRSLIASFNHLVARLECNDQDLRGAMAELVKARDDANAANVLKSHFLANMSHEIRTPLNGVLAMADVMAMDQLSDIQRERLAVIRESGAVLLGVLNDVLDLSKIEAGRLEIQDRPFDIAQLAQSIRETFVPQARAKGLAFEVGVAPEAQGLWRGDADRLRQILGNLISNALKFTLDGAVAVRFASAEDGSGLRIDVADTGIGISPEILPRLFDKFVQADSTTTRRFGGSGLGLAICRELAAMMNGSIKVQSREGRGSTFTVLVGLPREETLTDVHYIDDGDPIMAPPAAEPPRLRVLAADDNPTNQKVVAAVLAPLNADVTLVDDGAACVEAWKTGDFDVVLMDIHMPVMDGLEAARSIRATEQAEMRRRTPIIAVTANALTHQIEEYLSVGMDGHVAKPIEVSKLYDAIEAAMAGTRLSRAA

SEQ ID NO: 2109 - protein, 354 aa, Thermobifida fusca YX
MSHLFEPLKLRDTLIPNRVWVSPMCQYSAHNGVPNDWHLVHLGQFALGGAGLVIAEATAVVPEGRISPADTGLWNDEQASAWRRITDFLRAHGAVPAIQLAHAGRKASTAVPWEGEHTVPETEGGWPTVSSTNQPFGSLAAPRALTTDEVAALPEHFAAAARRAETAGFDVVELHFAHGYLAHQFYSPLVNDRTDRYGGSFDNRVRLLLEITEAVRQVWPAHRPLFARISATDWVEGGWTGDDSVRLARLLADRGVDLIDTSSGGAVPDARIPVRPGYQVPFARQIRTEAHVPTGAVGLITAPEQAEEIIASGSADAVLLGRAMLRDPHWPLHAADRLRAGNLWPKPYERARLN

SEQ ID NO: 2110 - protein, 939 aa, Marinomonas mediterranea
MLALNSVSLRSKLFFAIYTPCLILSIIASFAFTLSRFDTIDRNFKEGVEKSVSQMTVSAEHALSHSDEGMLNDTLRTLLKHDHINTVQLYNAEEKLITELGKTSEGNTLPFTNANESDENPHFFATIAPIKHPVTRLEHQSNTNFITSSYSVPQVSGWLKVEASKEASIVSKYRYLSATLGTFFIFNLLAIFALLNVTASLLRPIEKISDTVNKITQGHFGATKGLNLPTQYSTVVSDLNDISSRLENHRAEILSNVDQATEDIRRNMDSLEEKSAQLHIANKEATESNRLKSQFLANISHEIRTPLNAIMGYIQILQKDQLDKQQRLYMDTIAQSTTNLLTIISDILDFSKIEAGKLSLDLTDINIRDIVDEVYQILSSANLVNASKELDLIPEFDLDVPTWVIGDPVRIRQVLTNLIGNAIKFTHEGSVRTTVKILEKSNSSLKLSFQIIDTGVGIPENKLDNLFKPFSQVDTSTTRKFGGTGLGLVITKKLVKQMGGNVEVSSEHGIGSNFRFTIVLKPSQKEQKVEDPISKSLLVFEPSLNYRNYLKTYLNHVGANCTFTSSLEQTVTLLNSQTSLDAVLLNIDSHTEKLEEIQELVAYITQQFRLPCILLTKRPHDISKSSILHTLCSEILMTPISHNRLNKSLRSLEEPKLLSEDRLYADETTTTELTTELELEAVEPPEETSPLSGIQILAVDDTQINLQLLGHWLEPHGLQVDLAYSGKQAIEMAKETQYDLILMDIQMPEMDGMEATQRLRKLTNYVHTPIVALTAHALGSEQKQIVSSGMNAYLTKPVNEDILLETITQWCQSKKSYQDLADEKVVALFDIDKALSIANGKSVIAKDMFDMLLNTLEADKKLILHHFEEKDLAKLIHVVHRLHGGSKYTGAIELSKHAGFLETHLKELQFDDVEGVLEDFTDSIDALIDIAPLIKWPQE

SEQ ID NO: 2111 - protein, 250 aa, Arabidopsis thaliana
MGRGRVELKRIENKINRQVTFAKRRNGLLKKAYELSVLCDAEVSLIVFSNRGKLYEFCSTSNMLKTLERYQKCSYGSIEVNNKPAKELENSYREYLKLKGRYENLQRQQRNLLGEDLGPLNSKELEQLERQLDGSLKQVRCIKTQYMLDQLSDLQGKEHILLDANRALSMKLEDMIGVRHHHIGGAWEGGDQQNIAYGHPQAHSQGLYQSLECDPTLQIGYSHPVCSEQMAVTVQGQSQQGNGYIPGWML

SEQ ID NO: 2112 - protein, 168 aa, Arabidopsis thaliana
MAKPWAHFVNTNVVVSTFNGLIAELRHVFTMAAKEIGLGLTGFGVFFSFLGIVFVFDKGLLAMGNILFISGVSLTIGFKSTMQFFMKRQNYKGTISFGVGFFFVIIGWPILGMMLETYGFFVLFSSLTSTGASECRSSLPSRAERRFTELDAAEQAIKVFGRRSFVIL

SEQ ID NO: 2113 - protein, 396 aa, Pleurotus djamor
MPLRGNAPVPGAKEFYPLNDPEIGTDEKVPLLFQPITIGGTTFKNRIFVSPMCQYSSSNGHATDWHLVHIGGFATRGVGAIIMEATSVVPEGRISPEDAGLWTDTQIEPLKRIVQFCHAQGTKIGIQLAHAGRKASTLAPWARGGAYIAPVEQGGWPDDVYGPSTLPFHEKFPTPKEMDEPHLTYVENAFVEAIERCEEVGFDFIEIHSAHGYLFHSFLSNLSNDRTDSYGGQPLENRLRFPLRVIKSCREAWSKPLFVRISASDWADRPEQGDDGLWKQWGIEQTKVLVGELLKIGVDFVDCSAGGNWAEQKIPLSHGYQVPFAESLKKAYPGLNVGTVGLISDPEKAEGYLQEGKADVILLARELLRNPHWPLTAAKALGVYLKVANQYERAVV

SEQ ID NO: 2114 - protein, 274 aa, Enterococcus faecalis V583
MTLDKTKKLANGNEMPRLGLGVWRVEDGSEATNSVKWALEVGYRLIDTAAVYKNEVGVGEGIRQSGIPREEIFVTTKLWNEDQGYENAIKAFDKSLEKLGLDYVDLYLIHWPVAGKYKESWKALEEIYASGRAKAIGVSNFHQHHLEDLLTEANVVPMVDQIELHPTLTQEPLRKYLAENKIAVEAWSPLGQGNLLSEPVLVKIGEKYGKSAAQVIIRWHLQNDIIVIPKSVHEKRIQENFAVFDFELTPEEITAINQLNKDHRFGADPDNFDF

SEQ ID NO: 2115 - protein, 433 aa, Thermosynechococcus elongatus BP-1
MGITHRTLVVSTTVVMTALVAVTGAGLHWSRSLAGFRQSPKELVDEVWQVIDREYVDATFNGNDWRAVRREFLSRNYTKPEEAYKAAREMLEKLNDPYTRFMDPEQFRSMQIETSGELTGVGITITQDEKTKEITVVSPIEGSPAAEMGLMAKDVILKIDGKSTKGMDLNQAVSMIRGPVNTKVRLTIRRGNQILNYEITRARIEIHPVRYSLRQTPQGPVGYIRLVTFSSNAAGEMRAAIRELEKQGVEGYVLDLRSNPGGLLFASAEIARMFLKQGDIVSTVNRQGEAERLRAGRGFLTDKPLVVLIDGGSASASEILAGALQDNNRAILVGTKSFGKGLVQSVQPVGEGAGIAVTIAKYFTPSGRDINKKGIEPDVEVTLTEQQREQLTRDDIATDRDPQFMRALAVLNERILAQRRNPQSARPTQGPNP

SEQ ID NO: 2116 - protein, 124 aa, Enterococcus faecalis V583
MKMAHTCVRVKDLEASLDFYQKAFNFEESRRRDFPENKFTLVYLTLPGDDYELELTYNYDHEAYDLGNGYGHIAISTDDLEGLHEKHQAAGFTVTDLKGLPGTAPSYYFVVDPDGYKIEVIRER

SEQ ID NO: 2117 - protein, 365 aa, Triticum aestivum
  misc_feature (312)..(312): Xaa can be any naturally occurring amino acid
MRRWFCCSQFHASYREHEHEFPSSPDEKEGNGFDSKSDPTKAPPPIEIPELSLDELKEKTDNFGSKALIGEGSYGRVYYAILDSGKHLAVKKLDTSADPEPDNEFLTQLSIVSRLKHENFVEMLGYCVEGNQRLVAYEFATMGSLHDILHGRKGVPGAQPGPALDWMQRVKIAIDAAKGLAYLHEKVQPSIVHRDIRSSNVLLFEDYRAKVADFNLSNQSPDMAARLHSTRVLGTFGYHAPEYAMTGQLTQKSDVYSFGVVLLELLTGRKPVDHTMPRGQQSLVTWATPRLTEDTVKQCIDPRLKGECPPKXGVAKLAAVAALCVQYESEFRTSMSIVVKALSPLLQQKPQAPPAAAPNTTTSEA

SEQ ID NO: 2118 - protein, 576 aa, Neurospora crassa
MPGTSRMPVSLRQSIDSVKRSRPRNPMQVLNLNVDLIRNIVFFLFLLRWTRRALWKLKGRGLFGTLFELFTDARRILYGYFLRLPGVRTKVRAQIDDALTKMQAKMIPAGQTRYLSLPKEGWTEEAVRKELEALATMDHTRWEDGYVSGAVYSGEDELLKLQTEAYGKFTVANPIHPDVFPGVRKMEAEVVAMVLSLFNAPPGAAGVSTSGGTESILMAILSARQKAYHERGVTEPEMIIPETAHTAFRKAAEYFNIKLHLVACPAPTYQVDTKRVARLINRNTIMLVGSAPNFPHGIIDDISALSKLALRKKIPLHVDCCLGSFLVPFLDKAGFDSQPFDFRLKGVTSISCDTHKYGFAPKGNSTVLYRTAELRSYQYFVDPSWSGGVYASPGIAGSRPGALIAACWASLMSVGEEGYLKSCTQIVGATKKLAEHIRSHPTLQQELEILGNPLVSVLAFQARGDLNIYDIADGMSSRGWHLNALQNPPAIHVAVTAPVAKNWERLAQDLEGVVEEEREKERVRQVEALKMGISGKTGKQKAAGDTAALYGVAGSLPNKSVVVDLARGFLDLLYKA

SEQ ID NO: 2119 - protein, 259 aa, Zea mays
MLNMMTDLSCGPSSKVKEQVAAAPTGSGDRQGQGRGKIEIKRIENTTNRQVTFCKRRNGLLKKAYELSVLCDAEVALVVFSSRGRLYEYANNSVKSTIERYKKANSDSSNSGTVAEVNAQYYQQESSKLRQMIHSLQNANTRNIVGDSIHTMGLRDLKQMEGKLEKAIIKIRARKNELLYAEVDYMQKREMDLQTDNMYLRSKIAESNETGQPAMHMTMGAPPTSEYDHMAPFDSRNFLQVSMPQHYSHQLQPTTLQLG

SEQ ID NO: 2120 - protein, 142 aa, Bacteroides thetaiotaomicron VPI-5482
MVPVKTNQNWLPSIFNDFFDNEWMARANATAPAINVIENEKDYKVELAAPGMTKNDFKVSVDESNNLVICMEKKDEKKEEKKDGKYLRREFSYSRFQQSILLPDNVEKDKISAKVEHGVLFIDIPKVVDKKVQETTKTIDVK

SEQ ID NO: 2121 - protein, 75 aa, Triticum aestivum
  misc_feature (15)..(15): Xaa can be any naturally occurring amino acid
  misc_feature (57)..(57): Xaa can be any naturally occurring amino acid
SSHYRYPLNSDPRGXFGHIGVTVDDVYKGMRAFRKSWGRGFVKKPDDGKMKGIAFIXDPDGYWIEIFDLKQNRGG

SEQ ID NO: 2122 - protein, 545 aa, Streptococcus pyogenes MGAS10394
MNMAKDIKFSADARAAMVRGVDMLADTVKVTLGPKGRNVVLEKAFGSPLITNDGVTIAKEIELEDHFENMGAKLVSEVASKTNDIAGDGTTTATVLTQAIVHEGLKNVTAGANPIGIRRGIETATATAVEALKAIAQPVSGKEAIAQVAAVSSRSEKVGEYISEAMERVGNDGVITIEESRGMETELEVVEGMQFDRGYLSQYMVTDNEKMVADLENPFILITDKKVSNIQDILPLLEEVLKTNRPLLIIADDVDGEALPTLVLNKIRGTFNVVAVKAPGFGDRRKAMLEDIAILTGGTVITEDLGLELKDATMTALGQAAKITVDKDSTVIVEGSGSSEAIANRIALIKSQLETTTSDFDREKLQERLAKLAGGVAVIKVGAPTETALKEMKLRIEDALNATRAAVEEGIVAGGGTALITVIEKVAALELEGDDATGRNIVLRALEEPVRQIALNAGYEGSVVIDKLKNSPAGTGFNAATGEWVDMIKTGIIDPVKVTRSALQNAASVASLILTTEAVVANKPEPAAPAPAMPAGMDPGMMGGF

SEQ ID NO: 2123 - protein, 400 aa, Arxula adeninivorans
  misc_feature (380)..(380): Xaa can be any naturally occurring amino acid
MADFIRTQIFGTCFEITSRYVDLNPVGMGAFGLVCSARDQLTNQNVAIKKIMKPFSTPVLAKRTYRELKLLKHLRHENLITLSDIFISPLEDIYFVTELLGTDLHRLLTSRPLEHQFIQYFLYQILRGLKYVHSAGVVHRDLKPSNILINENCDLKICDFGLARIQDPQMTGYVSTRYYRAPEIMLTWQKYDVEVDIWSAGCIFAEMLRGKPLFPGKDHVHQFSIITELLGNPPDDVIETIGSENTLNFVKSLPKRERIPLSQKFPNADPDAVDLLEKMLVFDPRKRINAADALAHPYLAPYHEPSDEPVASEKFDWSFNDADLPVDTWKVMMYSEILDFHNVDSSAVEQQQQQPQPPQPQLQQQQQPPQQPQQPQQPQXAQQPVQPVQGDYVPQVAPRS

SEQ ID NO: 2124 - protein, 110 aa, Zea mays
MAEVHNERPVGMVGDVRDAPVGRENDLEAIELARFAVAEHNSKTNAMLEFERLVKVRHQVVAGTLHHFTVEVKEAGGGEKKLYEAKVWEKAWENFKQLQSFELVGDAAVA

SEQ ID NO: 2125 - protein, 727 aa, Yersinia pseudotuberculosis IP 32953
MSVLPDRQVINQLISGHYGDPFSILGMHETSQGLQICALLPDAREVWLVETENGRRIAQLTLEDPRGFFIAQLTRRKKSFRYQFAVTWQESPQIIEDPYRFGPLLQDIDSWLLAEGTHLRPYERLGAHLMSLDGVSGVSFAVWAPNAQRVSVVGDFNFWDGRRHPMRLRRENGIWELFLPGIEAGQLYKFEIIDCHGQVRLKADPYAFEAQMRPETASLISPLPDVVKSSAARQKANDLCSPVSIYEVHLGSWRRHTDNNFWLSYRELADQLVEYVKYMGFTHVELLPINEHPFDGSWGYQPLGLYAPTRRYGTPEDFKAFVAKFHQAGINVILDWVPGHFPSDEHGLSTFDGTALYEYADPREGYHQDWNTLIYNYGRNEVRNYLAGNAFYWMERFGIDALRIDAVASMIYRDYSRAEGQWVPNYYGGRENLEAIAFLRYTNKTIGVERPGSVTMAEESTDFPGVTLPPDIGGLGFNYKWNMGWMHDTLNYMQCDPVHRKYHHNLMTFGMLYAYTENFILPLSHDEVVHGKRSILDRMPGDAWQKFANLRAYYAFMWAHPGKKLLFMGCEFAQGREWNFETSLDWHLLDDENGWHSGVQRLVRDLNHCYRQYAPLYEWDYQPAGFEWLVVDDHENSVFAFLRRDAEGHELIAISNFTPVPRYHYRVGIPQGGHYREVLNSDSAFYCGSNLGNQGGIDSHHVRSHNHEHSLLLTLPPLATIYLLREN

SEQ ID NO: 2126 - protein, 435 aa, Arabidopsis thaliana
MPEIEIAAGSGDNNDALFGKYELGKLLGCGAFAKVFHARDRRTGQSVAVKILNKKKLLTNPALANNIKREISIMRRLSHPNIVKLHEVMATKSKIFFAMEFVKGGELFNKISKHGRLSEDLSRRYFQQLISAVGYCHARGVYHRDLKPENLLIDENGNLKVSDFGLSALTDQIRPDGLLHTLCGTPAYVAPEILSKKGYEGAKVDVWSCGIVLFVLVAGYLPFNDPNVMNMYKKIYKGEYRFPRWMSPDLKRFVSRLLDINPETRITIDEILKDPWFVRGGFKQIKFHDDEIEDQKVESSLEAVKSLNAFDLISYSSGLDLSGLFAGCSNSSGESERFLSEKSPEMLAEEVEGFAREENLRMKKKKEEEYGFEMEGQNGKFGIGICISRLNDLLVVVEARRRGGDGDCYKEMWNGKLRVQLIRVCDQTSSTNAAI

SEQ ID NO: 2127 - protein, 510 aa, Pseudomonas syringae pv. syringae
MPLLNWSRHMVCLTAAGLITVPTVYATDTLTRDNGAVVGDNQNSQTAGAQGPVLLQDVQLLQKLQRFDRERIPERVVHARGTGVKGEFTASADISDLSKATVFKSGEKTPVFVRFSSVVHGNHSPETLRDPHGFATKFYTADGNWDLVGNNFPTFFIRDAIKFPDMVHAFKPDPRTNLDNDSRRFDFFSHVPEATRTLTLLYSNEGTPAGYRFMDGNGVHAYKLVNAKGEVHYVKFHWKSLQGIKNLDPKEVAQVQSKDYSHLTNDLVGAIKKGDFPKWDLYVQVLKPEELAKFDFDPLDATKIWPDVPEKKIGQMVLNKNVDNFFQETEQVAMAPANLVPGIEPSEDRLLQGRVFSYADTQMYRLGAIGLSLPVNQPKVAVNNGNQDGALNTGHTTSGVNYEPSRLEPRPADDKARYSELPLSGTTQQAKITREQNFKQAGDLFRSYSAKEKTDLVQRFGESLADTHTESKNIMLSVLYKEDRHYGTRVAEVAKGDLSKVKSLAASLKD

SEQ ID NO: 2128 - protein, 503 aa, Glycine max
MVLSKTASESDVSVHSTFASRYVRTSLPRFKMAEESIPKEAAYQIINDELMLDGNPRLNLASFVTTWMEPECDKLIMAAINKNYVDMDEYPVTTELQNRCVNMIAHLFNAPLEETEAAVGVGTVGSSEAIMLAGLAFKRKWQNRRKQEGKPYDKPNIVTGANVQVCWEKFARYFEVELKEVKLRDDYYVMDPEKAVELVDENTICVAAILGSTLNGEFEDVKRLNDLLIEKNKITGWDTPIHVDAASGGFIAPFIYPELEWDFRLQLVKSINVSGHKYGLVYAGIGWVIWRSKQDLPEELIFHINYLGADQPTFTLNFSKGSSQVIAQYYQLIRLGFEGYRNVMENCRDNMLVLKEGLEKTGRFSIVSKDNGVPLVAFTLKDHTHFDEFQISDFLRRFGWIVPAYTMPPDAQHVTVLRVVIREDFSRTLAERLVSDVEKVLHELDSLPARVISSTTVTLSAEENGKVVVAKKNPMETQREITAIWKKFVLERKKNNDKMNGVC

SEQ ID NO: 2129 - protein, 160 aa, Zea mays
MDARMFGLENPLVAALHHLLDVPDGDAGAGGDKAGGGATRTYVRDARAMAATPADVKELAGAYAFVVDMPGLSTGDIRVQVEDERVLVISGERRREEREDAKYLRMERRMGKFMRKFVLPDNADVDKVAAVCRDGVLTVTVEKLPPPEPKKPKTIEIKVA

SEQ ID NO: 2130 - protein, 323 aa, Candida shehatae
MSPSPIPAFKLNNGLEMPSIGFGCWKLDKSTAADQVYNAIKAGYRLFDGAEDYGNEQEVGEGVKRAIDEGIVTREEIFLTSKLWNNYHDPKNVETALNKTLKDLKVDYVDLFLIHFPIAFKFVPIEEKYPPGFYCGDGDNFVYEDVPILETWKALEKLVKAGKIRSIGVSNFPGALLLDLFRGATIKPAVLQVEHHPYLQQPKLIEYAQKVGITVTAYSSFGPQSFVEMNQGRALNTPTLFEHDVIKAIAAKHNKVPAEVLLRWSAQRGIAVIPKSNLPERLVQNRSFNDFELTKEDFEEISKLDINLRFNDPWDWDNIPIFV

SEQ ID NO: 2131 - protein, 140 aa, Glycine max
  misc_feature (22)..(22): Xaa can be any naturally occurring amino acid
  misc_feature (43)..(43): Xaa can be any naturally occurring amino acid
  misc_feature (56)..(56): Xaa can be any naturally occurring amino acid
  misc_feature (61)..(61): Xaa can be any naturally occurring amino acid
  misc_feature (97)..(97): Xaa can be any naturally occurring amino acid
QQRDVAHTVGPAHHECICTVSXGIGAIEHVLYHSVTYEVTTIXASSPRFLMSRKTXSLGVXWVIFAEGLDQIFGGYMYLYEAPHKALFHQMTIGMVXALAKHDCLRDNRSTSAWGLEARVPMLVKQCVRVAMIFGPEYNM

SEQ ID NO: 2132 - protein, 692 aa, Vibrio fischeri ES114
MKNHSEKEQFQEILLELKRSKEREAQLHKENQVILRGVSAISDAQTKEDIFNGLLNVIKEFVEFDNAIVVSSTDKDSFSVLASTNPYFDHLTWRYNDLFHRACHDETIILFQPHKTNEFLFKNTELQSLFSSVAICGLKSHSGYAVIILACSKFGAYSTLEKEKIERFMPLVERAVIDIDYKERLNAMVSLKTKELFLSKERFQDFAETVGDWFWETDPQFNFTYLSDTKINNTSIISQNLLSLISNDFINSTIIESEKRLVPFHEVEWNPDIFNNKVWLSLSGKPFFDEFGTFVGYRGTAKDISARKKRIRDIQTAKTEAEKANKAKSQFLAMMSHEIRTPLNSILGLVDVFHSSLLSEEQLDWLNQMESSSQLLLTIISDVLDISRIEAGTFVLNEQPIDLLRSLNTSINFLDTRAKDKGITLTVTASQNVPKYVFADATRLSQVIFNLVGNAIKFTNHGHVAVKIEKLPNNSISISVSDTGIGIASTTLEQLFKPFVQADSSITRKYGGTGLGLAIIKRLVELMQGTITVESRLNIGSTFKITLPLKEISDLPKQLNNEAKELVNQRSLNILLAEDNKANQAVLQILLEKQGHHVSIVSNGEEAISIFKHQTNGCFFDVVLMDVSMPVKDGISATTELRKLGIELPIIAITAHAMETEKEMCLEAGMNDFISKPIRAKDLSDILIKYSC

SEQ ID NO: 2133 - protein, 247 aa, Arabidopsis lyrata subsp. petraea
MGRGRVELKRIENKINRQVTFAKRRNGLLKKAYELSVLCDAEVSLIVFSNRGKLYEFCSTSNMLKTLERYQKCSYGSIEVNNKPAKELENSYREYLKLKGRYENLQRQQRNLLGEDLGPLNSKELEQLERQLDGSLKQVRCIKTQYMLDQLSDLQGKEHILLEANRALSMKLEDMIGVRHHHIGGAWEGGDQHNVAYGHPQAHSQGLYQSLECDPTLQIGYSHPVCSEQMAVTAQGQSQPGNGYIPG

SEQ ID NO: 2134 - protein, 381 aa, Mannheimia succiniciproducens MBEL55E
MMNPKYQPLFEPYTLNNGVEIKNRLTVAPLTIYDSGKDGEMTETGRRFWQNRFEGFGLYIMPFTNVHPSGIGFESPNAFDERHLPTLREYAEMAHSQGAKAVVQIAHSGLRADPAMTQGAELVAATGDYYGCFRTMSEQEVWDMVTNYAYAAELVLRAGFDGVEIHGANGWQIQQFFSASTNLRNDYWGGTLEKRMRFPLAIIDGIDEMRQKHNRPDFIIGYRFSPEEPGEDGITMKETLALVDALLEKPLQYLHISLWDFYKKVRRGADTHLTRMQVVHDRIAGRLPFFGSGNLYTADDMLKAYQTGWVESVSIGKSIMLNPNLVELIETGRESEIESAFDWDKADYYRYTPAMLDGTRAGTDFFPPSKQNGVRYKTNHF

SEQ ID NO: 2135 - protein, 485 aa, Porphyromonas gulae
MEKNKLTTAAGAPVADNQNVATAGKRGPMLLQDVWFLEKLAHFDREVIPERRMHAKGSGAFGTFTVTHDITKYTKAAIFSEIGKQTELFVRFSTVAGERGAADAERDIRGFAIKFYTEEGNWDLVGNNTPVFFLRDPLKFPDLNHVVKRDPRTNMRSPQNNWDFWTLLPEALHQVTITMSDRGIPASYRHMHGYGSHAFSFINAEGVRHWVKFHLHTQQGIKNLTDAEAEALIGKDRESHQRDLFESIERGDYPRWTLKVQIMTEEEAKALPYNPFDLTKVWSQKDFPLIEVGVMELNRNPENYFADVEQSAFNPANVVPGISFSPDRMLQGRLFSYGDTQRYRLGVNHHQIPVNRSRCPFLNMYHRDGAMRVDGNFGSRLGYEPNSYGHWQDQNEYKEPPLELDGAAYQWDFREDDSDYYSQPRKLFHIMSPDQQQVLFDNTARAMGDIPKEIKLRHIANCYKADPDYGKGVAKALGLDVNEAL

SEQ ID NO: 2136 - protein, 268 aa, Hyacinthus orientalis
ALRFLAMAIALAASSVLAVDEADVRPTPVKFSKSSFPSGFVFGSASAAYQIEGAAKEGGRGPSIWDYFIDKHPVFFTEKIADRSNADVAIDFYHRYKEDIELMKDTGINAFRLSLSWSRILPNGKISGGINKEGVEFYNNVFNELLSKGIQPYVSIFHWDLPQSLDAEYGGFLSHRIVEDYKAYTDLVFELYGDRVKHWITFNEPFSFCFYGYASGDVCAWALLQISWGVPRGTLAVSLTSLPITCCLLMPLLLSSTETNFRHHKREP

SEQ ID NO: 2137 - protein, 194 aa, Triticum aestivum
FDGFRFDGVTSMLYHSRGAGQGFSGHYDEYFGLNVDTDALIYLMLANYMLHKFYPNCITIAEDVSGMPSSCRPVSEGGLGFDYRLGMAIPDMWIKLLKDVQYDDWNMGNIVHTLTNRRWMEKTVAYAESHDQALVGDKTVAFWLMDKEMYTHMAVSSDPSLIIDRGIALHKMIRIITNSLGGEAYLNFIGNEFG

SEQ ID NO: 2138 - protein, 247 aa, Zea mays
MRVAATRTAAAAAAHPPSAFLLLLVLLCCASLAIGGAAMAGHVLGGVKENPAAANSADSDGLGRFAVDEHNRRENALLEFVRVVEAKEQVVAGTLHHLTLEAVEAGRKKLYEAKVWVKPWLDFKELQEFSHKGDATAFTNADLGAKEGGHEPGWREVPVEDPVVKDAAHHAVKSIQERSNSLFPYELLEILRAHAQVVEDFAKFDILMKLKRGSKEEKIKAEVHKSLEGAFVLNQHQPAEHAESSSQ

SEQ ID NO: 2139 - protein, 173 aa, Zea mays
MMPRRALLFAAVLLAASAAAVSGFHLGGDESGLVRGVLAALRERAEAEDAARFAVAHYNKNQGAALEFTRVLKSKRQVVTGTLHDLILEAADAGKKSVYRAKVWVKPWEDFKSVVEFRLVGDSESEPEPSVASDVSSGQAIAKLSLEADIVQEEARLHTIENDGLSGDFTSSS

SEQ ID NO: 2140 - protein, 457 aa, Lactobacillus sakei subsp. sakei 23K
MIKFPEYFMWGAATSAPQSEGYALNYGKSASTWDKWFEMHPEKFNGDQGPDSASDTYRLYKEDVQNMQKIGLNSFRTSIAWTRLMPDGEHVNPEAVAFYRDYFERLKAANITPIINLFHFDMPWWLMEKGGWENRESVMAFARYAKTAFELFGDLVDRWTTFNEPIVHIECGYLTGYHYPDIIDFKKAVQVGYHTLLAHAAAVAEFRKVKPDGQIGIILNITPAYAKSDAPADLAAKEKADLLLAKSFLEPTVLGQVPPALITLLAEHQLTPVTEVGDRDLLAANRVDFIGVNYYQPLRVQAPTNPHFPALTTDDLYENYVWPERRINPYRGWEIYPEALYDVAMMMKNDYQNIPWYVSENGMGVADEERFMAADGEIQDDYRIEFMQEHLRQLHRAIADGSSCFGYHTWTFNDCWSWLNGFRNRYGFFRVDLEHNAQRTMKKSGHWYRQLTENNGF

SEQ ID NO: 2141 - protein, 633 aa, Saccharomyces cerevisiae; identical to SEQ ID NO: 157

SEQ ID NO: 2142 - protein, 721 aa, Thiomicrospira crunogena XCL-2
MSNVPLNHAIQFDQFKLVIKNSTVSSFGNIAVATFLTYLIVDALSNTLVFFWLAYMVLVSVFRTGYGRYIRTNVSLDTFKYFQKRYFVFILLTALGWGYASFALFVENDTTLQSFLVMSIAGISSSSVSSLSPVKSYFYSFIIIVITPLFLKFATSYEVYGVAFSLILLLFLIFMIKSAKHYQEAINDSLSLNYQNVGLIKELNQAKQEADASNQLKSEFLANMSHEIRTPMNGIIGMTGLLLDTSLKKEQRDLTLTVKESAESLLAIINDILDFSKIEAGKMELNYESVKLVPFLDGVMEMVASSAQSKGLNLAYFIDPILPAEIETDGVRLRQVLINLLSNGIKFTDHGYVYLTVSALDSDSNRLQFKVTDTGIGISEEGQAKLFNAFSQVDGSSMRVFGGTGLGLTISKQILSLLGGHISVKSALGKGACFCFDIPYRVMDSNNCLAAFEAEIPLIWLMPNDALKPKMVDFFKELNIVVHCDTFDELLEQSDENRRPVWIDMAEVMKTGGKPFELIRALKMKHSFLTLLLTHQQANEWYQQIADLEINTRIKPVKYSHLSDWLFANQEEKILKETPVHSKFDASLSHLKLLLAEDNLVNQKLATALLKKLGITPDIANNGEEALQKLEDNLYDLVLMDCQMPIKDGYQATKELREWARPIKDVVVIALTANAMQGDEQKCYAAGMNDYITKPVSPMVLQEKLQKWAAFIQDNSLSSKG

SEQ ID NO: 2143 - protein, 372 aa, Schizosaccharomyces pombe
MASATSTPTIADGNSNKESVATSRSPHTHDLNFELPEEYEMINLIGQGAYGVVCAALHKPSGLKVAVKKIHPFNHPVFCLRTLREIKLLRHFRHENIISILDILPPPSYQELEDVYIVQELMETDLYRVIRSQPLSDDHCQYFTYQILRALKAMHSAGVVHRDLKPSNLLLNANCDLKVADFGLARSTTAQGGNPGFMTEYVATRWYRAPEIMLSFREYSKAIDLWSTGCILAEMLSARPLFPGKDYHSQITLILNILGTPTMDDFSRIKSARARKYIKSLPFTPKVSFKALFPQASPDAIDLLEKLLTFNPDKRITAEEALKHPYVAAYHDASDEPTASPMPPNLVDLYCNKEDLEIPVLKALIFREVNFR

SEQ ID NO: 2144 - protein, 178 aa, Glycine max
  misc_feature (93)..(93): Xaa can be any naturally occurring amino acid
  misc_feature (122)..(122): Xaa can be any naturally occurring amino acid
  misc_feature (125)..(125): Xaa can be any naturally occurring amino acid
  misc_feature (144)..(144): Xaa can be any naturally occurring amino acid
  misc_feature (165)..(165): Xaa can be any naturally occurring amino acid
  misc_feature (174)..(174): Xaa can be any naturally occurring amino acid
  misc_feature (177)..(177): Xaa can be any naturally occurring amino acid
MASSMISSPAVTTVNRAGAGMVAPFTGLKSMAGFPTKKTNNDITSIASNGGRVQCMQVWPPIGKKKFNTLSYLPDLNNTQLAKEVEYLLKKRXIPYLQFDLNHNFIYHNHNESPRYYNKLYXTIXNLPIFNYTNTSHVCKDLQXTKTTYPSNCIPIIRFYNSHQXQYINFISYXPAXF

SEQ ID NO: 2145 - protein, 486 aa, Bradyrhizobium sp. BTAi1
MPNDVSRRDLAKLAGLAAMGAAAGPAHAEEAAVTDDAGRRFPSDFVWGTATSSYQIEGGATADGRGPSIWDVFTHTPGKIEDGSTGDVACDHYDRYKHDVRLIKELGCRAYRFSIAWPRLFPDGGLTPNPKGLDFYSRLVDELLANGIEPYATLYHWDLPQALQDRVGGWRSAETAAAFAHYAGYVAQTLSDRVKTIFTINECGRFIPFGYGLGIDAPGLKLPQQEVNQARHHVALAHGLAVQAIRAKGRAGTRVGMAENITACLPAIDTPENIRAAEIATREMNAGFLNVILEGRYTDAFLAWSGKDAPTFTADELKTISTPVDFVGLNIYAPQAYVVASERAPGFDVLPMPSSFPHMSSPWLLVGPETAYWVPKLAAKIWNLKTIYITENGTSSDDKVTADGKVHDLDRVMYLRNYLAQLQRATSEGVPVKGYFLWSLMDNFEWVFGYKQRFGVYHVDFDTQLRTPKLSASYYRHVITRNAVSA

SEQ ID NO: 2146 - protein, 185 aa, Brassica juncea
MASEAKESPANNPGLSTVRDEATKGYIMQQTMFRVKDPKASLDFYSRVLGMSLLKRLDFSEMKFSLYFLGYEDTSTAPTDPTERTVWTFGRPATIELTHNWGTESDPEFKGYHNGNSEPRGFGHIGVTVDDVHKACERFEQLGVEFVKKPHDGKMKNIAFIKDPDGYWIEIFDLKTIGTTAGNAA

SEQ ID NO: 2147 - protein, 404 aa, Streptococcus suis 89/1591
MKQFNKSTKLDDVAYDIRGPVLEEAMRMRANGEQILRLNTGNPAEFGFTAPDEVIRDLIHNARKSEGYSNSKGIFSARKAIMQYCQLKKFPNVDIEDIYLGNGVSELIVMSMQGLLDNGDEVLVPMPDYPLWTAAVSLAGGKAVHYVCDEAAEWYPDLADMESKVTSRTKAIVLINPNNPTGALYPKEILKGIIDIARRHELIIFSDEIYDRMVFDGAVHIPIATLAPDLFVVTMNGLSKSHRICGFRVGWMVLSGPKKHVKGYIEGLNMLSNMRLCSNVLAQQVVQTSLGGYQSVDELLMPGGRLYEQREFITKAINDIPGLSAVKPKAGLYVFPKIDREMYRVEDDEQFVLDFLKQEKVLLVHGRGFNWKDPDHFRIVYLPRVDELAEIQEKMSRFLRQYRR

SEQ ID NO: 2148 - protein, 1146 aa, Populus tremula
MASQSQRQSNQPAHNQAQSSGTSNMRQHHHPTESVSKAIAQYTVDAQLHAVFEQSGGTGKSFDYSKSVRTPNQSVPEEQITAYLSKIQRGGHIQPFGCMIAADEQSFRLIAYSENAKDMLGLTPQSVPSLEKQEILFVGADVRILFRPSSAVLLEKAFGAREITLLNPIWIHSKNSGKPFYAILHRIDVGIVIDLEPARTEDPALSIAGAVQSQKLAVRAISQLQSLPGGDIKLLCDTVVDSVRELTGYDRVMVYKFHEDEHGEVVAENKRVDLEPYIGLHYPSTDIPQASRFLFKQNRVRMIVDCHAIPVSVIQDEGLMQPLCLVGSTLRAPHGCHAQYMENMGSIASLAMAVIIYGNDEEAIGGRNSMRLWGLVVCHHTSARCIPFPLRYACEFLMQAFGLQLNMELQLASQLLEKHVLRTQTLLCDMLLRDSPTGIVTQSPSIMDLVKCDGAALYYQGQYYPLGVTPTEAQIKDIVEWLLTLHGDPTGLSTDSLADAGYPGAAFLGDAVCGMAVAYIAERDFLFWFRSHTAKEVKWGGAKHHPEDKDDGQRMHPRSSFKAFLEVVKSRSLPWENAEMDAIHSLQLILRDSFRDAEATNSKAVVHTQLKDMELQGMDELSSVAREMVRLIETATAPIFAVDVEGRINGWNAKVAELTGLSVEEAMGKSLVHDLVYKEYEEIVDKLIHRAVKGEEDKNVEIKLRTFCSEHQKKAVFVVVNACSSKDYMDNIVGVCFVGQDVTGQKVVMDKYVLIQGDYKAIVHSPNPSIPPIFASDENTCCLEWNTALEKLTGWSRGEVVGKMLVGEVFGSCCRLKGPDALTKFMIALHNAIGGIDTDKLPFSFFDRNEKNVQTLLTANKRVNMKGDIIGAFCFLQIASPELQPSLKVQKQQEKKSFARMKELAYICQEIKNPLSGIHFTNSLLENTDLTEDQQQFLETSAACEKQILKIIRDIDLESIENGSLELEKAEFLLGSVINAVVSQAMLLLRERNLQLLRDIPEEIKTLAVYGDQARIQQVLADFLLNMVRYAPSSAGWVEIHVCPTLKQISDGHTLVHTEFRYLERVLQTRMLGLQHPLRSFLNCKLTLVMLHREGMVPKIQFQGLSVCQGRLIWLSFPENTTVALYPLTIWFLLLHRHQSRSITHT

SEQ ID NO: 2149 - protein, 1146 aa, Populus tremula
MASQSQRQSNQPAHNQAQSSGTSNMRQHHHPTESVSKAIAQYTVDAQLHAVFEQSGGTGKSFDYSKSVRTPNQSVPEEQITAYLSKIQRGGHIQPFGCMIAADEQSFRVIAYSENAKDMLGLTPQSVPSLEKQEILFVGADVRILFRPSSAVLLEKAFGAREITLLNPIWIHSKDSGKPFYAILHRIDVGIVIDLEPARTEDPALSIAGAVQSQKLAVRAISQLQSLPGGDIKLLCDTVVDSVRELTGYDRVMVYKFHEDEHGEVVAENKRVDLEPYIGLHYPSTDIPQASRFLFKQNRVRMIVDCHAIPVSVIQDEGLMQPLCLVGSTLRAPHGCHAHYMENMGSIASLAMAVIIYGNDEEAIGGRNSMRLWGLVVCHHTSARCIPFPLRYACEFLMQAFGLQLNMELQLASQLLEKHVLRTQTLLCDMLLRDSPAGIVTQSPSIMDLVKCDGAALYYQGQYYPLGVTPTEAQIKDIVEWLLTLHGDPTGLSTDSLADAGYPGAAFLGDAVCGMAVAYIAERDFLFWFRSHTAKEVKWGGAKHHPEDKDDGQRMHPRSSFKAFLEVVKSRSLPWENAEMDAIHSLQLILRDSFRDAEATNSKAVVHNQLKDMELQGMDELSSVAREMVRLIETATAPIFAVDVEGRINGWNAKVAELTGLSVEEAMGKSLVHDLVYKEYEEIVDKLIHRAVKGEEDKNVEIKLRTFCSEHQKKAVFVVVNACSSKDYMDNIVGVCFVGQDVTGQKVVMDKYVLIQGDYKAIVHSPNPSIPPIFASDENTCCLEWNTAMEKLTGWSRGEVVGKMLVGEVFGSCCRLKGPDALTKFMIALHNAIGGIDTDKLPFSFFDRNEKNVQTLLTANKRVNMKGDIIGAFCFLQIASPELQPSLKVQKQQEKKSFARMKELAYICQEIKNPLSGIHFTNSLLENTDLTEDQQQFLETSAACEKQILKIIRDIDLESIENGSLELEKAEFLLGSVINAVVSQAMLLLRERNLQLLRDIPEEIKTLAVYGDQARIQQVLADFLLNMVRYAPSSAGWVEIHVCPTLKQISDGHTLVHTEFRYLERVLQTRMLGLQHPLRSFLNCKLTLVMLHREGMVPKIQFQGLSVCQGRLIWLSFPENTTVALYPLTIWFLLLHRHQSRSITHT

SEQ ID NO: 2150 - protein, 300 aa, Streptococcus thermophilus CNRZ1066
MHFYLISFKIILLQLEKENRMETYTLSNGVTIPKIGFGTWQIPEGEEAYNSVSFALKAGYTHIDTAQIYGNEVSVGKAIADSDVAREDLFLTTKLWNDKHDYDLAKASIDESLERLGVDYLDLFLIHWPNPKALRENDAWKVGNAGAWKAMEEAYKEGKVRAIGVSNFMQHHLEALFETAEIVPHVNQILLAPGCTQEDLVAYCRERDILLEAYSPLGTGSIFGNEDVEAVAERNGKSVAQVALRWSLQKGFLPLPKSVTPKNIEANLDIFDFDLSEEDMAVLDKIQGIKTQVDPDTVNF

SEQ ID NO: 2151 - protein, 1231 aa, Agrobacterium tumefaciens str. C58
MDCRGVEYRLTEGCGLLEKACRAVAALELPACIKDGELRYVVVNEAYGRVMGRAPSAFEGQTSLSLSGDIRDAEREDRERRSLVFATDEAIACHAALSAQSHMLRCERFIGDDGSLFLFEVFEEMPSAVSRKSAAVGGASDILFSSGVMDFIDAGIVVYDRDNQLVYCNARFAEFYSDLDIELKPGIRLEALMKTLYSSSVYRCAKNDGPSFEDWMQKQLHDFSLPYLERVEQFADGRWVRMVNKRLENGMLVGLRVDVTEFKAHETLLSTQIRETWLLRAALEQLPVGVFLRDQDRRLTYANAAYNTFLGGNLADHIGKTETEMFPQNGPRFRQENERILQTGEAIERTGNMPWRDGGAVPVITRLGRVATPDDEYYLVGSVTDVSLLQDREKALIAAQAEAEALHRQLQAVLRALPVGVLLLNADLVIEYVNPFFYQVWGEIGGEKSLVGKSYREFMEMNFDSGLYDYGDRPFDDVYEERVQRLLKADAFAPREVRSKSGKVTVISKTRLEGGKILSTYADVTDVRMRDAEISKARAELERVGEYMQGATRAMAQGLVLVEQGTIIMSNEAMARMFDVPPHLLEKGRNWAGFFAHCAGRGDFGTAAEAGETLRIWRENIAANRPFSWLVHVAGKSWLNLEATNSSGNYWLIIVTDVTEMKVREEELQRLLSRAEAADRAKSEFLANMSHEIRTPMNGVLGMAELLAKSKLDTRQKTFTDIIVKSGNALLTIINDILDFSKIEAGQMKLRSVPFDPAEAVEDVVSLLSSAALEKDIELIVRIDASVSGKVIGDAGRFRQIVTNIVGNAVKFTETGHVLVELSAQSAEASESIFSLRVEDSGIGIPVDKLETIFDKFSQVDGSATRRHEGTGLGLAITVGLVGLFDGKINVVSEVGRGSAFEVDIPFQVMERRRDVPLLSVAIDDIRVLVIDDNDVNRRILTEQLRSWGIDGHAVENGPSGIAVLQEAASLGFAIDAIILDYHMPVMNGLDVVERIRADKRFDDIAIVFLTSMDVVGDETLFTDLSVQAHLMKPARARLLRSTLFDVVRDVRLKRIRQHPLAQGTGGEKARPESRPAEKKQRAEAPATVPERSRPCLLDVLVAEDNDVNQIVFSQILQQAGLRFLIVGNGKRAVQAWEEYNPALILMDVSMPVMNGHQATQAIRAAEQAAGDSRHVPVIGVTAHTQEADRERCLEAGMDDYLSKPISPESLEDKIAQWLGENVLRRDAPGV

SEQ ID NO: 2152 - protein, 634 aa, Lactobacillus sakei subsp. sakei 23K
MCGIVGFAGGLFDLPKKKEVLNQQMDVIKHRGPSGAGDFIDDKVALGFRRLSIIDLTKGGQPIYNEDHTKLIFFNGEVYNYREIRKELEPLGHEFKTDSDTETILHAYEQWGKDVLKKIRGMFVFVIYDLQTKTLFGARDFFGIKPLYYTTLDDGTFMFSSEIKTFMRHPEFKRTLNKKALKSFMMNQYNDLQETFFEGVFRFPAGHYFTYKDGQLDIEKYWDMQFDPSNLSFEEEVKKIDASVEESIKMHNVADVPVGAFLSEGVDSSYVTSILQPQEVFSVGFDDQTYNEVTAAHALADELGLNFNETKVKADDAFAEFDKIQYYLDEPDGNPSCVPLWFLSRFAREKVTVALSGEGADELFAGYVNYGMHSHNTTIKAFTSSLKKLPKGARAKLAKTVKKMPAFPGRVHLYTNLANPKEFYAGQSVIYDIENPSIFGSDEANQYLKPAYQNDTTIQENYQADFDRVKDADPVSQMQYIDMHHFMLNDILQKADKLSMAHSLELRVPFLDPEVAKTAGQVPTEYLINSKDTKYAYRQASAKHLPAAWANRPKLGFPVPIKQWLETDKYYEQVKALFSEDFVSEFFDQGQLLALLDANKEQRINGRRKIWTIYTFLTWYKVYFINIEDYLVLG

SEQ ID NO: 2153 - protein, 286 aa, Zea mays
MHIREEEATPSTVTGIMSTLTSAGQQKLKEPISPGGGSASVAGSAAERNNGGRGKGKTEIKRIENTTNRQVTFCKRRNGLLKKAYELSVLCDAEVALIVFSSRGRLYEYANNSVKGTIERYKKATSDNSSAAGTIAEVTIQHYKQESARLRQQIVNLQNSNRALIGDSITTMSHKELKHLETRLDKALGKIRAKKNDVLCSEVEYMQRREMELQNDNLYLRSRVDENERAQQTANMMGAPSTSEYQQHGFTPYDPIRSFLQSNIVQQPQFYSQQEDRKDFNDQGGR

SEQ ID NO: 2154 - protein, 411 aa, Debaryomyces hansenii CBS767
MIGVQTSPLKNTDIFKPLKVGEHVLSNKVVYAPTTRLRALEDYTPSDLTLEYYNKRSRYPGSLLITEATLVSEQAGLYGTTPGIWNEKQVKEWKKIADKIHENGSFVSNQLWFQGRVGDPQLLRDHGLDLVAPSAIYPDDTSKEKAEAAGNPIRALTEKEIHEIIYDTYTNAAKNAIAAGFDYIELHAAHGYLLDQFLQPATNQRTDKYGGSIENRARFVLELVDHLTTVVGANKLAIRISPWAKFQGMKAEQDSTHPIITFSYLLHELQKRADNGNELAYVSVIEPRVNNNIDIDVSQQAGDNIFVGQIWKGIILKSGNYTYDAPHFNTLLNDISDNRTLVGFSRYYTSNPDLVKRLYEGWDLTPYDRDTFYTTNNWGYNTWNNYNENDEIDKNSEVNRKAKAIEEVKVK

SEQ ID NO: 2155 - protein, 411 aa, Debaryomyces hansenii CBS767
MSGVQIAALKDTDLFKPLKVGEHTLSNKVVYPPTTRLRALDDHTPSDLELEYYDKRSKYAGSLLITEATFVSEQAGLYSNVPGIWNEKHVKGWKEITDRIHENGSFISSQFWFLGRVGDPQLLKDRGLDFVAPSAIYPDDTTKEKAEAAGNPIRALTEKEIHDIIYDTYTNAAKNAIAAGFDYIELHAAHGYLLDQFLQPATNQRTDKYGGSIENRARFVLELVDHLITVVGANRLAIRISPWAKFQGMKAEQDSTHAVTTFSYLLHELQKRADNGNELAYVSIIEPRVLGIIDVEKSQQVGDNTFVGQIWKGIILKSGNYTYDAPHFKTLLHDISDNRTMVGFARYYTSNPDLVKRLYEGWDLTPYDRDTFYATNNWGYNTWNNYDEKAEITKDAEISRLAKAIEEIKAN

SEQ ID NO: 2156 - protein, 509 aa, Bdellovibrio bacteriovorus HD100
MLKGSFKIQERMHDMAQSKKGLTTSAGAPVSDNQNSLTVGPRGPLVLQDVALIEKLAHQNRERVPERTVHAKGSGAFGTLTINGDISKYTRAKFLQPGTKTDLLIRFSTVAGERGAADAERDVRGFALKFYTEEGNFDLVGNNTPVFFVRDPYKFPDFIHTQKRDPRTNLRSPTAMWDFWSLSPESCHQVTILFSDRGLPASYRHMHGFGSHTYSLINSKEDRHWVKFHFKTQQGIKNLTNDEGAELVGRTRESHQEDLYNSIEEKSFPKWRMYVQIMSEEQAKKTWYNPFDLTKVWPHGEFPMIEVGTMELNRNPTNYFAEIEQAAFNPNNMVPGVSWSPDKMLQSRTFAYADAHRYRIGTHYEMLPVNKPKVEVNHYHLDGAMRLDVPEYNHAYYEPNSFGGPAQQEQYREPPLKLDDATMDRFDHHQGNDDYRQAGDLFRLMDADKKRQLLDNIAEHMKRGNVPEEIVRRQIEVFMRCDPAYGSGLAERMGVKVYSDKYESGSAHH

SEQ ID NO: 2157 - protein, 151 aa, Desulfitobacterium hafniense DCB-2
MFDLVPFEGRNSGLPRKSRNLFDIDSIFENFFNDTLFPAFYNQSGQMRVDVRENEKEFIVEAELPGVNKEEIQIDCTEDRLTITVQKTESTEEQKDNYIRKERKASSMARSFAIANIRHEEITAKYENGLLTVTLPKHEKTAPKGKKIDIQ

SEQ ID NO: 2158 - protein, 238 aa, Ceratopteris richardii
MVRRKIKIKRIENATTRQVTFSKRRGGLLKKAHDLSVLCDAEVAVIIFSSKGKLFQFANPSMETVLGRYVKASRDPEAGDNGSSTDNVEADRLTVFTEKLKMLQSNVIGDDLERLSLRDLIHLEQQVHESLGHIRAKKDELILEQIDEFKQKMADTRRTTNANTSMLDRLVDFCSSGITGSQNIVESEPGYVVGVPRTDTLRAGWIATSDQSNDGPEYVPCAKRFRITEDLNESPASE

SEQ ID NO: 2159 - protein, 1158 aa, Methylobacillus flagellatus KT
MSGYQANNIDQTSFKRILRRNIMLPLGVGIASAALFVILIFNLLDSMNWVEHSERVIGKAQEVSKLAVDMESGMRGYLLSGDNSFLQPYLLSKPKIQAEISGLALLVKDSPAQTDRLKRTQAYIDQWHEYASQMISKRQASEDFMPILRQGNGKMQFDAIRNELAAFVAEEERILKTRSDSARKTTSFSLASYLLFVLGLTGFLGYFGRRELLSLSQNYEEVLRHQQEHADHQQRQTWLRTGQTALAELGIGQMALPQLGRTSLDFLARYIGAQVGAMYVREDDGALRRFSTYGFSPEHEQQDSVIRAHQGLLGQAVAENRTLDLDDLPSDYIKINSALGDATPRHLVIVPINNDGRINGVIELGFMRKPEPLDMEFLSLISGNLGIAIEAALSRQRLQDLLAETQQLNEELQVQQEELRTSNEELEEQSRILEESQATLENQKAELEQTNDKLAEQALRLDERNAALQEVQAQLRERAEDLERASQYKSEFLANMSHELRTPLNSSLILAKLLADNREGNLSEEQVKFAQTIYSAGNDLLNLINDILDISKVEAGKLELKPQELAVQHLANSLQAVFEPLAQQKKLDFSIDISPQTPDTIYTDRQRLEQILKNLLSNAIKFTDKGSISLHISNNAHDQISFTVKDSGIGIDPSMHEAIFAPFRQVDGTSSRRYGGTGLGLSISRNLAALLGGSINVESARGEGSSFTLLVPRQWQPAAMLPPPQPSPDPIQPVQQQEPPTKQPKQFSGPTFPDDREQAHGSKRLVLVIEDEPAFARILFDLAHEMGYQCLVAHAADEGLLVAEKYQPQAILLDIRLPDESGLSVLQTLKQNGLTRHIPVHVVSSEDHSEAALHLGAIGYALKPTTLEELKQVFARLEEKLSQKIKRVLLVEDDARQRESVHQLIADDDVEIIAVEFGEQALEQLRHNIFDCMIIDLKLPDMQGSELLQRMSSEDICAFPPVIVYTGRNLSRDEEEELLKYSRSIIIKGARSPERLLDEVTLFLHKVESELSSERQRMLQALRSRERVFDGRHILLVDDDVRNVFALTSALEQKGMKIEVARNGLEAIEKLNRIPDINLVLMDVMMPEMDGLEATRRIRADSRFERLPIIAITAKAMKDDQEQCMKAGMNDYLAKPIELSRLYSLLRVWLPAGLNHTE

SEQ ID NO: 2160 - protein, 269 aa, Lycopersicon esculentum
MVFPINQELLVDESSSQLRKTSGGTGGGGRGKIEIKRIENTTNRQVTFCKRRNGLLKKAYELSVLCDAEVSLIVFSSRGRLYEYANNSVRATIDRYKKHHADSTSTGSVSEANTQYYQQEASKLRRQIRDIQTYNRQIVGEALGSLSPRDLKNLEGKLEKAIGRVRSKKNELLFSEIELMQKREIELQNANMYLRAKIAEVERAQEQMNLMPGGGGGGGGGGGGGSDHQYHHQPNYEDARNNSLPVNLLEPNPHYSRRDNGDQTPLQLV

SEQ ID NO: 2161 - protein, 614 aa, Bacillus subtilis subsp. subtilis str. 168
MCGITGWVDFKKQLVQEKQTMDRMTDTLSKRGPDDSNVWGEHHVLFGHKRLAVVDIEGGRQPMACTYKGDTYTIIYNGELYNTEDLRKELRARGHQFERTSDTEVLLHSYIEWQEDCVDHLNGIFAFAVWDEKRNLLFAARDRLGVKPFFYTKEGSSFLFGSEIKAILAHPDIKARVDRTGLSEIFGLGPSRTPGTGIFKGIKEIRPAHALTFSKDGLNIWRYWNVESEKHTDSFDDTVANVRSLFQDAVTRQLVSDVPVCTFLSGGLDSSAITAIAAGHFEKEGKAPLHTYSIDYEENDKYFQASAFQPNDDGPWIEKMTEAFGTTHHKCVISQKDLVDHLEEAVLVKDLPGMADVDSSLLWFCREIKKDFVVSLSGECADEIFGGYPWFHTADVESGFPWMRSTEERIKLLSDSWQKKLNLKEYVNAKYEETLAETPLLDGETGVDKARRQLFYLNMLWFMTNLLDRKDRMSMGASLEVRVPFADHRLVEYVWNIPWEMKMHDNREKGILRKALEGILPDDILYRKKSPYPKTHHPEYTKGVSEWLKTIRSQKDSVLHTLLDRKQLDQLLETEGSSFKVPWFGQLMKGPQLIAHLAQIHTWFEAYRIDIDER

SEQ ID NO: 2162 - protein, 223 aa, Lycopersicon esculentum
MGRGKIEIKRIENNTNRQVTFCKRRNGLLKKAYELSVLCDAEIALIVFSTRGRLYEYSNNNVKATIERYKKATAETSSAYTTQELNAQFYQQESKKLRQQIQMMQNTNRHLVGEGLSSLNVRELKQLENRLERGITRIRSKKHEAILAETEDLHKREIQLEQENAFLRSKIAENERLQELSMMPSGGEEYNAFQQYLARNMLQLNMMETALPSYDPLSPDHKR

SEQ ID NO: 2163 - protein, 366 aa, Sorghum bicolor
RPLEYAWNKAANILFAESPAGVGFSYSNTSSDLSMGDDKMAQDTYTFLVKWFERFPHYKYREFYIAGESGHFIPQLSQVVYRNRNNSPFINFQGLLVSSGLTNDHEDMIGMFESWWHHGLISDETRDSGLKVCPGTSFMHPTPECTEVWNKALAEQGNINPYTIYTPTCDREPSPYQRRFWAPHGRAAPPPLMLPPYDPCAVFNSINYLNLPEVQTALHANVSGIVEYPWTVCSNTIFDQWGQAADDLLPVYRELIQAGLRVWVYSGDTDSVVPVSSTRRSLAALELPVKTSWYPWYMAPTEREVGGWSVQYEGLTYVSPSGAGHLVPVHRPAQAFLLFKQFLKGEPMPAEEKNDILLPSQKAPFY

SEQ ID NO: 2164 - protein, 254 aa, Brassica napus
MGRGRVELKRIENKINRQVTFAKRRNGLLKKAYELSVLCDAEVALIIFSNRGKLYEFCSSSNMIKTLERYQKCSYGSIEVNNKPAKELENSYREYLKLKGRYESLQRQQRNLLGEDLGPLNSKELEQLERQLDGSLKQVRSIKTQYMLDQLSDLQSKEQMLLETNRALAMKLDDMIGVRSHHMGGGGGGGWEGNEQNVSYEHHHQAQPQGLFQPLECNPTLQIGYDNPVGSEQITATTQAQAQPGNGYIPGWML

SEQ ID NO: 2165 - protein, 503 aa, Oryza sativa
MEGAGSDGNPLGGYRIGKTLGIGSFGKVKIAEHILTGHKVAIKILNRRKSMEMEEKVKREIKILRLFMHPHIIRLYEVIDTPADIYVVMEYVKSGELFDYDVEKGRLQEEEARRFFQQIISGVEYCHRNMVVRRDLKPENLLLDSKCNVKIADFGLSNVMRDGHFLKTSCGSPNYAAPEVISGKLYAGPEVDVWSCGVILYALLCGTLPFDDENIPNLFKNIKGGIYTLPSHLSPLGRDLIPRMLVVDPMKRITIREIREHQWFTVGLPRYLAVPPPDTAQQVKKLDDETQNDVINMGFDKNQLIESLHKRLQNEATVAYYLLLDNRLRTTSGYLGAEFHESMVSSLAQVTPAETPNSATDHRQHGHMESPGFGLRHHFAADRKWALGLQSRAHPREIITEVLKALQELNVCWKKIGHHNMKCRWSPSFPSHESMMHNNHGFGAASAMIETDDSEKSTHTVKFEIQLYKTRDEKYFLDLQRLSGPQLLFLDLCSAFLTQLRVL

SEQ ID NO: 2166 - protein, 1144 aa, Populus tremula
MASQSQRQSNQPAHNQAQSSGTSNMRQHHHPTESVSKAIAQYTVDAQLHAVFEQSGGTGKSFDYSKSVRTPNQSVPEEQITAYLSKIQRGGHIQPFGCMIAANEQSFRVIAYSENAKDMLGLTPQSVPSLEKQEILFVGADVRILFRPSSAVLLEKAFGAREITLLNPIWIHSKNSGKPFYAILHRIDVGIVIDLEPARTEDPALSIAGAVQSQKLAVRAISQLQSLPGGDIKLLCDTVVDSVRELTGYDRVMVYKFHEDEHGEVVAENKRVDLEPYIGLHYPSTDIPQASRFLFKQNRVRMIVDCHAIPVSVIQDEGLMQPLCLVGSTLRAPHGCHAQYMENMGSIASLAMAVIIYGNDEEAIGGRNSMRLWGLVVCHHTSARCIPFPLRYACEFLMQAFGLQLNMELQLASQLLEKHVLRTQTLLCDMLLRDSPTGIVTQSPSIMDLVKCDGAALYYQGQYYPLGVTPTEAQIKDIVEWLLTLHGDPTGLSTDSLADAGYPGAAFLGDAVCGMAVAYIAERDFLFWFRSHTAKEVKWGGAKHHPEDKDDGQRMHPRSSFKAFLEVVKSRSLPWENAEMDAIHSLQLILRDSFRDAEATNSKAVVHTQLKDMELQGMDELSSVAREMVRLIETATAPIFAVDVDGRINGWNAKVAELTGLSVEEAMGKSLVHDLVYKEYEEIVDKLIHRAVKGEEDKNVEIKLRTFCSEHQKKAVFVVVNACSSKDYMDNIVGVCFVGQDVTGQKVVMDKYVLIQGDYKAIVHSPNPSIPPIFASDENTCCLEWNTAMEKLTGWSRGEVVGKMLVGEVFGSCCRLKGPDALTKFMIALHNAIGGIDTDKLPFSFFDRNEKNVQTLLTANKRVNMNIIGAFCFLQIASPELQPSLKVQKQQEKKSFARMKELAYICQEIKNPLSGIHFTNSLLENTDLTEDQQQFLETSAACEKQILKIIRDIDLESIENGSLELEKAEFLLGSVINAVVSQAMLLLRERNLQLLRDIPEEIKTLAVYGDQARIQQVLADFLLNMVRYAPSSAGWVEIHVCPTLKQISDGHTLVHTEFRYLERVLQTRMLGLQHPLRSFLNCKLTLVMLHREGMVPKIQFQGLSVCQGRLIWLSFPENTTVALYPLTIWFLLLHRHQSRSITHT

SEQ ID NO: 2167 - protein, 656 aa, Thermobifida fusca YX
MKPRETTQFTHLFTPIRVGRMDLPNRIMATPHATPIGNLWSPDEAEADRNIAYWAARARAGLAWVGGISAALENHLVPGFEPTGVGAAARGVFRLPYFHDRIRKLTDTLHEAGAYVTAQLIMQGGMPHGPSPTVTAYVANQVSHALDRDEIAWFINEYAESARRGKAAGLDGVELHANHDDLLEWFLSPASNHRDDEYGGDLAGRMRFLLEIIDAIRAEVGPDFTLGVRMNLYEALDGGYDAAEGVDIAKALEATGKIDYLSVVVGDNWGAPSYIQPHYYQPAQWADLAAQVTRAVSLPVIYTGRVTDPHTAEKVIAQGQADLVGMARAIITDPEIITKTAQGRVHEIRPCIGCNECIHRRLVDKLPFACAINPYASRELDGPLPPARTPRRVLVVGGGPAGMELAGLLAERGHEVTLWEREEQLGGQMRIAARAAENAAYHDFVTWQEGRLRRAGVTVELGRTATVDNVLSFDADVVAVATGAVPRRLPIPGADAPFVVDGHAVLAGTAQIGERVLLTAAEDHMQPLTIAGYLADHGHHVHLVYQTPGPAPLVGKYTIGAPLAKLTAAGAAFTFMQRVVQIEEGRVATRNIYSDIPGEITGFDSVVVAAGGVPDDSLYHELKRHGKANVHLLGDAYAPRRITFATQQAYALAALV

SEQ ID NO: 2168 - protein, 1144 aa, Populus tremula
MASQSQRQSNQPAHNQAQSSGTSNMRQHHHPTESVSKAIAQYTVDAQLHAVFEQSGGTGKSFDYSKSVRTPNQSVPEEQITAYLSKIQRGGHIQPFGCMIAADEQSFRVIAYSENAKDMLGLTPQSVPSLEKQEILFVGADVRILFRPSSAVLLEKAFGAREITLLNPIWIHSKNSGKPFYAILHRIDVGIVIDLEPARTEDPALSITGAVQSQKLAVRAISQLQSLPGGDIKLLCDTVVDSVRELTGYDRVMVYKFHEDEHGEVVAENKRVDLEPYIGLHYPSTDIPQASRFLFKQNRVRMIVDCHAIPVSVIQDEGLMQPLCLVGSTLRAPHGCHAQYMENMGSIASLAMAVIIYGNDEEAIGGRNSMRLWGLVVCHHTSARCIPFPLRYACEFLMQAFGLQLNMELQLASQLLEKHVLRTQTLLCDMLLRDSPTGIVTQSPSIMDLVKCDGAALYYQGQYYPLGVTPTEAQIKDIVEWLLTLHGDPTGLSTDSLADAGYPGAAFLGDAVCGMAVAYIAERDFLFWFRSHTAKEVKWGGAKHHPEDKDDGQRMHPRSSFKAFLEVVKSRSLPWENAEMDAIHSLQLILRDSFRDAEATNSKAVVHNQLKDMELQGMDELSSVAREMVRLIETATAPIFAVDVDGRINGWNAKVAELTGLSVEEAVGKSLVHDLVYKEYEEIVDKLIHRAVKGEEDKNVEIKLRTFCSEHQKKAVFVVVNACSSKDYMDNIVGVCFVGQDVTGQKVVMDKYVLIQGDYKAIVHSPNPSIPPIFASDENTCCLEWNTAMEKLTGWSRGEVVGKMLVGEVFGSCCRLKGPDALTKFMIALHNAIGGIDTDKLPFSFFDRNEKNVQTLLTANKRVNINIIGAFCFLQIASPELQPSLKVQKQQEKKSFARMKELAYICQEIKNPLSGIHFTNSLLENTDLTEDQQQFLETSAACEKQILKIIRDIDLESIENGSLELEKAEFLLGSVINAVVSQAMLLLRERNLQLLRDIPEEIKTLAVYGDQARIQQVLADFLLNMVRYAPSSAGWVEIHVCPTLKQISDGHTLVHTEFRYLERVLQTRMLGLQHPLRSFLNCKLTLVMLHREGMVPKIQFQGLSVCQGRLIWLSFPENTTVALYPLTIWFLLLHRHQSRSITHT

SEQ ID NO: 2169 - protein, 1144 aa, Populus tremula
MASQSQRQSNQPAHNQVQSSGTSNMRQHHHPTESVSKAIAQYTVDAQLHAVFEQSGGTGKSFDYSKSVRTPNQSVPEEQITAYLSKIQRGGHIQPFGCMIAADEQSFRVIAYSENAKDMLGLTPQSVPSLEKQEILFVGADVRILFRPSSAVLLEKAFGAREITLLNPIWIHSKNSGKPFYAILHRIDVGIVIDLEPARTEDPALSIAGAVQSQKLAVRAISQLQSLPGGDIKLLCDTVVDSVRELTGYDRVMVYKFHEDEHGEVVAENKRVDLEPYIGLHYPSTDIPQASRFLFKQNRVRMIVDCHAIPVSVIQDEGLMQPLCLVGSTLRAPHGCHAQYMENMGSIASLAMAVIIYGNDEEAIGGRNSMRLWGLVVCHHTSARCIPFPLRYACEFLMQAFGLQLNMELQLASQLLEKHVLRTQTLLCDMLLRDSPTGIVTQSPSIMDLVKCDGAALYYQGQYYPLGVTPTEAQIKDIVEWLLTLHGDPTGLSTDSLADAGYPGAAFLGDAVCGMAVAYIAERDFLFWFRSHTAKEVKWGGAKHHPEDKDDGQRMHPRSSFKAFLEVVKSRSLPWENAEMDAIHSLQLILRDSFRDAEATNSKAVVHTQLKDMELQGMDELSSVAREMVRLIETATAPIFAVDVEGRINGWNAKVAELTGLSVEEAMGKSLVHDLVYKEYEEIVDKLIHRAVKGEEDKNVEIKLRTFCSEHQKKAVFVVVNACSSKDYMDNIVGVCFVGQDVTGQKVVMDKYVLIQGDYKAIVHSPNPSIPPIFASDENTCCLEWNTAMEKLTGWSRGEVVGKMLVGEVFGSCCRLKGPDALTKFMIALHNAIGGIDTDKLPFSFFDRNEKNVQTLLTANKRVNINIIGAFCFLQIASPELQPSLKVQKQQEKKSFARMKELAYICQEIKNPLSGIHFTNSLLENTDLTEDQQQFLETSAACEKQILKIIRDIDLESIENGSLELEKAEFLLGSVINAVVSQAMLLLRERNLQLLRDIPEEIKTLAVYGDQARIQQVLADFLLNMVRYAPSSAGWVEIHVCPTLKQISDGHTLVHTEFRYLERVLQTRMLGLQHPLRSFLNCKLTLVMLHREGMVPKIQFQGLSVCQGRLIWLSFPENTTVALYPLTIWFLLLHRHQSRSITHT

SEQ ID NO: 2170 - protein, 671 aa, Escherichia coli
SYPSLFAPLDLGFTTLKNRVLMGSMHTGLEEYPDGAERLAAFYAERARHGVALIVSGGIAPDLTGVGMEGGAMLNDASQIPHHRTITEAVHQEGGKIALQILHTGRYSYQPHLVAPSALQAPINRFVPHELSHEEILQLIDNFARCAQLAREAGYDGVEVMGSEGYLINEFLTLRTNQRSDQWGGDYRNRMRFAVEVVRAVRERVGNDFIIIYRLSMLDLVEDGGTFAETVELAQAIEAAGATIINTGIGWHEARIPTIATPVPRGAFSWVTRKLKGHVSLPLVTTNRINDPQVADDILSRGDADMVSMARPFLADAELLSKAQSGRADEINTCIGCNQACLDQIFVGKVTSCLVNPRACHETKMPILPAVQKKNLAVVGAGPAGLAFAINAAARGHQVTLFDAHSEIGGQFNIAKQIPGKEEFYETLRYYRRMIEVTGVTLKLNHTVTADQLQAFDETILASGIVPRTPPIDGIDHPKVLSYLDVLRDKAPVGNKVAIIGCGGIGFDTAMYLSQPGESTSQNIAGFCNEWGIDSSLQQAGGLSPQGMQIPRSPRQIVMLQRKASKPGQGLGKTTGWIHRTTLLSRGVKMIPGVSYQKIDDDGLHVVINGETQVLAVDNVVICAGQEPNRALAQPLIDSGKTVHLIGGCDVAMELDARRAIAQGTRLALEI

SEQ ID NO: 2171 - protein, 1144 aa, Populus tremula
MASQSQRQSNQPAHNQAQSSGTSNMRQHHHPTESVSKAIAQYTVDAQLHAVFEQSGGTGKSFDYSKSVRTPNQSVPEEQITAYLSKIQRGGHIQPFGCMIAADEQSFRVIAYSENAKDMLGLTPQSVPSLEKQEILFVGADVRILFRPSSAVLLEKAFGAREITLLNPIWIHSKNSGKPFYAILHRIDVGIVIDLEPARTEDPALSIAGAVQSQKLAVRAISQLQSLPGGDIKLLCDTVVDSVRELTGYDRVMVYKFHEDEHGEVVAENKRVDLEPYIGLHYPSTDIPQASRFLFKQNRVRMIVDCHAIPVSVIQDEGLMQPLCLVGSTLRAPHGCHAQYMENMGSIASLAMAVIIYGNDEEAIGGRNSMRLWGLVVCHHTSARCIPFPLRYACEFLMQAFGLQLNMELQLASQLLEKHVLRTQTLLCDMLLRDSPTGIVTQSPSIMDLVKCDGAALYYQGQYYPLGVTPTEAQIKDIVEWLLTLHGDPTGLSTDSLADAGYPGAAFLGDAVCGMAVAYIAERDFLFWFRSHTAKEVKWGGAKHHPEDKDDGQRMHPRSSFKAFLEVVKSRSLPWENAEMDAIHSLQLILRDSFRDAEATNSKAVVHTQLKDMELQGMDELSSVAREMVRLIETATAPIFAVDVEGRINGWNAKVAELTGLSVEEAMGKSLVHDLVYKEYEEIVDKLIHRAVKGEEDKNVEIKLRTFCSEHQKKAVFVVVNACSSKDYMDNIVGVCFVGQDVTGQKVVMDKYVLIQGDYKAIVHSPNPSIPPIFASDENTCCLEWNTAMEKLTGWSRGEVVGKMLVGEVFGSCCRLKGPDALTKFMIALHNAIGGIDTDKLPFSFFDRNEKNVQTLLTANKRVNINIIGAFCFLQIASPELQPSLKVQKQQEKKSFARMKELAYICQEIKNPLSGIHFTNSLLENTDLTEDQQQFLETSAACEKQILKIIRDIDLESIENGSLELEKAEFLLGSVINAVVSQAMLLLRERNLQLLRDIPEEIKTLAVYGDQARIQQVLADFLLNMVRYAPSSAGWVEIHVCPTLKQISDGHTLVHTEFRYLERVLQTRMLGLQHPPRSFLNCKLTLVMLHREGMVPKIQFQGLSVCQGRLIWLSFPENTTVALYPLTIWFLLLHRHQSRSITHT

SEQ ID NO: 2172 - protein, 463 aa, Listeria innocua Clip11262
MNNNFLWGGATASYQCEGAWNVDGKAESMWDYYLHEAGLENGDVASDHYHRYEEDIRMMKEGGQNSYRFSLSWPRIIKNRQGDINLKGIEFYQNLLDTCKKYDIEPFVTLYHWDLPQYWEETGGWLDHDVCAAFEHYAKVCYDHFGDKITNWTTFNEPKWFVANGYKIGNYPPGYQDTQKTMIAAYNVMYASALGVKTFKEGGYPGQIGIVHSYTPVNGVDESIETKIAMRYADNYCNNWILETAALGEFPVDLIAELAKSHDISFMKTDELQTIKQNTVDFIGLNYYSRTLVKPYTGGETQLQFNHSGKKGESKVLIKNWFEQVKDPANETTEWDTEIYPKGLQDGLIEAYERYQLPLYVTENGIGVREDVSVPQVDDAYRIAFMNDHINAIFNAIDAGCDVRGYYAWSPFDLYSWKNGVEKRYGLVAVDFENNQIRKPKASYYWFKEMIESQGKLIKRREF

SEQ ID NO: 2173 - protein, 1144 aa, Populus tremula
MASQSQRQSNQPAHNQAQSSGTSNMRQHHHPTESVSKAIAQYTVDAQLHAVFEQSGGTGKSFDYSKSVRTPNQSVPEEQITAYLSKIQRGGHIQPFGCMIAADEQSFRVIAYSENAKDMLGLTPQSVPSLEKQEILFVGADVRILFRPSSAVLLEKAFGAREITLLNPIWIHSKNSGKPFYAILHRIDVGIVIDLEPARTEDPALSIAGAVQSQKLAVRAISQLQSLPGGDIKLLCDTVVDSVRELTGYDRVMVYKFHEDEHGEVVAENKRVDLEPYIGLHYPSTDIPQASRFLFKQNRVRMIVDCHAIPVSVIQDEGLMQPLCLVGSTLRAPHGCHAQYMENMGSIASLAMAVIIYGNDEEAIGGRNSMRLWGLVVCHHTSARCIPFPLRYACEFLMQAFGLQLNMELQLASQLLEKHVLRTQTLLCDMLLRDSPTGIVTQSPSIMDLVKCDGAALYYQGQYYPLGVTPTEAQIKDIVEWLLTLHGDPTGLSTDSLADAGYPGAAFLGDAVCGMAVAYIAERDFLFWFRSHTAKEVKWGGAKHHPEDKDDGQRMHPRSSFKAFLEVVKSRSLPWENAEMDAIHSLQLILRDSFRDAEATNSKAVVHTQLKDMELQGMDELSSVAREMVRLIETATAPIFAVDVDGRINGWNAKVAELTGLSVEEAMGKSLVHDLVYKEYEEIVDKLIHRAVKGEEDKNVEIKLRTFCSEHQKKAVFVVVNACSSKDYMDNIVGVCFVGQDVTGQKVVMDKYVLIQGDYKAIVHSPNPSIPPIFASDENTCCLEWNTALEKLTGWSRGEVVGKMLVGEVFGSCCRLKGPDALTKFMIALHNAIGGIDTDKLPFSFFDRNEKNVQTLLTANKRVNMNIIGAFCFLQIVSPELQPSLKVQKQQEKKSFARMKELAYICQEIKNPLSGIHFTNSLLENTDLTEDQQQFLETSAACEKQILKIIRDIDLESIENGSLELEKAEFLLGSVINAVVSQAMLLLRERNLQLLRDIPEEIKTLAVYGDQARIQQVLADFLLNMVRYAPSSAGWVEIHVCPTLKQISDGHTLVHTEFRYLERVLQTRMLGLQHPLRSFLNCKLTLVMLHREGMVPKIQFQGLSVCQGRLIWLSFPENTTVALYPLTIWFLLLHRHQSRSITHT

SEQ ID NO: 2174 - protein, 563 aa, Zea mays
MAPLLAAAMNHAAHPVLRSHLGPNNESFSRHHLSSSPQSSKRRFNLSFTPRSARVGNQNGVQLLSPSEIPRRDWFPSDFIFGAATSAYQIEGAWNEDGKGESNWDHFCHNFPERIMDGSNADIGANSYHMYKTDVRLLKEMGMDAYRFSISWPRILPKGTVEGGINQDGIDYYKRLINLLLENGIEPYVTIFHWDVPQALEEKYGGFLDKTQKRIVNDYKNFAKVCFDNFGDKVKNWLTFNEPQTFTSFSYGTGVFAPGRCSPGLDCAIPTGNSLVEPYIAGHNILLAHAEAVDLYNKYYKGENGRIGLAFDVMGRVPYGTSFLDEQAKERSMDINLGWFLEPVVRGDYPFSMRSLARERLPFFSDKQQEKLVGSYNMLGINYYTSIFSKHIDISPKYSPVLNTDDAYASQETYGPDGKPIGPPMGNPWIYLYPEGLKDILMIMKNKYGNPPIYITENGIGDVDTKEKPLPMEAALNDYKRLDYIQRHISTLKESIDLGANVHGYFAWSLLDNFEWYAGYTERYGIVYVDRKNNYTRYMKESAKWLKEFNTAKKPSKKIITPA

SEQ ID NO: 2175 - protein, 248 aa, Debaryomyces hansenii CBS767
MTATKISPLKETDLFKPIKVGQHTLTNKVTFAPTTRNRALKDHTPSDLELEYYDKRSKFPGSLLITEATFVSEQGGLYANVPGIWNDKHVNAWKRITDKVHQNGSFISCQFWFLGRVADPKLLKEHGLDLVSSSALYPNDDFKKKAETAGNPVRALTEQEIHDLIYDSYTKAAKNAMAAGFDYIELHSAHGYLLDQFLQPATNERTDKYGGSVENRARFLLELIDQLITIVGANKLAIRISLGLNFKV

SEQ ID NO: 2176 - protein, 140 aa, Nicotiana tabacum
KEEFHKETCRKIKALHQYDCLRANKSTSAWGLEARVPFLDKEFINVAMSIDPEWKLIKPEQRRIEKWALRRAFDDEEHPYLPKHILYRQKEQFSDGVGYSWIDGLKAHAEQHVTNRMMLNASHIFPHNTPITKEAYYYSM

SEQ ID NO: 2177 - protein, 411 aa, Debaryomyces hansenii CBS767
MRGVKIEELKEKELLKNLKVGEKKLYKKVVYKKNKRLRELDDHTPSDLELEYYDKRSKYAGSLLITEATFVSEQAGLYSNVPGIWNEKHVKGWKEITDRIHENGSFISSQFWFLGRVGDPQLLKDRGLDFVAPSAIYPDDTTKEKAEAAGNPIRALTEKEIHDIIYDTYTNAAKNAIAAGFDYIELHAAHGYLLDQFLQPATNQRTDKYGGSIENRARFVLELVDHLITVVGANRLAIRISPWAKFQGMKAEQDSTHAVTTFSYLLHELQKRADNGNELAYVSIIEPRVLGIIDVEKSQQVGDNTFVGQIWKGIILKSGNYTYDAPHFKTLLHDISDNRTMVGFARYYTSNPDLVKRLYEGWDLTPYDRDTFYATNNWGYNTWNNYDEKAEITKDAEISRLAKAIEEIKAN

SEQ ID NO: 2178 - protein, 159 aa, Nicotiana tabacum
MAMIPSFFGGRRSNIFDPFSLDIFDPFEGFPFSGTVANVPSSARETSAFANARIDWKETPDSHIFKMDVPGIKKEEVKVEVEEGRVLQISGERSREQEEKNDTWHRMERSSGKFMRRFRLPGNAKMEEIKAAMENGVLTVTVPKEEEKKSEVKAIDISG

SEQ ID NO: 2179 - protein, 775 aa, Synechococcus sp. WH 8102
MGGAAVLDWMVQDGERLANCRHDHPLAILGPQPSDAGWTVRVWMPEAHSVTLLEGGREALMTAPNHPWVFETTLSHDPGSNYKVRVERGGITHEQHDPWAFRDEWMGDMDRHLFAQGNHHHIWQRMGAHLTQRDGISGVMFCLWAPHALSVSILGDLNSWDGRHHPMQQRLGGIWELFIPGLAEGSLYKYEIRTQDGHCYQKADPYGFQHEVRPDNSSVVARLDGFQWSDGSWMQRRDSSNPLEQPISVYEMHLGSWIHASAEEPWIQPDGSPRAPVPAADMKPGARLLTYAELAARLIPYVKERGFTHIELMPITEHPFDGSWGYQVTGWYAPTSRYGTPDEFRAFVDRCHAEGIGVIIDWVPGHFPKDAHGLAFFDGTHLYEHGDPRIGEHKEWGTLIFNYSRNEVRNFLVANLVFWFEQFHIDGIRVDAVASMLYRDYLRPDGEWLANEHGGRENTEAVQFLQQANHVLFQHFPGALSIAEESTTWPMVTQPTEIGGLGFNLKWNMGWMHDMLDYFELDPWFRQFHQNNITFSIWYTYTENFMLALSHDEVVHGKSHLLHKMPGDDWQKYANTRALLAYMWTHPGKKTIFMGMEFGQRAEWNVWGDLQWDLLNYEPHKGIQLLVDDLNTLYKAEPALWRDDFDQFGFQWIDCNDNRHSVISFMRRESSSGTWLVVVANFTPQSHSHYRVGVPLAGFYEEIFNTDAARYGGSNLGNMGGKPTDEWSIHGYENSLDLCLPPLSLLVFRHDPKRSLQAASASACDKADDETADTN

SEQ ID NO: 2180 - protein, 378 aa, Fagus sylvatica
MCGGAIISDFIAPTGSRRLTADYLWGDRKKPISGKRFSKPVVDLDDEFELDFQGFKDEEESDIDEEEVLVQDVKPFTFSAPPSSGSKPVKSVEFNGQAEKSAKRKRKNQYRGIRQRPWGKWAAEIRDPRKGVRVWLGTFNTAEKAARAYDAEARRIRGKKAKVNFPDETPRASPKRSVKANLQKPLAKANLNSVQPNLNQNFNFMNNSDQDYTMGLMEEKPFTNQYGYMDSIPANADVGLKPFASNNTTPYFNSDQGSNSFDCSDYGWGEQGSKTPEISSVLSATLEGDESQFVEDAMPTKKLKSDSGNAVFIENNTAKTLSEELSAFESQMNFQMPFLEGSWESNMEALFSGDTTQDGNSMDLWSFDDLPVMAGGVL

SEQ ID NO: 2181 - protein, 115 aa, Zea mays
  misc_feature (106)..(106): Xaa can be any naturally occurring amino acid
HASSNTLDGLNGFDGTDTHYFHSGPRGHHWMWDSRLFNYGNWEVLRFLLSNARWGLEEYKFDGFRFDGVTSMMYTHHGLQVTFTGNFNEYFGFATDVDAVVYLMLXNDLIHGLYP

SEQ ID NO: 2182 - protein, 246 aa, Lycopersicon esculentum
MGRGRVELKRIENKINRQVTFAKRRNGLLKKAYELSVLCDAEVALLVFSNRGKLYEFCSTSNMLKTLDRYQKCSYGTLEVNRSIKDNEQSSYREYLKLKAKYESLQRYQRHLLGDELGPLTIDDLEHLEVQLDTSLKHIRSTRTQMMLDQLSDLQTKEKLWNEANKVLERKMEEIYAENNMQQAWGGGEQSLNYGQQQHPQSQGFFQPLECNSSLQIGYDPITTSSQITAVTNAQNVNGMIPGWML

SEQ ID NO: 2183 - protein, 409 aa, Zea mays
  misc_feature (371)..(372): Xaa can be any naturally occurring amino acid
  misc_feature (395)..(395): Xaa can be any naturally occurring amino acid
  misc_feature (399)..(399): Xaa can be any naturally occurring amino acid
MSAAATKVKRRVGKYELGRTIGEGTFAKVRFAKNTETGEPVAVKILDKEKVLRHKMAEQIKREISTMKLIKHPNVVRIYEVMGSKTKVYIVLEYVTGGELFDTIANQGRMREGEARSYFQQLINAVDYCHSRGVYHRDLKPENLLLDSYGNLNVSDFGLSALSQQIKDDGLLHTTCGTPNYVAPEVLEDQGYDGAMADLWSCGVILFVLLAGYLPFEDSNLMTLYKKISNAEYTFPPWTSFPAKRLLTRILDPNPMTENSCDFRITIPEILEDEWFKKGYKRPEFDEKYDTPLDDVDAVFNDSEEHHVTEKKEEEPVALNAFELISRSAGLNLGNLFDSEQEFKRETRFTSKCPPKEIIRKIEEAAKPLGXXVQKKNYKLRLEKDKAGEERDNLXVCYXRILQVAPSLH

SEQ ID NO: 2184 - protein, 92 aa, Triticum aestivum
  misc_feature (15)..(15): Xaa can be any naturally occurring amino acid
  misc_feature (38)..(38): Xaa can be any naturally occurring amino acid
SGGAPVEAKVHQCSXCHRTFPSGQALGGHKRLHYEGGXAGAGTGKDKEAAKAKAAALLRDFDLNLPASGVAGDEAESPPPEAKRARLMLLAI

SEQ ID NO: 2185 - protein, 115 aa, Zea mays
HASSNTLDGLNGFDGTDTHYFHSGPRGHHWMWDSRLFNYGNWEVLRFLLSNARWGLEEYKFDGFRFDGVTSMMYTHHGLQVTFTGNFNEYFGFATDVDAVVYLMLVNDLIHGLYP

SEQ ID NO: 2186 - protein, 115 aa, Zea mays
HASSNTLDGLNGFDGTDTHYFHSGPRGHHWMWDSRLFNYGNWEVLKFLLSNARWGLEEYKFDGFRFDGVTSMMYTHHGLQVTFTGNFNEYFGFATDVDAVVYLMLVNDLIHGLYP

SEQ ID NO: 2187 - protein, 219 aa, Lactococcus lactis
GGLYAPFVEPELEWDFRLKNVISINTSGHKYGLVYPGVGWVLWRDKKYLPEELIFKVSYLGGELPTMAINFSHSASQLIGQYYNFVRYGFDGYKAIHERTHKVAMFLAKEIEKTGMFEIMNDGSQLPIVCYKLKEDSNRGWNLYDLADRLLMKGWQVPAYPLPKNLENEIIQRLVIRADFGMNMAFNYVQDMQEAIEALNKAHILYHEEPENKTYGFTH

SEQ ID NO: 2188 - protein, 489 aa, Talaromyces emersonii
MTTTETPTTTTTSTLPPDFLWGFATASYQIEGAFDEDGRLPSIWDTFSKTPGKVEDGTNGDVACDSYHRTGEDIEILKKYGAKIYRFSLSWPRIIPLGGRNDPINEKGLQFYSKFLDDLHAAGIEPFVTLFHWDLPDELMKRYGGMLNKEEFVADYANYARVVFNALGSKVKHWITFNEPWCSSVLGHNTGKHAPGRTSDRTKSPEGDGTREPWIVGHNLLVAHGTVVDIYRREFKEKQGGEIGITLNGDWAEPWDPENPADVEACDRKIEFAISWFADPIYHGKYPDSMVKQLGDRLPKFTPEEIAFVHGSNDFYGMNHYCENYIRNRTGEPDPEDIAGNLDILMEDKNGNPIGPETQCEWLRPFPLGFRKLLKWLADRYNNPKIYVTENGTSVKGESDKPLEEVLNDEFRVQYYRDYIGAMVDAVAQDGVNVKAYMAWSLLDNFEWSEGYRSRFGVTYVDYKNGQKRIPKKSALVIGELFNKYIRKE

SEQ ID NO: 2189 - protein, 426 aa, Triticum aestivum
  misc_feature (349)..(349): Xaa can be any naturally occurring amino acid
  misc_feature (365)..(365): Xaa can be any naturally occurring amino acid
PRVRSHASNNTLDGLNGFDGTDTHYFHGGSRGHHWMWDSRVFNYGNKEVIRFLLSNARWWLEEYKFDGFRFDGATSMMYTHHGLQVTFTGSYHEYFGFATDVDAVVYLMLVNDLIHGLYPEAVTIGEDVSGMPTFALPVQVGGVGFDYRLHMAVADKWIELLKGNDEAWEMGNIVHTLTNRRWLEKCVTYAESHDQALVGDKTLAFWLMDKDMYDFMALNGPSTPNIDRGIALHKMIRLITMGLGGEGYLNFMGNEFGHPEWIDFPRGPQVLPSGKFIPGNNNSYDKCRRRFDLGDAEFLRYHGMQQFDQAMQHLEEKYGFMTSDHQYVSRKHEEDKVIVFEKGDLVFXVFNFHWSNSYFDYRVXGCLKPGKYKVVLDSDAGLFGGFGRIHHTAEHFTSDCQHDNRPHSFSVYTPSRTCVVYAPMN

SEQ ID NO: 2190 - protein, 163 aa, Lactococcus lactis
GGLYAPFVEPELEWDFRLKNVISINTSGHKYGLVYPGVGWVLWRDKKYLPEELIFKVSYLGGELPTMAINFSHSASQLIGQYYNFVRYGFDGYKAIHERTHKVAMYLAEEIEKTGMFEIMNDGSQLPIVCYKLKENSNLGWNLYDLADRLFNEGMASACLSTS

SEQ ID NO: 2191 - protein, 340 aa, Alkaliphilus metalliredigenes QYMF
MSALFSPFTLKDLTLKNRIVMAPMCQYSASETGYANQWHQVHYVSRAVGGVGLILLEATAVEPRGRISQKDLGIWENGHVTGLKSIVTACKQYGARVGIQLAHAGRKCHIPSEKIVAPSAIAFNEEYATPTSLSQNEIQTIVQAFIHGAARALEAGFDVIEVHGAHGYLINEFLSPLTNHREDQYGGSPENRVRFLKEVLEGIQGVWPKNLPIILRVSAEDYIKEGNHPEDLAEMINLVKEYGIDMVNVSSGAVVPAKIKPYPGYQIPFSETIKKQTNLPTIAGGLITTATMAEEVLRNERADLVYLGRELLRNPYWPLHSAKEVRDDILWPLQYEMSKV

SEQ ID NO: 2192 - protein, 1144 aa, Populus tremula
MASQSQRQSNQPAHNQAQSSGTSNMRQHHHPTESVSKAIAQYTVDAQLHAVFEQSGGTGKSFDYSKSVRTPNQSVPEEQITAYLSKIQRGGHIQPFGCMIAADEQSFRVIAYSENAKDMLGLTPQSVPSLEKQEILFVGADVRILFRPSSAVLLEKAFGAREITLLNPIWIHSKNSGKPFYAILHRIDVGIVIDLEPARTEDPALSIAGAVQSQKLAVRAISQLQSLPGGDIKLLCDTVVDSVRELTGYDRVMVYKFHEDEHGEVVAENKRVDLEPYIGLHYPSTDIPQASRFLFKQNRVRMIVDCHAIPVSVIQDEGLMQPLCLVGSTLRAPHGCHAQYMENMGSIASLAMAVIIYGNDEEAIGGRNSMRLWGLVVCHHTSARCIPFPLRYACEFLMQAFGLQLNMELQLASQLLEKHVLRTQTLLCDMLLRDSPTGIVTQSPSIMDLVKCDGAALYYQGQYYPLGVTPTEAQIKDIVEWLLTLHGDPTGLSTDSLADAGYPGAAFLGDAVCGMAVAYIAERDFLFWFRSHTAKEVKWGGAKHHPEDKDDGQRMHPRSSFKAFLEVVKSRSLPWENAEMDAIHSLQLILRDSFRDAEATNSKAVVHNQLKDMELQGMDELSSVAREMVRLIETATAPIFAVDVDGRINGWNAKVAELTGLSVEEAMGKSLVHDLVYKEYEEIVDKLIHRAVKGEEDKNVEIKLRTFCSEHQKKAVFVVVNACSSKDYMDNIVGVCFVGQDVTGQKVVMDKYVLIQGDYKAIVHSPNPSIPPIFASDENTCCLEWNTAMEKLTGWSRGEVVGKMLVGEVFGSCCRLKGPDALTKFMIALHNAIGGIDTDKLPFSFFDRNEKNVQTLLTANKRVNINIIGAFCFLQIASPELQPSLKVQKQQEKKSFARMKELAYICQEIKNPLSGIHFTNSLLENTDLTEDQQQFLETSAACEKQILKIIRDIDLESIENGSLELEKAEFLLGSVINAVVSQAMLLLRERNLQLLRDIPEEIKTLAVYGDQARIQQVLADFLLNMVRYAPSSAGWVEIHVCPTLKQISDGHTLVHTEFRYLERVLQTRMLGLQHPLRSFLNCKLTLVMLHREGMVPKIQFQGLSVCQGRLIWLSFPENTTVALYPLTIWFLLLHRHQSRSITHT

SEQ ID NO: 2193 - protein, 1144 aa, Populus tremula
MASQSQRQSNQPAHNQAQSSGTSNMRQHHHPTESVSKAIAQYTVDAQLHAVFEQSGGTGKSFDYSKSVRTPNQSVPEEQITAYLSKIQRGGHIQPFGCMIAADEQSFRVIAYSENAKDMLGLTPQSVPSLEKQEILFVGADVRILFRPSSAVLLEKAFGAREITLLNPIWIHSKNSGKPFYAILHRIDVGIVIDLEPARTEDPALSIAGAVQSQKLAVRAISQLQSLPGGDIKLLCDTVVDSVRELTGYDRVMVYKFHEDEHGEVVAENKRVDLEPYIGLHYPSTDIPQASRFLFKQNRVRMIVDCHAIPVSVIQDEGLMQPLCLVGSTLRAPHGCHAQYMENMGSIASLAMAVIIYGNDEEAIGGRNSMRLWGLVVCHHTSARCIPFPLRYACEFLMQAFGLQLNMELQLASQLLEKHVLRTQTLLCDMLLRDSPTGIVTQSPSIMDLVKCDGAALYYQGQYYPLGVTPTEAQIKDIVEWLLTLHGDPTGLSTDSLADAGYPGAAFLGDAVCGMAVAYIAERDFLFWFRSHTAKEVKWGGAKHHPEDKDDGQRMHPRSSFKAFLEVVKSRSLPWENAEMDAIHSLQLILRDSFRDAEATNSKAVVHTQLKDMELQGMDELSSVAREMVRLIETATAPIFAVDVDGRINGWNAKVAELTGLSVEEAMGKSLVHDLVYKEYEEIVDKLIHRAVKGEEDKNVEIKLRTFCSEHQKKAVFVVVNACSSKDYMDNIVGVCFVGQDVTGQKVVMDKYVLIQGDYKAIVHSPNPSIPPIFASDENTCCLEWNTAMEKLTGWSRGEVVGKMLVGEVFGSCCRLKGPDALTKFMIALHNAIGGIDTDKLPFSFFDRNEKNVQTLLTANKRVNINIIGAFCFLQIASLELQPSLKVQKQQEKKSFARMKELAYICQEIKNPLSGIHFTNSLLENTDLTEDQQQFLETSAACEKQILKIIRDIDLESIENGSLELEKAEFLLGSVINAVVSQAMLLLRERNLQLLRDIPEEIKTLAVYGDQARIQQVLADFLLNMVRYAPASAGWVEIHVCPTLKQISDGHTLVHTEFRYLERVLQTRMLGLQHPPRSFLNCKLTLVMLHREGMVPKIQFQGLSVCQGRLIWLSFPENTTVALYPLTIWFLLLHRHQSRSITHT

SEQ ID NO: 2194 - protein, 280 aa, Pleurotus djamor
MERYNTRTASNFPGLVFDCAEEAQSGYKHIDTAYNYHTEKYVGNAVRESGIPREELFITTKLPWHHYARVAESFQESLDALGLGYIDLYLIHWPQPILYDPNDPLPKNPDGTPKTTNYPFTKIWADMERLLDTGKVRAIGVSNFSIKNLEILLESAKVVPAVNQVELHPYLAQPELVDYCKQKGIAITAYTPTGYQTVRDDPVIVELASKYRVSPAQVILAWHMSRGVIVTPKSANAERQRENINVSFLHFPINSFDVLFLASTAATCPGACRSSAYISS

SEQ ID NO: 2195 - protein, 306 aa, Pleurotus djamor
MSAYPPIVLNTGARMPALALGGWAGLTEEERTQAKEWFLTALKSGYRHIDTAQIYYTEKSVGNAIRESGIPREELFITTKLPWNHHSRVAESFQKSLENLGTEYIDLYLVHFPQRVFYDETTDFPRNPDGSIKVVNSPTLNDVWADVETLLDTGKVKAIGVSNYSIKTLEELLKTAKVVPAVNQVELHPFLAQSKLLAYCKEKGIAVTAYTPTGYQTVLTDPTIVELAGKYGVSPAQIVLAWHLSRGVAAAPKSANESRQKENLNLPFLQPEDVAKISALDRGQRIANKADERGQVWGLTLEELGW

SEQ ID NO: 2196 - protein, 1144 aa, Populus tremula
MASQSQRQSNQPAHNQAQSSGTSNMRQHHHPTESVSKAIAQYTVDAQLHAVFEQSGGTGKSFDYSKSVRTPNQSVPEEQITAYLSKIQRGGHIQPFGCMIAADEQSFRVIAYSENAKDMLGLTPQSVPSLEKQEILFVGADVRILFRPSSAVLLEKAFGAREITLLNPIWIHSKNSGKPFYAILHRIDVGIVIDLEPARTEDPALSIAGAVQSQKLAVRAISQLQSLPGGDIKLLCDTVVDSVRELTGYDRVMVYKFHEDEHGEVVAENKRVDLEPYIGLHYPSTDIPQASRFLFKQNRVRMIVDCHAIPVSVIQDEGLMQPLCLVGSTLRAPHGCHAQYMENMGSIASLAMAVIIYGNDEEAIGGRNSMRLWGLVVCHHTSARCIPFPLRYACEFLMQAFGLQLNMELQLASQLLEKHVLRTQTLLCDMLLRDSPTGIVTQSPSIMDLVKCDGAALYYQGQYYPLGVTPTEAQIKDIVEWLLTLHGDPTGLSTDSLADAGYPGAAFLGDAVCGMAVAYIAERDFLFWFRSHTAKEVKWGGAKHHPEDKDDGQRMHPRSSFKAFLEVVKSRSLPWENAEMDAIHSLQLILRDSFRDAEATNSKAVVHTQLKDMELQGMDELSSVAREMVRLIETATAPIFAVDVDGRINGWNAKVAELTGLSVEEAMGKSLVHDLVYKEYEEIVDKLIHRAVKGEEDKNVEIKLRTFCSEHQKKAVFVVVNACSSKDYMDNIVGVCFVGQDVTGQKVVMDKYVLIQGDYKAIVHSPNPSIPPIFASDENTCCLEWNTAMEKLTGWSRGEVVGKMLVGEVFGSCCRLKGPDALTKFMIALHNAIGGIDTDKLPFSFFDRNEKNVQTLLTANKRVNMNIIGAFCFLQIASPELQPSLKVQKQQEKKSFARMKELAYICQEIKNPLSGIHFTNSLLENTDLTEDQQQFLETSAACEKQILKIIRDIDLESIENGSLELEKAEFLLGSVINAVVSQAMLLLRERNLQLLRDIPEEIKTLAVYGDQARIQQVLADFLLNMVRYAPSSAGWVEIHVCPTLKQISDGHTLVHTEFRYLERVLQTRMLGLQHPPRSFLNCKLTLVKLHREGMVPKIQFQGLSVCQGRLIWLSFPENTTVALYPLTIWFLLLHRHQSRSITHT

SEQ ID NO: 2197 - protein, 1146 aa, Populus tremula
MASQSQRQSNQPAHNQAQSSGTSNMRQHHHPTESVSKAIAQYTVDAQLHAVFEQSGGTGKSFDYSKSVRTPNQSVPEEQITAYLSKIQRGGHIQPFGCMIAADEQSFRVIAYSENAKDMLGLTPQSVPSLEKQEILFVGADVRILFRPSSAVLLEKAFGAREITLLNPIWIHSKNSGKPFYAILHRIDVGIVIDLEPARTEDPALSIAGAVQSQKLAVRAISQLQSLPGGDIKLLCDTVVDSVRELTGYDRVMVYKFHEDEHGEVVAENKRVDLEPYIGLHYPSTDIPQASRFLFKQNRVRMIVDCHAIPVSVIQDEGLMQPLCLVGSTLRAPHGCHAQYMENMGSIASLAMAVIIYGNDEEAIGGRNSMRLWGLVVCHHTSARCIPFPLRYACEFLMQAFGLQLNMELQLASQLLEKHVLRTQTLLCDMLLRDSPTGIVTQSPSIMDLVKCDGAALYYQGQYYPLGVTPTEAQIKDIVEWLLTLHGDPTGLSTDSLADAGYPGAAFLGDAVCGMAVAYIAERDFLFWFRSHTAKEVKWGGAKHHPEDKDDGQRMHPRSSFKAFLEVVKSRSLPWENAEMDAIHSLQLILRDSFRDAEATNSKAVVHNQLKDMELQGMDELSSVAREMVRLIETATAPIFAVDVEGRINGWNAKVAELTGLSVEEAMGKSLVHDLVYKEYEEIVDKLIHRAVKGEEDKNVEIKLRTFCSEHQKKAVFVVVNACSSKDYMDNIVGVCFVGQDVTGQKVVMDKYVLIQGDYKAIVHSPNPSIPPIFASDENTCCLEWNTAMEKLTGWSKGEVVGKMLVGEVFGNCCKLKGPNALTKFMIALHNAIGGIDTDKLPFSFFDRNEKNVQTLLTANKRVNMKGDIIGAFCFLQIASPELQPSLKVQKQQEKKSFARMKELAYICQEIKNPLSGIHFTNSLLENTDLTEDQQQFLETSAACEKQILKIIRDIDLESIENGSLELEKPEFLLGSVINAVVSQAMLLLRERNLQLLRDIPEEIKTLAVYGDQARIQQVLADFLLNMVRYAPSSAGWVEIHVCPTLKQISDGHTLVHTEFRYLERVLQTRMLGLQHPLRSFLNCKLTLVKLHREGMVPKIQFQGLSVCQGRLIWLSFPENTTVALYPLTIWFLLLHRHQSRSITHT

SEQ ID NO: 2198 - protein, 1146 aa, Populus tremula
MASQSQRQSNQPAHNQAQSSGTSNMRQHHHPTESVSKAIAQYTVDAQLHAVFEQSGGTGKSFDYSKSVRTPNQSVPEEQITAYLSKIQRGGHIQPFGCMIAADEQSFRVIAYSENAKDMLGLTPQSVPSLEKQEILFVGADVRILFRPSSAVLLEKAFGAREITLLNPIWIHSKNSGKPFYAILHRIDVGIVIDLEPARTEDPALSIAGAVQSQKLAVRAISQLQSLPGGDIKLLCDTVVDSVRELTGYDRVMVYKFHEDEHGEVVAENKRVDLEPYIGLHYPSTDIPQASRFLFKQNRVRMIVDCHAIPVSVIQDEGLMQPLCLVGSTLRAPHGCHAQYMENMGSIASLAMAVIIYGNDEEAIGGRNSMRLWGLVVCHHTSARCIPFPLRYACEFLMQAFGLQLNMELQLASQLLEKHVLRTQTLLCDMLLRDSPTGIVTQSPSIMDLVKCDGAALYYQGQYYPLGVTPTEAQIKDIVEWLLTLHGDPTGLSTDSLADAGYPGAAFLGDAVCGMAVAYIAERDFLFWFRSHTAKEVKWGGAKHHPEDKDDGQRMHPRSSFKAFLEVVKSRSLPWENAEMDAIHSLQLILRDSFRDAEATNSKAVVHTQLKDMELQGMDELSSVAREMVRLIETATAPIFAVDVDGRINGWNAKVAELTGLSVEEAMGKSLVHDLVYKEYEEIVDKLIHRAVKGEEDKNVEIKLRTFCSEHQKKAVFVVVNACSSKDYMDNIVGVCFVGQDVTGQKVVMDKYVLIQGDYKAIVHSPNPSIPPIFASDENTCCLEWNTAMEKLTGWSRGEVVGKMLVGEVFGSCCKLKGPNSLTKFMIALHNAIGGIDTDKLPFSFFDRNEKNVQTLLTANKRVNMKGDIIGAFCFLQIASPELQPSLKVQKQQEKKSFARMKELAYICQEIKNPLSGIHFTNSLLENTDLTEDQQQFLETSAACEKQILKIIRDIDLESIENGSLELEKAEFLLGSVINAVVSQAMLLLRERNLQLLRDIPEEIKTLAVYGDQARIQQVLADFLLNMVRYAPSSAGWVEIHVCPTLKQISDGHTLVHTEFRYLERVLQTRMLGLQHPLRSFLNCKLTLVKLHREGMVPKIQFQGLSVCQGRLIWLSFPENTTVALYPLTIWFLLLHRHQSRSITHT

SEQ ID NO: 2199 - protein, 230 aa, Nocardioides sp. JS614
MTEAHDYTGAVRPGGPPDVRTLAHLSITKVAVDEQMSNNCYLLRCRETGAQLLVDAAAEPATLLPLIGETGLTAVVTTHQHWDHHRALADIVAATGAEVVVGLPDAAAVTEQTGVEVTRTVSEGDTVAVGTCTLQVITIAGHTPGSVALLYDDTASEGGRPHLFTGDSLFPGGVGNTFGDEAAFAQLIDDVETKIFQRLPDDTWFYPGHGDDSTLGAERPHLGEWRARGW

SEQ ID NO: 2200 - protein, 245 aa, Malus x domestica
GKVELKRIENKSNRQVTFSKRRNGLLKKAFELSVLCDAEVALIIFSGRGKLYEFSSSLSMMKTLERYQRCSYSSLDANRPANETQNSYQEYLQLETRVEALQQSQRNLLGEDLATLNTKKLEELEHQLETSLNKIRSTKTQFMLDQLSDLQNREQMLVEANKALRRKLEETSVQAPQFMAWEAAGDGHNNIQQTWLPSNSEAFFHPFGGNNSTSQIGYAHLGSHNGMDVGNPGQHVNGYIPGWML

SEQ ID NO: 2201 - protein, 116 aa, Schizosaccharomyces pombe
MSADGLDYTNLLPIANVARIMKSALPENAKISKEAKDCVQDCVSEFISFVTGEASEQCTQEKRKTITGEDVLLALNTLGFENYAEVLKISLTKYREQQARSASMKETKQSRSEEPQ

SEQ ID NO: 2202 - protein, 121 aa, Zea mays
ASAHASGLTDDDLEELKGCVDLGFGFSYREIPELCGTLPALDLCYSMSQRFMDEHHHHHHHHHHQQLGKAEEAPPLAPASPAQPAATTNWKISSPGDSPDEVKARLKYWAQAVACTVRLCS

SEQ ID NO: 2203 - protein, 515 aa, Saccharomyces cerevisiae
MSKLGQEKNEVNYSDVREDRVVTNSTGNPINEPFVTQRIGEHGPLLLQDYNLIDSLAHFNRENIPQRNPHAHGSGAFGYFEVTDDITDICGSAMFSKIGKRTKCLTRFSTVGGDKGSADTVRDPRGFATKLYTEEGNLDWVYNNTPVFFIRDPSKFPHFIHTQKRNPQTNLRDADMFWDFLTTPENQVAIHQVMILFSDRGTPANYRSMHGYSGHTYKWSNKNGDWHYVQVHIKTDQGIKNLTIEEATKIAGSNPDYCQQDLFEAIQNGNYPSWTVYIQTMTERDAKKLPFSVFDLTKVWPQGQFPLRRVGKIVLNENPLNFFAQVEQAAFAPSTTVPYQEASADPVLQARLFSYADAHRYRLGPNFHQIPVNCPYASKFFNPAIRDGPMNVNGNFGSEPTYLANDKSYTYIQQDRPIQQHQEVWNGPAIPYHWATSPGDVDFVQARNLYRVLGKQPGQQKNLAYNIGIHVEGACPQIQQRVYDMFARVDKGLSEAIKKVAEAKHASELSSNSKF

SEQ ID NO: 2204 - protein, 365 aa, Cryptococcus neoformans var. neoformans
MADFVKLSIFGTVFEVTTRYVDLQPVGMGAFGLVCSAKDQLSGTSVAIKKIMKPFSTPVLSKRTYRELKLLKHLRHENIISLSDIFISPLEDIYFVTELLGTDLHRLLTSRPLEKQFIQYFLYQILRGLKYVHSAGVVHRDLKPSNILVNENCDLKICDFGLARIQDPQMTGYVSTRYYRAPEIMLTWQKYDVAGDIWSTGCIFAEMLEGKPLFPGKDHVNQFSIITELLGTPPDDVIQTIASENTIRFVQSLPKREKVPFSTKFPNADPVSLDLLEKMLVFDPRTRISAAEGLAHEYLAPYHDPTDEPVAAEVFDWSFNDADLPVDTWKVMMYSEILDFHNLGDISQNEAEGPVTGEVPAAPAS

SEQ ID NO: 2205 - protein, 211 aa, Corynebacterium efficiens YS-314
MAHDGLKVENIVTSGIFALDGGEWEVDNNIWIVGNNEEVYIIDAAHNATPIMNAVGGRKVKGILCTHAHNDHITVAPELSREFDAPIFVHPGDRMLWEETHGDLKHEELVDGQRFDIAGTELIVLNTPGHSPGSCSFYVPEAAELFSGDTLFQGGPGATGRKYSSFDTIIESLKTSILDLPAETTVRTGHGDHTTVGAEAPHLEEWIKRGY

SEQ ID NO: 2206 - protein, 248 aa, Malus x domestica
MGRGRVELKRIENKINRQVTFAKRRNGLLKKAYELSVLCDAEVALIIFSSRGKLYEFCSSFSMMKTLEKYQSCSYGSLEANLPANETQNSYQDYLMLKARVEVLQQSQRNLLGEDLSHLNTKELEHLEHQLETSLKQIRSRKTQFILDQLSDLQNREQMLVEANKALKRKLEETSVHAPEGMAWEAAGHGPNNIQQTRLPSHSEAFFHPLEGNNSSSQIGYTHMGSDNEMNVGNPGQYVNGYIPGWML

SEQ ID NO: 2207 - protein, 486 aa, Shewanella oneidensis MR-1
MSQQYLTSQSGSPIADDQNSLSAGERGPLLLQDWHLIEKLAHFNRERIPERVVHAKGTGVYGTFTLTKDLSDYTIADHFNGVGKQTETFVRFSTVGGEMGSADAERDPRGFGLRFYTARGNHDIVGNNTPTFFLRDGIKFPDFIHTQKRNPLTNLKDPQAMWDFWSLNPEAMHQVTILMSDRGIPANYRQMHGYGSHTFSFWNAKGERFWVKFHFKSQQGVVNLSNEQADKLKGIDPDSSQRDMVVAITDGNFPRWTVNVQIMPEADANTYHINPFDLTKVWPHGDYPLIEIGVLELNRLPQNYFAEVEQVALAPSNLVPGVGASPDKMLQARLFAYADAQRYRIGANYNQLPVNCPHAAKANHHQRAGAMAGTQCPYHGSQTGGDASANYGPNSTIGALVEPANFAEPPLRLDGETARYSRYNQDDYTQAGNLYRIFSEEEKARLVATISGSLRQASMDVQQRMLAHFQKADADYGQRIKMALGL

SEQ ID NO: 2208 - protein, 207 aa, Malus x domestica
MGRGKIEIKRIENTTNRQVTFCKRRNGLLKKAYELSILCDAEVALIVFSTRGRLYEYSNNNSIRNTIERYKKACSDSTGSSSVTEINAQNSNRHLMGDALSTLTVKELKQVENRLERGITRIRSKKHELLLAEIEYFQKKEIELENENVYFRTKVSEVERLQQANMVSGSEMNAIQALASRHFFSQNMIEGGEATFPQQDKKNLHLG

SEQ ID NO: 2209 - protein, 94 aa, Nicotiana plumbaginifolia
QWREGPLGPKTLCNACGVRYRSGRLFPEYRPAASPTFIPTLHSNSHRKVVEMRKKAIYGETSALEEPHNVIVEGPPMSPAPEFVPMSSYLFDVY

SEQ ID NO: 2210 - protein, 903 aa, Oryza sativa (japonica cultivar-group)
MDSCALFLSTPRPPPPLVPAHRRRPLASRSGLRRREGCPCSCASSSSSSGRAGSQDRPPRPWQQKQRTQRPGRGEAIDPVGFLAKHGISDRAFAQFLRDRYKALKDRRWELHSRLIDLKEASSGFELMGMHRHRQHRVDFMEWAPGARYCSVVGDFNQWSTTENCAREGHLGHDDFGYWTIILEDKLREGQEPDEYYFQEYNYADDYDKGDNGVDVEELIHRMNEEYWEPGEIKSQKSRLEVVAKLYEQMFGPNGPQTEEELGDIPDAETRYNEWKALQKDDSASSLPCYDIIDNGQEFDIFNVATDRVSFEKFQGKSPPLAYWVEMRKGRKAWLEKYVPAISHKDKYRVYFNTPDGGLERIPAWATYVLPDAEGKQSYAVHWDPPPEEIYKWRFERPKVKGSLRIYECHVGISGSEQKISSFQEFTSNVLPHIKDAGYNAIQLIGIVEHKDYSSVGYKVTNYFSVSSRFGSPDDFKKLVDEAHGLGLVVLLDIVHSYASADELVGLSLFDGSNDCYFHSGKRGHHKYWGTRMFKYDDIDVLHFLLSNLNWWVTEYRVDGFQFHSLPSMLYTHNGFSTFTGATEEYYNQYVDEDALIYLIIANEMLHELHPDIITIAEDATFYPGLCEPTTQGGLGFDYWVNLSIPEMWLWHLENVPEQEWSMNKIMRVLVNNNSNMLSYVENHNQSISGRKSFAEIILYEGKCSNSSVDNDLIFRASSLLNIIKLITFTTSGGAYLNFIGNEFAHPKRIEFPMSSNDYSFCLANRQWELLDKGVHKHIFNFDKDIMSLDGKERLISGGSPIVHHCDDTSMIIYFTRGPFLFVFNFNPDASYQLYSVGVDEAGEYQLILNTDETKYGGRGELTSNQYMKRTSDNRVGGCRNSLELTLPSRSAQVFKLVRILRI

SEQ ID NO: 2211 - protein, 115 aa, Zea mays
  misc_feature (55)..(55): Xaa can be any naturally occurring amino acid
  misc_feature (100)..(100): Xaa can be any naturally occurring amino acid
  misc_feature (106)..(106): Xaa can be any naturally occurring amino acid
HASSNTLDGLNGFDGTDTHYFHSGPRGHHWMWDSRLFNYGNWEVLRFLLSNARWXLEEYKFDGFRFDGVTSMMYTHHGLQVTFTGNFNEYFGFATDVDAXVYLMLXNDLIHGLYP

SEQ ID NO: 2212 - protein, 202 aa, Amanoa strobilacea
TVLFMKNKVRMICDCLAPPVKVIQDKRFAQPLSLCGSTLRSPHGCHVQYMTNMGSIASLVMSVTLNEDDDEMDSDQERGIKLWGLVVCHHTSPRFIPFPLRYACEFLMQVFGVQVSKEVQLAAQTREKHILQTQTLLCDMLLRDAPVAIITRSPNVMDLVKCDGAALYYRKKFWLLGVTPTEAQIKDIAEWLLEYHGGSTGL

SEQ ID NO: 2213 - protein, 206 aa, Triticum aestivum
MASRRRTLLKVIILGDSGVGKTSLMNQYVNKKFSNQYKATIGADFLTKEVQFEDRLFTLQIWDTAGQERFQSLGVAFYRGADCCVLVYDVNSMKSFDNLNNWREEFLIQASPSDPDNFPFVLLGNKVDVDGGNSRVVSEKKAKAWCASKGNIPYFETSAKDGINVEEAFQCIVKNALKNEPEEELYMPDTVDVVGGNRGQGSSGCC

SEQ ID NO: 2214 - protein, 175 aa, Triticum aestivum
  misc_feature (86)..(86): Xaa can be any naturally occurring amino acid
MSLIRRTNVLDPFSLDLWDPFDGFPFGSGGSGSLVPRTSSDTAAFASARIDWKETPEAHVFKADVPGLKKEEVKVEVEDGNILQIXGERNKEQEEKTDTWHRVERSSGKFLRRFRLPENAKAEQVKASMENSVLTVTVPKEEAKKPEVKSIQISGAMRWTAVCRAVVWSFARSSR

SEQ ID NO: 2215 - protein, 417 aa, Anabaena variabilis ATCC 29413
MGFMQKQFFRLGFSLLVALSLAVGVVVQPATALTEEQKLVSEVWRIVNRSYLDETFNHQNWANVRQKALEKPLTDHKAAYGAIQNMLKTLGDPFTRFLDPEQYRSLQVSTSGELTGVGLQIALNPQSGKLEVVSPIAGSPADQAGIKPRDRIVKIEGISTTDLTLDEAATRMRGPIGSLVTLVIERDGEGEKEIRIVRDRIALNPVVAELRSSPEGKSFGYLRLTQFNANASMELAHAISSLEKKGAAAYILDLRNNPGGLLQAGIEIARQWLDSGTIVYTVNRQGIQGSFEAFGPALTDDPLIILVNQGTASASEILAGALQDNGRAQLVGETTFGKGLIQSLFELSDGSGLAVTIAKYETPNHRDINKLGIKPDTVVTQQILTRDEIATETDLQYQAALDLLSKNSVVAGIGNKG

SEQ ID NO: 2216 - protein, 149 aa, Rubrobacter xylanophilus DSM 9941
MLSPFRGFLDVRSELDRMFDEVFGGLSRRFGGGDLAEWAPAIDVYSKDGDLVIKAELPGMKPEDVDITLQEGVLTISGERKAEEEREGAGYFVRERRYGSFRRSMRLPEGVDESKIHARFEDGVLEVVVEGAGAVTEPRRIQIEAPKGS

SEQ ID NO: 2217 - protein, 267 aa, Zea mays
  misc_feature (189)..(189): Xaa can be any naturally occurring amino acid
  misc_feature (228)..(229): Xaa can be any naturally occurring amino acid
MAGLARHVDTEELLTTLKDHPMHKAGGRHSENRATSHITPYSSRYAAGTELSKFKIPQDGAPADVVHQLLKDELDLDGRPSLNLASFVGTYMEREGEQLMIENISKNLSDADEYPAMMDMHARCVSIIAHMWGVQKGEKAIGSATTGSSEAIHLGGLAMKRRWQEKRIAEGKDTSKPNIIMGANAQVAXLEKFARYFEVEARILPVSEDSSYRLDPKLVKENIDETLXXVFVILGSHYTGHYEPGEEISEILDEFEKETGVEIPIHV

SEQ ID NO: 2218 - protein, 1146 aa, Populus tremula
MASQSQRQSNQPAHNQVQSSGTSNMRQHHHPTESVSKAIAQYTVDAQLHAVFEQSGGTGKSFDYSKSVRTPNQSVPEEQITAYLSKIQRGGHIQPFGCMIAADEQSFRVIAYSENAKDMLGLTPQSVPSLEKQEILFVGADVRILFRPSSAVLLEKAFGAREITLLNPIWIHSKNSGKPFYAILHRIDVGIVIDLEPARTEDPALSIAGAVQSQKLAVRAISQLQSLPGGDIKLLCDTVVDSVRELTGYDRVMVYKFHEDEHGEVVAENKRVDLEPYIGLHYPSTDIPQASRFLFKQNRVRMIVDCHAIPVSVIQDEGLMQPLCLVGSTLRAPHGCHAQYMENMGSIASLAMAVIIYGNDEEAIGGRNSMRLWGLVVCHHTSARCIPFPLRYACEFLMQAFGLQLNMELQLASQLLEKHVLRTQTLLCDMLLRDSPTGIVTQSPSIMDLVKCDGAALYYQGQYYPLGVTPTEAQIKDIVEWLLTLHGDPTGLSTDSLADAGYPGAAFLGDAVCGMAVAYIAERDFLFWFRSHTAKEVKWGGAKHHPEDKDDGQRMHPRSSFKAFLEVVKSRSLPWENAEMDAIHSLQLILRDSFRDAEATNSKAVVHTQLKDMELQGMDELSSVAREMVRLIETATAPIFAVDVEGRINGWNAKVAELTGLSVEEAMGKSLVHDLVYKEYEEIVDKLIHRAVKGEEDKNVEIKLRTFCSEHQKKAVFVVVNACSSKDYMDNIVGVCFVGQDVTGQKVVMDKYVLIQGDYKAIVHSPNPSIPPIFASDENTCCLEWNTAMEKLTGWSRGEVVGKMLVGEVFGSCCRLKGPDALTKFMIALHNAIGGIDTDKLPFSFFDRNEKNVQTLLTANKRVNMKGDIIGAFCFLQIASPELQPSLKVQKQQEKKSFARMKELAYICQEIKNPLSGIHFTNSLLENTDLTEDQQQFLETSAACEKQILKIIRDIDLESIENGSLELEKAEFLLGSVINAVVSQAMLLLRERNLQLLRDIPEEIKTLAVYGDQARIQQVLADFLLNMVSYTQSSAGWVEIHVCPTLKQISDGHTLVHTEFRYLERVLQTRMLGLQHPPRSFLNCKLTLVKLHREGMVPKIQFQGLSVCQGRLIWLSFPENTTVALYPLTIWFLLLHRHQSRSITHT

SEQ ID NO: 2219 - protein, 1146 aa, Populus tremula
MASQSQRQSNQPAHNQAQSSGTSNMRQHHHPTESVSKAIAQYTVDAQLHAVFEQSGGTGKSFDYSKSVRTPNQSVPEEQITAYLSKIQRGGHIQPFGCMIAADEQSFRVIAYSENAKDMLGLTPQSVPSLEKQEILFVGADVRILFRPSSAVLLEKAFGAREITLLNPIWIHSKNSGKPFYAILHRIDVGIVIDLEPARTEDPALSIAGAVQSQKLAVRAISQLQSLPGGDIKLLCDTVVDSVRELTGYDRVMVYKFHEDEHGEVVAENKRVDLEPYIGLHYPSTDIPQASRFLFKQNRVRMIVDCHAIPVSVIQDEGLMQPLCLVGSTLRAPHGCHAQYMENMGSIASLAMAVIIYGNDEEAIGGRNSMRLWGLVVCHHTSTTCIPFPLRYACEFLMQAFGLQLNMELQLASQLLEKHVLRTQTLLCDMLLRDSPTGIVTQSPSIMDLVKCDGAALYYQGQYYPLGVTPTEAQIKDIVEWLLTLHGDPTGLSTDSLADAGYPGAAFLGDAVCGMAVAYIAERDFLFWFRSHTAKEVKWGGAKHHPEDKDDGQRMHPRSSFKAFLEVVKSRSLPWENAEMDAIHSLQLILRDSFRDAEATNSKAVVHTQLKDMELQGMDELSSVAREMVRLIETATAPIFAVDVEGRINGWNAKVAELTGLSVEEAMGKSLVHDLVYKEYEEIVDKLIHRAVKGEEDKNVEIKLRTFCSEHQKKAVFVVVNACSSKDYMDNIVGVCFVGQDVTGQKVVMDKYVLIQGDYKAIVHSPNPSIPPIFASDENTCCLEWNTALEKLTGWSRGEVVGKMLVGEVFGSCCRLKGPNALTKFMIALHNAIGGIDTDKLTFSFFDRNEKNVQTLLTANKRVNIKGDIIGAFCFLQIASLELQPSLKVQKQQEKKSFARMKELAYICQEIKNPLSGIHFTNSLLENTDLTEDQQQFLETSAACEKQILKIIRDIDLESIENGSLELEKAEFLLGSVINAVVSQAMLLLRERNLQLLRDIPEEIKTLAVYGDQARIQQVLADFLLNMVRYAPSSAGWVEIHVCPTLKQISDGHTLVHTEFRYLERVLQTRMLGLQHPLRSFLNCKLTLVMLHREGMVPKIQFQGLSVCQGRLIWLSFPENTTVALYPLTIWFLLLHRHQSRSITHT

SEQ ID NO: 2220 - protein, 471 aa, Listeria innocua Clip11262
MHTNTGFPADFLWGGAAAANQFEGAYNVDGKGLSVQDVTPKGGFGQITDGPTPDNLKLEGIDFYHRYKDDVKLFAEMGFKVFRTSIAWSRIFPNGDETEPNEAGLQFYDDLFDELLAHNIEPLITLSHYETPLHLSKTYDGWVNRKMIDFYENYVRTVFNRYKGKVKYWLTFNEINSILHAPFMSGGISTSPDKLSQKDLYQAVHHELVASALATKIGHEIMPEAQIGCMVLAMPTYPLTSNPDDIIAVMEAERKNYFFSDVHVRGAYPGYMKRYFRENNIELDVTEEDLEILKNTVDFISFSYYMSTTETADESKRKAGAGNILGGVQNPYLEASEWGWQIDPKGLRVVLNEFWDRYQKPLFIVENGLGAIDQLEQDENGNYTVNDDYRINYLSAHLSQVKEAIKDGVELMGYTSWGCIDLVSASTAEMKKRYGFIYVDRNNDGTGTLNRYKKKSFDWYKNVIATNGEDL

SEQ ID NO: 2221 - protein, 1146 aa, Populus tremula
MASQSQRQSNQPAHNQAQSSGTSNMRQHHHPTESVSKAIAQYTVDAQLHAVFEQSGGTGKSFDYSKSVRTPNQSVPEEQITAYLSKIQRGGHIQPFGCMIAADEQSFRVIAYSENAKDMLGLTPQSVPSLEKQEILFVGADVRILFRPSSAVLLEKAFGAREITLLNPIWIHSKNSGKPFYAILHRIDVGIVIDLEPARTEDPALSIAGAVQSQKLAVRAISQLQSLPGGDIKLLCDTVVDSVRELTGYDRVMVYKFHEDEHGEVVAENKRVDLEPYIGLHYPSTDIPQASRFLFKQNRVRMIVDCHAIPVSVIQDEGLMQPLCLVGSTLRAPHGCHAQYMENMGSIASLAMAVIIYGNDEEAIGGRNSMRLWGLVVCHHTSARCIPFPLRYACEFLMQAFGLQLNMELQLASQLLEKHVLRTQTLLCDMLLRDSPTGIVTQSPSIMDLVKCDGAALYYQGQYYPLGVTPTEAQIKDIVEWLLTLHGDPTGLSTDSLADAGYPGAAFLGDAVCGMAVAYIAERDFLFWFRSHTAKEVKWGGAKHHPEDKDDGQRMHPRSSFKAFLEVVKSRSLPWENAEMDAIHSLQLILRDSFRDAEATNSKAVVHTQLKDMELQGMDELSSVAREMVRLIETATAPIFAVDVDGRINGWNAKVAELTGLSVEEAMGKSLVHDLVYKEYEEIVDKLIHRAVKGEEDKNVEIKLRTFCSEHQKKAVFVVVNACSSKDYMDNIVGVCFVGQDVTGQKVVMDKYVLIQGDYKAIVHSPNPSIPPIFASDENTCCLEWNTAMEKLTGWSRGEVVGKMLVGEVFGNCCRLKGPDALTKFMIALHNAIGGIDTDKLPFSFFDRNEKNVQTLLTANKRVNMKGDIIGAFCFLQIASPELQPSLKVQKQQEKKSFARMKELAYICQEIKNPLSGIHFTNSLLENTDLTEDQQQFLETSAACEKQILKIIRDIDLESIENGSLELEKAEFLLGSVINAVVSQAMLLLRERNLQLLRDIPEEIKTLAVYGDQARIQQVLADFLLNMVRYAPSSAGWVEIHVCPTLKQISDGHTLVHTEFRYLERVLQTRMLGLQHPLRSFLNCKLTLVMLHREGMVPKIQFQGLSVCQGRLIWLSFPENTTVALYPLTIWFLLLHRHQSRSITHT

SEQ ID NO: 2222 - protein, 537 aa, Oryza sativa
MATGVSVENINPKVILGPSSIAECIVIRGEVAIHAQVSWFSPSMFWKSISIYSFSANARREINRYLTFFFQHLQQQLQTQPGSLPFDEIVYCNIGNPQSLGQKPITFFREVLALCNHPNLLEREEIKSLFSTDAIARAKKILSMIPGRATGAYSHSQGIKGLRDEIAAGIASRDGFPANADDIFLTNGASPGVHMMMQLLIRNNRDGIMCPIPQYSLYSASLALHGGALVPYYLDESSGWGLEVSKLKNQLEDARSKGITVRALVVINPGNPTGQILDEQQQYELVKFCKDEELVLLADEVYQENIYVTNKKINSFKKIARSMGYNGDDLQLVSLHSVSKGYYGECGKRGGYMEVTGFSTPVREQLYKIASVNLCSNITGQILASLIMDPPKAGDASYDLYEEEKDNILKSLSRRAKAMESAFNSIDGITCNKTEGAMYLFPRIYLPQKAIEAARAVNKAPDVFYALRLLDTTGIVVTPGSGFGQIIRCYLFTCNSEFLTTQVWSFVKGCRDMAREMHDPAAGGEDTFDDLPLQGIP

SEQ ID NO: 2223 - protein, 438 aa, Oryza sativa
MSLVRRSNVFDPFSLDLWDPFDSVFRSVVPATSDNDTAAFANARIDWKETPESHVFKADLPGVKKEEVKVEVEEGNVLVISGQRSKEKEDKNDKWHRVERSSGQFMRRFRLPENAKVDQVKAGLENGVLTVTVPKAEVKKPEVKAIEISGGENISRGKYKVNWKRVCRPKDLGGLGIMDLQRFASALRLRWLWYEWTAPEKPWESNWVRDIDILRITEADHVQQSVRLWTMIRRMNPLTEDQDSIHWDLTANGQYSAKSAYRLQFLGATRSAFNQTIWKAWAPPKCKFFSWLATQNRLWTVDRLEKRGWQNQKICPLCCIIDESAVHLLAHCRVTKRVWTEIQRWTQTNLQMIKWSDCDSVEQWWNLVVDSLNNPRIPLRTLVILVSWEIWCERNARIFRNSASPLASILAKIKEEGRAWVKAGAYKLQEFGILGDIT

SEQ ID NO: 2224 - protein, 1146 aa, Populus tremula
MASQSQRQSNQPAHNQAQSSGTSNMRQHHHPTESVSKAIAQYTVDAQLHAVFEQSGGTGKSFDYSKSVRTPNQSVPEEQITAYLSKIQRGGHIQPFGCMIAADEQSFRVIAYSENAKDMLGLTPQSVPSLEKQEILFVGADVRILFRPSSAVLLEKAFGAREITLLNPIWIHSKNSGKPFYAILHRIDVGIVIDLEPARTEDPALSIAGAVQSQKLAVRAISQLQSLPGGDIKLLCDTVVDSVRELTGYDRVMVYKFHEDEHGEVVAENKRVDLEPYIGLHYPSTDIPQASRFLFKQNRVRMIVDCHAIPVSVIQDEGLMQPLCLVGSTLRAPHGCHAQYMENMGSIASLAMAVIIYGNDEEAIGGRNSMRLWGLVVCHHTSTRCIPFPLRYACEFLMQAFGLQLNMELQLASQLLEKHVLRTQTLLCDMLLRDSPTGIVTQSPSIMDLVKCDGAALYYQGQYYPLGVTPTEAQIKDIVEWLLTLHGDPTGLSTDSLADAGYPGAAFLGDAVCGMAVAYIAERDFLFWFRSHTAKEVKWGGAKHHPEDKDDGQRMHPRSSFKAFLEVVKSRSLPWENAEMDAIHSLQLILRDSFRDAEATNSKAVVHNQLKDMELQGMDELSSVAREMVRLIETATAPIFAVDVDGRINGWNAKVAELTGLSVEEAMGKSLVHDLVYKEYEEIVDKLIHRAVKGEEDKNVEIKLRTFCSEHQKKAVFVVVNACSSKDYMDNIVGVCFVGQDVTGQKVVMDKYVLIQGDYKAIVHSPNPSIPPIFASDENTCCLEWNTAMEKLTGWSRGEVVGKMLVGEVFGSCCRLKGPDALTKFMIALHNAIGGIDTDKLPFSFFDRNEKNVQTLLTANKRVNIKGDIIGPFCFLQIASPELQPSLKVQKQQEKKSFARMKELAYICQEIKNPLSGIHFTNSLLENTDLTEDQQQFLETSAACEKQILKIIRDIDLESIENGSLELEKAEFLLGSVINAVVSQAMLLLRERNLQLLRDIPEEIKTLAVYGDQARIQQVLADFLLNMVRYAPSSAGWVEIHVCPTLKQISDGHTLVHTEFRYLERVLQTRMLGLQHPLRSFLNCKLTLVMLHREGMVPKIQFQGLSVCQGRLIWLSFPENTTVALYPLTIWFLLLHRHQSRSITHT

SEQ ID NO: 2225 - protein, 1146 aa, Populus tremula
MASQSQRQSNQPAHNQAQSSGTSNMRQHHHPTESVSKAIAQYTVDAQLHAVFEQSGGTGKSFDYSKSVRTPNQSLPEEQITAYLSKIQRGGHIQPFGCMSAADEQSFRVIAYSENAKDMLGLTPQSVPSLEKQEILFVGADVRILFRPSSAVLLEKAFGAREITLLNPIWIHSKNSGKPFYAILHRIDVGIVIDLEPARTEDPALSIAGAVQSQKLAVRAISQLQSLPGGDIKLLCDTVVDSVRELTGYDRVMVYKFHEDEHGEVVAENKRVDLEPYIGLHYPSTDIPQASRFLFKQNRVRMIVDCHAIPVSVIQDEGLMQPLCLVGSTLRAPHGCHAQYMENMGSIASLAMAVIIYGNDEEAIGGRNSMRLWGLVVCHHTSARCIPFPLRYACEFLMQAFGLQLNMELQLASQLLEKHVLRTQTLLCDMLLRDSPTGIVTQSPSIMDLVKCDGAALYYQGQYYPLGVTPTEAQIKDIVEWLLTLHGDPTGLSTDSLADAGYPGAAFLGDAVCGMAVAYIAERDFLFWFRSHTAKEVKWGGAKHHPEDKDDGQRMHPRSSFKAFLEVVKSRSLPWENAEMDAIHSLQLILRDSFRDAEATNSKAVVHTQLKDMELQGMDELSSVAREMVRLIETATAPIFAVDVDGRINGWNAKVAELTGLSVEEAMGKSLVHDLVYKEYEEIVDKLIHRAVKGEEDKNVEIKLRTFCSEHQKKAVFVVVNACSSKDYMDNIVGVCFVGQDVTGQKVVMDKYVLIQGDYKAIVHSPNPSIPPIFASDENTCCLEWNTAMEKLTGWSRGEVVGKMLVGEVFGSCCRLKGPDALTKFMIGLHNAIGGIDTDKLPFSFFDRNEKNVQTLLTANKRVNMKGDIIGAFCFLQIASLELQPSLKVQKQQEKKSFARMKELAYICQEIKNPLSGIHFTNSLLENTDLTEDQQQFLETSAACEKQILKIIRDIDLESIENGSLELEKAEFLLGSVINAVVSQAMLLLRERNLQLLRDIPEEIKTLAVYGDQARIQQVLADFLLNMVRYAPSSAGWVEIHVCPTLKQISDGHTLVHTEFRYLERVLQTRMLGLQHPLRSFLNCKLTLVMLHREGMVPKIQFQGLSVCQGRLIWLSFPENTTVALYPLTIWFLLLHRHQSRSITHT

SEQ ID NO: 2226 - protein, 195 aa, Araucaria heterophylla
DDDHGEVISEIRRSDLEPYLGLHYPATDIPQASRFLFMKNRIRMICDACAPPVRVVEDKRLPRELSLCGSTLRAPHGCHVQYMCNMGSIASLVMSVVVNEKEEKEGDSDGQQQQQKGRRLWGLVVCHHTSPRFVPFPLRYACEFLMQVFGIQLNKEVELGTQLREKQILRTQTLLCDMLFRGGAPMGIITRKPNV

SEQ ID NO: 2227 - protein, 482 aa, Wolbachia endosymbiont of Onchocerca volvulus
MSQNKTLTTASGPPVADNQNSRSAGPRGPLLLDDFHLIEKLAHFNRENIPERRVHAKGSGAYGTFTVTQDITQYTSAKLFDSVGKQTPTFLRFSTVGGERGSADTERDPRGFALKFYTEEGNWDIVGNNTPVFFIRDPLKFPDFIHTQKRLPQSNLKSAQMMWDFWSHSPEALHQVTILFSDRGIPDGYRHMHGFGSHTYSLINAKGERHWVKWHYKTKQGIKNLAPADAARLAGTDPDYAQRDLFGAIERGDFPKWRVCIQIMTEAQANAHYENPFDVTKTWSQKEFPLIEVGELELNRNPLNYFAEVEQAAFGPSNMVPGVGLSPDRMLQGRVFAYADAHRYRVGTNHQQLPVNAPRSPVNSYQRDGSMAFGSNGGAAPNYEPNSYADAPKQAPQYAEPALALSGAADRYDHREDTDYYSHAGALFRLMNDEQKALLINNIAGAMAGVSSDVVQRQLQYFFKADPAYGEGIASALGVSLN

SEQ ID NO: 2228 - protein, 192 aa, Araucaria heterophylla
DDHGEVISEVRKSDLEPYLGLHYPATDIPQASRFLFMKNRVRMICDCCAPPVRVIEDKRLPRELNLCGSTLRAPHGCHAQYMSNMGSISSLVMAVIVNEKEEEEGDSDGQQQQKGRRLWGLVVCHHTSPRFVPFPLRYACEFLMQVFGIQLNREIELAAQSREKHILRTQTLLCDMLLRDAPMGIVTQKPNI

SEQ ID NO: 2229 - protein, 545 aa, Wigglesworthia glossinidia endosymbiont of Glossina brevipalpis
MCSIFGILNIKNNSISLRKKALKCSNLMKHRGPDSNGIYCDEDVILVHERLSIIDVKSGNQPLFNNSKTNVLIMNGEIYNYEEIKKNLIHDYSFNTNSDNEVVLALYKKFGLNFLNKLNGMFAFILYDIEKKIYLIGRDHIGMIPLYMGYDCDNNLYISSEMKALIPVCNYIKEFPIGSYLCNLNKKIIKYYKRNWFEFDSIKNCLLSYKKIKHSLKKSVLNHLKSEVPFGILLSGGLDSSIIASIASKELNYKNLNKKLKSFSIGLENSPDLHSSRICARYLNTDHCEVKFTEQDGLDVIKKVIYYVETYDITTIRASIPMYLISQKIKSSGIKMILSGEGADEIFGGYLYFHNAPSEKDLHDELVRKLKSLHIYDCARANKSMLAFGIEARFPFLDKKFLDVAMRINPKHKMCNKNRIEKYILRKSFINYLPNNILWRQKEQFSDGVGYKWIDSIKNFSKKIISDKKFNNAIHKFPYNTPLSKEEYLYREIFENFFPLPSAAECVPQEKSIACSSEIASKWSKYRNLNFDPSGRSLDIHISKN

SEQ ID NO: 2230 - protein, 246 aa, Malus x domestica
MGRGRVELKRIENKINRQVTFAKRRNGLLKKAYELSVLCDAEVALIIFSNRGKLYEFCSSSSILKTLDRYQKCSYGAVDQVNRPAKELESSYREYMKLKGRYESLQRTQRNLLGEDLGPLNTKELEQLERQLEGSLKQVRSTKTQYMLDQLSDLQNKEQLLIEANRDLTMKLDEISSRNQLRQSWEGGDQGMAYATQHHHAQSQGFFQPLDCNPTLQMGYSAVGSEQMSATTNAQQVNCFIPGWML

SEQ ID NO: 2231 - protein, 193 aa, Araucaria heterophylla
DDHGEVIAEIRRVDLEPYLGLHYPATDIPQASRFLFMKNKVRMICDCRADPVKVIQDKRLAQPLSLSGSALRALHGCHVQYMANMGSIASLVMAMTINENENENDEETSGSGQKGGRRLWGILVCHHTSPRFVPFPLRYACEFLMQVFGIQLNKEVELAAQLREKHMLRTQTVLCDMLLRDAPVGIVTQTPNI

SEQ ID NO: 2232 - protein, 242 aa, Malus x domestica
RVELKRIENKINRQVTFAKRRNGLLKKAYELSVLCDAEVALIVFSNRGKLYEFCSSPSILQTVDRYQKCSYGAVDQVNIPAKELESSYREYMKLKGRCESLQRTQRNLLGEELGPLNTKELEQLERQLEASLKQVRSTKTQYMLDQLSALQNKEQLLIEANRDLTMKLDEIGSRNQLRQSWEGGDQGMAYGTQHHHAQSQGFFQPLDCNPTLQIGYPAEGSEQMGATTHAQQVNCFIPGWML

SEQ ID NO: 2233 - protein, 174 aa, Zea mays
  misc_feature (127)..(127): Xaa can be any naturally occurring amino acid
MAEAPASPGGGGGSHESGSPRGGGGGGSVREQDRFLPIANISRIMKKAIPANGKIAKDAKETVQECVSEFISFITSEASDKCQREKRKTINGDDLLWAMATLGFEDYIEPLKVYLQKYREMEGDSKXTAKSSDGSIKKDALGHVGASSSAAQGGAYNQGMGYMQPQYHNGDISN

SEQ ID NO: 2234 - protein, 195 aa, Araucaria heterophylla
DEHGEVLAEIRRSDLEPYLGLHYPATDIPQASRFLFMQNRVRMICDCRAAPVEVIQAEELKQPLCLVGSTLRAPHGCHAQYMANMGSIASLVMAVVINGNEDEGGGGGGSGSGSGRGSMKLWGLVVCHHTSPRAVPFPLRYACEFLMQAFGLQLNMELQLAAQLTEKHILRTQTLLCDMLLRDAPIGIVTHSPSI

SEQ ID NO: 2235 - protein, 115 aa, Zea mays
  misc_feature (100)..(100): Xaa can be any naturally occurring amino acid
  misc_feature (106)..(106): Xaa can be any naturally occurring amino acid
HASSNTLDGLNGFDGTDTHYFHSGPRGHHWMWDSRLFNYGNWEVLRFLLSNARWWLEEYKFDGFRFDGVTSMMYTHHGLQVTFTGNFNEYFGFATDVDAXVYLMLXNDLIHGLYP

SEQ ID NO: 2236 - protein, 237 aa, Saururus chinensis
MGRGRVQLKRIENKINRQVTFSKRRTGLLKKAHEISVLCDAEVALIVFSTKGKLYDYSTNAGMARILERYERYCYAEREVAVTSPDSEGSWWLEYGKLKARIEAQQRIQRQLMGEDLDALTPKELQQLENQLESALKHVKSRKNQVIYDSMVELRRKEKLLRDENTMMEKKIQEKKKERVQQAQWEQQIQSQNSPSFLPTLNIGYHQGTATETGEKEEAHPGHNTVMLAWLLRSSNN

SEQ ID NO: 2237 - protein, 201 aa, Astrocasia neurocarpa
RSSSSKNKVRMICDCQAPPVKVIQDKKLTRPISLCGSTLRYPHGCHVQYMQNMGTIASLVMSLTINDNDDEMDNDQQSARKLWGLVVCHHTSPRFVPFPLRYACEFLIQVFGVQVNKEIELAAQMREKHILQIQTVLCDMLLRDAPMAIITQSPNVMDLVKCDGAALYYRKKFWLLGVTPTETQIRDMADWLLEYHGGSTA

SEQ ID NO: 2238 - protein, 301 aa, Asarum caudigerum
AGLSSPPRERKRVRENLIFSLAFKFARFQNFRFSFSFAGGFIFFEFSSLFFFGLQEMGRGRVQLKRIENKINRQVTFSKRRTGLLKKAHEISVLCDADVALIVFSAKGKLYEYATNSSMETILERYERYSFAERELVADPESEGGWCLEYGKLKARVDALQKSHKHIMGEDLDSLSIKELQHLEQQLDVALKHIRSRKNQVMLDTISELQRKEKMLLEQNKALQKTMREKENAMVRQAQWEQDNQPQASRPSFMLSRPLPTLHIGSNYHQTRNTETEKQGDRPHSRSNSGIPAWMLSHMND

SEQ ID NO: 2239 - protein, 238 aa, Mycobacterium leprae TN
MSDSDRLYFRQLLSGRDFAVDDVVATQMRNFAYLIGDRQTGDCVVVDPAYAAGDLVDALEADGMRLSGVLVTHHHPDHVGGVMMGFQLKGLTELLERVTVPVHVNTHEALWISRVTGIDIGHLTTHEHRDKLSVGDIEIELLHTPGHTPGSQCFLLDGLLVAGDTLFLEGCGRTDFPGGNSDEMYRSLQQLAQLPGNPTVFPGHWYSTAPSATLSMVKCSNYVYRAADLNQWRMLMDS

SEQ ID NO: 2240 - protein, 115 aa, Zea mays
  misc_feature (53)..(53): Xaa can be any naturally occurring amino acid
  misc_feature (55)..(55): Xaa can be any naturally occurring amino acid
HASSNTLDGLNGFDGTDTHYFHSGPRGHHWMWDSRLFNYGNWEVLRFLLSNAXWXLEEYKFDGFRFDGVTSMMYTHHGLQVTFTGNFNEYFGFATDVDAVVYLMLVNDLIHGLYP

SEQ ID NO: 2241 - protein, 200 aa, Astrocasia jacobinensis
  misc_feature (125)..(125): Xaa can be any naturally occurring amino acid
RFLFMKNKVRMICDCQAPPVKVIQDKKLTRPISLCGSTLRYPHGCHVQYMQNMGTIASLVMSVTTNDNDDEMDNDQQSGRKLWGLVVCHHTSPRFVPFPLRYACEFLIQVFGVQVNKEIELAAQXREKHILQIQTVLCDMLLRDAPMAIITQSPNVMDLIKCDGAALYYRKKFWLLGVTPTETQIRDIADWLLEYHGGST

SEQ ID NO: 2242 - protein, 115 aa, Zea mays
  misc_feature (45)..(45): Xaa can be any naturally occurring amino acid
  misc_feature (100)..(100): Xaa can be any naturally occurring amino acid
HASSNTLDGLNGFDGTDTHYFHSGPRGHHWMWDSRLFNYGNWEVXRFLLSNARWWLEEYKFDGFRFDGVTSMMYTHHGLQVTFTGNFNEYFGFATDVDAXVYLMLVNDLIHGLYP

SEQ ID NO: 2243 - protein, 160 aa, Medicago sativa
MDFRLMGLMLQCYTALHQMMDLSDENVEKSSSHNAPTRSYVRDAKAMAATPADVKENPNSYVFVIDMPGLKSGDIKVQVEDDNVLVISGERKREEEKEGGAKYLRMERRVGKFMRKFVLPENPNTDAVSPVCQDGVLTVTVQKLPPPRPKKPRTIEVQIA

SEQ ID NO: 2244 - protein, 75 aa, Phaseolus vulgaris
RVLQISGQRTKEKEDKNEKWHRVERSSGSFLRRFRLPENAKVNEVKAAMETGVLTVTVPKEEVKKRDVKPVQITG

SEQ ID NO: 2245 - protein, 202 aa, Croizatia brevipetiolata
RFLFMKNKVRMICDCLAPPVKVIQDKKLAQPLSLCGSTLRSPHGCHAQYMANMGSTASLVMSVTINEDDDEMDSDQERGIKLWGLVVCHHTSPRFVPFPLRYACEFLIQVFGVQVSKEVQLAAQTREKHILQTQTVLCDMLLRDAPVAIITQSPNVMDLVKCDGAALSYGTKFWLLGVTPTEAQIKDIAEWLIEYHGGSTGL

SEQ ID NO: 2246 - protein, 364 aa, Xanthomonas campestris pv. campestris str. ATCC 33913
MSTSTPSPLFSPVRLGALDLSNRVIMAPLTRNRAVAGAVPSPLAVEYYAQRATAGLIIAEGTQISPLGQGYLDTPGIHTPAQVEGWRAVTDAVHRQGGKIALQLWHVGRVSHTSLLPPGEVPVAPSAIRSTGKTFTAQGFSDVSEPRALALEEIPALIEDYRAAARNAIDAGFDGVEVHAANGYLIDQFLRDGSNQRTDAYGGDIENRTRLLAEVVQAIADEIGAERTGVRLSPVTPVYDMHDSDPQALFERAVERLNLIGGLAFVHVIEGATGGPRDNIAFDYTALRAKFDGAWISNNGYDKAMAEQAISRGDTDAVSFGRAYIANPDLVRRLREDAPLAEPNQATLYGGGAEGYTDYPALPA

SEQ ID NO: 2247 - protein, 559 aa, Zea mays
MHRFAADRARRAVAASLRGAASRAAAAPSRHAPAPRHPTSPVGAAAPVAAAAMARAAMSTAVAGVPPPVSLDTISPKVPPVSLDTINPKVLKCQFAVRGEIVTRAQKLQQELQRNPESLPFDEILYCNIGNPHSIGQQPVTYFREVLSLCENPALLDKSETHALYRSDAIERARKILDKIPGRATGAYSHSQGIKGLRDEIAAGIAARDGFHASADNIFLTDGASPAVHMILQLLIRSEKDGILCPIPQYPLYSASIALHGGSLVPYFLDEETGWALEVDELKKQLEEARSKGISVRALVVINPGNPTGQVLTEENQKKIVEFCKNERLVLLADEVYQENIYVEDKQFHSFKKIARSLGYTDDDLPLVSFQSISKGYYGECGKRGGYMEITGFSPQVRDQIYKMASINLCSNITGQILASLVMNPPKAGDESFESFRLERDGILSSLGRRAKALEEAFNSLEGITCNKAEGAMYLFPRLHLPQKAIGAAQAAGTAPDAYYAKRLLEATGIVFVPGSGFGQVPGTWHIRSTILPQEDKIPGIVSRFKEFHDKFMDEFRDY

SEQ ID NO: 2248 - protein, 484 aa, Actinobacillus actinomycetemcomitans
MSAKCPFDHNSATLTTAAGAPVVDNDNTMSAGPRGPLLLQDVWYQEKLAHFARERIPERVVHAKGSAAFGTFTVTHDITQYTKAALFSEVGKQTEVLLRFSTVAGERGAADAERDVRGFSLKFYTEQGNWDLVGNNTPVFFIRDPLKFPDFIHTQKRNPQTNLRDATAAWDFWSRHPESMHQIMILFSDRGIPASLRNMNGYGSHTYSFINADNERFWVKFHFKTQQGHKFLTNAEAAKVVGEDRESSQRDLYDAIANGNFPRWNVRIQIMPEADAEKHNYSFDLTKVWPHKDYPLIDVGVLELNRNPQNYFAEVEQAAFAPNNNVPGIGFSPDRMLQGRLFSYQDAQRYRLGVNHHQIPVNAPKCPYHTTHRDGAMRVDHNGGTHPNYAPNRFDTYVPTHDQGPSLQLEREGAHFNFRDYDEDYYSQPAALYAIMDAAQRDRLAGNFAASLAEVTDDAIVEHQLVHFERVNTELANAIRTKLA

SEQ ID NO: 2249 - protein, 1142 aa, Saccharomyces cerevisiae
MAINGNSIPAIKDNTIGPWKLGETLGLGSTGKVQLARNGSTGQEAAVKVISKAVFNTGNVSGTSIVGSTTPDALPYGIEREIIIMKLLNHPNVLRLYDVWETNTDLYLVLEYAEKGELFNLLVERGPLPEHEAIRFFRQIIIGVSYCHALGIVHRDLKPENLLLDHKYNIKIADFGMAALETEGKLLETSCGSPHYAAPEIVSGIPYQGFASDVWSCGVILFALLTGRLPFDEEDGNIRTLLLKVQKGEFEMPSDDEISREAQDLIRKILTVDPERRIKTRDILKHPLLQKYPSIRDSKSIRGLPREDTYLTPLSESNSSIDATILQNLVILWHGRDPEGIKEKLREPGANAEKTLYALLYRFKCDTQKELIKQQQVKKRQSISSVSVSPSKKVSTTPQRRRNRESLISVTSSRKKPISFNKFTASSASSSNLTTPGSSKRLSKNFSSKKKLSTIVNQSSPTPASRNKRASVINVEKNQKRASIFSTTKKNKRSSRSIKRMSLIPSMKRESVTTKLMSTYAKLAEDDDWEYIEKETKRTSSNFATLIDEIFEYEKYEQIRKEKEELERKVREAKAREELERRRRKQEEKERARKLLEKEDLKRKQEELKKQIEIDISDLEQELSKHKEEKLDGNIRSISAPMENEEKNINHLEVDIDNILRRRNFSLQTRPVSRLDPGIMFSSPTEEVSPVEPKRTENERLTTEKKILETIRRSKFLGSSFNIDKELKLSKMEYPSIIAPQRLSEERVVSDSNDGYESLILPKDGNGVSQLKDSTATTAPVSDGRLRKISEIRVPQFTRKSRHFSESNKRLSVLSMYSTKESFTNLVDILKNGNLDVNNQQSQRIPTPRSADDSEFLFETVNEEAEYTGNSSNDERLYDVGDSTIKDKSALKLNFADRFNGSNEAKQTDNLHLPILPPLNGDNELRKQNSQEGDQAHPKIKSMIPESGSSSHTEKEEENEEKEEKKPEQHKQEEDQEKREKVVDDMEPPLNKSVQKIREKNAGSQAKDHSKDHLKEHKQDKNTAIGNGSFFRKFSKSSDKTMELYAKISAKQLFNGLEKLLRGWTQYGLKNIKSHPNNLTLTGKLSSDNIFSLRSTLFEVNIYPRGKMSVVQFKKVSGSFKAVKKLVNEVENVLNKEGVLQK

SEQ ID NO: 2250 - protein, 543 aa, Chlamydia trachomatis
MVAKNIKYNEEARKKIQKGVKTLAEAVKVTLGPKGRHVVIDKSFGSPQVTKDGVTVAKEVELADKHENMGAQMVKEVASKTADKAGDGTTTATVLAEAIYTEGLRNVTAGANPMDLKRGIDKAVKVVVDQIRKISKPVQHHKEIAQVATISANNDAEIGNLIAEAMEKVGKNGSITVEEAKGFETVLDIVEGMNFNRGYLSSYFATNPETQECVLEDALVLIYDKKISGIKDFLPVLQQVAESGRPLLIIAEDIEGEALATLVVNRIRGGFRVCAVKAPGFGDRRKAMLEDIAILTGGQLISEELGMKLENANLAMLGKAKVIVSKEDTTIVEGMGEKEALEARCESIKKQIEDSSSDYDKEKLQERLAKLSGGVAVIRVGAATEIEMKEKKDRVDDAQHATIAAVEEGILPGGGTALIRCIPTLEAFLPMLTNEDEQIGARIVLKALSAPLKQIAANAGKEGAIIFQQVMSRSANEGYDALRDAYTDMLEAGILDPAKVTRSALESAASVAGLLLTTEALIAEIPEEKPAAAPAMPGAGMDY

SEQ ID NO: 2251 - protein, 1146 aa, Populus tremula
MASQSQRQSNQPAHNQVQSSGTSNMRQHHHPTESVSKAIAQYTVDAQLHAVFEQSGGTGKSFDYSKSVRTPNQSVPEEQITAYLSKIQRGGHIQPFGCMIAADEQSFRVIAYSENAKDMLGLTPQSVPSLEKQEILFVGADVRILFRPSSAVLLEKAFGAREITLLNPIWIHSKNSGKPFYAILHRIDVGIVIDLEPARTEDPALSIAGAVQSQKLAVRAISQLQSLPGGDIKLLCDTVVDSVRELTGYDRVMVYKFHEDEHGEVVAENKRVDLEPYIGLHYPSTDIPQASRFLFKQNRVRMIVDCHAIPVSVIQDEGLMQPLCLVGSTLRAPHGCHAQYMENMGSIASLAMAVIIYGNDEEAIGGRNSMRLWGLVVCHHTSARCIPFPLRYACEFLMQAFGLQLNMELQLASQLLEKHVLRTQTLLCDMLLRDSPTGIVTQSPSIMDLVKCDGAALYYQGQYYPLGVTPTEAQIKDIVEWLLTLHGDPTGLSTDSLADAGYPGAAFLGDAVCGMAVAYIAERDFLFWFRSHTAKEVKWGGAKHHPEDKDDGQRMHPRSSFKAFLEVVKSRSLPWENAEMDAIHSLQLILRDSFRDAEATNSKAVVHNQLKDMELQGMDELSSVAREMVRLIETATAPIFAVDVDGRINGWNAKVAELTGLSVEEAMGKSLVHDLVYKEYEEIVDKLIHRAVKGEEDKNVEIKLRTFCSEHQKKAVFVVVNACSSKDYMDNIVGVCFVGQDVTGQKVVMDKYVLIQGDYKAIVHSPNPSIPPIFASDENTCCLEWNTALEKLTGWSRGEVVGKMLVGEVFGSCCKLKGPDALTKFMIALHNAIGGIDTDKLPFSFFDRNEKNVQTLLTANKRVNMKGDIIGAFCFLQIASPELQPSLKVQKQQEKKSFARMKELAYICQEIKNPLSGIHFTNSLLENTDLTEDQQQFLETSAACEKQILKIIRDIDLESIENGSLELEKAEFLLGSVINAVVSQAMLLLRERNLQLLRDIPEEIKTLAVYGDQARIQQVLADFLLNMVRYAPSSAGWVEIHVCPTLKQISDGHTLVHTEFRYLERVLQTRMLGLQHPLRSFLNCKLTLVMLHREGMVPKIQFQGLSVCQGRLIWLSFPENTTVALYPLTIWFLLLHRHQSRSITHT

SEQ ID NO: 2252 - protein, 1146 aa, Populus tremula
MASQSQRQSNQPAHNQAQSSGTSNMRQHHHPTESVSKAIAQYTVDAQLHAVFEQSGGTGKSFDYSKSVRTPNQSVPEEQITAYLSKIQRGGHIQPFGCMIAADEQSFRVIAYSENAKDMLGLTPQSVPSLEKQEILFVGADVRILFRPSSAVLLEKAFGAREITLLNPIWIHSKNSGKPFYAILHRIDVGIVIDLEPARTEDSALSIAGAVQSQKLAVRAISQLQSLPGGDIKLLCDTVVDSVRELTGYDRVMVYKFHEDEHGEVVAENKRVDLEPYIGLHYPSTDIPQASRFLFKQNRVRMIVDCHAIPVSVIQDEGLMQPLCLVGSTLRAPHGCHAQYMENMGSIASLAMAVIIYGNDEEAIGGRNSMRLWGLVVCHHTSARCIPFPLRYACEFLMQAFGLQLNMELQLASQLLEKHVLRTQTLLCDMLLRDSPTGIVTQSPSIMDLVKCDGAALYYQGQYYPLGVTPTEAQIKDIVEWLLTLHGDPTGLSTDSLADAGYPGAAFLGDAVCGMAVAYIAERDFLFWFRSHTAKEVKWGGAKHHPEDKDDGQRMHPRSSFKAFLEVVKSRSLPWENAEMDAIHSLQLILRDSFRDAEATNSKAVVHNQLKDMELQGMDELSSVAREMVRLIETATAPIFAVDVEGRINGWNAKVAELTGLSVEEAMGKSLVHDLVYKEYEEIVDKLIHRAVKGEEDKNVEIKLRTFCSEHQKKAVFVVVNACSSKDYMDNIVGVCFVGQDVTGQKVVMDKYVLIQGDYKAIVHSPNPSIPPIFASDENTCCLEWNTAMEKLTGWSRGEVVGKMLVGEVFGSCCRLKGPDALTKFMIALHNAIGGIDTDKLPFSFFDRNEKNVQTLLTANKRVNMKGDIIGAFCFLQIASPELQPSLKVQKQQEKKSFARMKELAYICQEIKNPLSGIHFTNSLLENTDLTEDQQQFLETSAACEKQILKIIRDIDLESIENGSLELEKAEFLLGSVINAVVSQAMLLLRERNLQLLRDIPEEIKTLAVYGDQARIQQVLADFLLNMVRYAPSSAGWVEIHVCPTLKQISDGHTLVHTEFRYLERVLQTRMLGLQHPLRSFLNCKLTLVMLHREGMVPKIQFQGLSVCQGRLIWLSFPENTTVALYPLTIWFLLLHRHQSRSITHT

SEQ ID NO: 2253 - protein, 445 aa, Silicibacter sp. TM1040
MKKFAMAALGGTLAGFVATTYVAAPLLAQESNNTTVYEQLDLFGDIFERIRAQYVEEVDEKELIEAAIGGMLQSLDPHSSYLSPDDASKMRVQTRGEFGGLGIEVTQEDGFVKVVSPMDGTPADEAGVEAGDFITHVDGESLLGLGLDEAVELMRGPVGSEIIITIVREGEDEPFDVSIIRDTIKLTAVRGRTEGDSVVLRVTTFNEQTTPNLEAKLEEQVEALGGMDNVNGIVLDLRNNPGGLLTQAISVADSFLESGEIVSTRGRNPEDGERFNATPGDLVGGKPIVVLINGGSASASEIVAGALQDHRRAIVVGTKSFGKGSVQTVMPLRSDGAMRLTTARYYTPSGRSIQALGVSPDIVVAQPRRRPEAEEDEPASSAFGPRSEADLRGRLNNDSLSEDEVRQIEADREKAEKAAELREQDYQLAYAIDILKGLSALGPKD

SEQ ID NO: 2254 - protein, 542 aa, Flavobacterium psychrophilum
MAKNIKFDIEARDGLKRGVDALANAVKVTLGPKGRNVIIGKSFGGPTVTKDGVTVAKEIELQDPLENMGAQMVKEVASKTNDLAGDGTTTATVLAQAIVKEGLKNVAAGANPMDLKRGIDKAVEAIVADLTKQAKVVGSDSEKIKQIASISANNDEVIGELIANAFAKVGKEGVITVEEAKGTDTYVDVVEGMQFDRGYLSPYFVTNPEKMDAELENPYILLYDKKVSSLKELLPVLEPVAQSGKPLLIIAEDVDGEALSTLVVNKLRGALKIAAVKAPGFGDRRKAMLEDIAILTGGTVISEERGFTLENTTIEMLGTAKRVTIDKDNTTIVSGAGEADMIKNRVNQIKGQMEASTSDYDKEKLQERLAKLAGGVAVLYVGAASEVEMKEKKDRVDDALHATRAAVEEGIVAGGGVALLRAKNVLKDIKADNADEATGIQIVSRAVEAPLRTIVENAGLEGSVVVAKVAEGSGDFGYNAKTDEYVDMLKAGIIDPKKVTRVALENAASVAGMILTTECALVEIKEENAGGGQMGGGMPGMM

SEQ ID NO: 2255 - protein, 1146 aa, Populus tremula
MASQSQRQSNQPAHNQAQSSGTSNMRQHHHPTESVSKAIAQYTVDAQLHAVFEQSGGTGKSFDYSKSVRTPNQSVPEEQITAYLSKIQRGGHIQPFGCMIAADEQSFRVIAYSENAKDMLGLTPQSVPSLEKQEILFVGADVRILFRPSSAVLLEKAFGAREITLLNPIWIHSKNSGKPFYAILHRIDVGIVIDLEPARTEDPALSIAGAVQSQKLAVRAISQLQSLPGGDIKLLCDTVVDSVRELTGYDRVMVYKFHEDEHGEVVAENKRVDLEPYIGLHYPSTDIPQASRFLFKQNRVRMIVDCHAIPVSVIQDEGLMQPLCLVGSTLRAPHGCHAQYMENMGSIASLAMAVIIYGNDEEAIGGRNSMRLWGLVVCHHTSARCIPFPLRYACEFLMQAFGLQLNMELQLASQLLEKHVLRTQTLLCDMLLRDSPTGIVTQSPSIMDLVKCDGAALYYQGQYYPLGVTPTEAQIKDIVEWLLTLHGDPTGLSTDSLADAGYPGAAFLGDAVCGMAVAYIAERDFLFWFRSHTAKEVKWGGAKHHPEDKDDGQRMHPRSSFKAFLEVVKSRSLPWENAEMDAIHSLQLILRDSFRDAEATNSKAVVHTQLKDMELQGMDELSSVAREMVRLIETATAPIFAVDVEGRINGWNAKVAELTGLSVEEAMGKSLVHDLVYKEYEEIVDKLIHRAVKGEEDKNVEIKLRTFCSEHQKKAVFVVVNACSSKDYMDNIVGVCFVGQDVTGQKVVMDKYVLIQGDYKAIVHSPNPSIPPIFASDENTCCLEWNTAMEKLTGWSRGEVVGKMLVGEVFGSCCRLKGPDALTKFMIALHNAIGGIDTDKLPFSFFDRNEKNVQTLLTANKRVNMKGDIIGAFCFLQIASPELQPSLKVQKQQEKKSFARMKELAYICQEIKNPLSGIHFTNSLLENTDLTEDQQQFLETSAACEKQILKIIRDIDLESIENGSLELEKAEFLLGSVINAVVSQAMLLLRERNLQLLRDIPEEIKTLAVYGDQARIQQVLADFLLNMVRYAPSSAGWVEIHVCPTLKQISDGHTLVHTEFRYLERVLQTRMLGLQHPLRSFLNCKLTLVMLHREGMVPKIQFQGLSVCQGRLIWLSFPENTTVALYPLTIWFLLLHRHQSRSITHT

SEQ ID NO: 2256 - protein, 1146 aa, Populus tremula
MASQSQRQSNQPAHNQAQSSGTSNMRQHHHPTESVSKAIAQYTVDAQLHAVFEQSGGTGKSFDYSKSVRTPNQSVPEEQITAYLSKIQRGGHIQPFGCMIAADEQSFRVIAYSENAKDMLGLTPQSVPSLEKQEILFVGADVRILFRPSSAVLLEKAFGAREITLLNPIWIHSKNSGKPFYAILHRIDVGIVIDLEPARTEDPALSIAGAVQSQKLAVRAISQLQSLPGGDIKLLCDTVVDSVRELTGYDRVMVYKFHEDEHGEVVAENKRVDLEPYIGLHYPSTDIPQASRFLFKQNRVRMIVDCHAIPVSVIQDEGLMQPLCLVGSTLRAPHGCHAQYMENMGSIASLAMAVIIYGNDEEAIGGRNSMRLWGLVVCHHTSARCIPFPLRYACEFLMQAFGLQLNMELQLASQLLEKHVLRTQTLLCDMLLRDSPTGIVTQSPSIMDLVKCDGAALYYQGQYYPLGVTPTEAQIKDIVEWLLTLHGDPTGLSTDSLADAGYPGAAFLGDAVCGMAVAYIAERDFLFWFRSHPAKEVKWGGAKHHPEDKDDGQRMHPRSSFKAFLEVVKSRSLPWENAEMDAIHSLQLILRDSFRDAEATNSKAVVHTQLKDMELQGMDELSSVAREMVRLIETATAPIFAVDVDGRINGWNAKVAELTGLSVEEAMGKSLVHDLVYKEYEEIVDKLIHRAVKGEEDKNVEIKLRTFCSEHQKKAVFVVVNACSSKDYMDNIVGVCFVGQDVTGQKVVMDKYVLIQGDYKAIVHSPNPSIPPIFASDENTCCLEWNTAMEKLTGWSRGEVVGKMLVGEVFGSCCRLKGPDALTKFMIALHNAIGGIDTDKLPFSFFDRNEKNVQTLLTANKRVNIKGDIIGAFCFLQIASPELQPSLKVQKQQEKKSFARMKELAYICQEIKNPLSGIHFTNSLLENTGLTEDQQQFLETSAACEKQILKIIRDIDLESIENGSLELEKAEFLLGSVINAVVSQAMLLLRERNLQLLRDIPEEIKTLAVYGDQARIQQVLADFLLNMVRYAPSSAGWVEIHVCPTLKQISDGHTLVHTEFRYLERVLQTRMLGLQHPLRSFLNCKLTLVMLHREGMVPKIQFQGLSVCQGRLIWLSFPENTTVALYPLTIWFLLLHRHQSRSITHT

SEQ ID NO: 2257 - protein, 1146 aa, Populus tremula
MASQSQRQSNQPAHNQAQSSGTSNMRQHHHPTESVSKAIAQYTVDAQLHAVFEQSGGTGKSFDYSKSVRTPNQSVPEEQITAYLSKIQRGGHIQPFGCMIAADEQSFRVIAYSENAKDMLGLTPQSVPSLEKQEILFVGADVRILFRPSSAVLLEKAFGAREITLLNPIWIHSKNSGKPFYAILHRIDVGIVIDLEPARTEDPALSIAGAVQSQKLAVRAISQLQSLPGGDIKLLCDTVVDSVRELTGYDRVMVYKFHEDEHGEVVAENKRVDLEPYIGLHYPSTDIPQASRFLFKQNRVRMIVDCHAIPVSVIQDEGLMQPLCLVGSTLRAPHGCHAQYMENMGSIASLAMAVIIYGNDEEAIGGRNSMRLWGLVVCHHTSARCIPFPLRYACEFLMQAFGLQLNMELQLASQLLEKHVLRTQTLLCDMLLRDSPTGIVTQSPSIMDLVKCDGAALYYQGQYYPLGVTPTEAQIKDIVEWLLTLHGDPTGLSTDSLADAGYPGAAFLGDAVCGMAVAYIAERDFLFWFRSHTAKEVKWGGAKHHPEDKDDGQRMHPRSSFKAFLEVVKSRSLPWENAEMDAIHSLQLILRDSFRDAEATNSKAVVHTQLKDMELQGMDELSSVAREMVRLIETATAPIFAVDVDGRINGWNAKVAELTGLSVEEAMGKSLVHDLVYKEYEEIVDKLIHRAVKGEEDKNVEIKLRTFCSEHQKKAVFVVVNACSSKDYMDNIVGVCFVGQDVTGQKVVMDKYVLIQGDYKAIVHSPNPSIPPIFASDENTCCLEWNTAMEKLTGWSRGEVVGKMLVGEVFGSCCRLKGPDALTKFMIALHNAIGGIDTDKLPFSFFDRNEKNVQTLLTANKRVNIKGDIIGAFCFLQIASPELQPSLKVQKQQEKKSFARMKELAYICQEIKNPLSGIHFTNSLLENTDLTEDQQQFLETSAACEKQILKIIRDIDLESIENGSLELEKAEFLLGSVINAVVSQAMLLLRERNLQLLRDIPEEIKTLAVYGDQARIQQVLADFLLNMVRYAPSSAGWVEIHVCPTLKQISDGHTLVHTEFRYLERVLQTRMLGLQHPLRSFLNCKLTLVMLHREGMVPKIQFQGLSVCQGRLIWLSFPENTTVALYPLTIWFLLLHRHQSRSITHT

SEQ ID NO: 2258 - protein, 366 aa, Sorghum bicolor
RPLEYAWNKAANILFAESPAGVVFSYSNTSSDLSMGDDKMAQDTYTFLVKWFERFPHYNYREFYIAGESGHFIPQLSQVVYRNRNNSPFINFQGLLVSSGLTNDHEDMIGMFELWWHHGLISDETRDSGLKVCPGTSFMHPTPECTEVWNKALAEQGNINPYTIYTPTCDREPSPYQRRFWAPHGRAAPPPLMLPPYDPCAVFNSINYLNLPEVQTALHANVSGIVEYPWTVCSNTIFDQWGQAADDLLPVYRELIQAGLRVWVYSGDTDSVVPVSSTRRSLAALELPVKTSWYPWYMAPTEREVGGWSVQYEGLTYVSPSGAGHLVPVHRPAQAFLLFKQFLKGEPMPAEEKNDILLPSEKAPFY

SEQ ID NO: 2259 - protein, 1197 aa, Xylella fastidiosa 9a5c
MRGALLTALLVLVSLLTATAAVPEMPRFRVLDATSGLPSNVVRAMLQDAAGYLWLATSDGLARYDGTAFKVWRHDPNDSGSLPGDSVLALYIDVQDRIWVLSENAGLAVLDAQRRRFIQVPVGSVAKTDALHTLTGHGDAIWLSDLHASVIRIDSAGALTRYALADVSPTLKDTPVVALTFDANGRLWVGTPDGLLYFEAGRLHLAPPPLDKASIHSIAAVGSRLWVGSTDGVYLQDAEGRWRAPNWGPMFASGNLLLSVADAGDGEFWLGSERGLWRTRQERPPVQIPLSDMHHGVSTVSSLWRDTSGGLWVPVYGRGLGYLRQDWKRMAVVRPSDGGESAYCNVAPAAYSGGLWQLNRIGELMHLNTSTGELVHTGWQRHELRGMNITTTLEDSRGRLWLANMQNGLSRLDLKNGQWREWAAHEDDAVPLYGPISWIVEMPDSSLWLEALGVLQQRDLESGRVLNQIVPGSHGLDGSRVEQIGLGPDGRLWLAAGSGVYAWESQRRMFVPISDLTGTRAYSFVPVGGNEVWVHRLRGLEQWRHSSHGWKRVALVGPQHGLPAMESLGMQHDAQGRIWLSTRRGLWRIDNTDELQVRNFGLRDGLGTQEFAEACLWMAPDGVLVGGTTDGYLMLFDTAMPDPAPFVPQLRMETVSVIRAGRRIDLPVDQPFELLPNDRQLIVGARLLSFGDPLSNRYSYWLKGFDTGWIDQGSSGTREFSSLPPADYTLLIQGTDPMGNLSRIHLVTFRVLPPWWRSAWGMSVLTGSGLLLLWGVAWNYHRRLRRRACLQLEQHQREVAERASLAKTQFLATLGHEVRTPMTGVLGMSELLLETPLDTRQHGYATSIQAAGKHLLRLVNDALDLAKIEAGKLSLERRDFDFHALLEQVVAMIRPMVERKGLRFVYRLDPEVPQYVHGDTDRLQQILLNLLINATKFTEHGEVVLQVAPGQEQACLGVRIDVADTGPGLSEEQCQRLFRRFEQVNGASTAARYGGSGLGLAICRELATVMEGEIHVDSELGKGTCFRVLLPLPWVLAVQHAVAVMDAEPSPCSNPLHLLLIEDDPTVAEVIVELLRVRGHRVTHALHGLEALVEVTLTRFDACLCDLDLPGLDGAGLIVQLRAQGQFFPIVVVTARTDADAQRQALQVGCDAFLRKPVTGEMLEQVLTQVLSAPRQEADVDTPKKGMEWEGPGSVTR

SEQ ID NO: 2260 - protein, 364 aa, Corynebacterium glutamicum ATCC 13032
MEPLVSKLFTPIQIRDITIPNRVWMSPMCTYSAATGSGLPTDFHQAHYAARAAGGVGLVMVEATGVNPVAPISPVDLGLWSHDQIEPFSRVTAAIRAGGAVPAVQLAHAGRKASTDAPWNGGGYVGPETNGWETVGPSPLAFPGLPAPRELTVSEIQEVVQQFAGAAVRADQAGFDVVEIHAAHGYLLHNFLSPISNKRTDSYGGSLENRARIVLEVIDAIRAVWPEEKPVFMRISTTDWVEENPQDDRESWTLSQSRQLALWASEHGVDLIDASSGGLDIVPIPHDRDYQTAKAADLHASTGVTVAAVGRIDDAQTAHNLVDSGDVNAVFLGRPLLKDPSWANQAALALGAEPRYVHQYDYVL

SEQ ID NO: 2261 - protein, 115 aa, Zea mays
  misc_feature (100)..(100): Xaa can be any naturally occurring amino acid
  misc_feature (111)..(111): Xaa can be any naturally occurring amino acid
HASSNTLDGLNGFDGTDTHYFHSGPRGHHWMWDSRLFNYGNWEVLRFLLSNARWWLEEYKFDGFRFDGVTSMMYTHHGLQVTFTGNFNEYFGFATDVDAXVYLMLVNDLIXGLYP

SEQ ID NO: 2262 - protein, 655 aa, Burkholderia sp. 383
MCGIDGFLNSVAFDEETARGTLARMTASLAHRGPDGQGIWVDPEAGIALGHRRLAIVDLSVHGRQPMASACGRYVMVFNGEIYNHRELRAELERAGRAPAWRGHSDSEVLIAAIVAWGVDATLRRATGMFSIALWNRESRVLTLARDRIGEKPLYYGRIGDALVFASELKALRGYPGFDGAIDRDALCLYLRQSSVPAPHTIYRGIHKLPPGTYIQFEHARDTPRLRAYWTLEQAIEDGRAQPFEGNADEAVSQLDAVLRQAVARQMEADVPLGAFLSGGVDSSTIVALMQAQSSTPVDTFTIGFHEAGYDEAGYAKAVARHLGTRHTELYVTADHALGVVPKLPSIYDEPFSDASQIPTFLVSEMTRRHVKVSLSGDGGDELFGGYTRYFLTPRLWRKLHRVPGAVRARIAAALHALRPDHADQLAAVAQGAWGGVEARESATRIGDRLHKLGHVMTAESRIGLYRLLMSSVHHPERLALSGQEPATPLDTVSAWPAHLSFAEQAMAIDTLTYLPTDILAKVDRAAMAVSLETRMPFLDHHVVEFAWRMPADLRLPEGQSKALLRRLLDRYVPSALIDRPKQGFCAPVDHWLRGSLRDWAEALLRPSRLREEGFFDAAAVERLWRQHVTGRMNWQHQLWTVLMFQAWLEAQRAT

SEQ ID NO: 2263 - protein, 484 aa, Saccharomyces cerevisiae
MADKIERHTFKVFNQDFSVDKRFQLIKEIGHGAYGIVCSARFAEAAEDTTVAIKKLTNVFSKTLLCKRSLRELKLLRHFRGHKNITCLYDMDIVFYPDGSINGLYLYEELMECDMHQIIKSGQPLTDAHYQSFTYQILCGLKYIHSADVLHRDLKPGNLLVNADCQLKICDFGLARGYSENPVENSQFLTEYVATRWYRAPEIMLSYQGYTKAIDVWSAGCILAEFLGGKPIFKGKDYVNQLNQILQVLGTPPDETLRRIGSKNVQDYIHQLGFIPKVPFVNLYPNANSQALDLLEQMLAFDPQKRITVDEALEHPYLSIWHDPADEPVCSEKFEFSFESVNDMEDLKQMVIQEVQDFRLFVRQPLLEEQRQLQLQQQQQQQQQQQQQQQQPSDVDNGNAAASEENYPKQMATSNSVAPQQESFGIHSQNLPRHDADFPPRPQESMMEMRPATGNTADIPPQNDNGSLLDLEKELEFGLDRKYF

SEQ ID NO: 2264 - protein, 202 aa, Didymocistus chrysadenius
  misc_feature (25)..(25): Xaa can be any naturally occurring amino acid
  misc_feature (28)..(28): Xaa can be any naturally occurring amino acid
RFLFMKNKVRMICDCRASPVKVIQXIEXAQSLSLCGSTLRSPHGCHSQYMENMGSIASLVMSVTINESDDEVENGQPKGSKLWGLVVCHHTGPRFVPFPLRYACEFLIQVFGVQINKEVELAAQTREKHILQTQTVLCDMLLRDAPEAIITQSPNIMDLVKCDGAALYYRKKFWLLGVTPTEAQIKDIADWLLEYHSGSTGL

SEQ ID NO: 2265 - protein, 239 aa, Asparagus officinalis
MGRGRVELKRIENKINRQVTFAKRRNGLLKKAYELSVLCDAEVALIIFSNRGKLYEFCSSSSMLKTLERYQKCSYGAPDTSVQIRESQMLQSSHQEYLRLKARVEALQRSQRNLLGEDLGPLSSKELEQLERQLDSSLKQIRSTRTQYMLDQLADLQRREQMLCEANRSLRKRLEESSQANQQQVWEDANAMGYNRQPNQPHGDQFFHPLECQPTLQIGFQPDQMPGPSVSNYMPGWLA

SEQ ID NO: 2266 - protein, 115 aa, Zea mays
  misc_feature (45)..(45): Xaa can be any naturally occurring amino acid
  misc_feature (74)..(74): Xaa can be any naturally occurring amino acid
  misc_feature (76)..(76): Xaa can be any naturally occurring amino acid
HASSNTLDGLNGFDGTDTHYFHSGPRGHHWMWDSRLFNYGNWEVXRFLLSNARWGLEEYKFDGSRFDGVTSMMXTXHGLQVTFTGNFNEYFGFATDVDAVVYLMLVNDLIHGLYP

SEQ ID NO: 2267 - protein, 201 aa, Hymenocardia acida
FLFMKNKVRMICDCRASPVKVIQDSRLAHPLSLCGSTLRSPHGCHAQYMENMGSIASLVMSVTINESDDEVENSQPKGSKLWGLVVCHHSGPRFVPFPLRYACEFLIQVFAVQISKEVELAAQSREKHILQTQTVLCDMLLRDAPVAIITQSPNVMDLVKCDGAALYYRKKFWLLGVVPTEAQIKDIADWLLEYHSGSTGL

SEQ ID NO: 2268 - protein, 241 aa, Asparagus officinalis
MGRGRVELKRIENKINRQVTFSKRRNGLLKKAYELSVLCDAEVALIIFSSRGKLYEFGSAGTSKTLERYQRCCYTSQDAAIASHETQSWYQEVSKLKAKFESLQRSQRHLLGEDLGPLSVKELQQLERQLESALSQARQRKTQIMLDQMEELRKKERHLGEINKQLKAKLEAEGASFRAIQGSWESEAGVGGNAFSMHPSQSSAMDCEPTLQIGYHHLVQPEAALPRSSGGENNFMLGWVL

SEQ ID NO: 2269 - protein, 115 aa, Zea mays
  misc_feature (57)..(57): Xaa can be any naturally occurring amino acid
  misc_feature (76)..(76): Xaa can be any naturally occurring amino acid
HASSNTLDGLNGFDGTDTHYFHSGPRGHHWMWDSRLFNYGNWEVLRFLLSNARWWLXEYKFDGFRFDGVTSMMYTXHGLQVTFTGNFNEYFGFATDVDAVVYLMLVNDLIHGLYP

SEQ ID NO: 2270 - protein, 202 aa, Jablonskia congesta
RFLFMKNKVRMICDCLASPVKVIQDKKLAKPLSLCGSTLRSPHGCHAQYMANMGSIASLVMSVTINDNEDEMESDQSNGRKLWGLVVCHHASPRFVPFPLRYACEFLIQVFGVQISKEVQLAAQMREKHILQTQTVLCDMLLRDAPVGIITQSPNVMDLVKCDGAALYYRKKFWLLGVTPTETQIKDIVEWLIEYHSESTGL

SEQ ID NO: 2271 - protein, 147 aa, Brassica napus
MDMNPNTTLPPGFRFHPTDEELIVYYLKNQTMSRPCPVSIIPEVDIYKFDPWQLPEKTEFGENEWYFFSPRDRKYPNGVRPNRAAVSGYWKATGTDKAIYSGSSNVGVKKALVFYKGRPPKGIKTDWIMHEYRLNDSRKASTKRTVR

SEQ ID NO: 2272 - protein, 224 aa, Asparagus officinalis
MGRGRVELKRIENKINRQVTFAKRRNGLLKKAYELSVLCDAEVALVVFSTRGKLYEFCSSPSMLKTLDRYQKCSYGAPDTSVQIRENQMLQSSHQEYLKLKARVEALQRSQRNLLGEDLGPLSSKELEQLEKQLDSSLKQIRSTRTQYMLDQLGDLQRKEQMLCEANRSLRKRYAQLEEASQANQQQVWEANANAMGYSRQPSQPQGEEFFHPLECQPSLGGQC

SEQ ID NO: 2273 - protein, 115 aa, Zea mays
  misc_feature (17)..(17): Xaa can be any naturally occurring amino acid
  misc_feature (45)..(45): Xaa can be any naturally occurring amino acid
  misc_feature (55)..(55): Xaa can be any naturally occurring amino acid
  misc_feature (76)..(76): Xaa can be any naturally occurring amino acid
HASSNTLDGLNGFDGTXTHYFHSGPRGHHWMWDSRLFNYGNWEVXRFLLSNARWXLEEYKFDGFRFDGVTSMMYTXHGLQVTFTGNFNEYFGFATDVDAVVYLMLVNDLIHGLYP

SEQ ID NO: 2274 - protein, 345 aa, Bradyrhizobium japonicum USDA 110
MTGQLRLDDHLQRYSETAPHALAVATAVDAIAAAAIEIADLIGAGDLADASGLTTGRNSDGDVQRDLDVQADAILRRCLGKLSIAALASEEMREPQIGDRAARICVAIDPLDGSSNIDINMTVGTIFSILPAPDDLALAFHQRGSAQFAAGFVTYGPQTSLVLTLGDGVDIFTLDRKAGCFRLARSAIQISEAGEEFAINASNRRHWDPPVRAFIDECLAGVEGPANHDFNMRWVGSLVAEAYRILTRGGVFLYPSDARPGYGDGRLRLTYEAHPMAYIIEQAGGSASTGRERILDLSAQSLHQRVPLIMGSSNEVRRVEELHCDPLLVASISAPLFARRGFFRL

SEQ ID NO: 2275 - protein, 876 aa, Frankia sp. EAN1pec
MGRHGRPRAPAEVYRWDDVTTEHGADRHVGPSPATGAVRVDVLYHTGVGRRIANGARLVGSWDEHGLQAGSWSSTPMEEFTAEDGCAAYRATVTVDASVSRTFDWGVWLTRPDGSQVWGIPAEVPDPGATEQVRRFEVGPGCGPVVRAEFRLAAHRHNGARRVLPVGSRDLGSPVSTVSTGGGSGGPSGPSGSGAAVSSDARERIRFRVWAPHALAVEVAFAGPGGYIADDGHGEDELITRLPMRQVGDGWWEAAAPGFADWVGRRYLYRVTRDDGSVAWRSDMYSAQQCGTGDIDPCGAPHDGPAEDLDGSVSCSVVVDTRDDERFWADEFDPARPVPRRVEDLVIYELHVGALGFGHTGAGTFADALAFVDHLTDLGVNAVELLPMFEFAGTRSWGYGSSHFLAVKQSAGGRAALRRFVRACHQRGVAVLMDVVYNHYTPNAQRSAWQYDSTAPSRNIYYWYEGAEDDHPHPDGGYLDNVSSGWAPRYSDENVRALFVASAVALLDEFHIDGLRVDQTTSIHAYNSLHADGRPVAAANIAGRKFLRELCQTLRLVDPDVILIAEDHSGWAEVTRPAESGGLGFDAHWYVDFYHHLVGDKGEGPEYAKLLHTAGRDPAGPLAMSLFAKAFTAAADRTVVYTESHDEAGNSEHSARNILVAVDHAPLHGDTAWFAFARLRCAAALTLLSPGTPMFLMGDEVGARRAYTHDGFAEAKEDLAGLRAGEGAELFACYRALVTLRLGSPALRSRAVELVGADDTARVLAFRRWDRGEEILVVVSLNNDPLPRFGLSHPSLAGRRWKPVLDTDAPRFGGRAGGSRRSLSPRGDSVRVDLPAAGAVVFRRRRRGAGLTDGPSDVPARPRRLRLPGVRRRGGR

SEQ ID NO: 2276 - protein, 540 aa, Bacillus clausii KSM-K16
MDESKKAPSFGTNVTGQGDALDQRKAANEKDDTLTTRQGHPVKDNQNVRTVGNRGPMTLENYDFLEKISHFDRERIPERVVHARGAGAHGYFQSYGKVGEEPISKYTRAKVFTNTEVKTPVFVRFSSVIHGIHSPETLRDPRGFAVKFYTEDGNWDLVGNNLKIFFIRDPLKFPDMVHAFKPDPVTNRQSMERFFDFVSQSPESTHMITFVFSPWGIPANYRNMQGSGVHAYKWVNEEGKAMLVKYHWEPVQGIKNLTQKEAEQIQGKNFNHATQDLYEAIEKGDYPEWELYVQLMEDGEHPELDFDPLDPTKLWYKDQFPWHKVGKMVLNKNPENYFAEVEQAAFGTGVLVDGLDFSDDKLLQGRTFSYSDTQRYRVGPNYLQLPINAPKKRVATNQRDGQMTYHVDSPPGINPHVNYEPSVLNGLKEAEKVNPDHTPHVSGEVKYEAISRPNNFGQAGETYRRFSDWERDELIANLADALADVDKRIQKQMIENVTEADRDYGKRLEEAIKRVQESVDDKEGHAVKEAEQEGMPSDPY

SEQ ID NO: 2277 - protein, 724 aa, Xanthomonas axonopodis pv. citri str. 306
MSNRWDSGVVRALAEARHGDAFAVLGAHPSDKGRLLRTYLPGADRVGAVLDDGQVVALDAGPEPGLFAGELPAHGGYRLRIGWPGGEQETADPYAFGPQLSDFDLHLISEGHHLQLADALGANVVEVEGVRGTRFAVWAPNASRVAVVGDFNSWDARRHPMRLRHQSGVWELFVPDVGPGAHYKYQLRGPHGHELPAKADPVARRAELAPGTASIVADPTPHQWSDDGWMATRARRQAHDAPMSIYEIHAGSWLREAGVDLDWDGLADRLIPYVADMGFTHVELMPVSEHPFGGSWGYQPLGLFAPTARFGTPDGFARFVDRCHREGIGVIVDWVPAHFPTDAHGLAHFDGTALYEHADPREGFHRDWNTLIYNHGRREVSGFLIASAMEFLQRYHVDGLRVDAVASMLYRDYSRNAGEWIPNIHGGRENYETIAFLRRLNEVVREHTPGAVMIAEESTAFPGVTAEVAHGGLGFHYKWNMGWMHDTLHYAGLDPIYRRYHHGELTFSMVYAYSERFVLPISHDEVVHGKGSLLGRMPGDDWQRFANLRAYLGFMFTHPGRKLLFMGCEFGQPTEWNHDAGLPWHLLDDPRHRGVQTLVRDLNRLYVQYPALHAHDDDPSGFAWVVGDDAGNSVVAFLRKGKRGDAPVLVVINFTPVVQHAYRIGVPQGGQWREVFNSDAGIYGGSNLGNGGSVTAEQQSMHGHAQSLPLLLPPLGAIVLTPYG

SEQ ID NO: 2278 - protein, 349 aa, Xanthomonas campestris pv. campestris str. ATCC 33913
MSAASVKGPIHHGEPCVPSSGLDPRVAPTPHPATPPQRAGKARRFGSLRRWVDSQTDEPLDEARADRIDWLRALPFIALHLACFAVFWVGVSWFAVSMAVALYALRMFALTGFYHRYFSHRAFKTSRVVQFVFAAIAATCVQRGPLWWAAHHRNHHRHTDTGRDPHSPAQHGFWWSHTGWFLTPRNFRTDWEVIPDLRRFTELRFLDRFDIVMPVLLALGLYLLGDWLAAAAPGLHTSGAQLLVWGFVLSTVALFHATFTINSLAHRFGSRRFDTRDDSRNNWLLALLTFGEGWHNNHHFFPGSARQGVRWWEYDMTWYGLTVMSWVGLVWDLKPMPAMLTRRAGRVAR

SEQ ID NO: 2279 - protein, 479 aa, Streptomyces coelicolor A3(2)
MLESATPVTPVTFPPAFLWGAATSAYQIEGAVREDGRTPSIWDTFSHTPGKTAGGDTGDVAVDHYHRYRDDVALMKDLGLGAYRFSISWPRVQPTGRGPAVQRGLDFYRRLVDELLAAGIKPAVTLYHWDLPQELEDAGGWPERDTAYRFAEYAQIVGEALGDRVEQWITLNEPWCAAFLGYASGVHAPGRTDPAAALRAAHHLNLAHGLGTVALRSVMPARNSVAISLNTSVVRPLSQSPADLAAARKIDDLSGGIFHGPILHGAYPQTLLEATAPLTDWSFVQDGDLGQIRQPIDAICLNYYTPTVVSAADADSRAPRADGHGASDHSPWPAAEDVAFHQPPGERTEMGWTVDPTGLHELIMRYNREAPGMPLYISENGAAYDDKPGADGTVHDPDRVAYLNGHLTAVRQAIADGADVRGYYLWSLLDNFEWAYGYEKRFGAVYVDYASQQRTPKSSALWYGRAARTGTLPPVDAAE

SEQ ID NO: 2280 - protein, 498 aa, Micrococcus luteus
TTPHATGSTRQNGAPAVSDRQSLTVGSEGPIVLHDTHLLETHQHFNRMNIPERRPHAKGSGAFGEFEVTEDVSKYTKALVFQPGTKTETLLRFSTVAGELGSPDTWRDVRGFALRFYTEEGNYDLVGNNTPIFFLRDPMKFTHFIRSQKRLPDSGLRDATMQWDFWTNNPESAHQVTYLMGPRGLPRTWREMNGYGSHTYLWVNAQGEKHWVKYHFISQQGVHNLSNDEATKIAGENADFHRQDLFESIAKGDHPKWDLYIQAIPYEEGKTYRFNPFDLTKTISQKDYPRIKVGTLTLNRNPKNHFAQIESAAFSPSNTVPGIGLSPDRMLLGRAFAYHDAQLYRVGAHVNQLPVNRPKNAVHNYAFEGQMWYDHTGDRSTYVPNSNGDSWSDETGPVDDGWEADGTLTREAQALRADDDDFGQAGTLVREVFSDQERDDFVETVAGALKGVRQDVQARAFEYWKNVDATIGQRIEDEVKRHEGDGIPGVEAGGEARI

SEQ ID NO: 2281 - protein, 761 aa, Silicibacter sp. TM1040
MSLAEKLAQERRARLAAERLLELKQAELTDANRKLGRHALALTKRIGATQAEIATFKNENEKVKSDLNTANEKVEQAERRLWHSIQAFQDGFAFFDSDSKLIGANTAYLNIFEGVEEVSPGVSYVRILQILTDEGLIDTEELSADSWRAMMTERWMSPAPEPTVVRLWNDRYLKLIDQRGHDGDIVSLALDITATVHYEEELRSARERAEAANRAKSAFLANMSHEIRTPMNGVVGMAELLSDTTLTEEQRLYANTIKNSGEALLVIINDVLDYSKIEADKLALHPEAFDLEACMHEVVMLLQANARDKGLTLLVDYDLFMPTNFIGDPGRIRQILTNLIGNAIKFTNEGHVTARVTGVPHPEDNTVMLHISIEDSGIGIPDDKIQHIFGEFNQVEDETNRQFEGTGLGLAITERLIKLMDGEIWVESQLGKGSCFGFRLPLVVADGSQVNAPELPENLNCVMIVDDMDINREILNRQLQRLDLKVVAVTSGAEALDVLNAEIDLVITDRNLPGMDGLKLARSLHHASPQTPVLLLSSDPADGSDPALSDLFAGILQKPIPRGALFRALSKLDAPSVHPARPQDVPPAAPAIEPPSDAPVQVPAPEAGVDFGSGATIASDLRRMRVLAAEDNRTNQLVFRKMVKDMNIDLRFAGNGLEAVELYQSFKPDMIFMDISMPKMDGKEATQAIRELEKENGRRVQIVALTAHAMDGDSEGILAAGLDDYLTKPLRKSVIHDRIMKNMPTAVAPLQGEGDDLQATG

SEQ ID NO: 2282 - protein, 540 aa, Burkholderia vietnamiensis G4
MTAKDVKFRDGARSQIVKGVNVLADAVKVTLGPKGRNVVIERSFGAPVITKDGVSVAKEIELKDRFENMGAQIVKQVASKTADVAGDGTTTATVLAQAIVQEGMKHVAAGMNPMDLKRGIDKAVGVVLEELRTLSRPISTHKEIAQVGAISANADDAIGKIIADAMEKVGKEGVITVEDGKSLDNELDVVEGMQFDRGYISPYFINDPEKQAAYLDDALILLHDKKISNIRDLLPILEAASKAGKPLLIVAEDVEAEALATLVVNAMRGILKVAAVKAPGFGDRRKAMLEDIAILTGATVISEETGKQLDKATLDDLGSAKRVEVRKDDTIIIDGAGDAARIDARVKSIRVQIDEATSDYDREKLQERVAKLAGGVAVIKVGAVTEVEMKEKKDRVDDALHATRAAVEEGIVPGGGVALLRARAALTDLKGANGDQDAGIRIVLRALEAPLRVIASNAGDEPSVVIAKVLEGSGNFGYNAATGEYGDLVEAGVVDPTKVTRTALQNAASIAGLVLTTDATVADAPKDERAEAAPSPELGY

SEQ ID NO: 2283 - protein, 115 aa, Zea mays
  misc_feature (17)..(17): Xaa can be any naturally occurring amino acid
  misc_feature (55)..(55): Xaa can be any naturally occurring amino acid
  misc_feature (106)..(106): Xaa can be any naturally occurring amino acid
HASSNTLDGLNGFDGTXTHYFHSGPRGHHWMWDSRLFNYGNWEVLRFLLSNARWXLEEYKFDGFRFDGVTSMMYTHHGLQVTFTGNFNEYFGFATDVDAVVYLMLXNDLIHGLYP

SEQ ID NO: 2284 - protein, 201 aa, Martretia quadricornis
IPFQKKKVRMICDCRASPVKVIQDDRLAQPLSLCGSTLGSPHSCHAQYMENMGAIASLVMSVTIHEDGDEVENDQPKGSKLWGLVVCHHTSPRFVPFPLRYACEFLIQVFGVQISKEVEMASQKREKHILQTQTILCDMLLRDAPVAIIAESPNVMDLVKCDGAALYYRNKFWLLGVTPTEEQIKDIADWLLEYHSESTGL

SEQ ID NO: 2285 - protein, 201 aa, Pentabrachion reticulatum
ILFMKNKVRMICDCLAPPVKVIQDKRLAQPLSLCGSTLRSPHGCHSQYMANMGSIASLVMSVTINEDDDEMDSDQERGIKLWGLVVCHHTSPRFVPFPLRYACEFLIQVFGVQVSKEVQLAAQAREKHILQTQTVLCDMLLRDAPVAIITRSPNVMDLVKCDGAALYYRKKFWLLGVTPTEAQIKDIADWLLEYHGGSTGV

SEQ ID NO: 2286 - protein, 1041 aa, Desulfotalea psychrophila LSv54
MKRYFFSVISVCFLVVWAIPALASDLQLTPAEQSWLRAHPDIRLGVDPDYAPFESIEGGVYVGLAADYVSLVSKKLGLSLVPVPDLTWKEVMALAEQGELDLFPAVVQTPERNELWLFAKPHMAYSTVIFTRDDYWNVFGLADFAGKKVAVVRGYAILDFIRSAHPHLDIVLVDSVDMGLRQLEAGRVSAFVNDIATGVSAIQKMNLKNLKIAAYTDLKDKGLGFAVRKDWPELVAMIDKVLASITPEEHAAIHNRWIKVESFSPWQHWARWLFIGLAMVAVSLLAFTGWIYLLRKQVASRTTKLQASEAWTVAILDTASNPIITIDEDETVLSFNLGAERSFAYSAEEIIGQKVKILLPDLYEKYEDEFATSFFAKDDAHLIDMDREIDARRKNGTIFPIHLSVGEMIVSGKRMFVIILVDLSVQKQRNLELELARDAAEAAMEAKAIFLANMSHEIRTPMNAILGFLAIVLESSSLPADLRKHIVTAHGSAESLLVIINDVLDVSKFDSGRMELVFSVFHLPRTIGKALQTLYMPAQEKELNIHLNYDEDLPYCFLGDSVRLRQVIINLVANAIKFTEEGSITIEVKGTSGEDDLLLFTVVDTGIGIRPEQVARIFEPFTQADDSSTRNIGGTGLGLAICKEIVDLMGGRIWVESEKGKGSSFNFMVPLPRAECIKDCPKAGRPAETGDDCPKLAELSERAEPVSRKIFRILLAEDMKDNAELAQFRLEQQGHIVTHVWNGLEAVEAFQRDEFDLIFMDVQMPVLDGHSATRQIRKIERGAGGYIPIFALTASVMREDREKCIAAGMDVIIGKPIDFQFLFAKMEEIVSEGVGVVQRGWIDFSPVMAVAAVEQGLLTWANSVVYAGTLIDFSEAHLGDASTLQQLFQQNDIRGMQCLIHTLKGVAENLALSDLVKIISDVDSSLLMDDRERTTLLLLDLKEALKNVVVATGQLALAGEGAVQPVKKEDLKKIGDLLAELLVQLEEDNPAVVEPLVAELSQYLSQNDLLLLQKNIDDFEFVRAKLQVRKLADMLAIKLEV

SEQ ID NO: 2287 - protein, 201 aa, Poranthera microphylla
  misc_feature (199)..(199): Xaa can be any naturally occurring amino acid
DPFMKNKVRMICDCLATPVEVIQDKRLAQPLSLGGSTLRSPHGCHAQYMANMGSIGSLVMAVTVNEDDDEIDNDQVRGRKLWGLVVCHHTSARFVPFPLRYACEFLIQVFSVQVNKEVELAAQMKEKHILQTQTVLCDMLLRDAPVGIITQSPNVMDLVKSDGAALYYRKKFWLIGVTPTEAQIRDIADWLLQYHGGSXGL

SEQ ID NO: 2288 - protein, 115 aa, Zea mays
  misc_feature (45)..(45): Xaa can be any naturally occurring amino acid
  misc_feature (64)..(64): Xaa can be any naturally occurring amino acid
  misc_feature (106)..(106): Xaa can be any naturally occurring amino acid
HASSNTLDGLNGFDGTDTHYFHSGPRGHHWMWDSRLFNYGNWEVXRFLLSNARWWLEEYKFDGXRFDGVTSMMYTHHGLQVTFTGNFNEYFGFATDVDAVVYLMLXNDLIHGLYP

SEQ ID NO: 2289 - protein, 200 aa, Reverchonia arenaria
DPVMKNKVRMICDCQAPPVNVVQDKRLAQPISLSGSTLRSPHGCHAQYMENMGTIASLVLSVTINEDDDETDNDQKIGRKLWGLVVCHHTNPRFVPFPLRYACEFLMQVFGVQISREVELAAQTTEKHILQTQTVLCDMLLRDAPVAIVTQSPNVMDLVKCDGAALYYRKKFWMLGVTPTEAQIKHITEWLLEYHGESTA

SEQ ID NO: 2290 - protein, 202 aa, Savia bahamensis
RFYLSKNKVRMICDCQATPVKVVQDKRLTQPLSLCGSTLRSPHGCHAQYMANMGTTASLVMSVTINEDDDEADNDQQIGRKLWGLVVCHHTSPRFVPFPLRYACEFLMQVFGVQLNKEVELAAQTREKHILQTQTVLCDMLLRDAPVAIVTQSPNVMDLVKCDGAALYHQKKFWLLGVTPTEAQIKDITEWLMEYHGESTGL

SEQ ID NO: 2291 - protein, 110 aa, Quercus suber
SLDIWDPFEGFSAVASVPPSARETTAFATARIDWKETPEAHIFKADLPGLKKEEVKVEVEDGNVLQISGERSKEHEEKNDKWHRVERSCGKFMRRFRLLENAKVDQVKAN

SEQ ID NO: 2292 - protein, 241 aa, Glycine max
MGRGRVELKRIENKINRQVTFAKRRNGLLKKAYELSVLCDAEVALIIFSNRGKLYEFCSSSSMLKTLERYQKCNYGAPEANVSTREALELSSQQEYLKLKARYEALQRSQRNLMGEDLGPLSSKELESLERQLDSSLKQIRSTRTQFMLDQLSDLQRKEHLLSEANRSLRQRLEGYQINPLQLNPGVEEMGYGRHPAQTHGEALFQQMECEPTLQIGYQPDPVSVVTAGPSMSNYMAGWLP

SEQ ID NO: 2293 - protein, 92 aa, Quercus suber
SLDIWDPFEGFSAVASVPPSARETTAFATARIDWKETPEAHIFKADLPGLKKEEVKVEVVDGNVLQISGERSKEHEEKNDKWHRVRGAVASL

SEQ ID NO: 2294 - protein, 488 aa, Bacillus clausii KSM-K16
MRRLTDNQGHPIYDNQNSRTAGQHGPTLLEDYHLVEKLAHFDRERIPERVVHARGAGAHGVFKVKNNMKRYTKANFLSEDGKETPVFVRFSTVIHGGTSPETLRDPRGFSVKFYTEEGNYDFVGNNLPVFFIRDAIKFPDVIHSLKPDPRTNIQSPDRYWDFMSLTPESTNMLTHLFTDEGIPASYREMRGSSVHAFKWVNEHGNMVYVKLNWVPKMGIRNLSMEEAANIQAHDFNHATRDLYEAIERGDYPEWDLYVQILDPADLDNFDFHPLDATKDWLEEDIPSQLVGTMTLNRNPENVFAETEQVGFNPGNLVPGFEPSEDKMLQGRIFSYSDTQRYRVGANYLDLPINCPFAQKANNTRDGAMPIGQQTNRINYEPNRYQDTPKEAEGYEDYRAPINGTIGRIAIEKKNNFGQAGKIYRNYPKNVQDALIKNIANDLKQVAPETALRAICNFYRADEDYGQRLADAIGMDISEYVKHGSENNS

SEQ ID NO: 2295 - protein, 375 aa, Arabidopsis thaliana
MVMMKKMKGSQSFRQRLLLSTLSSTPISIDEIRADETIPGLRPHEVNLLRLLEIVTDDAVVDINETGTRLKYKPGTIVGGKNLVHSCSLSRSIGYYLEPLLLLGLFGKKPLSIRLKGITNDPRDASVDTFRSTTLNIIKRFGVPAEDLELKIEARGVAPNGGGEVLLTVPNIKTLSAVHWVEEGMVKKIRGTTFSTRVTSDFEHSMRFAARGIFNNLLPDVHIFQDHRAGAQAGKSPGYGISLAAETTTGCFISADTTVSCERPDETGELDVEKKERSPAEDTGVEVASWLLQEIEKGGVVDSTHQGLLFLLCALSEQDVSKVRVGTLSPYAVETLRNIKEFLGVKFAIKPDPLTGTVILKCTGSGLINLSRKLS

SEQ ID NO: 2296 - protein, 595 aa, Kluyveromyces lactis NRRL Y-1140
MRVGNSNSIKKNVSECLSPNPVYYRNPITFKKANEFNNGKRERPLALLGDSIHADSKNSRQQLDDTVDNRLVIHWFRGDLRVRDNTGLAYALNQSKSGSVEALYVINEHDWIAHMESGWKLKFQLDALRSLSRELAKLGVRLHVKYFIPESPCLSNSREYAQWFSHIIEEIAASKNYDGNSKDDTKDDTDADEPALKKRKKDNDENQKGGSPNILVTANLQYEVDELYRDLKICRLQTQSSNSANFTLKLFHDMCIIEPGILKTGKGSQYTIFTPWYKKWVSFLEANQKDKHTICIEASIPQSSNREKVNPEEIKYQLPDKFMSEMPEQTLNIPKADEETALKKLTEFISKRASKYNNDKDLLDLTGTSLLSCYVTSGVISARTILNQSYQANNSRLMNKDIKKNNSLETFIKEVAWRDFYKHAISYWPFLSMDLPFKFETLNIKWENDVFLFEKWCYGETGIPIVDAIMLKMLKTGYINNRSRMITASFLAKNLLIDWRWGERWFRKHLIDYDTASNVGGWGFCASTGIDCQPYFRVFNMKLQSEKYDPEGKFIRHWLENDENDSDNVHEPKPNAIVDLRDSRERVLERFREVM

SEQ ID NO: 2297 - protein, 502 aa, Myxococcus xanthus DK 1622
MNGASGNGASDGVGASRRESVLQRRLSLADMLDLPSFVEVVRSFSELYRVGIKVMDTAGDKLADVKVGHGDFCSYVFGFPEGRSRCTATVARVKDGPVALVQGARPARGDGAEAAGIIALPCFTGLRYLVMPVCWEGDTLGRVILGPFTPEELADFPPSLTDISGVDLSRAHELVARVRRVPERTAAQVLVHFGQVLAALVASGQRAFLATQLHIEAMLETHRDLEANNARLAQANIRLKELDRLKSTFLGTVSHELRTPLASIIGYSEMLAEGLAGALNPEQLLYVRTIVEKGESLLNLISSILDLSQIEAGRLRLVMGPVDLGSVIQTAVSSVAPQAQRKGVELEVRLPPLPQPRLAADADKLRQVVVNLLANAVKFTSSGGRVSVVMSEATAQHELAAPGYRVCVEDTGMGIREDQFENIFQSFYQVDGSSTREHGGAGLGLAIVKSLVEGHGGRVSVESEFGRGSRFTVVLPLQPPLSEHGGFSALAPTPSPSGHDRF

SEQ ID NO: 2298 - protein, 577 aa, Lycopersicon esculentum
MIKQPFLLTKFTPFSSKSKHTLFTFHCNFSIKMASLTARTTPTVQNVPGLTPEEMERVCEQTFQRYESGGLGKRKGKGVAIVWFRNDLRVLDNEALLRAWVSSEAILPVYCVDPRLFGTTHYFGMPKTGALRAQFIIECLNDLKRNLVKRGLDLLIQHGKPEDIVPSLAKAYKAHTVYAHKETCSEEVKVEKMVTRNLQKLVSPSSGGIGNDPGSGNTTKLELVWGSTMYHIDDLPFDCESLPDVYTQFRKSVEYKSKVRNCTKLPTSFGPPPEVGDWGHVPQVSELGLQQEKVSKGMNFVGGESAALGRVHDYFWKKDLLKVYKETRNGMLGADYSTKFSPWLASGSLSPRFIDEEVKRYEKERLSNDSTYWVLFELIWRDYFGFLSIKLANLLFQAGGPQKVNINWSQDQTMFDAWRRGQTGYPLIDANMKELAATGYMSNRGRQIVCSFLVRDMGIDWRMGAEWFETCLLDYDPCSNYGNWIYGAGVGNDPREDRYFSIPKQAQNYDPEGEFVAYWLPELRALPREKRHSPGMMYLNPIVALKHGYTKKTGDSKTAFSSRRGRPEDNRRKRHGY

SEQ ID NO: 2299 - protein, 241 aa, Nicotiana sylvestris
MGRGRVELKRIENKINRQVTFAKRRNGLLKKAYELSVLCDAEVALIIFSNRGKLYEFCSSSSMLKTLERYQKCNYGAPETNISTREALEISSQQEYLKLKARYEALQRSQRNLLGEDLGPLNSKELESLERQLDMSLKQIRSTRTQLMLDQLTDLQRKEHALNEANRTLKQRLMEGSQLNLQWQQNAQDMGYGRQTTQTQGDGFFHPLECEPTLQIGYQNDPITVGGAGPSVNNYMAGWLP

SEQ ID NO: 2300 - protein, 470 aa, Dechloromonas aromatica RCB
MKKEKALVWFRRDLRDHDHAALSAALAEAQQVYCAFVFDSEILDPLPTRHDRRVHFIRESLVELDAALRARGGGLIIRHGQAVDEIPALARRLGVSAVFTNRDYEPSAKRRDAQVARQLRNDDIAFHGVKDQAIFDGDEVLTQAGKAFSVFTPYKNAWLKRLTTADYAAWPCDGRLAGQELAGIPTLEEIGFTPTDLAELGIQPGMSGAKGLWDDFSRDRIERYGSLRDFPAVKGVSYLSVHLRFGTISIRQLVRQALAHQADTWLSELIWRDFYFMILDHFPHVAGHAFKPEYDAIQWASRPEAFAAWCEGCTGYPLVDAAMRQLNFSGWMHNRLRMVVASFLTKDLGIDWRLGEKYFAEQLNDFDLSANNGGWQWASSSGCDAQPYFRIFNPVTQSEKFDAEGKFIRRYVPELAKVHDKYIHAPWKMGRIEQEALGVVIGRDYPSPIVDHATARDETLARYAVVKKQA

SEQ ID NO: 2301 - protein, 249 aa, Synechococcus sp. WH 8102
MQSSLHALPVLQDNVLWIWVRGDEAAVVDPAVAEPVIDWLQQRQLQLSAVLQTHHHADHIGGTPGLLERWPDAAVVAAGADRSRIPFQTISVSDGDQVTVLGRSLQVLDVAAHTSAHIAFVIPEQEDPDLGPVVFCGDTLFSGGCGRLFEGTPADMHRALRRLSELPESTKVCCAHEYTEGNLLWAIQQQPQDAAIRQRYDAVVDLRRRGELSLPSSIGEERRSNLFMRAASAEELGRLRRHKDHWRAA

SEQ ID NO: 2302 - protein, 115 aa, Zea mays
  misc_feature (83)..(83): Xaa can be any naturally occurring amino acid
  misc_feature (100)..(100): Xaa can be any naturally occurring amino acid
HASSNTLDGLNGFDGTDTHYFHSGPRGHHWMWDSRLFNYGNWEVLRFLLSNARWWLEEYKFDGFRFDGVTSMMYTHHGLQVTXTGNFNEYFGFATDVDAXVYLMLVNDLIHGLYP

SEQ ID NO: 2303 - protein, 115 aa, Zea mays
  misc_feature (17)..(17): Xaa can be any naturally occurring amino acid
  misc_feature (100)..(100): Xaa can be any naturally occurring amino acid
  misc_feature (106)..(106): Xaa can be any naturally occurring amino acid
HASSNTLDGLNGFDGTXTHYFHSGPRGHHWMWDSRLFNYGNWEGLRFLLSNARWWLEEYKFDGFRFDGVTSMMYTHHGLQVTFTGNFNEYFGFATDVDAXVYLMLXNDLIHGLYP

SEQ ID NO: 2304 - protein, 254 aa, Triticum aestivum
  misc_feature (172)..(172): Xaa can be any naturally occurring amino acid
NKFVQKSLPVPVRNSRDIVDPRVRLIFSKGSSQVIAQYYQLIRLGCEGYRNIMDNCQENAMVLKEGLERTGRFNIVSKDQGVPLVAFSLKDSSRYYEFEISEFLRRFGWIVPAYTMPPDAQHVTVLRVVIREDFSRTFAERLVIDIEKALHELDALPSCSSGPAPAAPPTGXPVSKKDLPRQRELVSVWKEGRPPPGRKTQGVLLDGGALHLLTWLAGDLMNPITCLLNTFWGGISLILKLAYYLPLWAMKDFF

SEQ ID NO: 2305 - protein, 199 aa, Spondianthus preussii
KISFLKNKVRMICDCLAPPVKVIQDKRLTQPLTLCGSTLRSPHGCHAQYMANMGSIASLVMSVTINEDDDETESDQSKGRTLWGLVVCHHTSPRFVPFPLRYACEFLIQVFGVQINKEVELAAQTREKHIFQTQTVLCDMLLRDAPVAIITQSPNVMDLVKCDGAALHYKSKFWLLGVTPPEAQIRDIAEWLLEYHSGS

SEQ ID NO: 2306 - protein, 115 aa, Zea mays
HASSNTLDGLNGFDGTDTHYFHSGPRGHHWMWDSRLFNYGNWEVLRFLLSNARWWLGEYKFDGFRFDGVTSMMYTHHGLQVTFTGNFNEYFGFATDVDAVVYLMLVNDLIHGLYP

SEQ ID NO: 2307 - protein, 115 aa, Zea mays
  misc_feature (76)..(76): Xaa can be any naturally occurring amino acid
HASSNTLDGLNGFDGTDTHYFHSGPRGHHWMWDSRLFNYGNWEVLRFLLSNARWWLEEYKFDGFRFDGVTSMMYTXHGLQVTFTGNFNEYFGFATDVDAVVYLMLVNDLIHGLYP

SEQ ID NO: 2308 - protein, 110 aa, Quercus suber
SLDIWDPFEGFSAVASVPPSARETTAFATARIDWKETPEAHIFNADLPGLKKEEVKVEVEDGNVLQISGERSKEHEEKNDKWHRVERSCGKFMRRFRLPENAKVDQVKAN

SEQ ID NO: 2309 - protein, 110 aa, Quercus suber
SLDIWDPFEGFSAVASVPPSARETTAFATARIDWKETPEAHIFKADLPGLKKEEVKVEVEDGNVLQISGERSKEHEEKIDKWHRVERSCGKFMRRFRLPENAKVDLVKAN

SEQ ID NO: 2310 - protein, 917 aa, Pseudomonas chlororaphis
MLKKLGIKGRVLLLTLLPTSLMALVLGGYFTWMQQSDLQTQLLQRGEMIAEQLAPLVAPALAHQNTALLERIATQSLEQQDVRAVSFLAPDRTPLAHAGPSMLNQAPTGNGSQMLQRTGSDATRYLLPVFGRHRNLAGDLIPDESDRLLGWVELELSHNSMLLRGYRSLFASLLLITAGLICTGLLALRMGRTINNPLSQIKQAVTQLKDGNLETRLPLLGSQELDELASGINRMAGTLQNAQEELQHSIDQATEDVRQNLETIEIQNIELDLARKEALEASRIKSEFLANMSHEIRTPLNGILGFTHLLQKSELTPRQLDYLGTIEKSADSLLGIINEILDFSKIEAGKLVLDSIPFNLRDLLQDTLTILAPAAHAKQLELVSLVYRDTPLSLVGDPLRLKQILTNLVSNAIKFTREGTIVARAMLEEEHEDSVQLRISIHDTGIGLSNQDVRALFQAFSQADNSLSRQPGGTGLGLVISKRLIEQMGGEIGVDSTPGEGSEFWISLRLPKTRDDAEDLPAPPLLGRRVAVLENHELARQALQHQLEDCGLEVTPFNTLEALTNGVTGVHQTEQAIDLAVLGITTNDMPPERLNQHIWDLEHLGCKVLVLCPTTEQTLFHLSVPNPHSQLQAKPACTRKLRRALADLVNPKAVRSEPSEPIASRPPRVLCVDDNPANLLLVQTLLEDMGAKVLAVDSGYAAVKAVQNESFDLVMMDVQMPGMDGRQSTEAIRQWESERNCTPLPVIALTGHAMANEKRALLQSGMDDYLTKPISERQLAQVVLKWTGLALRNQGPERTGEPSGNGHELQVLDHDEGLRLAAGKADLAADMLAMLLASLEADREAIRAARAANDHNALIERVHRLHGATRYCGVPQLRAACQRSETLLKQEDIKAFAALDELERAINRLATEARINA

SEQ ID NO: 2311 - protein, 452 aa, Zea mays
  misc_feature (136)..(136): Xaa can be any naturally occurring amino acid
  misc_feature (155)..(155): Xaa can be any naturally occurring amino acid
  misc_feature (167)..(167): Xaa can be any naturally occurring amino acid
MGEGEAEVKGGVLQGRYELGRVLGHGNFGRVHAARDLRTGRAVAVKVLDKDKMLRTGMMEQIKREIAVMKRVSHPNIVELHEVMATRSKIYLALELVRGGELFARIVRAGRVKEDVARRYFRQLIHAVDFCHARGXVYHRDLKLENLLLDDAGNXLKVVDFGLSALXADHARSDGLLHTLCGTPGYVAPEVFRNKGYDGAKADIWSCGVILYVLLAGSLPFPDDNVAAMFRKMSRGDYRCPPWLSTEARRLIPKLLDPDPDTRITIAQLVETPWFNKPSVSRSVRAAAGGATEPPAEPASSAKDGGDKDEPPETMNAFHLISLSAGFDLSPLFDVEGGPARGPREGGMRFATREPASGVVSRLEEVAARGGGRMRVTKSGARGVRLEGAERGGRKGRLAVAADIFCVAPSVLVVDVKKDGGDSLEYRSFCSEELRPALKDIVWAADPQPAVV

SEQ ID NO: 2312 - protein, 110 aa, Quercus suber
SLDIWDPFEGFSAVASVPPSARETTAFATARIDWKETPEAHIFKADLPGLKKEEVKVEVEDVNVLQISGERSKEHEEKNDKWHRVERSCGKFMRRFRLPENAKVDQVKAN

SEQ ID NO: 2313 - protein, 145 aa, Bacillus subtilis
MSLVPYDPFRQLSNMRREFDRFFSELPISFDNEHGIGGIRVDVHETENEVVATCDLPGLEKKEDVDIDIQNNRLSISGSIKRTNEIKEENMLKKERYTGRFQRMITLPSPVSHDGVKATYKNGILEITMPKVAKDVKKKIDVSFQ

SEQ ID NO: 2314 - protein, 469 aa, Bacillus cereus G9241
MKFSHDFLFGAASASYQVEGAWNEDGKGVTNWDEFSKIPGKTYNGTNGDVAVDHYHRYKEDVRLMAEMGLESYRFSISWARILPTGDGEVNEKGIEFYNNLIDECLKYGIVPFVTLYHWDLPLALEKDGGWTNKRTAEAFVKYAEICFKAFGDRVKHWITFNETVMFCGLGYLKGAHPPGIQNDVPKYFQATHYVFYAHAKTVAVYKQLKQYGEIGITHVFLPAYSVDGQKENILAAKHANEYETYWYYDPVLKGEYPSYVVQQLKKKGWTPNWTVEELEIIKQNAEKNDFIGLNYYQPIRVERYDMDINGGEHSRENSTLAPGNPSFDGFYRTVKMDDKTYTKWGWEISPEGFLDGLHMLKERYGDIKMYVTENGLGDEDPIIDGEIVDVPRIKFIEEHLKVIKRAIEEGINLKGYYAWSVIDLLSWLNGYKKQYGFIFVDHNDNLKRKKKLSFHWYKHVIETRGEEL

SEQ ID NO: 2315 - protein, 80 aa, Glycine max
  misc_feature (73)..(73): Xaa can be any naturally occurring amino acid
MLEFNFMQHILYRQKEQFSDGVGYGWIDGLKAHAEKHVTDRMMLNAANIFPFNTPTTKEAYYYRMIFERFFPXVNLINHA

SEQ ID NO: 2316 - protein, 607 aa, Bacillus anthracis str. A2012
MCGITGWVDWKEDLSNQHVILKKMANRIQHRGPDAEGFWFSPRAAFAHRRLIVIDPEGGAQPKTFRAGDYTYALTYNGEIYNFRELREQLQKCGHTFETHSDTEVLLHAYLEWKEDCVQHLNGIFAFALWDDQKQRLFLARDHLGVKPLFYTERNDSIIFGSEIKALLAHPSVPAEIDADGINEIFGLGLFRTPGCGVFKHIEEVRAGHSITFTRDKKVVTKYWNLESKVHTDSIEDTSSHILSILQDTVKRQLIADVPLVCMLSGGLDSSGITALAGKEFAAENKTLHTYSVDFVNSAKDFELTFARTGLDAPWVKRVSEHVGTSHHDIIVNAEELANHLFVPLRAKDLPSAGEMETSLYLLFCEMKKDATVALSGESADEVFGGYPWFHQEELLYVDKFPWLTNWKNTSPLLLHEISNQCNLENYIDTRFQEAILEVPTLEGESKKSAKQRQMFYLFLTRFLPFLLDRKDRMSMAVGFEVRVPFCDYRLVEYLWNVPFNIKSIDNIEKGILRRALKPALPDDVRNRRKSAYPTSQDPQYLQTIRHLSLDMCSNKNNPIFSLINHSTLLAIADGSNKEINNFEARSAMEYMLQVNEWLKTYHIHIA

SEQ ID NO: 2317 - protein, 251 aa, Arabidopsis thaliana
MGRGRVELKRIENKINRQVTFAKRRNGLLKKAYELSVLCDAEVALIIFSNRGKLYEFCSSSNMLKTLDRYQKCSYGSIEVNNKPAKELENSYREYLKLKGRYENLQRQQRNLLGEDLGPLNSKELEQLERQLDGSLKQVRSIKTQYMLDQLSDLQNKEQMLLETNRALAMKLDDMIGVRSHHMGGGGGWEGGEQNVTYAHHQAQSQGLYQPLECNPTLQMGYDNPVCSEQITATTQAQAQQGNGYIPGWML

SEQ ID NO: 2318 - protein, 503 aa, Ajellomyces capsulatus
MGADDTFNSYRYKDTPTYTDSNGCPVMDPESSQRVGENGPLLLQDFHLIDLLAHFDRERIPERVVHAKGAGAYGEFEVLDDISDITTINMLKGVGKKTKLVTRFSTVGGEKGSADSARDPRGFSTKFYTEEGNWDWVFNNTPVFFLRDPSKFPLFIHTQKRNPQTNLKDATMFWDYLSTHQEAIHQVMHLFSDRGTPYSYRHMNGYSGHTFKWLTPDGGFNYVQIHLKTDQGSKTLTNEEATKLAAENPDWHTEDLFRAIERGEYPSWTCYVQVLSPQQAEKFRWNIFDLTKVWPHSEVPLRRFGRLVLNKNPQNYFAEMEQAAFSPSHLVPGVEPSADPVLQSRLFSYPDTHRHRLGVNYQQIPVNCPLRAFNPYQRDGAMAVNGNYGANPNYPSTFRRMNYMPVKASQEHEKWTGAVLAKQLPVTDEDFVQANGLWQVLGRQPGQQANFVKNVAGHLCNAEQKVRKAAYGMFIRVNKDLGSSIESSTEALVASQAQSQPRL

SEQ ID NO: 2319 - protein, 388 aa, Xanthomonas axonopodis pv. citri str. 306
MAGLGVWGMLAVLLVFTQLTIFAVTLYLHRSQAHRGVDFHPVIAHFFRFWTWLTTSMITREWVAIHRKHHAKVETEEDPHSPQTKGIAQVFWRGVELYREARTQRADIEQYGKGAPSDWIERHLYTPHANAGPIALLVINAVLFGLPGIALWAIQMAWIPFWAAGVVNGLGHWWGYRNFESADTSTNLTPWALWIGGEELHNNHHAFPSSARFSMRRWELDIGWVAIRGLQALGLAKVLRVAPSLDIRPNIAVPDADTLKALLSHRFQAMTDYQRNVFKPALREEAAATGAKLRELLPRRLRKGLVDDGRWLKPDARAQLQAWVAQRPRMRTLVEYRARLTALLEARSHDASERLRQLQQWCHEAEASGNAALQAYAARLKGYALSGA

SEQ ID NO: 2320 - protein, 167 aa, Glycine max
  misc_feature (151)..(151): Xaa can be any naturally occurring amino acid
  misc_feature (155)..(155): Xaa can be any naturally occurring amino acid
MSGGGCSIVWFRRDLRVEDNPALAAGVRAGAVVCVFIWAPEEEGQYYPGRVSRWWLKQSLAHLDSYLRNLGSPLITKRSTNSISSLLEVVKSTGATQLFFNHLYDPLSLVRDHKAKEVLTAQGITVRSFNSDLLYEPWDVNDAHGQPFTTXSAFXERCLSMPYDPQA

SEQ ID NO: 2321 - protein, 129 aa, Gluconobacter oxydans 621H
MSTFLHTMVRIRDIDRSLAFYKLLGMKELRRKEVREGRYTLVFIGFDDNEHGQAEIELTYNWDQETDYEVGTGFGHFAIGVPDVAALVETVRSGGGKVTREAGPLKFGTIIIAFVEDPDGYKIELIEKK

SEQ ID NO: 2322 - protein, 292 aa, Zea mays
MRNSAAAQPSSPAATYVSGAAYVAPASSAAMYGSGASYVAPAASAPGGGGYIYPAPASSGGSAGYSKIPTYPAVPSAYPNPSRLPPRVSTHAPVEDPTALPSPLAKAGELVTRLREQGQVLIAARRPWGEVFRAPAFSKPPSLGEAIARMRRNTAYFRANYALAVLAVVAASLLWHPGTLFVLLFLCAAWFFLYFARPAQGGQPLRVLGMEFDDGSVLAALCGVTVIAMLFTSVGWNVVGSVMIGGALVSAHAALRTTDDLFLTEQEAAGDGLLAAGMSAAGPMLPTYVRIG

SEQ ID NO: 2323 - protein, 277 aa, Lotus corniculatus var. japonicus
MCEALKSQYQLCEEIGRGRFGTIFRCFHPISTDTFAVKLIDKSLLADSTDRHCLENEPKYMSLLSPHPNILQIFDVFEDDDVLSMVIELCQPLTLLDRIVAANGTSIPEVEAAGLMKQLLEAVAHCHRLGVAHRDVKPDNVLFGGGGDLKLADFGSAEWFGDGRRMSGVVGTPYYVAPEVLMGREYGEKVDVWSCGVILYIMLSGTPPFYGDSAAEIFEAVIRGNLRFPSRIFRNVSPAAKDLLRKMICRDPSNRISAEQALRHPWFLSAGDTVNVT

SEQ ID NO: 2324 - protein, 480 aa, Listeria innocua Clip11262
MKELLTFPKDFWWGSAWSAEQAEGRGDTGKAKTVWEHWFETEPNRFYEGVGSEITTDHFNRYKEDVQWMKKTGHNSFRISISWARMFPNDGVGEVNQKAIAFYRDLLTEMNENGIKPFANLYHFDMPVALQDAWGWESREVVDAYVHFADTCFKEFGDLVYHWFTFNEPLGPILGGYLEDFHYPNQIDFKRGAQAGFNTILAHALAIKAFKKLNLSSKIGVILNLSPTYPRSQNEYDLEAAEICDAFYTRSFLDPMVKGTFPEKLVEIMREYDQMPEYTEEDLTIIKENTAQILGLNYYEPRRVKARLTAINEKSPFLPDWFFEPHNMPGKRMNIYRGWEIYERGIYDLCIDIRDNYGNIESFISENGMGVANEERFLNEEGQIQDDYRIQFVKDHLAYVHQAIAEGCDIKGYHLWTFIDCWSWINAYKNRYGLVSLDVETGKRTMKKSGEFYKKMSDMNGFEYETSKLVGTKREETTNG

SEQ ID NO: 2325 - protein, 542 aa, Sinorhizobium meliloti
MAAKEVKFTSDARDRMLRGVDIMANAVRVTLGPKGRNVVIDKSFGAPRITKDGVSVAKEIELEDKFENMGAQMLREVASRTSDIAGDGTTTATVLAQAIVREGAKAVASGMNPMDLKRGIDLAVEAIVKELRNNARKVSKNAEIAQVATISANGDAEIGRYLAEAMEKVGNEGVITVEEAKTAEIELEVVEGMEFDRGYLSPYFITNQEKMRVELEDAYILLHEKKLSNLQAMIPILESVIQSGKPLLIIAEDVEGEALATLVVNKLRGGLKIAAVKAPGFGDRRKSMLEDIAILTGGTVISEELGIKLENTTMDTLGRAKRIMVDKETTTIVDGAGSKEDIGGRVAQIKAQIEDTTSDYDREKLQERLAKLAGGVAVIRVGGSTEVEVKEKKDRVDDALHATRAAVEEGILPGGGVALLRVVSALNGLATANDDQRVGIEIVRRAIEAPVRQIAENAGAEGSIIVGKLREKQDFAFGWNAQTGEFGDLFQMGVIDPAKVVRAALQDAASIAGLLVTTEAMIAEKPKKDGQPQMPPGGGMDF

SEQ ID NO: 2326 - protein, 551 aa, Hordeum vulgare subsp. vulgare
MATVRQSDGVAANGLAVAAAANGKSNGHGVAAAVNGKSNGHGVDADANGKSNGHGVAADANGKSNGHAEATANGHGEATANGKTNGHRESNGHAEAADANGESNEHAEDSAANGESNGHAAAAAEEEEAVEWNFAGAKDGVLAATGANMSIRAIRYKISASVQEKGPRPVLPLAHGDPSVFPAFRTAVEAEDAVAAAVRTGQFNCYPAGVGLPAARSAVAEHLSQGVPYMLSADDVFLTAGGTQAIEVIIPVLAQTAGANILLPRPGYPNYEARAAFNRLEVRHFDLIPDKGWEIDIDSLESIADKNTTAMVIINPNNPCGSVYSYDHLSKVAEVAKRLGILVIADEVYGKLVLGSAPFIPMGVFGHITPVLSIGSLSKSWIVPGWRLGWVAVYDPRKILQETKISTSITNYLNVSTDPATFIQAALPQILENTKEDFFKAIIGLLKESSEICYKQIKENKYITCPHKPEGSMFVMVKLNLHLLEEIDDDIDFCCKLAKEESVILCPGSVLGMANWVRITFACVPSSLQDGLGRIKSFCQRNKKRNSSDDC

SEQ ID NO: 2327 - protein, 551 aa, Hordeum vulgare subsp. vulgare
MATVRQSDGVAANGLAVAAAANGKSNGHGVAAAVNGKSNGHGVDADANGKSNGHGVAADANGKSNGHAEATANGHGEATANGKTNGHRESNGHAEAADANGESNEHAEDSAANGESNGHAAAAAEEEEAVEWNFAGAKDGVLAATGANMSIRAIRYKISASVQEKGPRPVLPLAHGDPSVFPAFRTAVEAEDAVAAALRTGQFNCYPAGVGLPAARSAVAEHLSQGVPYMLSADDVFLTAGGTQAIEVIIPVLAQTAGANILLPRPGYPNYEARAAFNRLEVRHFDLIPDKGWEIDIDSLESIADKNTTAMVIINPNNPCGSVYSYDHLSKVAEVAKRLGILVIADEVYGKLVLGSAPFIPMGVFGHITPVLSIGSLSKSWIVPGWRLGWVAVYDPRKILQETKISTSITNYLNVSTDPATFIQAALPQILENTKEDFFKAIIGLLKESSEICYKQIKENKYITCPHKPEGSMFVMVKLNLHLLEEIDDDIDFCCKLAKEESVILCPGSVLGMANWVRITFACVPSSLQDGLGRIKSFCQRNKKRNSSDDC

SEQ ID NO: 2328 - protein, 115 aa, Zea mays
  misc_feature (45)..(45): Xaa can be any naturally occurring amino acid
  misc_feature (83)..(83): Xaa can be any naturally occurring amino acid
HASSNTLDGLNGFDGTDTHYFHSGPRGHHWMWDSRLFNYGNWEVXRFLLSNARWWLEEYKFDGFRFDGVTSMMYTHHGLQVTXTGNFNEYFGFATDVDAVVYLMLVNDLIHGLYP

SEQ ID NO: 2329 - protein, 115 aa, Zea mays
  misc_feature (55)..(55): Xaa can be any naturally occurring amino acid
  misc_feature (76)..(76): Xaa can be any naturally occurring amino acid
  misc_feature (100)..(100): Xaa can be any naturally occurring amino acid
HASSNTLDGLNGFDGTDTHYFHSGPRGHHWMWDSRLFNYGNWEVLRFLLSNARWXLEEYKFDGFRFDGVTSMMYTXHGLQVTFTGNFNEYFGFATDVDAXVYLMLVNDLIHGLYP

SEQ ID NO: 2330 - protein, 80 aa, Zea mays
  misc_feature (32)..(32): Xaa can be any naturally occurring amino acid
  misc_feature (45)..(45): Xaa can be any naturally occurring amino acid
  misc_feature (55)..(55): Xaa can be any naturally occurring amino acid
  misc_feature (64)..(64): Xaa can be any naturally occurring amino acid
  misc_feature (76)..(76): Xaa can be any naturally occurring amino acid
HASSNTLDGLNGFDGTDTHYFHSGPRGHHWMXDSRLFNYGNWEVXRFLLSNARWXLEEYKFDGXRFDGVTSMMYTXHGLQ

SEQ ID NO: 2331 - protein, 129 aa, Brassica napus
KKACSDAVNPPTGTEANTQYYQQEASKLRRQIRDIQNSNRHIVGESLGSLNFKELKNLEGRLEKGINRVRSKKNELLVAELEYMQKREIELQHDNMYNQYYHLECERNKIDITTYNSFPTLSNFHTNYF

SEQ ID NO: 2332 - protein, 590 aa, Pseudomonas syringae pv. phaseolicola 1448A
MCGLAGELRFDHQPADLAAVERITHQLAPRGPDAWGFHSQGPVALGHRRLKIMDLSDGSAQPMIDSHLGLSMAFNGAIYNFPELRAELESLGYQFHSGGDTEVLLKGYHAWGADMLPKLNGMFAFAIWERDSKQLFIARDRLGVKPLYLSKTDKRLRFASSLPALLKGGDISGMLDPVALNHYLNFHAVVPAPRTLLAGVEKLPPASWMRIDASGKVEQKVWWTLPYGPHEDEKNLTLEDWRDRVLDSTREAVAIRQRAAVDVGVLLSGGVDSSMLVGLLREVGVEDLSTFSIGFQDAGGERGDEFQYSDLIAKHYGTRHHQLRIQESEIIEQLPAAFRAMSEPMVSHDCIAFYLLSREVSKHCKVVQSGQGADELFAGYHWYPQVDGASDPVAAYRDAFVDRSYAEYAETVQPKWRTANDAAGDFVRDHFAQPGASAAVDKALRLDSTVMLVDDPVKRVDNMTMAWGLEARTPFLDYRLVELSARIPGKFKLPDDGKQVLKEAARLVIPSEVIDRKKGYFPVPGLKHLQGDTLNWVRELLTDSSQDRGLFNPAMVDKLLTNPEGQLTPLRGSKLWQLAALNLWLSEQGL

SEQ ID NO: 2333 - protein, 274 aa, Candida glabrata CBS138
MHVKPIKMRWHTGGVNYSYLVSNQDQTTSWLIDPAEPHEVWPELSESERESVVALVNTHHHYDHAGGNTSLLKQFKETVGKPLQVIGGSEECDNVTLIPTHSQKLKIGNLDVTCIRTPCHTQDSVCYYIRDPETDERCIFTGDTLFTAGCGRFFEGTGEEMDAALNKYILEGVGKNNWSSTLVYPGHEYTKSNVKFVRSKIYPTTNVNSRFDELERFCNEHEVTTGKFTLADELLFNPFMKLDDPIVRAAVGDSENQWTSAAVMDKLRKMKNAM

SEQ ID NO: 2334 - protein, 105 aa, Quercus suber
SLDIWDPFEGFSAVASVPPSARETTAFATARIDWKETPEAHIFKADLPGLKKEEVKVEVEDGNVLQISGERSKEHEEKNDKWHRVERSCGKFMRRFRLPENAKVD

SEQ ID NO: 2335 - protein, 491 aa, Neisseria gonorrhoeae FA 1090
MSKPVFKKIALYTLGAISGVAVSLAVQGFAAEKDGRDNEVLPVQSIRTMAEVYGQIKANYYHDKPDADLFEGAMKGMVAGLDPHSEYMDKKGYAEIKESTSGEFGGLGMEIGQEDGFVKVVSPIEDTPAERAEVKSGDFIVKIDNVSTRGMTVSEAVKKMRGKPGTKITLTLSRKNADKPIVVNLTRAIIKVKSVRHHLIEPDYGYIRVSQFQERTVESVNTAAKELVKENKGKPLKGLVLDLRDDPGGLLTGAVGVSAAFLPSEAVVVSTKGRDGKDGMVLKAVPEDYVYGMGGDPLAGIPAELKTIPMTVLVNSGSASASEIVAGALQDHKRAVIVGTQSFGKGSVQTLIPLSNGSAVKLTTALYYTPNDRSIQAQGIVPDVEVKDKERTFESREADLVGHIGNPLGGEDVNSETLAVPLEKDADKPAAKEKGKKKKDEDLSSRRIPNPAKDDQLRKALDLVKSPEQWQKSLGLAAKKPVSNKDKKDKK

SEQ ID NO: 2336 - protein, 110 aa, Quercus suber
SLDIWDPFEGFSAVASVPPSARETTAFATARIDWKETPEAHIFKADLPGLKKEEVKVEVEDGNVSQISGERSKEHEEKNDKWHRVERSCGKFMRRFRLPENAKVDQVKAN

SEQ ID NO: 2337 - protein, 244 aa, Crocus sativus
MGRGRVELKRIENTINRQVTFSKRRGGLLKKANEISVLCDADVAIIIFSTKGKLSEYSTDARMESILERYDRYSCAERDIVAPDPDSQESWRDEYGRLKAKLEALQTSQRHLMGAQLDMLSAKELQQLEQQLENALKNIRSRKNQLLFDSISELLKKEKTLTTQNKDMEMKLIEKKKVKSMARQGQQYTESSSPPSLLIQDPFPSLTIGINPASGSSEEDNEARLLPPVNRNRLPPWMVRSANE

SEQ ID NO: 2338 - protein, 88 aa, Quercus suber
SLDIWDPFEGFSAVASVPPSARETTAFATARIDWKETPEAHIFKADLPGLKKEEVKVEVEDGNVLQISGERSKEHEEKNDKWHRVERS

SEQ ID NO: 2339 - protein, 222 aa, Triticum aestivum
  misc_feature (186)..(186): Xaa can be any naturally occurring amino acid
MGQQSLIYAFVARGTVVLAEYTEFTGNFTTIASQCLVKLPASNNKFTYNCDGHTFNYLVEDGFTYCVVAVESVGQQMPIAFLVRVKDDFSKRYAGGKAATAAPSSLNREFGSKLKEHMQYCVDHPEEINKLAKVQAQVSEVKNVMMENIEKVLDRGEKIELLVDKTENLRSQAQDFRQQGTQVRRXMWLQNMKIKLIVLGIIVALILIIILSVCHGFNCGKK

SEQ ID NO: 2340 - protein, 88 aa, Vigna radiata
MSQELESVEIDSLARFAVEEHNKKQNALLEFGRVVSAQQQVVSGTLYTITLEAKDGGQKKVYEAKVWEKPWLNFKELQEFKLVGEAPA

SEQ ID NO: 2341 - protein, 110 aa, Quercus suber
SLDIWDPFEGFSAVASVPPSARETTAFATARIDWKETPEAHIFKADLPGLKKEEVKVEVEDGNVLQISGERSKEHEEKNDKWHRVERSCGKFMRRFRLPESAKVDQVKAN

SEQ ID NO: 2342 - protein, 461 aa, Hordeum vulgare subsp. vulgare
MVHQSNGHGEAAAAAANGKSNGHAAAANGKSNGHAAAAAVEWNFARGKDGILATTGAKNSIRAIRYKISASVEESGPRPVLPLAHGDPSVFPAFRTAVEAEDAVAAALRTGQFNCYAAGVGLPAARSAVAEHLSQGVPYKLSADDVFLTAGGTQAIEVIIPVLAQTAGANILLPRPGYPNYEARAAFNKLEVRHFDLIPDKGWEIDIDSLESIADKNTTAMVIINPNNPCGSVYSYDHLAKVAEVARKLGILVIADEVYGKLVLGSAPFIPMGVFGHIAPVLSIGSLSKSWIVPGWRLGWVAVYDPTKILEKTKISTSITNYLNVSTDPATFVQEALPKILENTKADFFKRIIGLLKESSEICYREIKENKYITCPHKPEGSMFVMVKLNLHLLEEIHDDINFCCKLAKEESVILCPGSVLGMENWVRITFACVPSSLQDGLERVKSFCQRNKKKNSINGC

SEQ ID NO: 2343 - protein, 354 aa, Gloeobacter violaceus PCC 7421
MHLFAPLTLRDITLRNRIAVSPMCQYSSIDGLANDWHFVHLGSRAVGGAGLVIFEAAAVEARGRISPQDLGIWSDAHIEPLRRINDFIHRQESVAGIQIAHAGRKASTARPWEGGGPLTEGEGGWADSVAPSALPFDAGYPVPEALDEAGIAATVQAFAAAARRSLAAGFRVLEIHAAHGYLLHSFLSPLSNRRTDRWGGLFENRIRLLLAVVEAVRGVWPERLPLFVRISATDWTEGGWDLEQSVLLAQVLARSGVDLIDCSSGGVIPGVRIPAGPGYQTRFAERIRAEADMLTGAVGQITSAEQADHIVRTGQADLVLIGRQLLRDPYWPLKAAVELRAPGPWPEQYQRAKP

SEQ ID NO: 2344 - protein, 158 aa, Zea mays
MSLIRRSNVFDPFSLDLWDPFEGFPFGSGSSSSLFPSFPRTSSETAAFAGARIDWKETPEAHVFKADVPGLKKEEVKVEVEDGNVLQISGERNKEQEEKTDTWHRVERSSGRFLRRFRLPENAKTEQITAAMENGVLTVTVPKEDAKKPEVKSIQISG

SEQ ID NO: 2345 - protein, 445 aa, Oryza sativa
MYKAKRTAAQKVRRCLGKYELGRAIGQGTFAKVRFAKNMETGDHVAIKILDKAKVQKHRLVEQIRREICTMKLIQHPNVVHLHEVMGSKTRIFIVLEYVMGGELHDIIATSGRLKEDEARKYFQQLINAVDYCHSRGVYHRDLKLENLLLDTAGNIKVSDFGLSAISEQVKADGLLHTTCGTPNYVAPEVIEDKGYDGALADLWSCGVILFVLLAGYLPFEDENIVSLYNKISGAQFTCPSWFSAEAKRLIARILDPNPATRITTSQVLQDQWFKKGYESPVFDDKYYPYFHDVYDAFGDSEEKHVKEAMEEQPTLMNAFELISLNKGLNLDNFFESDKKYKRETRFTSQCPPKEIINRIEEAANLLGFNIQKRNYRMRMENIKEGRKGHLNIATEVFQVAPSLHVVELKKAKGDTLEFQKFYQTLSTQLKDVVWELEDAAEDMS

SEQ ID NO: 2346 - protein, 559 aa, Bacteroides thetaiotaomicron VPI-5482
MCGIAGILNIKTQTKELRDKALKMAQKIRHRGPDWSGIYVGGSAILAHERLSIVDPQSGGQPLYSPDRKQALAVNGEIYNHRDIRARYAGQYDFQTGSDCEVILALYKDKGIHFLEEISGIFAFVLYDEEKDEFLIARDPIGVIPLYIGKDKDGKIYFGSELKALEGFCNEYEPFLPGHYFYSKEGKMKRWYTREWTDYESVKDNDAKVSDVKEALEDAVHRQLMSDVPYGVLLSGGLDSSVISAIAKKYAAKRIETDGASDAWWPQLHSFAIGLKGAPDLIKAREVAEYIGTVHHEINYTVQEGLDAIRDVIYFIETYDVTTVRASTPMYLLARVIKSMGIKMVLSGEGADEVFGGYLYFHKAPTPKDFHEETVRKLSKLHMYDCLRANKSLSAWGVEGRVPFLDKEFLDVAMALNPKAKMCPGKEIEKRIVREAFADMLPESVAWRQKEQFSDGVGYSWIDTLREITAAAVSDEQMEHAAERFPINTPLNKEEYYYRSIFEEHFPSESAARSVPSVPSVACSTAEALAWDVAFRNLNEPSGRAVRGVHEEAYAEEVK

SEQ ID NO: 2347 - protein, 426 aa, Rickettsia typhi
MATKLIKHGSKAREQMLEGIDILADAVKVTLGPKGRNVLIEQSFGSPKITKDGVTVAKSIELKDKIRNAGAQLLKSAATKAAEVAGDGTTTATVLARALAREGNKLVAAGYNPMDLKRGMDLAVNAVVEEIKKSSKKINSQEEIAQVGTISSNGDKEIGEKIAKAMEEVGKEGVITVEEAKNFSFDVEVVKGMMFDRGYLSPYFVTNSEKMVAELENPFILLFEKKLSNLQPMLPILEAVVQSQRPLLIIAEDVEGEALATLVVNRLLGGLKVAAVKAPGFGDRRKAMMEDIAILTKGELITEDLGMKLENVNIKNLGTAKRVTISKENTVIVDGNGDKKNIEDRVLQIKSQIAETTSDYDKEKLQERLAKLSGGVAVLKVGGATEVEVKERKDRVEDALAATKPNSSTLAAVHLVDPSSVPSLAY

SEQ ID NO: 2348 - protein, 394 aa, Burkholderia vietnamiensis G4
MRAATPKANGADVTAPNMKRKESTMSSLLSAYDLRGLALPNRVVMGPMTRSRAPSRGLPTELMAEYYAQRASAGLIVTEATNVSTASAAFESTPGLIDDAQVAGWKKITDAVHANGGRIFAQLWHGGRVGSLALLDGAAPLSPSGVNDDLEQLQVWAQLHNGYYTKIHATPSRAMTTDEVVAAVAEFRHAAMQAMAAGFDGVEIHAANGYLPHQFLSSTLNRRDDRYGGSVANRARFLEEIVDAVGGVMPLSRVGVRVSPYAKYNNVRDADPDATYAYVGRMLDDAGVAYLHAADTNGWSGEPDLPRIVAQARRSFGGTLIVNGGIAPDAANALLDAGDADLVAFARAYIANPDLVERLATRAPLAQPKSSGWYGGDRAGYVDYARHDAAEAGV

SEQ ID NO: 2349 - protein, 471 aa, Legionella pneumophila subsp. pneumophila str. Philadelphia 1
MTIALVWFRQDLRLTDNPAFIEACSHHEIVIPLYIYDDKCSVLGQAQAWWLHYSLIALGKSLNQQGLSLVLRKGSPQEIILELVAQYGVESVYWNRCYEPQVIARDKKIKLALVEREIKVQSFNGNLLHEPWTIKNKNGDFFKVFTPYWKQCRQILNIPSPFILTKRPRGIEIASDDIGKWKLLPAINWAARFSEYWIPGEEGAQKKLDEFIVHHLSGYKRDRDFPAKNATSRLSPHLHFGEISPWVILRALELAKLEHTCDLASVEHFLSELGWREFSVYLLYHFPKLDCENFRKEFDAFPWQNDEQLLTCWQKGMTGYPIIDAGMRELWATGYMHNRVRMIVASFLTKDLLIDWRSGAQWFLDTLVDADLANNSASWQWVAGCGADAAPYFRIFNPILQSQKFDPDGVYIRQWIPELAQLNSQSIHQPWTDADASSIFLGKKYPKPIIDHQEARTKALSYYQQIKKGMD

SEQ ID NO: 2350 - protein, 72 aa, Zea mays
  misc_feature (45)..(46): Xaa can be any naturally occurring amino acid
  misc_feature (55)..(55): Xaa can be any naturally occurring amino acid
  misc_feature (60)..(60): Xaa can be any naturally occurring amino acid
  misc_feature (64)..(64): Xaa can be any naturally occurring amino acid
HASSNTLDGLNGFDGTDTHYFHSGPRGHHWMWDSRLFNYGNWEVXXFLLSNARWXLEEYXFDGXRFDGVTSM

SEQ ID NO: 2351 - protein, 235 aa, Chloranthus spicatus
  misc_feature (108)..(108): Xaa can be any naturally occurring amino acid
MGRGRVQLKRIENKINRQVTFSKRRSGLLKKAHEISVLCDAEVALIVFSAKGKLSEYSTDSRMDRILERYERISYAERELRSTDHRPDGNWNLEYSKLKAKLEGLQRXQRHYMGEDLEKLSLKELQPLENQLDNALKHIRTRKTQVMMDSIAELQAREKLLQEQNSMLEKKIQEKNALAHQAHWEQQNQTQSPPPFLLTHQHPTINNSTYQARGEEDRVRTNSLMPPWMLRHVNG

SEQ ID NO: 2352 - protein, 80 aa, Zea mays
  misc_feature (55)..(55): Xaa can be any naturally occurring amino acid
HASSNTLDGLNGFDGTDTHYFHSGPRGHHWMWDSRLFNYGNWEVLRFLLSNARWXLEEYKFDGFRFDGVTSMMYTHHGLQ

SEQ ID NO: 2353 - protein, 613 aa, Thermoanaerobacter tengcongensis MB4
MCGIAGWVNFNMDLSLQNEVIEKMTDTLKKRGPDGSGVWLSKHCVLGHRRLIVIDPQGGIQPMIKKYGEKNFVIIHNGELYNMDELKNELISLGYTFNTRSDTEIILTSYIEWGPLCVKKFNGIFAFAIWDEVQNRLFIARDHLGIKPLFYTIKNGSLIFGSEIKAILAHPHVKPEIDSQGLAEIFVMGPSRTPGCGVFKDIKELKAGHYLIFTKNGVNISKYWSLQSLPHEDSLEKTAEKIRYLLKDSSVRQLVSDVPLCSLLSGGLDSTAVSFFANEELKQKGHKLITYSVDYVGNDKYFTPNEFQPNSDADWVKFVANKLDTDHNYVFIDNEELAHALKPALYARDLPGMADIDSSLYLFLKEVKKGATVALSGEGADEVFGGYPWFRNKESIRSHTFPWTRMVNERMKLLLPEVVNYIRPLEYLNDRYNEALNEVPKLNGEDPYNARMREMFYLNITRFMPMLLDRMDRMSMAVGLEARVPFLDYRLVEYVWNIPWEMKNLNNREKGILRYALKGYIPDEVIERKKSPYPKTHNPVFKNIVKKWLKQIINDSTSPLLQLVDKKAIAELIETDAKAYDPAWFSQLMGSPQLFAYLVQINMWLKDYKISIV

SEQ ID NO: 2354 - protein, 275 aa, Escherichia coli CFT073
MANPTVIKLQDGNVMPQLGLGVWQASNEEVITAIQKALEVGYRSIDTAAAYKNEEGVGKALKNASVNREELFITTKLWNDDHKHPREALLDSLKKLQLDYIDLYLMHWPVPAIDHYVEAWKGMIELQKEGLIKSIGVCNFQIHHLQRLIDETGVTPVINQIELHPLMQQRQLHAWNATHKIQTESWSPLAQGGKGVFDQKVIRDLADKYGKTPAQIVIRWHLDSGLVVIPKSVTPSRIVENFDVWDFRLDKDELGEIAKLDQGKRLGPDPDQFGG

SEQ ID NO: 2355 - protein, 110 aa, Quercus suber
SLDIWVPFEGFSAVASVPPSARETTAFATARIDWKETPEAHIFKADLPGLKKEEVKVEVEDGNVLQISGERSKEHEEKNDKWHRVERSCGKFMRRFRLPENAKVDQVKAN

SEQ ID NO: 2356 - protein, 504 aa, Lycopersicon esculentum
MSSRGGGIAESPYLRNYRVGKTLGHGSFGKVKIAEHLLTGHKVAIKILNRRKMKTPDMEEKLRREIKICRLFVHPHVIRLYEVIETPTDIYVVMEYVKSGELFDYIVEKGRLQEDEARKFFQQIIAGVEYCHRNMVVHRDLKPENLLLDARRNVKIADFGLGNIMRDGHFLKTSCGSPNYAAPEVVSGKLYAGPEVDVWSCGVILYALLCGTLPFDDENIPNLFKKIKSGVYTLPSHLSPLARDLIPRMLIVDPMKRISVADIRQHQWFKIHLPRYLAVPPPDARQHLKKLDEEILQQVTRMGLDRDQLLDSLQKRIQDDATVAYYLLYDNRSMASSGYLGAEFQESVDGYSSGLFPNLDLQLSSGNGVSEESLRRPFRKEKTWLVGLQSPANPKEIMNQVLGTLLELNVRWKKIGHYNMKCLWCHDLHLHSMASNHMNDDDHFISNATAISTHLQPLPTVKFEMQLYKTEDEKYLLDLQRISGPQFLFLDFCAGFIRQLEGPQ

SEQ ID NO: 2357 - protein, 592 aa, Bacillus cereus G9241
MAETLAKRGPDDNKVWIKGNVAFGHKRLIVVDPEGGKQPMTCLKDEANYAICYNGELYNTEDIRKELLRRGYTFKGHSDTEVLLASYMEWKEECVDHLNGIYAFAVWDEQKEQVFIARDRLGVKPLFYKYDSGRLLFGSELKAILAHPDVKVEVTLEGLSEIFGLGPSRTPGHGIYAGIKELRPGHAMTFSKNGLCIWRYWNVESKKHEDSFEETVEKTRFLLQDAITRQLVSDVPLCTFLSGGVDSSAITAIAAKEYERSGKGQLHTYSIDYEDNDKYFKANAFQPNSDAPFIHLMTETFQTIHHRCVISNEQLAQYLTEAVLVRDLPGMADIDSSLLWFCREIKQDFVVGLSGECADEIFGGYPWFYREDDLQSSAFPWMRSTEAREQLLKKEWRNKLNLQQYVQRRYEESIQEVPILEGESPIEAKRRQLFYLNMVWFMTTLLDRKDRMSMGASLEVRVPFADHRLVEYAWNIPWEMKMYKNREKGLLRKALEGLLPNEILYRKKSPYPKTHNPHYTKAVTVWLQDLLTDKGSILHELFDKEQLSGLIESGGSAFQSPWFGQLMTGPQLLAHLAQIHVWFKEYGVNIKE

SEQ ID NO: 2358 - protein, 327 aa, Synechocystis sp. PCC 6803
MQSFNRINSMKYFPLSNGEQIPALGLGTWKSSPQVVGQAVEQALDLGYRHLDCAAIYGNEAEIGATLANAFTKGVVKREELWITSKLWSNAHHPDAVLPALEKTLQDLGLDYLDLYLIHWPVVIQPDVGFPESGDQLLPFTPASLEGTWQALEKAVDLGLCHHIGVSNFSLKKLEMVLSMARIPPAVNQVELHPYLQQSDLLTFANSQNILLTAYSPLGSGDRPAAFQQAAEPKLLTDPVINGIAAEQGCSAAQVLLAWAIQRGTVTIPKSVNPERLEQNLRAADITLTDSEMAKIALLDRHYRYVSGDFWTMPGSPYTLQNLWDEI

SEQ ID NO: 2359 - protein, 110 aa, Quercus suber
SLDIWDPFEGFSAVASVPPSARETTAFATARIDWKETPEAHIFKADLPGLKKEEVKVEVEDGNVLQISRERSKEHEEKNDKWHRVERSCGKFMRRFRLPENAKVDQVKAN

SEQ ID NO: 2360 - protein, 152 aa, Glycine max
MLENARVLKEGIERTGRFNIISKDIGVPLVAFSLKDSSQHTVFEIADHLRKFGWIVPAYTMPPDAQHIAVLRVVIREDFSRGLAERLAADIEKVVKLLDTLPSPLTTKVAHITAITSETSETSEKVKSAIETQKEIALYWKRLVDGKRLGAC

SEQ ID NO: 2361 - protein, 488 aa, Bacillus cereus G9241
MNPNNRLTTNQGAPVGDNQNSRTAGRRGPVLLEDYHLVEKLAHFDRERIPERVVHARGAGAHGVFVTKNSMKQYTKAAFLQNEGTETPVFVRFSTVIHGQGSPETARDPRGFAVKFYTEEGNYDIVGNHLPVFFIRDAIKFPDMVHSLKPAPDTNIQTPDRYWDFMTLSPESTHMMTWVFSDYGTPASYREMEGFGVHSFKWINAEGKIVYIKYHWKPQQGVRNLSAKEVQEVQGKDFNHATRDLFDAIEKGNYPKWDLHVQVMQLEETDSLDFDPLDPTKVWPEDRFPLMEVGTMTLNRNPKNFFAEVEQVAFSPSATVNGIEPSEDKLLQGRLFSYPDTQRYRLGANYLQIPVNCPYAAVHNQQRDGAMQINQNPSTINYEPSRHAENPVEDPAYRDSTMKVEGYVSREKIDKPNDFKQAGERYRSFSKEEQDNLIANLTNDLKDVSERTKLLAVCNFFRADQEYGMRLAQSLNVDITQYVGNAPK

SEQ ID NO: 2362 - protein, 364 aa, Enterobacter cloacae
SAEKLFTPLKVGAVTAPNRVFMAPLTRLRSIEPGDIPTPLMGEYYRQRASAGLIISEATQISAQAKGYAGAPGLHSPEQIAAWKKITAGVHAEDGRIAVQLWHTGRISHSSIQPGGQAPVSASALNANTRTSLRDENGNAIRVDTTTPRALELDEIPGIVNDFRQAVANAREAGFDLVELHSAHGYLLHQFLSPSSNQRTDQYGGSVENRARLVLEVVDAVCNEWSADRIGIRVSPIGTFQNVDNGPNEEADALYLIEELAKRGIAYLHMSETDLAGGKPYSEAFRQKVRERFHGVIIGAGAYTAEKAEDLIGKGLIDAVAFGRDYIANPDLVARLQKKAELNPQRPESFYGGGAEGYTDYPSL

SEQ ID NO: 2363 - protein, 292 aa, Photorhabdus luminescens subsp. laumondii TTO1
MDNQPIIRLADGNHMPQLGLGSWASDDQQIAETIHAALDIGYRAIDTAAIYNNEKGVGNALQETDIPREDIFVTTKLWNDRHLDARAALTESLEKLQLDYVDLYLIHWPAPPQDQYVGAWQQLIELQKEGLIRSIGVSNFQPEHIQRLINETGVHPVINQIELHPLLQQRQLHAWNATHNIVTESWSPLAQGGENVFDNQLVQHLTQKYGKTPAQVVIRWHIDNGMIVIPKSTTLSRIKENFDVFDFKLEKEDLTAMTTLDIGKRLGPTPEIFVDFSEFIQLLEQNSANNQC

SEQ ID NO: 2364 - protein, 110 aa, Quercus suber
SLDIWDPFEGFSAVASVPPSARETTAFATARIDWRETPEAHIFKADLPGLKKEEVKVEVEDGNVLQISGERSKEHEEKNDKWHRVERSCGKFMRRFRLPENAKVDQVKAN

SEQ ID NO: 2365 - protein, 1142 aa, Ashbya gossypii ATCC 10895
MGDKNNNVTSLRGDRIGPWKLGETLGAGSTGKVLLAQNTETGQIAAVKVISKSVFNAQGSTFVGSNDPDVLPYGIEREIIIMKLLNHPNVLRLYDVWETAQDLYMVLEYVEKGELFNLLVQRGPLPENEAVRFFRQIIIGISYCHALGIVHRDLKPENLLLDHKFNIKLADFGMAALESKDKLLETSCGSPHYAAPEIVSGLPYHGFESDVWSCGVILYALLTGRLPFDEEDGNIRNLLLKVQSGKYEIPGEDEISPEARDLIVQILTVEPEQRIKTREILKHPLLQKYPSIKDSKSIRNLPREDTYLNPLDHNDGTIDQAILQNLVVLWHGRDKNEITMKLKEPGANLEKTFYALLHRFKFENEQQQLKQQQIAKRISSTSSSPQQNIVKSSSRRSINNILSTPKKKRSSAINVSSAHKRPVSIQKLNDCGTLNPTSPSKKRSLSNRKLSAVLAGSNSSSPSRKRMSVGQDAPPVPTAVLRDYNKRASRASKRLSFLPSKRGSITTKIIATYAKLSEDNDWEYIDREAKRTSSDFATLIDNIFEHEKYEQIRREKEELERKVREAKEREERERRARAEAERRKREEEERRRRREVEELIRQRELQKSLEEQVARLKAEVAATKQEKRISLAQEQHVRSISEPMERKGTRPSKRDSFLALQNNINSLLKRRTLSLETRPISRLDPGIRLSEENTILEDDLECNEDRLRVEKNILETIRRSKFLGSQYDIDKELQRVRREKLEKVNMRKSQDRKLEPGLHSRQEQRFVSDGTTVTSSHEDSESIILPKNVTAIGVLKDEESEPRKLSEVKIPQFTRRSKHFSASSKRLSVLSMYSTKVSYTNLADYLNNDVQLKSLQPSAPTSIKIPQEPEFMFESAGQENRYQAAAPTDTYLERPKVGVEGDHEPGEPVELIELDDSEDRSKQYSEEDIAKVKLPILPPLDHLNKPNGLGIYQAPAPPKEPLGQPVMKSMIPDDIKIKCVPNQLSPRRRATERAPEKKLTKTVPERVIAAETFPPPNTKKKPSFFKKFSREKMHSDCDVQLDTTVGDSKMFRALNKLLNGWTSYGLKEVRSMPASYTITGKLSSDNILSLRSTAFEIVILSVADTGSSVKFTKKSGSKKTFTRLVNEIEKILEKESVLVLAS

SEQ ID NO: 2366 - protein, 155 aa, Brassica napus
NNKIRLTSPRSHNHKVKDELTQSDFVSLPSSSQVGSTPINCIALFYQIFLQYPRAVRYHCLILSSSSTASSDSFNPMPSAELQESPTSVATASFATGDRIQRLKIVLDLDDTLVCAYETSSLPAALRNQAIEAGLNWFELECLSSDKESDGKSKI

SEQ ID NO: 2367 - protein, 228 aa, Zea mays
MAGASLLSPSCTLLRLIPSASHICCSSHFKRFDRVRRFAPAAMATSSGPKEAPANNPGLQTEVDPATKGYFLQQTMLRVKDPKVSLDFYSRVMGMSLLKRLDFEEMKFSLYFLGYEDVTLAPDDHIKRTEWTFRQKATLELTHNWGTENDPEFKGYHNGNSDPRGFGHIGVTVDDVHKACERFERLGVEFVKKPDDGKIKGIAFIKDPDGYWIEIFDQTIGTVTSSAS

SEQ ID NO: 2368 - protein, 187 aa, Sciadopitys verticillata
DEHGEVVSEIRRSDLEPYLGLHYPATDIPQASRFLFMQNRVRMICDCCATPVKAVQAEELKQPLCLVGSTLRAPHGCHAQYMANMGSIASLVMAVIINGNDEEGASGRSSMKLWGLVVCHHTSPRAVPFPLRYACEFLMQAFGLQLNMELQLAAQLTEKHILRTQTLLCDMLLRDAPIGIVTQSPSI

SEQ ID NO: 2369 - protein, 405 aa, Kineococcus radiotolerans SRS30216
MKLEQSDKLADVLYDVRGPALRRAQQLEEAGHRILKLNIGNPAPFGFEAPEELLQDMVANLPVAQGYSDSKGVPSARRAVVQSSQLKGVPGVDVNDVYMGNGVSELIVMTMQALLNDGDEVLVPAPDYPLWTAATSLAGGRAVHYLCDESAGWEPDLDHLRAQVTPRTKAMVVINPNNPTGAVYGKAVLEGMLQVAREHGLLVLSDEIYDKILYDDAVHVSTASLAPDLLCITFNGLSKAYRVAGFRSGWMYLSGPKGHAAGFVEGLDLLANMRLCANVPAQHVVQAALSGHQSINDLVLPGGRLAEQSHRTWELLNQIPGVSCVKPRGALYCFPRLDPEVHRVEDDYQLIVDLLESQHVLVVQGTGFNWPKPDHFRIVTLPRVEDLESAVGRIGTFLTGRLAGR

SEQ ID NO: 2370 - protein, 566 aa, Debaryomyces hansenii CBS767
MANRRIPKSEDSLSNLPSTASSNQSGSNDFVKKLFQMLQEDTYKDVVKWTSSGDSFVVINTTEFTKEILPRHFKHSNFASFVRQLNKYDFHKVKIPNEEKQSYEYGEDAWEFKHPDFRINDRESLENIKRKSSKKSTQNYNPNVANSGSSVDSFGYQNLKDEMDNLRLENKSLKQDISVLHTKYKTLVENIVSLKSFDEKYYRSMSVLINCLVQAGIKMPPLDFPNPNALYPQKPNVAAHQHSHSHSNSSSLPQLSPPLLSPNGGTGQQGGIGVPLGSGLPAQRFDHNTISQAHTLQHQTPLQTIHSQPNNQQSTKQTPPTNDNLNSKPQSPHLMGESTSGSPLVGNLGLDAASTTAPVNSRTSSISTNRVPQPANGASTDQPQVTTTNLTNPKFHVLLVEDDNVCIQLCRKFLVKYGCQVTIATDGLNAISTVEHTKYDLVLMDIVMPNLDGATATSVIRSFDTKTPIIAMTGNIEDNDLVTYLQNGMSDILAKPFTKDDLYSILSKHLLTSTDSASVTTDEPSETMSSLQGPAQQTLVLPQEVQQQDSNGEPMPEPHSKKPRLI

SEQ ID NO: 2371 - protein, 773 aa, Crocosphaera watsonii WH 8501
MTTTISADQVNQIVYNLHHDPFEILGCHLLEKGEKTKKWVVRAYLPKAEAAWVIRPTEGKEDPMNSVHHPNFFECIIETPELNNYQLKVKEGEHEKVIYDPYAFSSPFLTDEDIYLFSEGNHHRIYEKLGAHVGKINKVAGVYFAVWAPNARNVSIIGDFNNWDGREHQMRKRNNTIWELFVPEIGAGTVYKYEIKNSEGHIYEKSDPYGFYREVRPDTASIVVDIDNIYQWNDEQWLENRRNSDPLKEPVSVYEVHLGSWLHASSEEKMPLLNGEADPVIVSELNSGSRFLSYYELAEKLIPYVKEMGYTHIEVLPIAEHPFDGSWGYQVTGFYSPTSRFGPPEDFMYFVDQCHENGIGVILDWVPGHFPKDSHGLAYFDGTHLYEHADPRIGEHKEWGTLVFNYGRHEVKNFLVANVLFWFDKYHIDGIRVDAVASMLYRNYLRKDGEWIPNEYGGDEHIEAVNFIKEVNILLFEYFPGILSIAEESTEWEKVSRPIYDGGLGFNLKWDMGWMHDMLDYFSIDPFYRQYHQNNVTFSMLYYYNENFMLALSHDEVVHGKSNMLGKMPGDEWQKYANVRALFTYMYTHPGKKTMFMSMEFGQWSEWNVWGDLEWHLLQYEPHQQLKQFFTDINALYKQEPALYTHDFDYHGFYWIDCNDNPHSVVSFARQSDDPKDTLIVICNFTPQPHSHYRIGVPESGYYLELFNSDAKKYGGSNMGNLGGKWADEWAFHNKPYSVDLCLPPLSVLILKLDPDKVPEGTIVEEVAIDEEE

SEQ ID NO: 2372 - protein, 612 aa, Arabidopsis thaliana
MKMDKKTIVWFRRDLRIEDNPALAAAAHEGSVFPVFIWCPEEEGQFYPGRASRWWMKQSLAHLSQSLKALGSDLTLIKTHNTISAILDCIRVTGATKVVFNHLYDPVSLVRDHTVKEKLVERGISVQSYNGDLLYEPWEIYCEKGKPFTSFNSYWKKCLDMSIESVMLPPPWRLMPITAAAEAIWACSIEELGLENEAEKPSNALLTRAWSPGWSNADKLLNEFIEKQLIDYAKNSKKVVGNSTSLLSPYLHFGEISVRHVFQCARMKQIIWARDKNSEGEESADLFLRGIGLREYSRYICFNFPFTHEQSLLSHLRFFPWDADVDKFKAWRQGRTGYPLVDAGMRELWATGWMHNRIRVIVSSFAVKFLLLPWKWGMKYFWDTLLDADLECDILGWQYISGSIPDGHELDRLDNPALQGAKYDPEGEYIRQWLPELARLPTEWIHHPWDAPLTVLKASGVELGTNYAKPIVDIDTARELLAKAISRTREAQIMIGAAPDEIVADSFEALGANTIKEPGLCPSVSSNDQQVPSAVRYNGSKRVKPEEEEERDMEKSRGFDERELFSTAESSSSSSVFFVSQSCSLASEGKNLEGIQDSSDQITTSLGKNGCK

SEQ ID NO: 2373 - protein, 217 aa, Populus tremula x Populus tremuloides
MEEGRFQNGGGLGVKVMTDEQMEMLRKQISVYATICEQLVEMHKAVSAQQDFAGMGLGNPYCDPLLSSAVHKIGSRQRWTPKPAQLQILEQIFEQCNATPGRQKIKDITRELAQHGQISETNVYNWFQNRRARSKRKQSAVVPNNGESEMETDIESLKEKKTRAEDSQPDENTTPMADHMYFNSPDIGFDQLMGKIESPGPGSCIPYWQMEQYDLFG

SEQ ID NO: 2374 - protein, 119 aa, Bacteroides thetaiotaomicron VPI-5482
MVKANATAPAINVFETEKEYKVELAAPGMTKEDFNVRIDEDNNLVISMEKKTENKEEKKEGRYLRREFSYSKFQQTMILPDNVDKEKISAAVENGVLSVQLPKISEEEVKKAEKQIEVK

SEQ ID NO: 2375 - protein, 115 aa, Zea mays
  misc_feature (32)..(32): Xaa can be any naturally occurring amino acid
  misc_feature (55)..(55): Xaa can be any naturally occurring amino acid
  misc_feature (64)..(64): Xaa can be any naturally occurring amino acid
  misc_feature (100)..(100): Xaa can be any naturally occurring amino acid
  misc_feature (106)..(106): Xaa can be any naturally occurring amino acid
HASSNTLDGLNGFDGTDTHYFHSGPRGHHWMXDSRLFNYGNWEVLRFLLSNARWXLEEYKFDGXRFDGVTSMMYTHHGLQVTFTGNFNEYFGFATDVDAXVYLMLXNDLIHGLYP

SEQ ID NO: 2376 - protein, 289 aa, Mycoplasma gallisepticum R
MYLTTKKIKVMKYNLLANNYKMPSIGFGTYKLEDGKQTVEAVKTALEVGYRHLDCAEIYENQLSVSQGIKLSGVNRKEIFITSKIWNDDKGYESTKKAFHKILKDLDLEYLDLLLIHWPIGKGFKDNWQEVNAQTWKAMEEFYLEGKIKAIGLSNFLVHHIEALKKSAKILPMVNQLEFHPGYLQPEIVEYCQKNNIVVQAWSPFSQSKVLENKTLVQLAKKYEVTVAQLILNWIIQKDIVPLPKSKTPERIRSNFDVFNFGINQADLKVIDQLNDCGGLGLHPDQVDF

SEQ ID NO: 2377 - protein, 243 aa, Glycine max
MGRGRVELKRIENKINRQVTFAKRRNGLLKKAYELSVLCDAEVALIIFSNRGKQYEFCSGSSMLKTLERYQKCNYGAPEDNVATKEALVLELSSQQEYLRLKARYEALQRSQRNLMGEDLGPLSSKELESLERQLDSSLKQIRSIRTQFMLDQLSDLQRKEHFLGESNRDLRQRLEEFQINPLQLNPSAEDMGYGRHPGQPQGHALFQPLECEPTLQIGYHPDPVSVVTEGPSMNNYMAGWLP

SEQ ID NO: 2378 - protein, 310 aa, Candida glabrata CBS138
MAALHKNTSTLKLNTGAHIPVIGLGTWQSSENEGYNATLEALKAGYRHIDTAAIYKNEEEIGRAIRDSNIPRNELFVTTKLWGTQHRNPTEALDQSLKRLGLDYVDLYLMHWPVALKTDLIKDGNLLQIPEREDGSRDVDLEDWNFVKTWELMQELPKEKARAIGVSNFSINNLKELLNSKGNKVVPAANQIEIHPLLPQDELINFCKEKGIVLEAYSPLGSTDAPILKEEEITEIAKKNGVNAGQLVISWHAQRGYVVLPKSVKPERIHGNQETFKLSDEDFATLSNYAKKHGERRVVSPNWGPFKPFV

SEQ ID NO: 2379 - protein, 364 aa, Enterobacter cloacae
SAEKLFTPLKVGAVTAPNRVFMAPLTRLRSIEPGDIPTPLMGEYYRQRASAGLIISEATQISAQAKGYAGAPGLHSPEQIAAWKKITAGVHAEDGRIAVQLWHTGRISHSSIQPGGQAPVSASALNANTRTSLRDENGNAIRVDTTTPRALELDEIPGIVNDFRQAVANAREAGFDLVELHSAHGFLLHQFLSPSSNQRTDQYGGSVENRARLVLEVVDAVCNEWSADRIGIRVSPIGTFQNVDNGPNEEADALYLIEELAKRGIAYLHMSETDLAGGKPYSEAFRQKVRERFHGVIIGAGAYTAEKAEDLIGKGLIDAVAFGRDYIANPDLVARLQKKAELNPQRPESFYGGGAEGYTDYPSL

SEQ ID NO: 2380 - protein, 326 aa, Candida glabrata CBS138
MSSVVTLNNGLKMPLVGLGCWKIPNDVCAQQVYDAIKIGYRLFDGAEDYGNEKEVGQGIRKAIDEGVVKREDVFVVSKLWNSFHHPDHVKMALKRTLSDMGLDYLDLFYIHFPIAFKYVPFEEKYPPGFYTGKEDEKNGHITEAHVPIIDTYRALEQCVEEGLIKSIGISNFSGSLVQDLLRQCKIKPVALQVEHHPYLTQEHLVEYCKDNGIQVVAYSSFGPQSYIELNHPLAKNTPNLFHHDTIKQIANNHNVATSQVLLRWATQRGIAIIPKSSKKERLQDNLMIDEKLTLTHKELEAISKLNKNLRLNDPWDWLDGKFPIFA

SEQ ID NO: 2381 - protein, 732 aa, Xanthomonas oryzae pv. oryzae KACC10331
MMSGVMTAVSNRWDPGVIRALAEARHGDAFAVLGAHRTDTGRVLRTYLPGAERVSAVLDDGQTIALEAGPEPGLFAGDLPAQGGYRLRIGWPGGEQDTADPYAFGPQLSDFDLHLISEGHHLQLADALGANVVEVDGVRGTRFAVWAPNASRVAVVGDFNSWDARRHPMRLRHQSGVWELFVPDVGPGAHYKYQLRGPHGHELPAKADPVARRAELAPGTASIVADPTPYQWSDDGWMATRARRQAHDAPMSVYEMHAGSWLREEGVDLDWDGLADHLIPYVADMGFTHVELMPVTEHPFGGSWGYQPLGLFAPTARFGTPDGFARFVDRCHREGIGVIVDWVPAHFPTDAHGLAHFDGTALYEHADPREGFHRDWNTLIYNHGRREVSGFLIASAMEFLQRYHVDGLRVDAVASMLYRDYSRNAGEWVPNIHGGRENYETIAFLRRLNALVREHTPGAVMIAEESTAFPGVTADVAHGGLGFHYKWNMGWMHDTLHYASLDPIYRRYHHGELTFSMVYAYSERFVLPISHDEVVHGKGSLLGRMPGDDWQRFANLRAYLGFMFTHPGRKLLFMGCEFGQPTEWNHDSGLPWHLLDDPRHRGVQTLVRDVNRLYVQYPALHAHDDDPSGFAWVVGDDAGNSVVAFLRKGKRGDAPVLVVINFTPVVQHGYRIGVPQGGQWREVFNSDAGIYGGANLGNGGIVTAEQQSMHGHAHALPLLLPPLGAIVLTPPG

SEQ ID NO: 2382 - protein, 431 aa, Mycobacterium smegmatis
MWLRRDLRLGDLPALQAARGTDDSSVLLCFVVDPRLARSSGERRLAFLFDSLRELDDKLDGRLLVVRGRPDEEIPRLARAVDAEAVHISADFTPFGRRRDEAVAEALGEVPLEATGSPYLVSPGRITKDDGEPYKVFTPFFRRWRDHGWRRPAESSVPSSAVVDPADIANSGRIAVPTAPVKLSFPAGEDAARQRWAEFVDADLADYDEIRDDPAADATSRMSAYLKYGNIHPRTLAVDLGKGKGAQAYLRELAFRDFYADVLWHWPHSLWHNWNRRFDAIELDTDDAAYERFEVWKAGRTGFPLVDAGMRQLNETGWMHNRVRMITASFLVKDLHLPWWWGAEYFLEQLVDGDMASNNHGWQWAAGTGTDAAPYFRVFNPQTQAKKFDPKGEYVRRWVGDVEADDYPGPIVDHSAERAEALRRYGEIGEA

SEQ ID NO: 2383 - protein, 635 aa, Solanum tuberosum
MESCDCIEALLPTGDLLVKYQYLSDFFIAVAYFSIPLELIYFVHKSACFPYRWVLMQFGAFIVLCGATHFISLWTFFMHSKTVAVVMTISKMLTAAVSCITALMLVHIIPDLLSVKTRELFLKTRAEELDKEMGLIIRQEETGRHVRMLTHEIRSTLDRHTILKTTLVELGRTLDLAECALWMPCQGGLTLQLSHNLNNLIPLGSTVPINLPIINEIFSSPEAIQIPHTNPLARMRNTVGRYIPPEVVAVRVPLLHLSSFTNDWAELSTRSYAVMVLVLPMNGLRKWREHELELVQVVADQVAVALSHAAILEDSMRAHDQLMEQNNALDDARQEAEMAIRARNDFLAVMNHEMRTPMHAVIALCSLLLETDLTPEQRVMIETILKSSNLLATLINDVLDLSRLEDGILELENGTFNLHGILREAVNLIKPIASLKKLSITLALALDLPILAVGDAKRLIQILLNVAGNAVKFTKEGHISIEASVAKPEYARDCHPPEMFPMPSDGQFYLRVQVRDTGCGISPQDIPLVFTKFAEARPTSNRSTGGEGLGLAICRRFIQLMKGNIWIESEGSGKGTTVTFVVKLGICNHPNALPLLPMPPRGRLNKGSDDLFRYRQFRGDDGGISVNAQRYQRSL

SEQ ID NO: 2384 - protein, 379 aa, Prochlorococcus marinus subsp. pastoris str. CCMP1986
MSLLLDAQEKWDDFLENKITNYEKLRSFDYGPTNKSSVSKLSPYISHRVLLEYELLEEVKKKYRSQKINKFVEEIYWRIYWQGWMENRPKVWCNFISENNYEYDIETYEKAINGNSELGFFNSWVNELKTYNYLHNHTRMWFASTWIFNLGLPWQLGASFFFKHLYDGDAASNLLSWRWVAGLQTKGKQYRFSSANLRKFSNNRFNVEKISNRQIFLEEKNQIPLDDEIYKSNMEQKSETLILFENDLHVSTLENTLRNYKSVFIILLSNDQRKIKLSEAVLSFKQQIVLEFIKQFDNVTQIDPLKLKETLVNIDHLDMIYPGVGENNDFMNSFKKLNNKVIFNLVRDQDLFAWKFAKKGFFKFKENIPKINQYVFQNY

SEQ ID NO: 2385 - protein, 513 aa, Cryptococcus neoformans var. neoformans JEC21
MPRLSNVYCPKSLLQRQTIQIRSFSQTMSPFKPALTLDTINPAVQAVHYAVRGELAIKADKYVQVLADITHKPLPFEKIVTANIGNPQQQGLDQVPLTYWRQIISLLEYPDLMQKHEQLAKQIYPGDVIERARALHNEIGSTGAYTHSKGVLGIRKRVAKFIEERDGYPADPQNIFLTAGASAGVASILGVALRRGDGCMIPIPQYPLYTATLAYLESEPLPYYLSEADDWSMNHDSLLKSVEEGKKKGIPIKALVIINPGNPTGACLSQEAMEAVVHLCYEEGIVLLADEVYQMNVFDPEQRPFISFKKVLMDMPKEIRESVELVSFHSISKGVSGECGRRGGYFECVNIDKDVMDQVYKMASVTLCPPVSGQIGVDLMVSPPKPGDESYPLWKEETDLIQNNLKSRSYLMAEHFNKMEGVSCNNAEGAMYLFPRINIPPKAVEAAKKLGKEPDVMYALDLLDATGICAVAGSGFGQEPGTFHLRVTALCPDTAEFIGRFQKFNKEFMEKYA

SEQ ID NO: 2386 - protein, 350 aa, Vibrio vulnificus CMCP6
MVTPWYGIKEGFGFEHLIWLLVTFSFTNLSITAGYHRLWSHKTYEAHPLLRVVFAIGGAFSLQNSALHWSSDHRMHHKFVDHHDKDPYSASRGFWFSHIGWMLRDYNQSTYNDYTNCRDLQKDPVIMWQHKYYVPLAIATNLGIPLLLGWYYQDIIGMLLVVGALRLTLSHHSTFFINSLAHIWGKQTFTDKNSARDNGFLAVLTFGEGYHNFHHIFENDYRNGIYWWQYDPTKWLIKSCSWLGLTRNLRLTPQMKIDKARAATRLKNALHQLAQRGEQESLKQQLQLEFDGLVATMKDYYDAKKQLLECKKQTAFKKYEVALVKIRYQQAKEDLLSRYKRWHALTAHYA

SEQ ID NO: 2387 - protein, 445 aa, Triticum aestivum
  misc_feature (201)..(201): Xaa can be any naturally occurring amino acid
MANRGKILMERYELGRLLGKGTFGKVHYARSLESNRSVAIKMLDKEKVLKVGLSEQIRREVTTMRLVAHKNIVQLHEVMATRNKIYFVMEYVKGGELFDKVAKSGKLTEGAAHKYFQQLISAVDYCHSQGVYHRDLKLENLLLDENENLKVSDFGLSALSESKRQDGLLHTTCGTPAYVAPEVISKTGYDGAKSDIWSCGXVILLGLGGGYLPFHGSNLMDMYRKIEQGDFRCPNWFSHKLQKLLFKILDPNPSTRASIQKIKESTWFRKGPRGTLAVKERTPSENVTTNAPPTAGVRPRKNTHEDVQPLTVTNLNAFEIISFSTGFDLSGLFIQEDCRKETRFTSDKPASAIISKLEYVAKALNLRVRKKDNGVVKMQARKEGRNGAVQLDMEIFEITPSHPLIEMKQTSGDPLEYRELLEDIRPALKDIVWAWHGDDPHQQLE

SEQ ID NO: 2388 - protein, 544 aa, Bacillus thuringiensis serovar konkukian str. 97-27
MAKDIKFSEEARRSMLRGVDTLANAVKVTLGPKGRNVVLEKKFGSPLITNDGVTIAKEIELEDAFENMGAKLVAEVASKTNDVAGDGTTTATVLAQAMIREGLKNVTAGANPMGLRKGIEKAVVAAVEELKTISKPIEGKSSIAQVAAISAADEEVGQLIAEAMERVGNDGVITLEESKGFTTELDVVEGMQFDRGYASPYMITDSDKMEAVLDNPYILITDKKISNIQEILPVLEQVVQQGKPLLIIAEDVEGEALATLVVNKLRGTFNVVAVKAPGFGDRRKAMLEDIAILTGGEVITEELGRDLKSATVESLGRAGKVVVTKENTTVVEGVGSTEQIEARIGQIRAQLEETTSEFDREKLQERLAKLAGGVAVIKVGAATETELKERKLRIEDALNSTRAAVEEGIVAGGGTSLMNVYTKVASIVAEGDEATGINIVLRALEEPVRQIAINAGLEGSVVVERLKGEKVGVGFNAATGEWVNMLETGIVDPAKVTRSALQNAASVAAMFLTTEAVVADKPEPNAPAMPDMGGMGMGGMGGMM

SEQ ID NO: 2389 - protein, 154 aa, Zea mays
MSLVRRSSVFDPFSVDLFDPFDSMFRSIVPSSPSSAAASETAAFASARIDWKETPEAHVFKADLPGVKKEEVKVEVEDGNVLLISGQRSREKEDKGDKWHRVERSSGQFVRRFRLPENAKTEEVRAALENGVLTVTVPKAEVKKPEVKSIQISG

SEQ ID NO: 2390 - protein, 259 aa, Rubrivivax gelatinosus PM1
MNLIAVPAFTDNYIWMLHDGVSAIVVDPGEAAPVTRALDERSLKLAAIVVTHHHGDHVGGVDALRARLPDGRGPVYGPAREDIPQPFLPLRDGDAIELFGTRFEVIDVPGHTAGHIAYFGQPAGEAPILFCGDTLFSGGCGRLFEGTPAQMHASLSRLAALPGDTRVCCAHEYTLGNLKFACAVEPGNADLIDYVAQCESLRQRDLPTLPSTVARERQVNPFLRVTSTQVRTSARAHGAAGDDAVSVLAALRQWKNEFR

SEQ ID NO: 2391 - protein, 110 aa, Quercus suber
SLDIWDPFEGFSAVASVPPSARETTAFATARIDWKETPEAHIFKADLPGLKKEEVKVEVEDGNVLQISGERSKEHEEKNDKWHRVERSCGKFMRRFRLPENAKVDQVKAN

SEQ ID NO: 2392 - protein, 392 aa, Oryza sativa (japonica cultivar-group)
MEGGGGGGHGHHGGGGGGHGHHGGIGGGEAQIKGTLTHGGRYVQYNVYGNLFEVSSKYVPPIRPVGRGACGIICAVVNAQTRQEVAIKKIGNAFDNQIDAKRTLREIKLLRHMDHDNVISIKDIIRPPRRENFNDVYIVYELMDTDLHHLLRSNQPLTDDHCQYFLYQVLRGLKYVHSANVLHRDLRPSNLLLNAKCDLKIGDFGLARTTNETDFMMEYVVTRWYRAPELLLNCSEYTAAIDIWSVGCILGEIVTREPLFPGKDYVHQLRLITELIGSPDDSSLGFLRSDNARRYVRSLPQYPKQQFRARFPTMSSGAMDLLERMLVFDPSKRITVDEALCHPYLASLHEIYDEPVCPAPFSFDFEQPSLTEEDIKEIIWREALKFNPEPIH

SEQ ID NO: 2393 - protein, 193 aa, Sciadopitys verticillata
DDHGEVISEIRRSDLEPYLGLHYPATDIPQASRFLFMKNRIRMICDCCAPPVIVVEDKRLPRELSLCGSTLRAPHGCHAQYMSNMGSIASLVMAIVVNEKEEEDEDTDGEKQQQNGRRLWGLVVCHHTSARFVPFPLRYACEFLMQVFAIQLNKEVELAAQLREKHILRTQTLLCDMLLRDAPMGIVTQKPNI

SEQ ID NO: 2394 - protein, 440 aa, Sorghum bicolor
MSTTKVKRRVGKYELGRTIGEGTFAKVRFARDTVTGEAVAIKILDKDKVLKHKMVEQIKREISTMKLIKHPNVVRIYEVMGSKTKIYIVLEFATGGELFQRIVNHGRMREDEARRYFQQLINAVDYCHSRGVYHRDLKPENLLLDSYGNLKVSDFGLSALSQQMKDDGLLHTTCGTPNYVAPEVLEDQGYDGAMADLWSCGVILFVLLAGYLPFEDSNLMTLYKKISNAEFTFPPWTSFPAKRLLTRILDPNPMTRITIPEILEDEWFKKGYKRPEFDEKYDTTLDDVDAVFNDSEEHHVTEKKEEEPVALNAFELISMSAGLNLGNLFDSEQEFKRETRFTSKCPPKEIVRKIEEAAKPLGFDVQKKNYKLRLEKVKAGRKGNLNVATEILQVAPSLHMVEVRKAKGDTLEFHKFYKNLSKTLKDVVWKSDDTQMLHAA

SEQ ID NO: 2395 - protein, 454 aa, Arabidopsis thaliana
MVIKGMRVGKYELGRTLGEGNSAKVKFAIDTLTGESFAIKIIEKSCITRLNVSFQIKREIRTLKVLKHPNIVRLHEVIILLVLASKTKIYMVLECVTGGDLFDRIVRFLLAPVTVLLVSKRLVSKGKLSETQGRKMFQQLIDGVSYCHNKGVFHRDLKLENVLLDAKGHIKITDFGLSALSQHYREDGLLHTTCGSPNYVAPEVLANEGYDGAASDIWSCGVILYVILTGCLPFDDANLAVICRKIFKGDPPIPRWISLGAKTMIKRMLDPNPVTRVTIAGIKAHDWFKHDYTPSNYDDDDDVYLIQEDVFMMKEYEEEKSPDSPTIINAFQLIGMSSFLDLSGFFETEKLSERQIRFTSNSLAKDLLENIETIFTEMGFCLQKKHAKLKAIKEESTQKRQCGLSVTAEVFEISPSLNVVELRKSHGDSSLYKQLYERLLNELGSSSQVQELLA

SEQ ID NO: 2396 - protein, 734 aa, Hordeum vulgare subsp. vulgare
MAEVNMTGGAAEKLESSEPTQGIAETITDGVTKGVKELVVGEKPQVVPKPGDGQKIYEIDPTLKDFRSHLDYRYSEYKRIRAAIDQHEGGLEVFSRGYEKLGFTRSAKGITYREWAPGAHSAALVGDFNNWNPNADTMTRDDYGVWEIFLPNNADGSPAIPHGSRVKIRMDTPSGVKDSISAWIKFSVQAPGEIPFNGIYYDPPEEEKYVFQHPQPKRPESLRIYESHIGMSSPEPKINSYANFRDEVLPRIKRLGYNAVQIMAIQEHSYYASFGYHVTNFFAPSSRFGTPEDLKSLIDRAHELGLLVLMDIVHSHSSNNTLDGLNGFDGTDTHYFHGGPRGHHWMWDSRLFNYGSWEVLRFLLSNARWWLEEYKFDGFRFDGVTSMMYTHHGLQMTFTGNYGEYFGFATDVDAVVYLMLVNDLIHGLYPDAVSIGEDVSGMPTFCIPVPDGGVGFDYRLHMAVADKWIELLKQSDESWKMGDIVHTLTNRRWLEKCVTYAESHDQALVGDKTIAFWLMDKDMYDFMALDRPSTPRIDRGIALHKMIRLVTMGLGGEGYLNFMGNEFGHPEWIDFPRGPQTLPTGKVLPGNNNSYDKCRRRFDLGDADFLRYRGMQEFDQAMQHLEEKYGFMTSEHQYVSRKHEEDKVIIFERGDLVFVFNFHWSNSKKDYRVGCSKPGKYKVALDSDDALFGGFSRLDHDVDYFTTEHPHDNRPRSFSVYTPSRTAVVYALTE

SEQ ID NO: 2397 - protein, 145 aa, Thermosynechococcus elongatus BP-1
MALVRWEPFREIDAIQRQMNRLFDELIPLTERRSDLSFLPAAELEETPEALLLKVELPGMDPKDIDVQVTAEAVSISGERKSETKTETEGMKRTEFRYGKFQRVIPLPVRIQNTSVKAEYKDGILHLTLPKAEEEKNRVVKVSLA

SEQ ID NO: 2398 - protein, 344 aa, Triticum aestivum
  misc_feature (275)..(275): Xaa can be any naturally occurring amino acid
MDHAADTFRTDLMTITRHVLNEQSRHPESRGDLTILLSHIVLGCKFVASAVNKAGLAKLTGLAGETNVQGEEQKKLDVLSNEVFVNALVSSGRTCVLVSEEDEKATFVDPKLRGKYCVCFDPLDGSSNIDCGVSIGTIFGIYMIKNQDTVTLEEVLQPGKDMIAAGYCMYGSSCTLVLSTGNGVNGFTLDPSLGEFIMTHPDIKIPPKGKIYSVNEGNAKNWDTPTAKYVEKCKYPTDGSSPKSLRYIGSMVADVHRTLLYGGIFLYPADKKSPXGKLRVMYEVFPMSFLMEEAGGQSFTGKGRSLDLIPTDIHERSPIFLGSSDDVEEIKALYAEEAKKEGSA

SEQ ID NO: 2399 - protein, 440 aa, Sorghum bicolor
MSATKVKRRVGKYELGRTIGEGTFAKVRFAKNTETGEPVAIKILDKEKVLRHKMVEQIKREISTMKLIKHPNVVRIYEVMGSKTKIYIVLEYVTGGELFDTIANHGRMREDEARRYFQQLINAVDYCHSRGVYHRDLKPENLLLDSYGNLKVSDFGLSALSQQIKDDGLLHTTCGTPNYVAPEVLEDQGYDGAMADLWSCGVILFVLLAGYLPFEDSNLMTLYKKISNAEYTFPPWTSFPAKRLLTRFLDPNPMTRITIPEILEDEWFKKGYKRPEFDEKYDTPLDDVDAVFNDSEEHHVTEKKEEEPVVLNAFELISRSAGLNLGNLFDSEQEFKRETRFTSKCPPKEIVRKIEEAAKPLGFGVQKKNYKLRLEKVKAGRKGNLNVATEILQVAPSLHMVEVRKAKGDTLEFQKFYKNLSKTLKDVVWKSEDLQMQPAS

SEQ ID NO: 2400 - protein, 829 aa, Hordeum vulgare subsp. vulgare
MAAPAFAVSAAGIARPSARRSSGAEPRSLLFGRNKGTRFPRAVGVGGSGWRVVMRAGGPSGEVMIPDGGSGGSGTPPSIEGSVQFESDDLEVPFIDDEPSLHDGGEDTIRSSETYQVTEEIDAEGVSRMDKESSTVKKIRIVPQPGNGQQIYDIDPMLRDFKYHLEYRYSLYRRIRSDIDEYDGGMDVFSRGYEKFGFVRSAEGITYREWAPGADSAALVGDFNNWDPTADHMSKNDLGIWEIFLPNNADGSPPIPHGSRVKVRMDTPSGTKDSIPAWIKYSVQTPGDIPYNGIYYDPPEEEKYVFKHPQPKRPKSLRIYETHVGMSSPEPKINTYANFRDEVLPRIKRLGYNAVQIMAIQEHSYYGSFGYHVTNFFAPSSRFGSPEDLKSLIDRAHELGLLVLMDVVHSHASSNTLDGLNGFDGTDTHYFHGGSRGHHWMWDSRVFNYGNKEVIRFLLSNARWWLEEYKFDGFRFDGATSMMYTHHGLQVTFTGSYHEYFGFATDVDAVVYLMLVNDLIHALYPEAVTIGEDVSGMPTFALPVQVGGVGFDYRLHMAVADKWIELLKGSDEGWEMGNIVHTLTNRRWLEKCVTYAESHDQALVGDKTIAFWLMDKDMYDFMALNGPSTPNIDRGIALHKMIRLITMALGGEGYLNFMGNEFGHPEWIDFPRGPQVLPTGKFIPGNNNSYDKCRRRFDLGDAEFLRYHGMQQFDQAMQHLEEKYGFMTSDHQYVSRKHEEDKVIVFEKGDLVFVFNFHWSNSYFDYRVGCLKPGKYKVVLDSDAGLFGGFGRIHHTGEHFTNGCQHDNRPHSFSVYTPSRTCVVYAPMN

SEQ ID NO: 2401 - protein, 261 aa, Populus tremula x Populus tremuloides
KLVFYDCQSIAGRMDWDNNQENHQDSHQNQRECRNGINGTNVNVNGNGGTNMLYVKVMTDEQLETLRKQIAVYAAICEQLVEMHKTLSAQQDLAGGRLGNLYCDPLMASGGHKITARQRWTPTPVQLQILERIFDQGNGTPSKQKIKEITSELSQHGQISETNVYNWFQNRRARSKRKQLVASSNNAESEVETEVDSLNEKKKPEIFHAQQNPPRAEDLCFQSPEISSELHFLGDDHLTGKVGVPGNYNLYDQAEDYGMAG

SEQ ID NO: 2402 - protein, 444 aa, Oryza sativa (japonica cultivar-group)
MAPTTAAAAASSNGGGESDGSSKEWRLTAPTRGGAMAAAGDKMSIRAVRYKISASVDDRGPRPVLPLAHGDPSVFPEFRTAAEAEDAVADALRSGDFNCYPAGVGLPAARRAVADHLSRDLPYKLSSDDIFLTAGGTQAIEVVISILAQPGTNILLPRPGYPNYEARAAFNNLEVRHFDLIPEKGWEIDLNSLESIADKNTTAIVIINPNNPCGNVYTYEHLSKVAEVARKLGILVITDEVYGNLVFGSSPFVPMGCFGHIVPILTIGSLSKRWIVPGWRLGWVAICDPKKTLQETKIATLITNFLNVSTDPATFIQGALPNILKNTKEEFFKRIIDLLTETSDICYRGIKDIKCITCPHKPEGSMFVMVKLNLYLLEGIHDDVDFCCQLAKEESVILCPGSVLGMKNWVRITFAIDSSSLLDGLERIKSFCQRHKKKNPLNYI

SEQ ID NO: 2403 - protein, 1035 aa, Thermosynechococcus elongatus BP-1
MRIFMFRFPLLSFIQLFLPTTAVIAALLTPLYVGQRQALFKDFRVGQEGKLEEIQLTIANDIDDAVTDPKGLGSFHLWHELIDSPSQGELAEEVQELVDQWHRLKEHYDQLYVLDTRGRIRFQWTSTPQSDPPSTVKAINSYWPILRELTPDQVFVSPVEVTATKSSGLPFPVLYIGVPLYHQSAPKGVLVVRYQLNHLFNNLLSRCNIQMGWCLVADDQGYWLLGEDIREQWGFDFPERRQFTVRHQYPLLWQQMQHQLRGGLFGPDGLFVFQSFSLLQENWISAERSAHSSRRQSNVRWWLIGFLPSSALEQYLDHLNRDFLVSFTALCILAAVAVLLITRDRQRKRSLQKLLETSNARFRSVSEMAPVGIFTLDAQGQPTFLNQRLLQLLQVHNLEEAQQQWIERLHPEDRDRVLKAWAACQQKRVPFHERFRIVHNDSSSHWINARIIPLQESSATDSFVGTWEDISQMMQQQELLEVARQAAEEASRAKSEFLATMSHEIRTPMNAIIGLTGLLLDTPLNPQQQEFVNTIRLSGDALLGVINDILDFSKIESGKLELESYPFNLRTCVEEVLDLLASRAAEREVELAAHIDSGVPCAVIGDMGRLRQVLVNLIGNAIKFTQKGNVTLYVKAKPMPMSQYEFMPSYYSYLFAIQDTGIGISAAGMNRLFKPFSQVDASTTRQYGGTGLGLVICQRLVERMGGQIWVESKKTGESLVVGGTPLAVYESIPIAESGSVFYFTARFLLNPNPAPEPTDDTCYLENRRVLIVDDNATNRQILALQIKKWKMQPLVAESGPSALALLQQQGWVDLAILDLQMPEMDGVTLARQIRAAYGELPLILLTSLGNTLTESEKALFSSLISKPVKQSTLYNALNSLFCEKQKTVSPKPAAAPSFEHLKAELPPLRILVAEDNKVNQMVALRILEKLGYRGDIAANGLEVLDAVQRQPYDVILMDMQMPEMDGITATREVTQLFQGLKKPRPRIIAMTANAMESDRQLCLDAGMDDYVSKPIRLEELVRALRQCQPLQTPTT

SEQ ID NO: 2404 - protein, 280 aa, Yersinia pestis KIM
MQVSQYFGVFALVSYFIIFFQAVANERYLMNLISIPAFQDNYIWLLANRQKHCVIVDPGESAPVLATLAQGQYVPQAILLTHHHNDHVGGVADLRHHFPDIPVYGPQETAKKGATVIVNDGDSLTIAGQNYTIIAVPGHTLGHIAYYSSPYLFCGDTLFSAGCGRLLEGTPEQMYASIQRLAQLPDETLICCAHEYTLSNLKFAHAILPADQDIATYQQQIEQLRSKNLPSLPVKLQFERKINVFLRCNDIDLQRKIGTTSPPDSLVSVFCELRSRKDSF

SEQ ID NO: 2405 - protein, 489 aa, Debaryomyces hansenii CBS767
MFKRFVSFKAAGKLKLADLNKLTINAKYAVRGKIPIRADELKEQLNDTNNELPFKEIIYANIGNPQQLDQAPLTWYRQVLSVLQNPKLLNSQIDYPKDVIDRAKILLENVGSVGAYSHSQGTPHVRKSVADFITRRDGFPSNSSDIFLTSGASAAVSYLLQVLSSSDRSGFLIPIPQYPLYTATIALNDAVPIGYYLNEENNWSTNPTQIRELIKENNEKGIQIKALVVINPGNPTGSILSYDNIVEIINIAAEHGIAIIADEVYQENVFEGEFVSVKKVLSKLNRLDPQAYNNVQLASLHSTSKGVSGECGQRGGYMELVGFSKEVRDIIFKLASINLCSVVSGQTLMELMINPPTPESPSYELYKSETSKIHKSLQSRADLLYKSFIEMEGITCNKPMGAMYLFPKLNFTPNSYSKLFEASENIGATIDEVYCIELLENTGICCIPGSGFGQVPDTYHLRTTFLPPGSKWIDRWVEFHNDFIAKYKN

SEQ ID NO: 2406 - protein, 591 aa, Zea mays
MCGILAVLGVAEVSLAKRSRIIELSRRLRHRGPDWSGLHCHEDCYLAHQRLAIIDPTSGDQPLYNEDKTVVVTVNGEIYNHEELKAKLKTHEFQTGSDCEVIAHLYEEYGEEFVDMLDGMFSFVLLDTRDKSFIAARDAIGICPLYMGWGLDGSVWFSSEMKALSDDCERFITFPPGHLYSSKTGGLRRWYNPPWFSETVPSTPYNALFLREMFEKAVIKRLMTDVPFGVLLSGGLDSSLVASVASRHLNETKVDRQWGNKLHTFCIGLKGSPDLKAAREVADYLSTVHHEFHFTVQEGIDALEEVIYHIETYDVTTIRASTPMFLMSRKIKSLGVKMVISGEGSDEIFGGYLYFHKAPNKKEFHEETCRKIKALHLYDCLRANKATSAWGVEARVPFLDKSFISVAMDIDPEWKMIKRDLGRIEKWVIRNAFDDEERPYLPKHILYRQKEQFSDGVGYSWIDGLKDHASQHVSDSMMMNAGFVYPENTPTTKEGYYYRMIFEKFFPKPAARSTVPGGPSVACSTAKAVEWDASWSKNLDPSGRAALGVHDAAYEDTAGKTPASADPVSDKGLRPAIGESLGTPVASATAV

SEQ ID NO: 2407 - protein, 522 aa, Magnaporthe grisea 70-15
MGNSSSKEGGGGSSRSGSGADRGSDGLQSYPSFSRSDTKESSRSFRSLRSKIPGSGRTDSPRNSAIVTTNGDYGDKSDAASVKSGVSRQGRTDSNLSATSPTDTIQSPIDEPQLPPSPVHASHKQGAKHDVSAAQASGEVDHVSDQPPGQGGVPNPTAQSQTPGQSILVKREDAVNPVRTAGSPREDGVAMSEIKDIDLDDFIKRLLDAAYAGKVTKSVCLKNAEIAAICHRARECFLSQPALLELDAPVKIVGDVHGQYTDLIRMFEMCGFPPNSNFLFLGDYVDRGKQSLETILLLLCYKLKYPENFFLLRGNHECANVTRVYGFYDECKRRCNVKVWKTFIDTFNTLPIAAIVAGKIFCVHGGLSPALVHMDDIRNIARPTDVPDYGLLNDLLWSDPADMEQDWEANERGVSYCFGKKVITEFLAQHDFDLVCRAHMVVEDGYEFFNDRVLVTVFSAPNYCGEFDNWGAVMSVSSELLCSFELLKPLDSNALKSHIKKGRNKRQHMLNSPPASVYPQSV

SEQ ID NO: 2408 - protein, 80 aa, Zea mays
  misc_feature (32)..(32): Xaa can be any naturally occurring amino acid
  misc_feature (45)..(45): Xaa can be any naturally occurring amino acid
  misc_feature (55)..(55): Xaa can be any naturally occurring amino acid
  misc_feature (64)..(64): Xaa can be any naturally occurring amino acid
  misc_feature (74)..(74): Xaa can be any naturally occurring amino acid
  misc_feature (76)..(76): Xaa can be any naturally occurring amino acid
HASSNTLDGLNGFDGTDTHYFHSGPRGHHWMXDSRLFNYGNWEVXRFLLSNARWXLEEYKFDGXRFDGVTSMMXTXHGLQ

SEQ ID NO: 2409 - protein, 185 aa, Oryza sativa
GGLEARVPFLDKAFLDVAMNTDAADKMFSKGSLQEVDADGRPRMEKYILRKAFDVIPDDIEAGGDGTGSMLSASAPKKPYLPEDILWRQKEQFSDGVGYSWIDGIKDHAEQSISDEKFQERAKRYPTDTPDTKEAYMIREIFESWFPSDAAASTSVRWIPRADWGCASDPSGRAVKIHESAYADE

SEQ ID NO: 2410 - protein, 249 aa, Solanum tuberosum
EPRVNSYREFADDVLPRIKANNYNTVQLMAIMEHSYYGSFGYHVTNFFAVSSRYGNPEDLKYLIDKAHSLGLQVLVDVVHSHASNNVTDGLNGFDIGQGSQESYFHAGERGYHKLWDSRLFNYANWEVLRFLLSNLRWWLEEYNFDGFRFDGITSMLYVHHGINMGFTGNYNEYFSEATDVDAVVYLMLANNLIHKIFPDATVIAEDVSGMPGLGRPVSEGGIGFDYRLAMAIPDKWIDYLKNKNDEDW

SEQ ID NO: 2411 - protein, 470 aa, Methylobacterium extorquens
NSLTAGSRGPVLMQDYHLIEKMAHFNRERIPERVVHAKGYGAYGTFRLTRSLSEFTRAKVLTEVGKDVPMVARFSTVGGESGSADTARDPRGFALKFYTEEGNWDLVGNNTPIFFVRDAIKFSDFIRTQKRDPRTHLKPHWRRWDFWSLSPEAIHQVMFLYSDRGTPKSARFMNGYGSHTFSLWNDRGERHWVKFHFHTKQGIQNFSADEADEVAGKDPDYSSADLSTAIEQGDFPKWKVSVQLMPELDADTYRINPFDLTKVWPHGDYPLIEIGEMELNRNPENYFAEIEQSAFEPSNVVPGIGFSPHKMLQNRVLSYADAHRYRLGVNYQQIPVNQAKNADVQTYHRDGAMRTDGNHGAQVDYEPNSFGGPKQDPSFSEPPLRIQGDAGRYGWPGDDEDLYGQPKLFWTKVLDEGGRKRLVENIVTSMGDSPRHIQERMIAHWFKVHEDFGRGVAQGLGIDTAQAAAE

SEQ ID NO: 2412 - protein, 492 aa, Arabidopsis thaliana
MDPYKYRPSSAYNAPFYTTNGGAPVSNNISSLTIGERGPVLLEDYHLIEKVANFTRERIPERVVHARGISAKGFFEVTHDISNLTCADFLRAPGVQTPVIVRFSTVVHERASPETMRDIRGFAVKFYTREGNFDLVGNNTPVFFIRDGIQFPDVVHALKPNPKTNIQEYWRILDYMSHLPESLLTWCWMFDDVGIPQDYRHMEGFGVHTYTLIAKSGKVLFVKFHWKPTCGIKNLTDEEAKVVGGANHSHATKDLHDAIVSGNYPEWKLFIQTMDPADEDKFDFDPLDVTKIWPEDILPLQPVGRLVLNRTIDNFFNETEQLAFNPGLVVPGIYYSDDKLLQCRIFAYGDTQRHRLGPNYLQLPVNAPKCAHHNNHHEGFMNFMHRDEEINYYPSKFDPVRCAEKVPTPTNSYTGIRTKCVIKKENNFKQAGDRYRSWAPDRQDRFVKRWVEILSEPRLTHEIRGIWISYWSQADRSLGQKLASRLNVRPSI

SEQ ID NO: 2413 - protein, 115 aa, Zea mays
  misc_feature (32)..(32): Xaa can be any naturally occurring amino acid
  misc_feature (45)..(45): Xaa can be any naturally occurring amino acid
  misc_feature (55)..(55): Xaa can be any naturally occurring amino acid
  misc_feature (64)..(64): Xaa can be any naturally occurring amino acid
  misc_feature (74)..(74): Xaa can be any naturally occurring amino acid
  misc_feature (76)..(76): Xaa can be any naturally occurring amino acid
  misc_feature (79)..(79): Xaa can be any naturally occurring amino acid
HASSNTLDGLNGFDGTDTHYFHSGPRGHHWMXDSRLFNYGNWEVXRFLLSNARWXLEEYKFDGXRFDGVTSMMXTXHGXQVTFTGNFNEYFGFATDVDAVVYLMLVNDLIHGLYP

SEQ ID NO: 2414 - protein, 135 aa, Zea mays
MRKHRIVSLVAALLVLLALAAVSSTRSAQKESVADNAGMLAGGIKDVPANENDLQLQELARFAVNEHNQKANALLGFEKLVKAKTQVVAGTMYYLTIEVKDGEVNKLYEAKVWEKPWENFKQLQEFKPVEEGASA

SEQ ID NO: 2415 - protein, 115 aa, Zea mays
  misc_feature (53)..(53): Xaa can be any naturally occurring amino acid
  misc_feature (60)..(60): Xaa can be any naturally occurring amino acid
  misc_feature (76)..(76): Xaa can be any naturally occurring amino acid
  misc_feature (81)..(81): Xaa can be any naturally occurring amino acid
  misc_feature (96)..(96): Xaa can be any naturally occurring amino acid
  misc_feature (100)..(101): Xaa can be any naturally occurring amino acid
  misc_feature (106)..(107): Xaa can be any naturally occurring amino acid
HASSNTLDGLNGFDGTDTHYFHSGPRGHHWMWDSRLFNYGNWEVLRFLLSNAXWGLEEYXFDGFRFDGVTSMMYTXHGLQXTFTGNFNEYFGFATXVDAXXYLMLXXDLIHGLYP

SEQ ID NO: 2416 - protein, 410 aa, Yarrowia lipolytica CLIB122
YITWLIVDGEETDNRDNFLRHSKTHSNMSTVNLFKPIKIGATQLQNRVVMAPLTRTRAQKNIPSDLAVEYYKQRGSSPGTLLISEATYIHPSSGGGGFGAETVPGIWNDSAIVAGWKKVIDGVHSEGSKMYIQLWDIGRVADYEILSKNGYDLTGPSAIAQAGDEEGAKHVRALTIPEIKQKVQRYVDAAKAALEAGADGVEVHSANGYLPDQFIHWNSNHRTDEYGGSIENRARFTLEIIDAVSAAIGADRVGVRFSPWTTFQDMEVSEEKTLPQFKYLFEQLEKRGVEDASKRLSYIHVIEPRANGIFDMTPEPWQSNEPFRKIWTGNLIRAGGFNRQLAIDTAQEDDKTLIAFGRRFIANPDLVYRLEKDLPLTKWDRDTFYVPGPKGYTDYPFYKDQLEQDQELKQ

SEQ ID NO: 2417 - protein, 292 aa, Helicobacter hepaticus ATCC 51449
MAKNNKTQVILNEFFTLNNGNKIPKLGLGTWRIDDNVVEAAVREAFKVGYRHIDTAQAYGNERGVGEAVRKSKIKREELFITSKIRAEYKDYKSASASIDTSLKTMKLDFIDLMLIHSPQPWNSFRKGDYFKENVEVYNALEDAQKAGKVRSIGVSNFLQKDLENILKNCKTKPAANQILCHIGNTPFTLLDYCKKQNILAEAYSPIAHGELLKDPRVIELAKKYNVSPAQICIRYTLELGLVSLPKSKTPKYIAENAQVDFTFSKADLQTLKKLTFKDYGEHSYFPVFGGK

SEQ ID NO: 2418 - protein, 97 aa, Zea mays
MAEVHNERPVMVGDVRDAPVGRENDLEAIELARFAVAEHNSKTNAMLEFERLVKVRHQVVAGTLHHFTVEVKEAGGGEKKLYEAKVWEKAWENFKQL

SEQ ID NO: 2419 - protein, 226 aa, Zea mays
AAAAAHPPSAFLLLLVLLGCASLAIGGAAMAGHVLGGVKENPAAANSAESDGLGRFAVDEHNRRENALLEFVRVVEAKEQVVAGTLHHLTLEAVEAGRKKLYEAKVWVKPWLDFKELQEFSHKGDATAFTNADLGAKQGGHEPGWREVPVEDPVVKDAAHHAVKSIQERSNSLFPYELLEILRAHAQVVEDFAKFDILMKLKRGSKEEKIKAEVHKSLEGAFVLNQ

SEQ ID NO: 2420 - protein, 573 aa, Candida albicans SC5314
MCGIFAAYRQPEVEDFKSKALQYSKLIRHRGPDWSGNVVQNSTILCHERLAIVGLDSGAQPIVSPDGNFTLAVNGEIYNHIQLREQFPDYKFKSLSDCEPIIPLFTKYDIDAPKHLDGMFAWVLYDKKNDRIVAARDPIGITTLYMGKSSKSPKTRYFASELKCLIEECDEIFAFPPGHVYDSNTDEITRYFKPSWWDASKVPEQHVDFKKVRETLELAVRKRLMAEVPYGVLLSGGLDSSLIASIASRETKKAAQASFNPEGIDANKELSGVDDKGSLHSTGVFNQLHSFAIGLPGAPDLLAAEKVAHFIGTIHHSHTFTLEEGLDALDDVIYHLETYDVTTIRASTPMYLLSRKIKAQGVKMVLSGEGSDEIFGGYLYFANAPSAKEFHEECVKRVKNLHYADCLRANKSTMAWGLEARVPFLDKQFLEVCMNINPEDKLIQPGKIEKYILRKAFDTSDEPDVKPYLPEEILWRQKEQFSDGVGYSWIDGLKDTAEKMVSDEEFAHPKPEWGDDIPTTKEAYWYRCKFDKMFNGSKAAASTVMRWIPKAEWGCHADPSGRYAATHDHKVAQ

SEQ ID NO: 2421 - protein, 98 aa, Medicago sativa
METLGGVRDVPGNQNSLAIDGLARFAVEEHNKKQNALLEFSRVISAKEQVVAGTIHHITLEVKDGVNKKVYEAKVWEKSWMNFKEVQEFKLVEDAPAQ

SEQ ID NO: 2422 - protein, 478 aa, Lactobacillus plantarum WCFS1
MTIKGRAFPEGFLWGGAVAAHQLEGGYKEGGKGLSTADIMTLGTNERPREITDGVVAGKYYPNHQAIDFYHRYPEDIELFAEMGFKCFRTSIAWTRIFPNGDESEPNEAGLQFYDDLFDECLKNGIQPVVTLAHFEMPYHLVKQYGGWRNRKLIQFYLNFAKVCFERYRDKVTYWMTFNEINNQTNFESDGAMLTDSGIIHQPGENRERWMYQAAHYELVASAAAVQLGHQINPDFQIGCMIAMCPIYPLTAAPADVLFAQRAMQTRFYFADVHCNGTYPQWLRNRFESEHFNLDITAEDLKILQAGTVDYIGFSYYMSFTVKDTGKLAYNEEHDLVKNPYVKASDWGWQVDPVGLRYAMNWFTDRYHLPLFIVENGLGAIDKKTADNQIHDDYRIDYLTDHLRQIKLAVLEDGVDLIGYTPWGCIDLVAASTGQMSKRYGFIYVDENDDGSGSLKRYKKDSFTWFQHVIATNGAEIE

SEQ ID NO: 2423 - protein, 441 aa, Bartonella quintana str. Toulouse
MIRKVILLVAGVLLGASSMIMVQSVAANNEGDTYQQLSLFGDIFERVRMQYVTVPDDKKLIENAINGMLTSLDPHSSYMNAEEAKDMWDSTKGEFGGLGIEVTMEKNLVKVVSPMDDTPASKAGILAGDLISKIDGVQTNGQTLNEAVKRMRGAPGTPITLTIIRSGVDKPLEIKVVRDIIKVKAVKYRVEDDIGYLRLIRFSEQTFGDLQTAIKDIQSKIPQDKLKGYVLDLRLNPGGLLNQAVNVSSAFLNKGEIVSTRGRKKNDVVRFDAKPGDIINGKPLIVLINGGSASASEIVAGALQDHRRATILGTQSFGKGSVQTVIPLGENGALRLTTALYYTPAGTSIQGTGITPDIIVEQPLPEQYKDYDVKLGESELKGHIKGKQESNKGSGSAAFVPKDPKDDTQLSEAYKLLRGEMAHAAFPPDPNKNVLKKDVLK

SEQ ID NO: 2424 - protein, 545 aa, Porphyromonas gingivalis
MAKEIKFDMESRDLLKKGVDALANAVKVTLGPKGRNVILSKTYGAPHITKDGVSVAKEIELECPFENMGAQLVKEVASKTNDDAGDGTTTATILAQSIIGVGLKNVTAGANPMDLKRGIDKAVKAVVTHIAGMAKEVGDDFQKIEHVAKISANGDENIGSLIAEAMRKVKKEGVITVEEAKGTDTTVEVVEGMQFDRGYISPYFVTNTDKMEVQMENPFILIYDKKISVLKEMLPILEQTVQTGKPLLIIAEDIDSEALATLVVNRLRGSLKICAVKAPGFGDRRKAMLEDIAILTGGTVISEETGLKLENATMDMLGTAEKVTVDKDNTTIVNGAGNKEGIASRITQIKAQIENTTSDYDREKLQERLAKLAGGVAVLYVGAASEVEMKEKKDRVEDALSATRAAIEEGTVPGGGTAYIRAIAALEGLKGENEDETTGIEIVKRAIEEPLRQIVANAGKEGAVVVQKVKEGKDDFGYNARTDVFENLYSTGVIDPAKVTRVALENAASIAGMFLTTECVIADKKEDNPAAPAMPGGMGGMGGMM

SEQ ID NO: 2425 - protein, 240 aa, Arabidopsis thaliana
MTDPHTARTIVGIVGNVISFGLFCAPIPTMVKIWKMKSVSEFKPDPYVATVLNCMMWTFYGLPFVQPDSLLVITINGTGLFMELVYVTIFFVFATSPVRRKITIAMVIEVIFMAVVIFCTMYFLHTTKQRSMLIGILCIVFNVIMYAAPLTVMVRVIKTKSVKYMPFFLSLANFMNGVVWVIYACLKFDPYILIPNGLGSLSGIIQLIIYITYYKTTNWNDDDEDKEKRYSNAGIELGQA

SEQ ID NO: 2426 - protein, 230 aa, Oryza sativa
MAASTASWSRYGTVPPAAAAAAPPLKREEVVVGGDGEAAAAAPSPSPATAAEAGVAFFSRARAVAGAAAGRPRAWREVLDATAFSRPESCGEARARARRNLAYFRANYALAALVLVFLGLVYRPVSMLAFLALFAAWLGLYFGRGDGEPPLACMGREVDDRVVLAALSVATVLAVALSRAGLNLLVSLVLAAAAIGAHAAFRMNVYLDERDAYDGSSFMGSSYGGYALPR

SEQ ID NO: 2427 - protein, 300 aa, Zea mays
  misc_feature (88)..(88): Xaa can be any naturally occurring amino acid
SGAFTHCCCSVLASGSHRSADDCLLCPSFPSQWQAEDLQCLPSSARPTPPAAQHRGRGETQDHQLAWVQQSKKKKFRGVRQRHWGSWXVSEIRHPLLKRRVWLGTFETAEEAARAYDEAAVLMSGRNAKTNFPVLPCGRTRGGGGGGGSSGNNTNASASASASTSTSSLSQSQVLSAKLRRCCKAPSPSLTCLRLDPERSHIGVWHKGAGARADSSWVMTVQLSDKDAAPAPSATSSATATTTTAASHPPPATVVVVDDEERIALQMIEELLGGGGGPVSQQPLGNGMLQIAAAGGGLVI

SEQ ID NO: 2428 - protein, 330 aa, Shewanella sp. MR-4
MQTLAQHLTSKAVNESLSQLILTLADTSKAISHAVRHGALAGVLGATEQENVQGETQKKLDIITNDMLKDALKVDGTVRGLASEEEDHVVEVSANGKYLVCFDPLDGSSNIDINSLVGTIFSVLPAPAGELTETSFLQSGRNQLAAGYVLYGPSTMLALTTGQGVQLFTLHPETNEFLLTNAAMSISPDTQEFAINMSNQRFWEAPMQTYIADLLLGKIGPREKSFNMRWIAAMVGDVHRVLSRGGIFTYPTDNKDPKKPYKLRLMYEANPMALLVEQAGGKASTGYETILDIQPTQIHQRVAVILGSANEVDACLSYHGIDYSEEPTLD

SEQ ID NO: 2429 - protein, 370 aa, Acinetobacter sp. ADP1
MAKLFENIQFDTLRLSNKIIIAPMCQYSATDQGEITYWHEQQWANYALSGAGLCIIEASAVQAAGRISYADVGLWNDNQRDQIKMLLNKIKHLSPVPFGIQLAHAGRKASTDKPWLGKGQIPPDHVHGWQTVAPSSIAFGEHDLAPHALTRDEIQQIQADFAASAVRAVEAGFKLIEIHAAHGYLLHQFLSPLSNLRDDEYGGSFENRIRMTLEVLQAVKAVVPEGFPVGVRISATDWMPTQSWDIESSVGLSQALEQLGAAYIHVSSGGLHVMQDIKVGANYQVPFAAQIKQNVSIPVIAVGLITEPDQAEAILQNDEADAIALARAMQYDPRWPWHAAAALGAEIEISPQYLRCQPHGLKQLFKAFSH

SEQ ID NO: 2430 - protein, 664 aa, Chromobacterium violaceum ATCC 12472
MEARSQALQQANVQLTEARDAAEAANRAKSEFLAVMSHEIRTPLNGVIGMTDLLQRTRLDDRQRHYVSVVHRSGEDLLAIISDILDFSKIEAGKFELDRQPFCLNLLVEEIVERLAPVAYGKGLELMCALPLMPVEVVGDGKRLGQVLTNLVGNAIKFTESGHVLAKVDRAGESDAGVTCRISVKDTGIGIAPDQQKRLFKPFSQADSSTTRRFGGTGLGLVISQRLVGMMGGRIELESEPGSGSEFHFTLTLPRASDSQLCPPAEDVARMRVLVLDDNVTNLEILEQQLASWHCRVAAFHRPREALDWLTAGNEVDLIISDMMMPEMDGLMFLGEARERLGEAAPPAIILSSAADDFQKLTGASRLARQVLTKPIRRSDLYNALLQLGSAAAKVEPAPDGHDQPRLSGRVLLVEDNLVNQELATAMLRNLGCEVELARNGEEALRLCEAGGFDLALMDCEMPVMDGWQATGAIRARERPGGARLTIVALTANAGLGERERCLQAGMDDYLSKPFTQNELGAVLSRWLSPGEEAEASAEPAGIAARDDGEWVDAGALDAIRAIQQDLLPRMLAAWMSEGPMLLAGIREAIDAVDGPALFRAAHALKNCAGSVGAQPLASLCMELERLGKGEDLAGAANLLPELDQAFGCSMAALKAVDEGSGLA

SEQ ID NO: 2431 - protein, 445 aa, Anabaena variabilis ATCC 29413
MNSSAKHHSLLQVAMIGGAIATTATISVFGPAWTRSVRAALQDSPKAVIDQVWQLVNNEYVDGKFNQQDWLAVRKSLLSKDYSSKEEAYVAIREALQRLNDPYTRFMDPKQFEVLTSQTSGEVSGIGIRMELNEITKRLTVLEAIENSPALKAGIKAGDEILAIDGKPTQQMKVDDASKLIRGKEGTAITLRLGRTGNSAFDLKLTRAKIEVPTVSYNLKQEGSRRVGYIRLREFSAHAAEQMARAIRNLNGQKVDSYVLDLRGNPGGLLQASIEIARMWLDDGGIVRTVNRQGFNEDTKANRTALTKLPLAVLVDGNSASASEILTGALKDNKRAVVIGGQTFGKALVQSVHELPDGSGLAVTIAHYYTPNGTDINHKGITPDIKLELTDAQERQLANNPKLIATQNDPQYARAIAVLSGNTFARPPLNQTNQPMSLGANELKF

SEQ ID NO: 2432 - protein, 476 aa, Bacillus cereus G9241
MQNKIIMMFQKDFRLYDNPALFEAAQSGEVVPVYVQDETFSIGSAAKWWLHHAIIDVQKQLKALGATFIIRKGKTQEEILSLIEQLDITAVYWNICYEPDRLQSNQKMKMMLEDKGIICKEFNSHLLLEPWIIKKKDNTEYKVFTPFYNAFQKQAIPKPTSKVQSIKWGSSLPASLSVSELHLLPTIPWTSHMESIWNPTEEGAYKTFKKFFSSKLTFYSEGRDFPNQNVHSMLAPYLSFGQISVKLMFHYLINKSTERQSSLFEKQVNSFIRQLIWREFSYYLLYHYPFTVYKPLNKNFEHFPWDKEEELLRVWQKGETGYPFIDAGMRELWQTGFMHNRARMAVASFLVKHLLIPWQEGAKWFMDTLLDADIANNTMGWQWVAGSGADASPYFRIFNPITQGEKFDKDGEYIRKWVPELRDIPNKYIHKPWEAPEPILQKANIQLGDTYPLPVVDHKAARERALCAYKSMKEFI

SEQ ID NO: 2433 - protein, 741 aa, Pyrus pyrifolia
MLACNCIEPQWPADELLMKYQYISDFFIALAYFSIPLELIYFVKKSAVFPYRWVLVQFGAFIVLCGATHLINLWTFNMHSRTVAIVMTTAKVLTAVVSCATALMLVHIIPDLLSVKTRELFLKNKAAELDREMGLIRTQEETGRHVRMLTHEIRSTLDRHTILKTTLVELGRTLALEECALWMPTRTGLELQLSYTLHQQNPVGYTVPIHLPVVNQVFSSNCAVKISPNSPVARLRQLAGKHIPGEVVAVRVPLLHLSNFQINDWPELSTKRYALMVLMLPSDSARQWHVHELELVEVVADQVAVALSHAAILEESMRARDLLMEQNIALDLASREAETAIRARNDFLAVMNHEMRTPMHAIIALSSLLQETDLTPEQRLMVETILKSSNLLATLINDVLDLSRLEDGSLQLDIATFNLHSIFREVHDLIKPVASVRKLSVALNIAADLPVCAIGDEKRLMQIILNVVGNAVKFSKEGSISITAYVAKSESLRDFRAPDFFPVQSDNHFYLRVQVKDSGSGINPQDIPNLFTKFTQTQTLASQNSGGSGLGLAICKRFVNLMEGHIWIESEGLGKGCTATFIVKLGFPERSNESKQPFAPKLQANHVQTNFPGLKVLVMDDNGVSRSVTKGLLVHLGCDVTTVSSIDEFLHVISQEHKVVFMDVCMPGIDGYELAVRIHERFTKRHERPVLVALTGSIDKMTKENCMRVGMDGVILKPVSVDKMRSVLSELLEHRVLFEAM

SEQ ID NO: 2434 - protein, 220 aa, Zea mays
MGQQSLIYAFVARGTVVLAEYTEFTGNFTTIASQCLMKLPASNNKFTYNCDGHTFNYLVEDGFTYCVVAVESMGQQIPIAFMDRVKEDFTKRYGGGKAATAAANSLNREFRLKIKEHMQHCVDHPEEVSKLAKVKAQVSEVKGVMMENIEKVLDRGEKIELLVDKTENLRSQAQDFRQQGTNVRRKMWLQNMKIKLIVLGIIIALILIIILSVCHGFKCH

SEQ ID NO: 2435 - protein, 638 aa, Pyrus pyrifolia
MESCDCIEAQWPPDELLVKYQYISDVFIALAYFSIPLELVYFVQKSAFFPYRWVLVQFGAFIVLCGATHFINVWTFSMHTKTVAIVMTVAKVSCAVVSCATALMLVHIIPDLLSVKKRELSLKSRAEELDKEMGLMLTQEETGRHVRMLTHEIRSTLDRHTILKTTLVELGRTLGLQECALWMPSRTGMNLELSHTLNYHLQAGSSVSIDLPEVNEVFNSSRAIRIPYTCQLARIRPLVGRYVPPEVVALRVPLLNLSNFQINDWPDVSAKSYAIMVLILPTDGTRTWREHELELVDVVADQVAVALSHAAILEESMRARKQLTEQNDALDLAWREAEMAIHARNDFLAVMNHEMRTPMHAFIALSSLLLETELTPEERLMIETALKSSNLLETLVNDVLDLSRLEDDSLELDIEKFNLHGVFREVMNLVQPVASVKKLSMTLILSPDLPVYAVGDENRLLQTILNVAGNAVKFTKQGYISITASVAKSESSRDWQPPEFYPASTDGYFYLRVQVKDSGCGVLPEDIRHLFTKFSQPRNGSNRINNGAGLGLAICKRFVNTMGGHIWIESEGIDRGSIVAFIVQLGICDNHSDTTTHQVQMPPKGQANYGSGDVIGHKSAFRDCFGVTSSNARYQRSL

SEQ ID NO: 2436 - protein, 284 aa, Glycine max
  misc_feature (106)..(106): Xaa can be any naturally occurring amino acid
  misc_feature (151)..(151): Xaa can be any naturally occurring amino acid
TRPATGWGLEIPELKKQLEAAKSKGINVRALVVINPGNPTGQVLGEANQRDIVEFCKQEGLVLLADEVYQENVYVPEKKFHSFKKVSRSMGYGENDITLVSFQSGXRGGYMEVTGFSAEVREQIYKVASVNLCSNISGQILASLVMSPPKXLQVGDESYDSFNAEKENILESLARRAKTLEDAFNKLEGVTCNKAEGAMYLFPQIRLSQKAIKAAGDANTAPDNFYCKRLLNATGVVVVPGSGFGQVPGTWHFRCTILPPEEKIPAIVTRLTEFHEKFMDEFRD

SEQ ID NO: 2437 - protein, 660 aa, Thermosynechococcus elongatus BP-1
MCGLTGFWQPCGCPTDEVSATIQRMADTLVHRGPDDVGVWVDTEVGIALGHRRLAILDLSPAGHQPMVSATGRYVIAFNGEIYNHLELREELSKVGAGGTAPVWRGHSDTETLLAAFAALGIEKTLKRVVGMFAIALWDRETRTLTLARDRMGEKPLYYGWVRDALVFGSELKALRAYPGFDNAIERRSLALFMRYDYIPAPWSIYENIWKLPPGCFVQFRAASHGGEPLAVGSRGNIKPYWSVRDVAERGLANPFTGREADAVEELERLLRQSIAGQMMADVPLGAFLSGGIDSSTVVALMQAQSSRAVKTFTIGFHEQDYNEAKHAKAVACHLRTNHTELYVTPQEAMAVIPKLPSLYDEPFADSSQIPTFLLAQLARQQVTVSLSGDGGDELFGGYTRYFLTHSLWQRLAWIPLPMRKLAEQGVLAISPQTWNRVFALLAPVLPERLRFRLPGDKLHKAAALFVTRRPEDIYLRFVSHWHDPTSLVIGTEEPRTALTEPATVLEGADFEARMMYLDSITYLPDDILVKVDRAAMGVSLETRVPLLDHRIVEFAWQLPHYFKIRRGQSKWLLRQVLYRYVPKELIERPKMGFGIPLDQWLRGPLREWAEDLLSEERLKREAFLNPELVRQKWQEHLLGRRNWAYHLWNVLMWEAWLAA

SEQ ID NO: 2438 - protein, 455 aa, Triticum aestivum
MGGMLLPAASSPPLSRVATSSAHGEDSPYFAGWRAYDDDPYDAVTNPGGVIQMGLAENQVSFDLLEGFLREHPEAAGWGGARPGSGVASFRDNALFQDYHGLKTFRKAMASFMEKIRGGKVRFDPDRIVLTAGATAANELLTFILANPGDALLIPTPYYPGFDRDLRWRTGVNIVPVHCHSSNGFQVTVAALEAAYEEAAAAGMSVRGVLLTNPSNPLGTTVERSALEDVLDFVVRKNIHLISDEIYSGSVFAAPDLVSVAELVESRGDDVAGRVHIVYSLSKDLGLPGFRVGVVYSYNDAVVTAARRMSSFTLVSSQTQKTLAAMLSDAAFAQEYIRTNRERLRVRHDHMVAGLARSGVPCLPSNAGLFVWMDMRRLLRDGGEATVADELRLWDLMLREVKLNISPGSSCHCSEPGWFRVCFANMSLDTLDVALARMSRFMDRWNKATTLQEQH

SEQ ID NO: 2439 - protein, 187 aa, Triticum aestivum
MSTSSGAKEAPANNPGLQAEADPATKGYIMQQTMFRVKDPKVSLDFYSRVMGMSLLKRLDFPEMKFSLYFLGYEDLSAAPADPVQRTGWTFGQKATIELTHNWGTESDPEFKGYHNGNSDPRGFGHIGVTVDDVYKACERFESLGVEFVKKPDDGKMKGIAFIKDPDGYWIEIFDLKRIGEVTAAAS

SEQ ID NO: 2440 - protein, 380 aa, Populus alba x Populus tremula
MCGGAIISGFIAPTTTARSSRRLTSGFEWLEPKKPFNNKHLKPVVADPEDDFEADLQEFKDESDVDEDYDVFADAKPFAFSASASEPAKKRGLPRGSTAVKSAGFSGLAKNSAKRKRKNQFRGIRQRPWGKWAAEIRDPRKGVRVWLGTFNTAEEAARAYDSEARRIRGKKAKVNFPDEAPCASARHPIKENSQKRLTKANLSQDFSYLSNPETDYNNMGFVEEKPQVSQFGIMNSIPVNGDSGVTPLTPSDNASMYFNSDKGSNSFDCDFGWGEQGAEILSVLAATPEVDESVFVEANPKKLKSYTEYAVPVEERNGKSLSEELLAFDNQLMNLQMPDLVGNWEASLDSFLNGDTTQDGTNAVDLWSFEDFPSMVGGVY

SEQ ID NO: 2441 - protein, 397 aa, Carica papaya
ALDTLMVGKLTTESLFILLAILTGLSNGSLENQLCFDLIEKWVKKNPNASICTALEGVENFKHIANFQDYHGLKEFRQEVAKLMGKARGGRVTFDPERIVMSGGATGASETIMFCLADPGDAFLVPTPYYPAFNRDLRWRTGVQIIPVQCSSSNNFTVTREAVEAAYQKAQEANINVKGLIITNPSNPLGTTLDSQTLQSLVIFVNDKTIHLVCDEIYAATVFSSPEFVSIAEIIQEIDVNRDLIHILYSLSKDMGLPGFRVGIVYSYNDVVLSCGRRMSSFGLVSSQTQYFLATLLSDDEFVDYFLRESSKRLARRHHKLTRGLEQVGIKCLKSNAGLFVWMDLRRLLEDPTSFDAEMKLWRTIVNDVKLNVSPGSSFHVAEPGWFRVCFANMDEF

SEQ ID NO: 2442 - protein, 179 aa, Zea mays
MVSFEMNDLKKIGLGLTGFGIFFSFLGIIFFFDKGLIAMGNILFLSGLGLTIGLKSTMQFFTKPKNYKGTISFAAGFFLVLIGWPFLGMLLEAYGFVVLFSGFWPTLAVFLQRIPIIGWIFQQPFVTSVCKGSNSFRLLYGKERRLGRIEVTCDSCDAMWLFSSVIPLPGLVWELSFEL

SEQ ID NO: 2443 - protein, 112 aa, Triticum aestivum
EGPNYDDVHCPECCLHFPEGAMYSFPQIRLPQRALDVAKKRLAKPPDVYYFLKLLEATGISTVPGSGFGQKEGLFHLRTTILPAEEDMPAIMSSFKKFNDSFMEQYQDHSRL

SEQ ID NO: 2444 - protein, 379 aa, Zea mays
  misc_feature (330)..(330): Xaa can be any naturally occurring amino acid
MRRWFCCTRFNASYREHENERPITPEEKEGNGFSVKSDPIKAPPSIEVPELSFEELKEKTDNFGSKALIGEGSYGRVYYAILDSGKHVAVKKLDASTDPELDNEFLTQVSIASKLKHDNFVEMLGYCVEGNQRLVVYEFATMGSLHDILHGRKGVPGAQPGPALDWMQRVKIAIDAAKGLEYLHEKVQPSIVHRDIRSSNILLFEDYRAKIADFNLSNQSPDMAARLHSTRVLGTFGYHAPEYAMTGQLTQKSDVYSFGVVLLELLTGRKPVDHTMPRGQQSLVTWATPRLTEDTVKQCVDPRLKGEYPPKGVAKVWLQSFHTLCACASXLAAVAALCVQYESEFRPSMSIVVKALSPLLQHKPQPPAATTDATAPSDA

SEQ ID NO: 2445 - protein, 683 aa, Coxiella burnetii RSA 493
MGRQNWKIKNLEVCMEVSTTRIHKPILKKLGSLFLNLAETSQDIFWIRSVDFYTHVYVSPAFENIFGISRQTLYANPNKWMNAVIIEDRDRLRHLIMEWQVKNKKGAAYTVDYRIIDAYGEMHWINETSYPVYEDDQCLGYAGVVKDVSSEKLRVKEFDNAVHYFRHFVERVSGVFWVKGSRGDKQIYISPTYEKIWGVSCESLYQNPKSWIDYVLPEDISNGKVNVNFYETAADQRTPDSKYEFHFRIRRPDGEIRWIKDTYFPIMENGKLVGFAGIAEDVTNDALREKELWEAKEFAEQANRTKSDFLAMMSHELRTPLNAILGMSQILKTHNLSDEQQGQIDVISQAGQNLLALLNDLLDFAKLEAGKLSFTEETMDLHELVMKIKGDMLLLAHKKGIQLKFDYPENIPSKVMGDAKRIRQVLVNLLSNALKFTEKGYVQLTANCLKKDHKKMTLCFTVKDTGIGMEKTKLSSIFNRFQQINSVYQRKYDGVGLGLSIVKELLEKMGGTISVTSEPGVGSEFTCIIPFRLQADSNPTLPARDLLEKQAVNNSTYDRESRFNMNVLVVEDNLINQRISKIMLEQVGCQVDIAGCGKDAIEKMKKHYDMVFMDIGLPDMDGFETTQCIRHNETPGQRVPIVAMTAHVFAQDRKRCFDVGMDEVMAKPIMQDDLIKVLKRWAA

SEQ ID NO: 2446 - protein, 495 aa, Rhodopirellula baltica SH 1
MGAIVIPWRRSRSSPQSDSAMLPRNLTLLLSVLVISFACYAIYLRTRSAMMVGEAIEMIDRYYVEPVDRRELLTSAMAGMTSTLDQHSEYIPPVSYQAFQDTIQQEFAGIGIYVDQPVEGEPVRVITPLVGSPALRAGLMPGDAILEVDGEYVGDMDIRSVSERLRGPIATTVQLLVERGEEKLEVKVQRDTIQLESVIGDYRNGGNEWVYRLKQHPDIVYVRMTSFGDKTVSELRSVLSRLMPKPDVSGFVLDLRGNGGGLLTAAVDVCDMFLSSGRIVSTKTRGGVVEDEVSATAGTLVPPDMPVAILIDEHSASASEIVAAALQDHGRATIVGTRSYGKGTVQNILPLEYGRSALRLTVAKYYRPSDQNIHRGVDDTEEDVWGVSPDPGMDVKIAEDDIRQLARFWEEASYPSLKNRDLKDAHLKLADPDEEVDSDAAPDASSNEASNSTEEDAVVTERSPAESAWELDTPLRTAVEAIRSAKSSKQISAAA

SEQ ID NO: 2447 - protein, 621 aa, Dechloromonas aromatica RCB
MQHADALYLFNEGRNNQAYRLLGAHADISGTTFRVWAPNASRVSVVGDFNGWHGDVHQLHPLGESGVWEIAVAEAHTGNLYRFEITNRHTGDKLIKSDPYGRGFELRPGSAAYVVPPSMHVWGDADWLQQRAGWDWQQAPVNIYEVHPGSWMRHPDGKPYLWGELAERLIPYALAQGYTHLELLPITEHPLDESWGYQTTGYFAPTSRYGSADELRAFVDACHQAGLGVLLDWVPGHFPQDDWALARFDGTALYEHEDPRLGLHADWGTHIFNYGRHEVRSFLMSSAHWWLSEFHFDGLRVDAVASMLYLDYSRKHGEWLPNKFGGRENLEAIDFLKQLNAMVHGDFPGALTIAEESTAWPMVSRPTYVGGLGFSMKWNMGWMNDSLRYFHRDPIYRRWHHSELTFGQIYAYSENYVLPFSHDEVVHGKGSLLGKMPGDTWQRYANLRLLLAWQVLTPGKKLMFMGCEFGQQGEWSEGRELDWGSLANPENAAAQRLSADLNRLYRDLPALHTQDFSALGFEWIDCNDSEHSVLSWLRWGKDGSFVVVVFNFTPVPQPAYRLGVPEAGTYVELLNTDSAFYGGSNLGNGGALTATKGEWMGRPANLEVTIPPLGAVVLRRE

SEQ ID NO: 2448 - protein, 234 aa, Aristolochia arborea
VPQAARFLFMKNKVRMICDCYAKPVKVYQDERLSFDLTLCGSTLRASHSCHLQYMKNMDSVASLVMAVVVNEGEEDGDPDTNQEQQAQPKRKRLWGLVVCHNTTPRFVPFPLRYACEFLMQVFAIHVNKELELENQIREKNILRTQTLLCDMLLRDSPLSIVSRSPNIMDLVRCDGAALLYQNEVYTLGAAPTESQIREISRWLSEFHMDSTGLSTDSLQDAGYPKALSLGDIV

SEQ ID NO: 2449 - protein, 233 aa, Aristolochia arborea
VPQAARFLFMKNKVRMICDCYAKPAKVYQDERLSFDLTLCGSTLRASHSCHLQYMKNMGSVASLVMAVVVKEGEEDDNPDLNQEQAQPKRKRLWGLVVCHNTTPRFVPFPLRYACEFLMQVFAIHVNNEVELENQIREKNILRTQTLLCDMLLRDTSLSIVTRSPNIMDLVKCDGAALLFRNKVYTLGITPTESQIREINQWFSEYHMDSTGLSTDSLHDAGYPKALSLGDIV

SEQ ID NO: 2450 - protein, 727 aa, Xanthomonas campestris pv. campestris str. ATCC 33913
MTAVTNRWDPGVTRALAEARHGDAFAVLGAHPSTNGRLLRTYHPGAEHVTAVLADGREVPLEAGPEPGLFAGELPAEGRYRLRIGWPGGTQDTADPYAFGPLLSDFDLHLISEGHHLQLADALGANAVEVDGVRGTRFAVWAPNASRVAVVGDFNSWDARRHPMRLRHQAGVWELFVPDVGPGAHYKYQLRGPHGHELPAKADPVARRAELAPGTASIVADPTPHQWSDDGWMATRARRQAHDAPMSIYEIHAGSWLREEGLDLDWDGLADRLIPYVADMGFTHVELMPVTEHPFGGSWGYQPLGLFAPTARFGSPDGFARFVDRCHREGIGVIVDWVPAHFPTDAHGLAHFDGTALYEHADPREGFHRDWNTLIYNHGRREVSGFLIASALEFLQRYHVDGLRVDAVASMLYRDYSRNAGEWVPNIHGGRENYETIAFLRRLNEVVREHAPGAVTIAEESTAWPGVTADVSHGGLGFHYKWNMGWMHDTLHYIGLDPIYRRYHHGELTFSMVYAYSERFVLPISHDEVVHGKGSLLGRMPGDDWQRFANLRAYLGFMFTHPGRKLLFMGCEFGQPTEWNHDAGLPWHLLDDARHRGVQTLVRDLNHLYAQYPALHAHDDDPSGFAWLVGDDAANSVVAFLRKGKRGDAPVLVVINYTPVVQQGYRLGVPQGGLWREVFNSDAGIYGGANLGNGGAVTAEPQSMHGHAQSLPLLLPPLGVIVLAPQG

SEQ ID NO: 2451 - protein, 1132 aa, Glycine max
  misc_feature (722)..(722): Xaa can be any naturally occurring amino acid
MSTSRPSQSSSNSRRSRHSARMAQATVDAKIHATFEESGSSFDYSSSVRVSGTADGVNQPRSDKVTTAYLRGKMIQPFGCLLAIDEKNHMQTCKVIAYSENEPEMLTMVSHAVPSVGDHPALGIGTDIKTLFTAPSVSGLQKALGCADVSLLNPILVHCKTSGKPFYAIVHRVTGSLIVDFEPVKPYEVPMTAAGALQSYKLAAKAITRLQSLPSGNMERLCDTMVQEVFELTGYDRVMAYKFHEDDHGEVIREITKPCLEPYLGLHYPATDIPQASRFLFRKNKVRMIVDCHAKHVRVLQDEKLQFDLILCGSTLRAPHSCHAQYMANMDSIASLVLAVVVNDNEEDGDTDAVQPQKTERLWGLVVCHNTTPRFVPFPLRYAREFLPQVFADHVHKEIELEYQIIEKNILHHPGHLLCMLMRDAPLGIASESPNIMDLVKCDGAALIYRNKVWRLGVTPSEPQIREIALWLSEYHMDSTSFSTDSLFDAGFPSALSLGDVVCGMASVRVTAKDMVFWFRSHTAAEIRWGGAKHEAGEKDDSRRMHPRSSFKAFLEVVKARSLPWKEYEMDAIHSLQIILRNAFKEDTESLDLNAKAINTRLRDLKIEGINDLKIERMQELEAVTSEIVRLDYTATVPILAVDVDGLVNGWNIKIAELTGLPIGEATGKHLLTLVEDSSTDRVKKMLNLALLGEEEKNVQFEIKTLGSKMDSGPISLVVNRXCASRDLRDNVVGVCFVAHDITAQKNVMDKFIRIEGDYKAIVQNRNPLIPPIFGTDEFGWCCEWNPAMMKLTGWKREEVMDKMLLGEIFGTQMAACRLKNQEAFVNLGVVLNKAMTGSETEKVPFGFFARNGKYVECLLSVSKKLDVEGLVTGVFCFLQLASPELQQALHIQRLSEQTASKRLNALSYMKRQIRNPLCGIVFSRKMLEGTDLGTEQKQLLRTSAQCQQQLSKILDDSDLDTIIDGYLDLEMAEFTLHEVLVTSLSQVMEKSNGKSIRIVNDVAGHIMMETLYGDSLRLQQVLADFLLISINFTPNGGQVVVAGSLTKEQLGKSVHLVKLELSITHGGSGVPEVLLNQMFGNNGLESEEGISLLIRAKLLKLMNGDVRYLREAGKSAFILSAELAAAHNLKA

SEQ ID NO: 2452 - protein, 234 aa, Aristolochia burelae
IPQASRFLFMKNKVRMICDCYAKPVRVYQDEKLSFDLTLCGSTLRAPHSCHLQYMKNMSSIASLVMAVVVNEGEEDDNPDINQQRQQVPRRKRLWGLVVCHNTTPRFVPFPLRYACEFLMQVFAIHVNNELELENQIREKNILRTQTLLCDMLLRDSPLSIVTRSPNIMDLVKCDGAALMYQNKVYTLGLAPTESQIREINQWLSEYHMDSTGLSTDSLHDAGYPKALSLGDIV

SEQ ID NO: 2453 - protein, 401 aa, Xanthomonas campestris pv. campestris str. ATCC 33913
MLSDSIIDVLTSGIAGLGVWGMLAVLLVFTQLTIFAVTLYLHRSQAHRGVDFHPVIAHFFRFWTWLTTSMITREWVAIHRKHHAKVETEEDPHSPQTKGIGQVFWRGVELYREARAQRADIEQYGKGAPNDWIERHLYTPHANAGPIALLVVNSVLFGLPGIALWAIQMAWIPFWAAGVVNGLGHWWGYRNFESADTSTNLTPWALWIGGEELHNNHHAFPSSARFSMRRWELDIGWIAIRCLQALGLAKVLRVAPSLDIRPNIAVPDADTLKALLSHRFQAMTDYQRNVLKPALREEAAATGAKLRQLLPRRLRKGLVDDGRWLKPDAREQLQHWVAQRPRMRTLVEYRARLTAVLEARSHDASERLKQLQQWCHEAEASGNAALQAYAARLKGYALSGT

SEQ ID NO: 2454 - protein, 579 aa, Glycine max
MCGILAVLGCSDSSQAKRVRVLELSRRLKHRGPDWSGLHQYGDNYLAHQRLAIVDPASGDQPLFNEDKTVVVTVNGEIYNHEELRKQLPNHTFRTGSDCDVIAHLYEEHGENFVDMLDGIFSFVLLDTRDNSFIVARDAIGVTSLYIGWGLDGSVWISSELKGLNDDCEHFESFPPGHLYSSKERAFRRWYNPPWFSEAIPSAPYDPLALRHAFEKAVVKRLMTDVPFGVLLSGGLDSSLVAAVTARYLAGTNAAKQWGTKLHSFCVGLEGAPDLKAAKEVADYIGTVHHEFHYTVQDGIDAIEDVIYHIETYDVTTIRASIPMFLMSRKIKSLGVKWVISGEGSDEIFGGYLYFHKAPNKEEFHQETCRKIKALHKYDCLRANKSTFAWGLEARVPFLDKDFIRVAMNIDPEYKMIKKEEGRIEKWALRRAFDDEEHPYLPKHILYRQKEQFSDGVGYGWIDGLKAHAEKHVTDRMMLNAANIFPFNTPTTKEAYHYRMIFERFFPQNSARLSVPGGPSVACSTAKAVEWDAAWSNNLDPSGRAALGVHASAYGNQVKAVEPEKIIPKMEVSPLGVAI

SEQ ID NO: 2455 - protein, 321 aa, Candida boidinii
MSSPLLTLNNGLKMPQIGFGCWKVDNATCAETIYEAIKVGYRLFDGAMDYGNEKEVGEGVNKAIKDGLVKREELFIVSKLWNNFHHPDSVKLAIKKVLSDLNLEYIDLFYMHFPIAQKFVPIEKKYPPNFYCGDGNKWSFEDVPLLTTWRAMEELVEEGLVKSIGISNFVGALIQDLLRGCKIRPAVLEIEHHPYLVQPRLIEYAKTEGIHVTAYSSFGPQSFVELDHPKVKDCTTLFKHETITSIASAHDVPPAKVLLTWATQRGLAVIPKSNKKERLLGNLKINDFDLTEAELEKIEALDIGLRFNDPWTWGYNIPTFI

SEQ ID NO: 2456 - protein, 462 aa, Glycine max
MFCNFHIILLIALALLVQISSQLGSKVEVLPGFEGPLPFELETGYVGLGEKDDDMQVFYYFVKSENDPQKDPLMLWLTGGPGCSSFSGLAFQIGPLRFKIEEYDGSVPNLILRPQSWTKVCNIIFVDLPFGTGFSYAKNLTAQRSDWKLVHHTHQFLRKWLIDHPEFLSNEFYMGADSYSGIPAPAIVQEISNGNEKGLQPRINLQGYLLGNPITTRNEGNDQIPFAHGMGLISDELYASLQRNCKGEYENRDSRNVLCLRDLKHYDECLSGINTFYILDRYCKSDSPKKHEAQWRRSLTQKFEASLNSHLRVPDIRCQIFGFFLATQWANDESVRKSLHIREGTIGKWERCYTTDFEEQIFSSFEFHVNLSAKGYRSLIYSGDHDAVVPFMSTQAWIRALNYSIVEDWRPWLLEDQVAGYTRIYSNQMTFATVKGSGHTAPEYKPEEGFAMFSRWIANMPL

SEQ ID NO: 2457 - protein, 487 aa, Escherichia coli CFT073
MLPLRINPTFLLPSNKFKEFEMDQKLLTDFRSELLDSRFGAKAISTIAESKRFPLHEMRDDVAFQIINDELYLDGNARQNLATFCQTWDDENVHKLMDLSINKNWIDKEEYPQSAAIDLRCVNMVADLWHAPAPKNGQAVGTNTIGSSEACMLGGMAMKWRWRKRMEAAGKPTDKPNLVCGPVQICWHKFARYWDVELREIPMRPGQLFMDPKRMIEACDENTIGVVPTFGVTYTGNYEFPQPLHDALDKFQADTGIDIDMHIDAASGGFLAPFVAPDIVWDFRLPRVKSISASGHKFGLAPLGCGWVIWRDEEALPQELVFNVDYLGGQIGTFAINFSRPAGQVIAQYYEFLRLGREGYTKVQNASYQVAAYLADEIAKLGPYEFICTGRPDEGIPAVCFKLKDGEDPGYTLYDLSERLRLRGWQVPAFTLGGEATDIVVMRIMCRRGFEMDFAELLLEDYKASLKYLSDHPKLQGIAQQNSFKHT

SEQ ID NO: 2458 - protein, 673 aa, Photorhabdus luminescens subsp. laumondii TTO1
MSHYPHLFAPLDLGFTTLKNRILMGSMHTGLEEHPDRAQRLARFYAERAAGGVALIVTGGISPNKQGVIGKGTAFLVDEKDLIHHKVITDAVHQAGGKIAMQILHTGRYSYQPHLVAPTAIQAPINPFMPREMTEEDIQQTIADFAHCAQLAQLAGYDGVEIMGSEGYLINQFLTTRTNHRQDKWGGSFENRMRFAVEVVKAVHQATGREFILIYRLSMLDLVEEGSNWQEIEQLAVAIEQAGASIINTGIGWHEARIPTIATMVPRAGFSWVTQKLMGKVSIPLITTNRINDPNIAEQVLAQGCADMVSMARPFLADAEFVMKAQQGRADEINTCIGCNQACLDQIFVGEIASCLVNPRACHETEMTAEPTTTPKKLAVVGAGPAGLSFAVTAASRGHHVTLFERDGQIGGQFNIAKQIPGKEEFHETLRYFQRQLTIHHVDVRLNQTATPEALSDFDEVIIASGIVPRQLTIDGIHHEKVLSYLDVLRDKKNVGQRVAIIGAGGIGFDTAEYLSQPGKSTSLDSTTFSEKWGIDHNLTHRGGLSPEGPKPKPSPRKIYLLQRKPTKVGEGLGKTTGWVHRTNLHLRGVKMLNNMQYLKIDDQGLHISSNGEQRCLAVDNIVICAGQEPLRELYQPLQQAGKTVHLIGGADVATELDARRAIDQGTRLGLKI

SEQ ID NO: 2459 - protein, 170 aa, Zea mays
MDGRMFGLETPLMVALQHLLDVPDGDAGAGGDKASGAAAGGGPTRTYVRDARAMAATPADVKELPGAYAFVVDMPGLGTGDIKVQVEDLYLCGMWRGIIVVCSGGASGVRVCVPSVSVSVYQFLSDVSASVSYEPCRMLSVCSKKKKKKKKKKKKKKKKKKKKKKKKKKK

SEQ ID NO: 2460 - protein, 217 aa, Arabidopsis thaliana
MAQQSLFYSFIARGTVILVEFTDFKGNFTSVAAQYLENLPSSNNKFTYNCDGHTFNDLVENGFTYCVVAVDSAGREIPMAFLERVKEDFYKRYGGEKAATDQANSLNKEFGSNLKEHMQYCMDHPDEISNLAKAKAQVSEVKSLMMENIEKVLARGVICEMLGSSESQPQAFYIKRTQMKRKKWFQNMKIKLIVLAIIIALILIIILSVCGGFNCGK

SEQ ID NO: 2461 - protein, 104 aa, Magnetospirillum magnetotacticum MS-1
MVETDNAIEVSIELPGMEMKDIEVTVNDDMLTVKGEKKIERQVEKKGYYLSERSYGAIYRTIPLPPGVDGEKAQASFKNGVLTIKLPQTPEAQAKIKRIDVKNG

SEQ ID NO: 2462 - protein, 678 aa, Pseudomonas putida KT2440
MKNDPLLQPYRLKHLTLRNRIITTSHEPAYPEDGMPKKLYRAYHVERAKAGVAMTMTAGSAAISRDSPPVFNNILAYKDEVVGWMKDLTDECHEHGAAVMIQLTHLGRRTRWDKGDWLPVVSPSHNQEPAHRAFPKQLEQWDIDRIIRDYADAAERMKAAGLDGIELQAYGHLMDQFWSPLTNELEGPYGGSLQNRLRFTFDVLTAIRKRVGPEFIVGIRYTGDEVLAGGLQKEEGLQISQLLKDSGMIDFLNVIRGNIATDAGLTDIIPIQGMRNAPHLDFAGEIKTLTGFPTFHAAKIPDVATARHAIASGLVDMVGMTRAHMTDPHIVRKIIEGREDDIRPCVGANYCLDRIYNAGAAYCIHNAATGRETTMPHEIPKAVQKRKVVIIGAGPGGLEAARVAGERGHEVVVYELADKPGGQIRLTAQSERRKEMISIIDWRMAQCERLGVRFHFNTWADTAIVLDENADVVIVATGGMPHTEVLEHGNQFLVSSWDIISGDVKPGRNVLVYDDAGDHAGLQAAEFIARSGAKTEIMTPDRSFAPEVMGMNLVPYMRALQHLDTTFTVTYRLKAVEKQGDQLLATIGTDYSDLTKTRLVDQVVVNHGTRPLDELYFDLKPLASNEGALEYMDLIVGKPQTVVSNPEGRFQLFRIGDAVASRNTHAAIYDALRLVKDL

SEQ ID NO: 2463 - protein, 150 aa, Alkalilimnicola ehrlichei MLHE-1
MAIMRYDPWSTLRQIQTDLDRMFGQRGMITAGEGENAESAGQWLPAVDISEDDKAYHIHADLPGVAPEDIEISMDQGVLSIKGSRESESTESEEGWKRVERARGTFYRRFALPESVDADNIAARSRNGVLEITVPKKVAPPAQRIEVKSE

SEQ ID NO: 2464 - protein, 122 aa, Spirulina platensis
HDRNKGFWWSHMGWMLREIPADADVPRFTKDINEDPVYLFLQNYFIPIQVALGVVLYLLGGWPLVVWGIFFRIVVVFHCTWFVNSATHKFGYRTYQSNDNSKNCWWVALVTYGEGWHNNHHA

SEQ ID NO: 2465 - protein, 175 aa, Xylella fastidiosa Ann-1
MHPKNFQHQLKTIPQPPEETRDFVFNHTMLRVKDINASLDFYARILGFRLIDQRDFHEAQFSLYFLALLPQTVHISDNDTERRLWMSGIPGVLELTHNYGTETQEGQIYHNGNSEPRGFGHICISVPDLYSACARFDTLQVPYQKRLTDGRMKNIAFIKDPDGYWVEIISNTPLP

SEQ ID NO: 2466 - protein, 235 aa, Aristolochia clematitis
IPQASRFLFMKNKVRMICDCYAKPVKVYQDEKLPFDLTLCGSTLRAPHSCHVQYMKNMSSVASLVMAVVVNEGEEDDNPDPNQQQQQQQPKRKRLWGLVVCHNTTPRFVPFPLRYACEFLMQVFAIHVNNELELENQIREKNILRTQTLLCDMLLRDSPLSIVTRSPNIMDLVKCDGAALMYQNKVYTLGLAPTESQIRDVNRWLLEYHMDSTGLSTDSLHDAGYPKALSLGDIV

SEQ ID NO: 2467 - protein, 135 aa, Zea mays
MRKHRIVSLVAALLVLLALAAVSSTRSAQKESVADNAGMLAGGIKDVPANENDLQLRELARFAVNEHNQKANALLGLEKLVKAKTQVVAGTMYYLTIEVKDGVVKKLYEAKVWEKPWENFKQLQEFKPVEEGASA

SEQ ID NO: 2468 - protein, 257 aa, Crocosphaera watsonii WH 8501
MEIKRLPALSDNYIFLLHDPHNNTAAVVDPAEAKPVLKCLDELGAKLVAILNTHHHADHVGANKKLMKKFPDVCIYGGKEDQGRIPGQQVFLEEGDTVKFAEKMAKVYFVPGHTRGHIAYYFPPHDSEGKGDLFCGDTIFAGGCGRLFEGTPAQMVNSLTKLRNLPDNTRVWCAHEYTLSNLKFAVTVEQDNNELQNRYQAIIKARKNQQATVPSLLGEEKKTNPFLRWDQPALQSLTGMNDPARVFGQIRGMKDNF

SEQ ID NO: 2469 - protein, 532 aa, Pseudomonas aeruginosa UCBPP-PA14
MLVGVNVLADAVKATLGPKGRNVVLDKSFGAPTITKDGVSVAKEIELKDKFENMGAQLVKDVASKANDAAGDGTTTATVLAQAIVNEGLKAVAAGMNPMDLKRGIDKATVAIVAQLKELAKPCADTKAIAQVGTISANSDESIGQIIAEAMEKVGKEGVITVEEGSGLENELSVVEGMQFDRGYLSPYFVNKPDTMAAELDSPLLLLVDKKISNIREMLPVLEAVAKAGRPLLIVAEDVEGEALATLVVNNMRGIVKVAAVKAPGFGDRRKAMLQDIAILTGGTVISEEVGLSLEGATLEHLGNAKRVVINKENTTIIDGAGVQADIEARVLQIRKQIEETTSDYDREKLQERLAKLAGGVAVIKVGAATEVEMKEKKARVEDALHATRAAVEEGVVPGGGVALVRALQAIEGLKGDNEEQNVGIALLRRAVESPLRQIVANAGDEPSVVVDKVKQGSGNYGFNAATGVYGDMIEMGILDPAKVTRSALQAAASIGGLMITTEAMVAEIVEDKPAMGGMPDMGGMGGMGGMM

SEQ ID NO: 2470 - protein, 160 aa, Malus x domestica
MSLIPNSRRGSSSVFDPFSLNLWDPFKDFPFPSSSSLSAFPEFSRENSAFVNTRVDWKETPEAHVFKADVPGLKKEEVKVEVEDDRVLKISGERNVEEEDKNDKWYRVERSSGKFLRRFQLPENAKVDQIKAAMENGVLSVTVPKAELKNVDVRAIEISG

SEQ ID NO: 2471 - protein, 139 aa, Debaryomyces hansenii CBS767
MIWLSERQKFGVGFTAGGIFFFLFGIMAFFDSAFLALGNILFVIGLILIIGPQRTVTFFTRPTKMRGTLCFCTGILLILAKRSFIGFIIECFGILGLFGDFFGTIVQFLRSIPYIGDLLSHPMIAPTIDRLAGINTLPV

SEQ ID NO: 2472 - protein, 233 aa, Aristolochia eriantha
IPQAARFLFMKNKVRMICDCYAKPVKVFQDEKLSFDLTLCGSTLRAPHSCHLQYMKNMSSVASLVMAVVVNEGEEDDNPDPNQQQQVPKRKRLWGLVVCHNTTPRFVPFPLRYACEFLMQVFAIHVNNELELESQIREKNILRTQTLLCDMLLRDSPLSIVTRSPNIMDLVKCDGAALMYQNKVYTLGLAPTESQIRDINRWLLEYHMDSTGLSTDSLHDAGYPSVLSLGDIV

SEQ ID NO: 2473 - protein, 532 aa, Thiobacillus denitrificans ATCC 25259
MVAGVNVLADAVKVTLGPKGRNVVLDRSFGAPTVTKDGVSVAKEIELKDKLENMGAQMVKEVASKTSDVAGDGTTTATVLAQSIVNEGMKFVAAGMNPMDLKRGIDKAVNAITEELKKISKPCTTSKEIAQVGSISANSDAPIGQIIADAMDKVGKEGVITVEDGSGLENELDVVEGMQFDRGYLSPYFINNADKQMAIMDDPFILLFDKKISNIRDLLPVLEQVAKAGKPLMIVAEDVDGEALATLVVNNIRGILKTCAVKAPGFGDRRKAMLEDMAILTGGTVIAEEVGLSLEKATLQDLGRAKRIEVGKENTTIIDGAGDGNAIKGRIAQINKQIEEVTSDYDKEKLQERKAKLAGGVAVIKVGAATEVEMKEKKARVEDALHATRAAVEEGIVPGGGVALLRAKAAAAAIKGDNHDQDAGVKIVLRAIEEPLRQIVKNCGDEPSVVVNKVLEGEGNFGYNAGTSEYGDMVAMGVLDPTKVTRTALQNAASIAGLMLTTDCMVADLPEDKAPAMPMGGGMGDMGGMGMM

SEQ ID NO: 2474 - protein, 1323 aa, Arabidopsis thaliana
MEVCNCIEPQWPADELLMKYQYISDFFIAIAYFSIPLELIYFVKKSAVFPYRWVLVQFGAFIVLCGATHLINLWTFTTHSRTVALVMTTAKVLTAVVSCATALMLVHIIPDLLSVKTRELFLKNKAAELDREMGLIRTQEETGRHVRMLTHEIRSTLDRHTILKTTLVELGRTLALEECALWMPTRTGLELQLSYTLRHQHPVEYTVPIQLPVINQVFGTSRAVKISPNSPVARLRPVSGKYMLGEVVAVRVPLLHLSNFQINDWPELSTKRYALMVLMLPSDSARQWHVHELELVEVVADQVAVALSHAAILEESMRARDLLMEQNVALDLARREAETAIRARNDFLAVMNHEMRTPMHAIIALSSLLQETELTPEQRLMVETILKSSNLLATLMNDVLDLSRLEDGSLQLELGTFNLHTLFREVLNLIKPIAVVKKLPITLNLAPDLPEFVVGDEKRLMQIILNIVGNAVKFSKQGSISVTALVTKSDTRAADFFVVPTGSHFYLRVKVKDSGAGINPQDIPKIFTKFAQTQSLATRSSGGSGLGLAISKRFVNLMEGNIWIESDGLGKGCTAIFDVKLGISERSNESKQSGIPKVPAIPRHSNFTGLKVLVMDENGVSRMVTKGLLVHLGCEVTTVSSNEECLRVVSHEHKVVFMDVCMPGVENYQIALRIHEKFTKQRHQRPLLVALSGNTDKSTKEKCMSFGLDGDGCPMPQRSNSAPAFFSRKTSEADVLWFNCVHIRDCRSVLDDILKQKGNNKIETLNRYVSVAISVIEEQDGGALRRLVEQQQWRYLVSQSTRSPKLIHGFFSFSSKTNPNPNKQQQILIDYISKSLQSNDTWETLSTKFSSIDLSDSLIETILLRFKNPETAKQALSFFHWSSHTRNLRHGIKSYALTIHILVKARLLIDARALIESSLLNSPPDSDLVDSLLDTYEISSSTPLVFDLLVQCYAKIRYLELGFDVFKRLCDCGFTLSVITLNTLIHYSSKSKIDDLVWRIYECAIDKRIYPNEITIRIMIQVLCKEGRLKEVVDLLDRICGKRCLPSVIVNTSLVFRVLEEMRIEESMSLLKRLLMKNMVVDTIGYSIVVYAKAKEGDLVSARKVFDEMLQRGFSANSFVYTVFVRVCCEKGDVKEAERLLSEMEESGVSPYDETFNCLIGGFARFGWEEKGLEYCEVMVTRGLMPSCSAFNEMVKSVSKIENVNRANEILTKSIDKGFVPDEHTYSHLIRGFIEGNDIDQALKLFYEMEYRKMSPGFEVFRSLIVGLCTCGKVEAGEKYLKIMKKRLIEPNADIYDALIKAFQKIGDKTNADRVYNEMISVR

SEQ ID NO: 2475 - protein, 555 aa, Catharanthus roseus
MGSKDDQSLVVAISPAAEPNGNHSVPIPFAYPSIPIQPRKHNKPIVHRRDFPSDFILGAGGSAYQCEGAYNEGNRGPSIWDTFTNRYPAKIADGSNGNQAINSYNLYKEDIKIMKQTGLESYRFSISWSRVLPGGNLSGGVNKDGVKFYHDFIDELLANGIKPFATLFHWDLPQALEDEYGGFLSDRIVEDFTEYAEFCFWEFGDKVKFWTTFNEPHTYVASGYATGEFAPGRGGADGKGEPGKEPYIATHNLLLSHKAAVEVYRKNFQKCQGGEIGIVLNSMWMEPLNETKEDIDARERGLDFMLGWFIEPLTTGEYPKSMRALVGSRLPEFSTEVSEKLTGCYDFIGMNYYTTTYVSNADKIPDTPGYETDARINKNIFVKKVDGKEVRIGEPCYGGWQHVVPSGLYNLLVYTKEKYHVPVIYVSECGVVEENRTNILLTEGKTNILLTEARHDKLRVDFLQSHLASVRDAIDDGVNVKGFFVWSFFDNFEWNLGYICRYGIIHVDYKTFQRYPKDSAIWYKNFISEGFVTNTAKKRFREEDKLVELVKKQKY

SEQ ID NO: 2476 - protein, 441 aa, Capsicum annuum
KEKDCDTHDLPLKARKFESFFTQLYSVTLASSGELICKDFFLYMESNQFGLFATSTAQIHDVPPTGGATQGVPSVEKITFHLLRLEDGAILGERVFHNDYVNLAHSIGAFLYDDLLAIVSLRYQRIHILQIRDSGDIVDVRAIGEFCREDDELFLNSNSQVLVDHVGNGFHHSLPESETFFLSGIKQRLLSFIFRGIWNEETDQTMRVQCLKKKFYFHFQDYIDLIIWKVQFLDRHHLLIKFGSVDGAVSRNTDSHPSFLAVYNMETTEIVAFYQNSADELYFLFELFSDHFHVSSKSSLHMNLMSSHSNNIHAFEQLRCTKNKAISFSQFVKKMMASLPFSCQSQSPSPYFDQSLFRFDEKLISAIDRHRQSTDHPIKFISRRQPNILKFKMKPGPEAGSMDGRTKKICYFLFHPILPLALSVQQTLFLQASVVNIHFRQ

SEQ ID NO: 2477 - protein, 484 aa, Hypocrea jecorina
  misc_feature (171)..(171): Xaa can be any naturally occurring amino acid
MPESLALPNDFEWGFATAAYQIEGAVKEGGRGPSIWDTYCHLEPSRTNGANGDVACDHYHRYDEDFDLLTKYGAKAYRFSLSWSRIIPLGGRLDPVNEEGIEFYSKLIDALLRRGITPWVTLYHWDLPQALHDRYGGWLNVEEVQLDFERYARLCFERFGDRVQNWITINXPWIQAIYGYATGSNAPGRSSINKHSTEGNTATEPWLAGKAQIMSHARAVAVYSRDFRPSQKGQIGISLNGDYYEPWDSNEPRDKEAAERRMEFHIGWFANPIFLKKDYPESMKKQLGERLPALTPADFAILNAGETDFYGMNYYTSQFARHLDGPVPETDYLGAIHEHQENKDGSPVGEESGLAWLRSCPDMFRKHLARVYGLYGKPIYITENGCPCPGEENMTCEEAVNDPFRIRYFDSHLDSISKAITQDGVVVKGYFAWALLDNLEWSDGYGPRFGVTFTDYTTLKRTPKKSALVLKDMFAARQRVKVAA

SEQ ID NO: 2478 - protein, 728 aa, Escherichia coli O157:H7 EDL933
MSDRIDRDVINALIAGHFADPFSVLGMHKTTAGLEVRALLPDATDVWVIEPKTGRKLAKLECLDSRGFFSGVIPRRKNFFRYQLAVVWHGQQNLIDDPYRFGPLIQEMDAWLLSEGTHLRPYETLGAHADTMDGVTGTRFSVWAPNARRVSVVGQFNYWDGRRHPMRLRKESGIWELFIPGAHNGQLYKYEMIDANGNLRLKSDPYAFEAQMRPETASLICGLPEKVVQTEERKKANQFDAPISIYEVHLGSWRRHTDNNFWLSYRELADQLVPYAKWMGFTHLELLPLNEHPFDGSWGYQPTGLYAPTRRFGTRDDFRYFIDAAHAAGLNVILDWVPGHFPTDDFALAEFDGTNLYEHSDPREGYHQDWNTLIYNYGRREVSNFLVGNALYWIERFGIDALRVDAVASMIYRDYSRKEGEWIPNEFGGRENLEAIEFLRNTNRILGEQVSGAVTMAEESTDFPGVSRPQDMGGLGFWYKWNLGWMHDTLDYMKLDPIYRQYHHDKLTFGMLYNYTENFVLPLSHDEVVHGKKSILDRMPGDAWQKFANLRAYYGWMWAFPGKKLLFMGNEFAQGREWNHDASLDWHLLEGGDNWHHGVQRLVRDLNLTYRHHKAMHELDFDPYGFEWLVVDDKERSVLIFVRRDKEGNEIIVASNFTPVPRHDYRFGINQPGKWREILNTDSMHYHGSNAGNGGTVHSDEIASHGRQHSLSLTLPPLATIWLVREAE

SEQ ID NO: 2479 - protein, 711 aa, Pseudomonas putida
MPSKKTDAPKQSEAAGTQTPDRANTNAKLQSLETFRSDATGQALRTNQGVKIADNQNSLKAGARGPSLLEDFIMREKITHFDHERIPERIVHARGTGAHGYFQSYGNHADLTKAGFLQDPDKITPVFVRFSTVQGPRGSGDTVRDVRGFAVKFYTDEGNFDLVGNNMPVFFIQDAIKFPDFVHAVKPEPHNEIPTGGSAHDTFWDFVSLVPESAHMVMWAMSDRAIPRSLRMMEGFGVHTFRLINAEGVASFVKFHWKPRQGVHSLLWDEAQKLAGKDTDFQRRDLWEAIENGDYPEWELGVQIVPEADEHKFDFDLLDPTKIIPEELVPVTPLGKMVLNRNPDNFFAEVEQVAFCPGHIVPGIDFTNDPLLQGRLFSYTDTQISRLGGPNFHQIPINRPVAPNHNNQRDALHQHVVHKGRASYEPNSIDGGWPKETPAAAQDGGFESYQERIDAHKIRQRSESFGDHFSQARLFFQSMSPTEQQHIIKAYSFELGKVEREHIRAREVNEILANIDLKLAAAVAANLGLPAPKAGTVQVKGSQLAQSPALSQMNHPGSVGIKGRKIAVLVANGVDAASVDKLIKALEAHSARPMLLGPTSAPVKATDGKQLPVEASMEGMPSIMFDGIVVPSGKASTDALAASGLAKHFLLEGYKHLKAMVLTKELATGLGLKEDKGLLLADDQKAVDAFVKAVEGHRVWEREAAAEAVPA

SEQ ID NO: 2480 - protein, 691 aa, Candida glabrata CBS138
MTELIDIPFLLTKDCSADLEDRLRFCIETGSLYQTHESFKKDIGEIVNTRQALVNLKFGDSKLLTKYYGYLECLLKKIDPEALAFSWSYTNYTIFEGNVFRDENLLGERRNILFNLGIAYYQSAKHIDDYKNNLPLVCDYLKRSAGCFEILSQRTKERNSEKAIISETMLKALKSMCMGLAQETVWFKSLAAKKDLLTSKLAYKCFEYFQESLNSFQLVGQSTEYIKLILVFVESKMLYFKAVCVYRLAQSIESIADNVGVVIRCLSIAVAALTNSKLESTVVFKNKCLEMLRQLEKDNDFIYLKHVPSHLQFSDFVKLYKLDSMKDLIVLPDLTEIAPSMLDQILFRNLLPIEIMDYGTSYNEKQDIYVLQHFVEPINLLNIQLDEELASFFEIDPQHIVNAHNKTKSFVTRKELDVIGQSFGDLESNAINIETQLANITSYLDLEIKTYEEDKQQYGDVWTIVDARDVTKEFYEKVEKLRQYLEIGRNINLETQELFASIDKSLVTSRTSKAHLTAQYNDPFLNKIEALKKRRERFISEIEKKSYENRIISKLIMYYKETDDIPGTISEREEIFDNIYSKHMKVFAVDMKYIEDCKNENYGLIKEIEEYKSRTNFNNEDRSSDPRTQYIQDVRQSLASLDDVKTQLKKGTAYYQQLIEKVNELVQVIVGFLEARRNDRERLLNEISTAA

SEQ ID NO: 2481 - protein, 139 aa, Oryza sativa
LYPEAVAIGEDVSGMPTFCIPVQDGGVGFDYRLHMAVPDKWIGLLKQSDEYWKMGDIVHTLTNRRWSEKCVTYAESHDQALVGDKTIAFWLMDKDMYDFMALDRPSTPRIDRGIALHKMIRLVTMGLGGEGYLNFMGNE

SEQ ID NO: 2482 - protein, 53 aa, Synechocystis sp. IPPAS 284
FVRLVLVWHCTWFVNSASHIFGYSTYKSQHNSKNCWWVALVTFGEGWHNNHHA

SEQ ID NO: 2483 - protein, 1119 aa, Cuscuta pentagona
MSSSRPSQSSSNSARSKHSARIIAQTSIDAKLHAEFEESGDSFDYSSSIRVTSVNTGEQKPRSDKVTTAYLHQIQKAKFIQPFGCLLALDEKTFRVIAFSENAPDMLTMVSHAVPSVGDLPVLGIGTDIRTIFTAPSGAALQKALGFGEVSLLNPILVHCKTSGKPFYAIVHRVTGSLIVDFEPVKPYEAPMTAAGALQSYKLAAKAIARLQSLPSGSLERFCDTIVQEVFELTGYDRVMAYKFHDDDHGEVVSEITKPGLEPYLGLHYPATDIPQAARFLFMKNKVRMICDCQAKHVKVVQDEKLLFDLTLCGSTLRAPHTCHLQYMENMNSIASLVMAIVVNDGDDEEEEERSGSGKRKRLWGLVVCHNTTPRFVPFPLRYACEFLAQVFAIHVNKELELENQIVEKNILRTQTLLCDILLRDAVLGIVSQSQSPNMMDLVKCDGAVLLYKSKIHRLGITPTDFQLQDIVYRLNEHHMDSTGLSTDSLYDAGFPGALSLGLCGMASVRISEKDWLFWFRSHTASEVRWGGVKHEPDDGRKMHPRSSFKAFLEVVETRSLPWKDYEMDGIHSLQLIMRNAFFNEADTVATNVIHAKLNDLRIDGLQELEAVTSEMVRLIETAMVPIIAVGVDGLVNGWNTKIAELTGLSVDEAIGNHLLTLVEDSSVHTVKKMLNLALQGEEEKNVQFEIMTHGIRSECGPISLVVNACASRDVQESVVGVCFIAQDITGQKTVMDKFTRIEGDYRAIIQNPNPLIPPIFGTDEFGWCSEWNSAMTKLSGWRRDEVIDKMVLGEVFGTQKACCRLKSHEAFVTLGVVLNNAITGHESDKTVFGFCTRNGKYVECLLSVTKRLNQDGAVIGLFCFLQLASQELQQALHFQKLSEQTATKRLKVLAYLRKQVKNPLSGIMFSRKMLEGTELGNDQQNILHTSAQCQQQLSKVLDDTDLDCIIEGYLDLEMVEFKLDEVLLASISQVMTKSNGKSLRVINDVAENVLCETLYGDSLRLQQVLAEFLSVAVNFTPSGGQLAVSSSLTKDHLGQSVQLAHLEFRVTHSGGGVPEELLTQMFGSDVDALEEGISLLVSRNLVKLMNGDVQYHREAGRSAFIISVELAVATKPRA

SEQ ID NO: 2484 - protein, 145 aa, Novosphingobium aromaticivorans DSM 12444
MTKFLHTMIRVTDPDATIAFFELIGLKETRRFDSEKGRFTLIFLAAPGEEGIAEVELTYNWPPEDGSPAEGYSGGRNFGHLAYRVDNIYDTCRRIMDAGHIVHRPPRDGHMAFVKTPDGISIELLQDGHLPPQEPWASMENTGTW

SEQ ID NO: 2485 - protein, 207 aa, Arabidopsis thaliana
PRVREDVTSRDSPLSSRFFFFPLILSPSAFHFFANGHTSFIWPIFQNRCVYMIANLFHAPVGQDEAVIGCGIVASSESAGLAFKMKWQHRRKAQGLPIDKPNIVTGVNVQVCWEKFARYFEVELKEVKLSEDYYVMDPAKAVEMVDENSICVAAILGSTFTGEFEYLKLLNDLLAEKNAKTAWETPIHVDAASGGFIASMGEEYQCQ

SEQ ID NO: 2486 - protein, 151 aa, Agrobacterium tumefaciens str. C58
MERNKMRYLHTMVRVKDLGESLKFYVDLLGLTEIRRIENEKGRFTLVFLSARDDIAAAKENKAPCLELTYNWDTEDYTGGRNFGHLAYEVDNIYDFCARLQQSGIVINRPPRDGHMAFVRSPDGISFEILQKGESLAPAEPWISMQNTGSW

SEQ ID NO: 2487 - protein, 512 aa, Arabidopsis thaliana
MDHSSNRFGNNGVESILPNYKLGKTLGIGSFGKVKIAEHVVTGHKVAIKILNRRKIKNMEMEEKVRREIKILRLFMHPHIIRQYEVIETTSDIYVVMEYVKSGELFDYIVEKGRLQEDEARNFFQQIISGVEYCHRNMVVHRDLKPENLLLDSRCNIKIADFGLSNVMRDGHFLKTSCGSPNYAAPEVISGKLYAGPEVDVWSCGVILYALLCGTLPFDDENIPNLFKKIKGGIYTLPSHLSSEARDLIPRMLIVDPVKRITIPEIRQHRWFQTHLPRYLAVSPPDTVEQAKKINEEIVQEVVNMGFDRNQVLESLRNRTQNDATVTYYLLLDNRFRVPSGYLESEFQETTDSGSNPMRTPEAGASPVGHWIPAHVDHYGLGARSQVPVDRKWALGLQSHAHPREIMNEVLKALQELNVCWKKIGHYNMKCRWVPGLADGQNTMVNNQLHFRDESSIIEDDCAMTSPTVIKFELQLYKAREEKYLLDIQRVNGPQFLFLDLCAAFLTELRVI

SEQ ID NO: 2488 - protein, 184 aa, Arabidopsis thaliana
MRRFLINQAKGLVDHSRRQHHHKSPSFLSPQPRPLASSPPALSRFFSSTSEMSASDSTSSLPVTLDSINPKVLKCEYAVRGEIVNIAQKLQEDLKTNKDAYPFDEIIYCNIGNPQSLGQLPIKFFREVLALCDHASLLDESETHGLFSTDSIDRAWRILDHIPGRATGAYSHSQGIKGLRDVIA

SEQ ID NO: 2489 - protein, 233 aa, Aristolochia gigantea
IPQAARFLFMKNKVRMICDCYAKPVKVFQDEKLSFDLTLCGSTLRAPHSCHLQYMKNMSSVASLVMAVVVNEGEEDDNPDPNQQQQVPKRKRLWGLVVCHNTTPRFVPFPLRYACEFLMQVFAIHVNNELELESQIREKNILKTQTLLCDMLLRDSPLSIVTRSPNIMDLVKCDGAALMYQNKVYTLGLAPTESQIREINRWLLEYHMDSTGLSTDSLHDAGYPSVLSLGDIV

SEQ ID NO: 2490 - protein, 75 aa, Glycine max
  misc_feature (37)..(37): Xaa can be any naturally occurring amino acid
  misc_feature (57)..(57): Xaa can be any naturally occurring amino acid
IYRIESYDVTSIPACIPMYLMSRLIKSLAFNWLISIXGSDKIFGRCVCFLNAPLKEXFHQETCRMIKALHKYDCL

SEQ ID NO: 2491 - protein, 238 aa, Aristolochia grandiflora
IPQASRFLFMKNRVRMICDCYAKPVKVYQDEKLSFDLTLCGSTLRAPHSCHSHYMKNMSSIASLVMAVVVNEGEEDDNPNSNQQQQPQQQQVPKRKRLWGLVVCHHTTPRFVPFPLRYACEFLMQVFAIHVNNEVELENQIREKNILRTQTLLCDMLLRDSPLSIVTRSPNIMDLVKCDGAALMYLGKVYTLGLAPTESQIREINRWLLEYHMDSTGLSTDSLQDAGYPGALSLGDVV

SEQ ID NO: 2492 - protein, 151 aa, Oryza sativa
MRASSLFAESVFTTSAAAGRRRCPRLAAVPVTLFFSTGRGSPAMAEEAQQPRGVKVGGIHDAPAGRENDLTTVELARFAVAEHNSKANAMLELERVVKVRQQVVGGFMHYLTVEVKEPGGANKLYEAKVWERAWENFKQLQDFKPLDDATA

SEQ ID NO: 2493 - protein, 232 aa, Aristolochia kaempferi
IPQASRFLFMKNKVRMICDCYAKPVKVYQDERLSFDLTLCGSTLRASHSCHLQYMKNMGSVASLVLAVVVKEGEEDDNPDPNQEPQSKRKRLWGLVVCHNTTPRFVPFPLRYACEFLMQVFAIHVNNEVELENQIREKNILRTQTLLCDMLLRDSSLSIVTRSPNIMDLVKCDGAAFLCRNKVYTLGVTPTESQIREINQWLSEYHMDSTGLSTDSLHDAGYPNALSLGDIV

SEQ ID NO: 2494 - protein, 480 aa, Dechloromonas aromatica RCB
MGQLEMSKTKTISLTVGAFVAGALISLNFPALADKEAKPGLPIEELRTFAEVYSAIKQGYVEPVEDKKMITNAISGMLSNLDPHSAYLDADAFKDLQVGTQGEFGGLGIEVGMEDGLVKVVSPIEDTPAYRAGVKSGDLIFKLDDTMVKGLTLSEAVKKMRGKPKTPIKLSIIRKGETKPIELTLIREVIKVQSVKSKLIEPGYGWVRITQFQENTIAELAKHVAGLYKDGNKLQGLVLDLRNDPGGLLHGAIGVSAAFLPPDVKVVSTDGRTEDAKQEFRARTQDYQRGTKEDSLKGMPIEAKNVPMVVLVNGGSASASEIVAGALQDHKRAVIVGTQTFGKGSVQSVLPLPGNTAIKLTTARYYTPSGRSIQAKGITPDIVVEESLNGNAAASMRLREADLDRHLSNDRDKEAGKELPKADTKPQAKTSPKSGKDKNGKEDAEDELPQRLEYASKSDYQFQQAINLLKGLQIMQNKAQ

SEQ ID NO: 2495 - protein, 229 aa, Aristolochia kaempferi
IPQAARFLFMKNKVRMICDCYAKPVKVYQDGRLSFDLTLCGSTLRAPHSCHMQYMKNMGSIASLVMAVVVNEGEEDNNPDTNQEQQAQPKRKRLWGLVVCHNTTPRFVPFPLRYACEFLMQVFAIHVNNELELENQIREKNILRTQTLLCDMLLRDSPLSIVSRSPNILDLVKCDGAALLYQNKVYTLGAAPTESQIHEINRWLSEYHMDSTGLSTDSLQDAGYPKALS

SEQ ID NO: 2496 - protein, 173 aa, Pseudomonas syringae pv. phaseolicola 1448A
MSLHELNTLPGVTADPEAATRQFVFNHTMLRVKDITKSLDFYTRVLGFSLVEKRDFPEAEFSLYFLALVDKAQIPEDDKARNEWMKSIPGILELTHNHGTESDATASYHNGNSDPRGFGHICVSVPDVKVACERFETLGVDFQKRLSDGRMNSLAFIKDPDGYWVEIIQPTPL

SEQ ID NO: 2497 - protein, 233 aa, Aristolochia maxima
IPQAVRFLFVKNKVRMICDCYAKPVKVYQDEKLSFDLTLCGSTLRAPHSCHLQYMKNMSSVASLVMAVVVNEGEEDGNPDPNQQQQQPKRKRLWGLVVCHNTTPRFVPFPLRYACEFLMQVFAIHVNNELELENQIREKNILRTQTLLCDMLLRDSPLSIVTRSPNIMDLVKCDGAALMYQNKVYTLGLAPTESQIREINRWLLEYHMDSTGLSTDSLHDAGYAKALSLGDIV

SEQ ID NO: 2498 - protein, 496 aa, Brassica juncea
MDPYKYRPASSYNSPFFTTNSGAPVWNNNSSMTVGPRGPILLEDYHLVEKLANFDRERIPERVVHARGASAKGFFEVTHDISNLTCADFLRAPGVQTPVIVRFSTVIHERGSPETLRDPRGFAVKFYTREGNFDLVGNNFPVFFIRDGMKFPDMVHALKPNPKSHIQENWRVLDFFSHHPESLNMFTFLFDDIGIPQDYRHMEGSGVNTYMLINKSGKAHYVKFHWKPTCGVKSLLEEDAVRVGGTNHSHATQDLYDSIAAGNYPEWKLFIQVIDPADEDKFDFDPLDVTKTWPENLLPLQPVGRMVLNKNIDNFFAENEQLAFCPAIIVPGIHYSDDKLLQTRVFSYADTQRHRLGPNYLQLPVNAPKCAHHNNHHEGFMNFMHRDEEVNYFPSRYDPVRHAEKYPTPPAVCSGKRERCVIEKENNFKEPGERYRSFTPESFDFRQERFIRRWIEALSDPRITHEIRSIWISYWSQADKTLGQKLASRLNVRPSI

SEQ ID NO: 2499 - protein, 492 aa, Brassica juncea
MDPYKYRPASSYNSPFFTTNSGAPVWNNNSSMTVGPRGPILLEDYHLVEKLANFDRERIPERVVHARGASAKGFFEVTHDISNLTCADFLRAPGVQTPVIVRFSTVIHERGSPETLRDPRGFAVKFYTREGNFDLVGNNFPVFFIRDGMKFPDMVHALKPNPKSHIQENWRVLDFFSHHPESLNMFTFLFDDIGIPQDYRHMEGSGVNTYMLINKAGKAHYVKFHWKPTCGVKSLLEEDAIRVGGTNHSHATQDLYDSIAAGNYPEWKLFVQIIDPADEDKFDFDPLDVTKTWPEDILPLQPVGRMVLNKNIDNFFAENEQLAFCPAIIVPGIHYSDDKLLQTRVFSYADTQRHRLGPNYLQLPVNAPKCAHHNNHHEGFMNFMHRDEEVNYFPSRYDPVRHAEKYPTPPAVCSGKRERCIIEKENNFKEPGERYRSFTPERQERFIGRWIDALSDPRITHEIRSIWISYWSQADKSLGQKLASRLNVRPNI

SEQ ID NO: 2500 - protein, 237 aa, Mycobacterium avium subsp. paratuberculosis K-10
MSDDRLYFRQLLSGRDFAAGDMFATQMRNFAYLIGDRQTGDCVVVDPAYAASDLLDTLEADGMHLSGVLVTHHHPDHVGGSMMGFTLAGLAELLERAPVPVHVNSHEALWVSRVTGISASDLTAHENHDKVSAGDIEIELLHTPGHTPGSQCFLLDGRLVAGDTLFLEGCGRTDFPGGDSDEMYRSLQRLAKLPGDPTVFPGHWYSAEPSASLSEVKRSNYVYRASDLDQWRMLMGG

SEQ ID NO: 2501 - protein, 500 aa, Neisseria gonorrhoeae
MTTSKCPVTHLTMNNGAPVADNQNSLTAGTRGPLLTQDLWLNEKLADFVREVIPERRMHAKGSGAFGTFTVTRDITKYTRAKIFSEVGKKTEMFGRLATVAGERGADAYTRVRGFALKFYTEEGNWDVVGNNTPVFYPDLRKFPDLNKAVKRSAHQYSSATNNWDFWALLPEALHQVTIVMSDRGIPASYRHMHGFGSHTYSLWNEAGERFWVKFHFRSQQGIKNLTNEEAAKIIADDRESHQRDLYEAIERGEFPKWTMYIQVMPEADAAKVPYHPFDLTKVWPKKDYPLIEVAEFELNRNPENFFADVEQSAFAPSNLVPGIGASPDKMLQARLFNYADAQRYRLGVNFRQIPVNRPRCPVHSNQRDGQGRATELRQPAHYEPNSFGQWSQQPDFAEPPLKINGDAAHWDYRQDDDDYFSQPRALFNLMNDAQKQALFDNTAAAMGDAPDFIKYRHIRNCYRCDPAYGEGGSKALGLTVEEPQAARATDPALGQGGLL

SEQ ID NO: 2502 - protein, 492 aa, Brassica juncea
MDPYKYRPASSYNSPFFTTNSGAPVWNNNSSMTVGPRGPILLEDYHLVEKLANFDRERIPERVVHARGASAKGFFEVTHDISNLTCADFLRAPGVQTPVIVRFSTVIHERGSPETLRDPRGFAVKFYTREGNFDLVGNNFPVFFIRDGMKFPDMVHALKPNPKSHIQENWRVLDFFSHHPESLNMFTFLFDDIGIPQDYRHMEGSGVNTYMLINKSGKAHYVKFHWKPTCGVKSLLEEDAVRVGGTNHSHATQDLYDSIAAGNYPEWKLFIQVIDPADEDKFDFDPLDVTKTWPENLLPLQPVGRMVLNKNIDNFFAENEQLAFCPAIIVPGIHYSDDKLLQTRVFSYADTQRHRLGPNYLQLPVNAPKCAHHNNHHEGFMNFMHRDEEVNYFPSRYDPVRHAEKYPTPPAVCSGKRERCVIEKENNFKEPGERYRSFTPERQERFIRRWIEALSDPRITHEIRSIWISYWSQADKTLGQKLASRLNVRPSI

SEQ ID NO: 2503 - protein, 479 aa, Pseudomonas putida
MSKILTTASGAPVADNQNSRSAGPRGPLLLDDFHLIEKLAHFNRENIPERRVHAKGSGAYGTFTVTRDITGYTSAKLFEQVGKQTETFLRFSTVGGERGSADTERDPRGFAVKFYTEEGNWDIVGNNTPVFFIRDPLKFPDFIHTQKRHPQSNLKNAQIFWDSWSHSPEALHQVTILFSDRGIPDGYRHMHGFGSHTYSLINAQGERTWVKWHFKTQQGIKNLAPADAARLAGTDPDYAQRDLFEAIERGDYPRWTVCIQVMSEAEAASRDENPFDVTKTWSQKDYPLIEVGVLELNRNPLNYFAEVEQAAFGPSNMVPGVGLSPDRMLQGRVFAYADAHRYRVGTNHQQLPVNAPRCPVNSYQRDGSMATGSYGSAPNYEPNSYAAAPKQSPRHAEPALALNGSADRYDHREDADYYSHAGALFRLMSDEQKALLISNIAGTMAGVSENVIQRQLQYFFKADPAYGEGIAKGLGINLA

SEQ ID NO: 2504 - protein, 479 aa, Desulfovibrio vulgaris (strain Miyazaki)
MTKHKLTTNAGAPVPDNQNAMTAGPRGPMLLQDVWFLEKLAHFDREVIPERRMHAKGSGAYGTFTVTHDITSYTKAALFSKIGKKTDLFVRFSTVAGERGAATAERDIRGFAIKFYTEQGNWDLVGNNTPVFFLRDPLKFPDLNHAVKRDPRTNMRSAKNNWDFWTSLPEALHQVTVVMSDRGIPASYRHMHGFGSHTFSFISPDNQRYWVKFHLRTQQGIKNLTDAEAEAIVARDRESHQRDLYDSIERGDFPRWTMYVQVMPEKDAEKLPYHPFDLTKVWFHKDCPLIEVGVLELNRNPENYFAEVEQAAFNPANVVPGISFSPDKMLQGRLFSYGDAHRYRLGVNHHLIPVNAARCPVHSYHRDGAMRVDGNHGSTLAYEPNSYGEWQEQPDFAEPPLAIRGDAAHWNFREDADYYDQPGRLFRLMTPQQQDELFQNTARAMGDAPEEIKRRHVGNCAKADPAYGAGVARALGLKM

SEQ ID NO: 2505 - protein, 492 aa, Brassica juncea
MDPYKYRPASSYNSPFFTTNFGAPVWNNNSSMTVGPRGPILLEDYHLVEKLANFDRERIPERVVHARGASAKGFFEVTHDISNLTCADFLRAPGVQTPVIVRFSTVIHERGSPETLRDPRGFAVKFYTREGNFDLVGNNFPVFFIRDGMKFPDMVHALKPNPKSHIQENWRVLDFFSHHPESLNMFTFLFDDIGIPQDYRHMEGSGVNTYMLINKSGKAHYVKFHWKPTCGVKSLLEEDAIRVGGTNHSHATQDLYDSIAAGNYPEWKLFVQIIDPADEDRFDFDPLDVTKTWPEDILPLQPVGRMVLNKNIDNFFAENEQLAFCPAIIVPGIHYSDDKLLQTRVFSYADTQRHRLGPNYLQLPVNAPKCAHHNNHHEGFMNFMHRDEEVNYFPSRYDPVRHAEKYPTPPAICSGKRERCIIEKENNFKEPGERYRSFTPERQERFIGRWIDALSDPRITHEIRSIWISYWSQADKSLGQKLANRLNVRPSI

SEQ ID NO: 2506 - protein, 249 aa, Buchnera aphidicola str. Bp (Baizongia pistaciae)
MKIIFTKVLFDNYVWIMFNSSKDCIIIDPGESNSVIKKIKKLNLNPKIILLTHNHLDHIQGVKNLLYKYPEISIYGPLETQFCGTKNLIDNRNTIEILNTKFYIIPTPGHTNGHTAYYCPPFLFCGDSIFSGGCGRVKNGMMIKMYNSLRTISKLPNDTLIYCSHEYTRSNLEFFKKIFPKNLNILNYYNNIKKSKTQCTLPSTLKIEKKINPFLQLNNTNLRHQVKIHNDLSFSLNFFIYLRKIKDKS

SEQ ID NO: 2507 - protein, 586 aa, Zea mays
MCGILAVLGVVEVSLAKRSRIIELSRRLRHRGPDWSGLHCHEDCYLAHQRLAIIDPTSGDQPLYNEDKTVVVTVNGEIYNHEELKAKLKTHEFQTGSDCEVIAHLYEEYGEEFVDMLDGMFSFVLLDTRDKSFIAARDAIGICPLYMGWGLDGSVWFSSEMKALSDDCERFITFPPGHLYSSKTGGLRRWYNPPWFSETVPSTPYNALFLREMFEKAVIKRLMTDVPFGVLLSGGLDSSLVASVASRHLNETKVDRQWGNKLHTFCIGLKGSPDLKAAREVADYLSTVHHEFHFTVQEGIDALEEVIYHIETYDVTTIRASTPMFLMSRKIKSLGVKMVISGEGSDEIFGGYLYFHKAPNKKEFLEETCRKIKALHLYDCLRANKATSAWGVEARVPFLDKSFISVAMDIDPEWNMIKRDLGRIEKWVMRKAFDDDEHPYLPKHILYRQKEQFSDGVGYNWIDGLKSFTEQQVTDEMMNNAAQMFPYNTPVNKEAYYYRMIFERLFPQDSARETVPWGPSIACSTPAAIEWVEQWKASNDPSGRFISSHDSAATDHTAVSRRWPTAAARPANGTVNGKDVPVPIAV

SEQ ID NO: 2508 - protein, 127 aa, Ashbya gossypii ATCC 10895
MCCGCTCSDCILYFLGFLIPPVAVLLRSGCFSLDLLLNTILTCLGVLPGIVHAFYYIHITSPLRHQYGDPVPVGTLDRFLYDRQRLDQAVAAQRLGGSGPMPEEQRPLTYSSNSKAQMAPPPYNEHA

SEQ ID NO: 2509 - protein, 492 aa, Prunus persica
MGSSSATSNRLLLSKIATSEGHGENPPYFDGWKAYDRNPFHPTKNPEGVIQMGLAENQLSFDLIEDWIKKNPKASICTPEGVEEFKNVAIFQDYHGFPEFRKAVAMFMSKARGGRVTFDPNRVVMSGGATGANELVMFCLADPGDAFLVPSPYYPAFYRDLGWRTGVQIVPVDCDSSNNFQITKEALAAAYEKAQKNNINVKGLIITNPSNPLGTTLDRDTLESLVEFINQKNIHLVCDEIYAATVFSSPTFTCISEVIQNMNCNPNLIHIVYSLSKDMGLPGLRVGIVYSYNDDVVNIGRKMSSFGLVSSQTQHMLASMLLDEEFVARFLETSSKRLAKRHGVFTKGLEEVGINCLKSNAGLFCWMDLRRLLKDQTFDGEMVLWRVIVNEVGLNVSPGSSFKCVEPGWFRVCFANMDDETVEVALKRIRTFVRQGKKAQDQAVQVKSPKRWKSNLRLSFSSSSTRRFDQDSVNVLSPHMMSPHSPLVRAKT

SEQ ID NO: 2510 - protein, 676 aa, Ralstonia eutropha JMP134
MCGFAGFLGGIPGSLEDRAILLTRMGQRILHRGPDHGDLWCEPGAPFGFTHRRLAIVDLSPAGRQPMISASGRYVIVFNGEIYNHPEIRAELESAGAAPRWRGHSDTETLLAGIDAWGADATVRRTIGMFAFAVWDRQTHSLTLARDRLGEKPLYYGWQGSGQARAFLFGSELKALRPHPAFDGSIDRNALTLYMRYNNVGGGHSIYQGIAKLPPAHLLTVSMLAREPVLRAYWSGSAAALQGKQDPFTGGPQEAVDSLDALLRDAVARQMMADVPLGAFLSGGIDSSTVVALMQSQSTQPIRTFSIGFHDAGYNEAAHAKAVARHLGTSHTELYVSPEHAMAVIPRLPEIYDEPFSDSSQIPTLLVSGLARQHVTVSLSGDAGDELFGGYNRYQITAELWGRLARIPGPVRAAAAWGLTRLSPHQINRVAALLPMASRWSHVGEKVHKGAGVMAAHTVDELYRGMVSQWQCPDAIVMGGAEPATLPEPVARALAMLGDVERMMAADLLTYLPDDILTKVDRAAMARSLETRIPFLDHRVVEFAWRLPLAYKIRQEDAGHTTKWVLRRVLDRYVPRELIERPKMGFGVPIDAWLRGPLRDWADDLLSEERLRREGFLNPQPIRQRWTEHLSGRRNWQHPLWCVLMFQAWLGHETTERTAPPLTDIPTSDRRLACAF

SEQ ID NO: 2511 - protein, 258 aa, Clusia minor
CEEIGRGRFGVVYKCTKLSTNETYALKSIVKNSLNDDLLDARCLVTEPKILRHVSPHPHVTQLHDSHEDDCYLHLIIDLCPNGDLYTLLLSTGPIPEAQSKAQFVQLMKAVSHCHKSGVVHRDIKPDNILFDSRESLKLADFGSAECGKGSDLNGVVGTPYYVAPEILEGREYGEKVDVWSAGVVLYVMLAGFPPFYGETVVEIFEAVLRGNLRFPTRAFCTVSSSVKDLLRRILCRDVSRRFTADQVLRHPWVTSGG

SEQ ID NO: 2512 - protein, 150 aa, Hordeum vulgare subsp. vulgare
MSIVRRSNAFDPFADLWADPFDTFRSIVPAFSGNSETAAFANARVDWKETPEAHVFKADLPGVKKEEVKVEVEDGNVLVVSGERTKEKEDKNDKWHRVERSSGKFVRRFRLPEDAKVEEVKAGLENGVLTVTVPKTEVKKPEVKAIEISG

SEQ ID NO: 2513 - protein, 260 aa, Clusia minor
CEEIGRGRFGVVYKCTKLSTNETYALKSIVKNSLNDDLLDARCLVTEPKILRQVSPHPHVTQLHDSHEDDCYLHLIIDLCPNGDLYTLLLSTGPIPEAQSKAQFVQLMKAVSHCHKSGVVHRDIKPDNILFDSRESLKLADFGSAEVICGKGSDLNGVVGTPYYVAPEILEGREYGKKVDVWSAGVVLYVMLAGFPPFYGETVVEIFEAVLRGNLRFPSRAFCTVSSSVKDLLRRILCRDVSRRFTADQVLRHPWVTSGG

SEQ ID NO: 2514 - protein, 234 aa, Aristolochia micrantha
IPQASRFLFMKNKVRMICDCYAKPVRVYQDEKLSFDLTLCGSTLRAPHSCHLQYMKNMSSIASLVMAVVVNEGEEDDNPDINQQRQQVPKRKRLWGLVVCHNTTPRFVPFPLRYACEFLMQVFAIHVNNELELENQIREKNILRTQTLLCDMLLRDSPLSIVTRSPNIMDLVKCDGAALMYQNKIYTLGLAPTESQIREINQWLSEYHMDSTGLSTDSLHDAGYPKALSLGDIV

SEQ ID NO: 2515 - protein, 234 aa, Aristolochia tomentosa
IPQAARFLFMKNKVRMICDCYAKPVKVYQDERLSFDLTLCGSTLRAPHSCHLQYMKNMGSIASLVMAVVVNEGEEDDNPDTNQEQQAQPKRKRLWGLVVCHNTTPRFVPFPLRYACEFLMQVFAIHVNKELELENQIREKNILRTQTLLCDMLLRDSPLSIVSRSPNIMDLVKCDGAALLYQNKVYTLGAAPTESQIHEINRWLSEYHMDSTGLSTDSLQDAGYPKALSLGDIV

SEQ ID NO: 2516 - protein, 206 aa, Solanum tuberosum
MPSRRRTLLKVIILGDSGVGKTSLMNQYVNKKFSNQYKATIGADFLTKEVQFEDRLFTLQIWDTAGQERFQSLGVAFYRGADCCVLVYDVNSMKSFENLNNWREEFLIQASPSDPENFPFVVLGNKVDVDGGNSRVVSEKKARAWCASKGNIPYFETSAKEGTNVEEAFQCIAKNALKSGEEEEIYLPDTIDVAASSQQRTGGCEC

SEQ ID NO: 2517 - protein, 295 aa, Nostoc punctiforme PCC 73102
MAKDMQREFTNRDELVAYLCEQFPGAAERDDHISETVGGRKAAQDALQKIDPVRYAQTRNFFTGAVTRLSPYIRYGVLSLREIRDYVLDQVQQKNDATKLINELGWRDYWQRLYVKLGDEIWKDQEEYKTGYTVAEYLPELPQDIRQGTTGRVCIDSFSHDLKETGYLHNHARMWLAAYIVHWRRIGWQAGAKWFLEHLLDGDPASNNMSWQWVASTFSQKPYFFNRENLERYTEGVYCQKCPLYGHCDFEGSYEELQQRLFPKGEFSKQANSQSWQRDKKGKGSRGSREGQGRE

SEQ ID NO: 2518 - protein, 232 aa, Aristolochia tomentosa
IPQASRFLFMKNKVRMICDCYAKPVKVYQDERLSFDLTLCGSTLRASHSCHLQYMKNMGSVASLVLAVVVREGEEDDNPDPNQEPQSKRKRLWGLVVCHNTTPRFVPFPLRYACEFLMQVFAIHVNNEVELENQIREKNILRTQTLLCDMLLRDSSLCIVTRSPNIMDLVKCDGAALLCQNKVYTLGVTPTESQIREINQWLSEYHMDSTGLSTDSLHDAGYPKALSLGDIV

SEQ ID NO: 2519 - protein, 209 aa, Triticum aestivum
  misc_feature (53)..(53): Xaa can be any naturally occurring amino acid
SFYRRWTKNQDTVTLEEVLQPGNDMIAAGYCMYGSSCTLVLSTGNGVKAAHAXGFTLDPSLGEFILTHPNIKIPNKGKIYSVNEGNARNWDAPTAKYVERCKFPQDGSSPKSLRYIGSMVADVHRTLLYGGIFLYPADKKSPNGKLRALYEVFPMSFLMEQAGGQSFTGKHRALEIVPSEIHQRSPIFLGSYDDVEEIKSLYAAESSTA

SEQ ID NO: 2520 - protein, 682 aa, Escherichia coli K12
MNMFFRLTALAGLLAIAGQTFAVEDITRADQIPVLKEETQHATVSERVTSRFTRSHYRQFDLDQAFSAKIFDRYLNLLDYSHNVLLASDVEQFAKKKTELGDELRSGKLDVFYDLYNLAQKRRFERYQYALSVLEKPMDFTGNDTYNLDRSKAPWPKNEAELNALWDSKVKFDELSLKLTGKTDKEIRETLTRRYKFAIRRLAQTNSEDVFSLAMTAFAREIDPHTNYLSPRNTEQFNTEMSLSLEGIGAVLQMDDDYTVINSMVAGGPAAKSKAISVGDKIVGVGQTGKPMVDVIGWRLDDVVALIKGPKGSKVRLEILPAGKGTKTRTVTLTRERIRLEDRAVKMSVKTVGKEKVGVLDIPGFYVGLTDDVKVQLQKLEKQNVSSVIIDLRSNGGGALTEAVSLSGLFIPAGPIVQVRDNNGKVREDSDTDGQVFYKGPLVVLVDRFSASASEIFAAAMQDYGRALVVGEPTFGKGTVQQYRSLNRIYDQMLRPEWPALGSVQYTIQKFYRVNGGSTQRKGVTPDIIMPTGNEETETGEKFEDNALPWDSIDAATYVKSGDLTAFEPELLKEHNARIAKDPEFQNIMKDIARFNAMKDKRNIVSLNYAVREKENNEDDATRLARLNERFKREGKPELKKLDDLPKDYQEPDPYLDETVNIALDLAKLEKARPAEQPAPVK

SEQ ID NO: 2521 - protein, 221 aa, Arabidopsis thaliana
MAQQSLIYSFVARGTVILVEFTDFKGNFTSIAAQCLQKLPSSNNKFTYNCDGHTFNYLVENGFTYCVVAVDSAGRQIPMAFLERVKEDFNKRYGGGKAATAQANSLNKEFGSKLKEHMQYCMAHPDEISKLAKVKAQVSEVKGVMMENIEKVLDRGEKIELLVDKTENLRSQAQDFRTQGTQMRRKMWFQNMKIKLIVLAIIIALILIIILSICGGFNCGK

SEQ ID NO: 2522 - protein, 473 aa, Thermobispora bispora
MTESAMTSRAGRGRGADLVAAVVQGHAAASDAAGDLSFPDGFIWGAATAAYQIEGAWREDGRGLWDVFSHTPGKVASGHTGDIACDHYHRYADDVRLMAGLGDRVYRFSVAWPRIVPDGSGPVNPAGLDFYDRLVDELLGHGITPYPTLYHWDLPQTLEDRGGWAARDTAYRFAEYALAVHRRLGDRVRCWITLNEPWVAAFLATHRGAPGAADVPRFRAVHHLLLGHGLGLRLRSAGAGQLGLTLSLSPVIEARPGVRGGGRRVDALANRQFLDPALRGRYPEEVLKIMAGHARLGHPGRDLETIHQPVDLLGVNYYSHVRLAAEGEPANRLPGSEGIRFERPTAVTAWPGDRPDGLRTLLLRLSRDYPGVGLIITENGAAFDDRADGDRVHDPERIRYLTATLRAVHDAIMAGADLRGYFVWSVLDNFEWAYGYHKRGIVYVDYTTMRRIPRESALWYRDVVRRNGLRNGE

SEQ ID NO: 2523 - protein, 83 aa, Rhodospirillum rubrum
PERVVHARGFGAHGTFETYEDLSALTSADIFQRAGEKTPAFVRFSTVAGNLGSSDVARDVRGFAVKLYTKQGNWDIVGNNTPV

SEQ ID NO: 2524 - protein, 755 aa, Streptomyces avermitilis MA-4680
MRVAVVGGGPGGLYAAALLKRLDPSREVTVWERNAPDDTFGFGVVLSDETLGGIEHADPVVYAALRDEFVRWDDIDIVHRGVRHTSGGHGFAALGRQRLLGILHERCRSLGVELRFGTEAPYPAWLTETYDLVIAADGVHSSTREAYAEAFRPSVETHRCRYIWLAADFAFDAFRFEIAETEHGVLQLHGYPYAADASTVIVEMREEVWQAAGFAELDERESVERCAKIFADALGGRSLRSNKSAWTHFRTVVNERWSHGNLVLLGDAAHTAHFSIGSGTKLAVEDALALAACLEEQPGLPEALAAYEQERRPVVASTQRAARASLEWFENIGLYLGRPSRQFAFNLLTRSRRVTHDNLRLRDAHFTEAVEREFGCPSGTPPMFTPFRLRGLTLRNRVVVSPMDMYAAVDGVPGDFHLVHLGARALGGAGLVMTEMVCVSREGRITPGCAGIYTGRQAEAWRRITDFVHTRAPGVGIGVQLGHSGRKGSTKLMWEGIDEPLEEGNWPLVAASPLPYKPGSQTPRALSRAQLTDIREQFTDAAWRAARSGFDLLELHCAHGYLLSGFLSPLTNHRTDAYGGSLARRLRFPLEVFDAVRSVWPEERPMTVRISATDWAEGGTTAEDAVEIARAFAAHGADAIDVSTGQVVADEQPAYGRSYQTPYADRIRGEAGVPVIAVGAISSWDDVNSLILAGRTDLCALARPHLYDPHWTLHAAAEQGYTGPGVVWPAPYRAGSRRPQSGRTDAPKPRLTLGT

SEQ ID NO: 2525 - protein, 623 aa, Burkholderia sp. 383
MRSRPARPSGSHAFESSFGTTCVDVDRTRFWLWAPASRTAAVEIEGEDAPAVAMTAVGDGWFEATVPCGPGTLYRYRLDGGLAVPDPASRFQPGGVEGPSQVVDPAAYRWRHDAWRGRPWHETVLYELHIGACGGHASVERRLPEIAALGVTAVELMPVNAFPGMRNWGYDGVLPFAPDASYGRPEELKALIDAAHGLEMQVFLDVVYNHFGPEGNLLPRYAPAFFRADRQTAWGPAIDFSREQTSTFFIENALYWLDEFRIDGLRIDAAHAIDDDAWLRELARRVRAYVGDTRHVHLVLENERNAASLLGPGGFDAQWNDDFHNSAHVLLTGERDGYYRAYADAPLRHLARTLGEGFAYQGEPSPLHDGAARGEPSAHLPPTAFVAFLQNHDQVGNRAFGERLRTLANEDAVRAATALLLLAPSIPLLFMGEEDGSTQPFQFFTDYRGALADAVREGRRREFAAFPAFADAAHRDAIPDPNDIATFVRSTLHGSSDETTPDTDAWRRFYRSALAVRAALVTPNLPGARALGVDLLTGDGDPQALVARWRLGDGSTLTIALNLGSHDAVLPALPVGKIVFETPPRARDRLRDLRLPPRACIAWRDGKVNHDARQHRINGQGRS

SEQ ID NO: 2526 - protein, 362 aa, Ashbya gossypii ATCC 10895
MSSKYVTFRGATNFRHRIVMATLSGKAVKIEKIRSEDMNPGLRDHEVSFLRLIEAVTNGSVIEISYTGTTVIYRPGIIVGGSHTHNCPNGKAVGYYVEPLLYLAPFSKKKFSIILRGVTSTHQDAGIEAIKWGLMPVMEKFGVRECALHTLKRGAPPLGGGEVHLVVDSLIAQPITMHALERPLISAIRGVAYSTRVSPSMVNRMIDGAKSVLKQVPCEANITADVWRGANSGKSPGWGITLVAETKKGWRYFTEAIGDAGEVPEDIGNKAAYNLLEEISRSAVVCRSQLPLAIVYMVIGKEDIGRLRIARAQVDESLVLLLRDIKELFGTEALLKPADDDTDDLIVTIKGIGFTNTSKKIA

SEQ ID NO: 2527 - protein, 591 aa, Chlamydomonas eugametos
MAAKFVEGTLDVTLKSASDLREDMSVKLDAYCVVSCASTAHRSNTVTDAGKTMNWEQTFHFDKVASTSVLKLESSMRRTPSDRSSCACKIPLTRACTSGSDEVCVPVLDKKGKPIGETHVSMTFKATSMADGPTKGNWILPTYANKDCWKDYEQGKVVGKGSFGTTYLVTKKDTQEQYAVKVISKRKLTTMEEVEDIQREVRIMHHLAGHPNVVQLKNVYEDKSYVYLVMDACMGGELFDAIVERGTYSEKDARALMRTIVSVVAHCHDMGVIHRDLKPENFLLLDKSANPVLKSIDFGLSSFYQEGQVFHDIVGSPFYVAPEVVRRSYGKEADIWSCGVILYILLCGYPPFHGDNETKIFEAIMNKSLDFQSDPWPKVSEPAKECIRRMLDRNPKTRASAQQTLEHEWMRENGVATEKRLEMEVLTSMKKFSAGNRLKKEAAKIIAANLPTDEICGLREMFIAIDVDHSGSITAEEFANALRMKGNSLPEDEVQRLVSNADVDGDGTCDYEEFLAATINQSKLEREDRLKIAFEHFDLDHDGSITHDELMQSLANLGINDAGIKEIIADVDRDGNGQIDYNEFCLMMRNL

SEQ ID NO: 2528 - protein, 735 aa, Burkholderia sp. 383
MTDTLFERSDIDALLAGRHPDPFACLGPHGQTGQVVVRAVLPGAKSVHALSPEGAELGTLACVDRAGCFAGTIPRNGGAPHYLLAIDWPDARQVIDDAYAFGTLLDDAVLARFSAGDPAAVLDCLGATPARIDDTDGVRFAVWAPNAQRVSVVGDFNGWDGRRHPMRLRRPSGVWELFVPGIGAGECYKYELRAADGRVLPHKSDPCARATEAPPRTASVVADVAALDAFAWHDEGWMHARPRADRYRVPWSIYEVHAESWQRVPEEMNRSATWDELAERLIPYVQGMGFTHVEFMPIAEYPFGGSWGYQPVAQFAPSARFGPVDGFARFVDRAHAAGIGVLVDWVPAHFPDDPHGLAQFDGTALYEHADPREGLHPDWHTCVFNVGRTEVGAFLAASALAWARRYHVDGIRVDAVASMLYRDYSRAEGEWVPNVHGGRENLESVAFLRMLNDTLHGAAAPAGVVTVAEESTAWPGVTAPTGDGGLGFDFKWNMGWMHDTLAYVREDPVHRRYHHDRMTFGLVYAFSERFVLPLSHDEVVHGKGSLVAKMPGDAWQRLATLRAYFGFMWAHPGKKLLFMGSEFAQWAEFAHDATPHWDLLDAPAHRGVQRLVRDLNRTYAAEPALHALDCHAAGFSWLIGDDRDNSVFAFARRDEAGHLVVAICNFTPVPRASYRVGLPAPGQWRELMNTDAAPYGGTNAGNDGAVWAEAVPAHGEAWSALLRLPPLATLWLRPA

SEQ ID NO: 2529 - protein, 371 aa, Pseudomonas fluorescens PfO-1
MTQQLFRPIALGPYTLPHRVAMAPLTRSRAGQPGDIPTSMNAEYYRQRASAALIITEATQISRQGQGYAWTPGIYNDEQVQAWREVSRQVHEAGGLIFMQLWHVGRVSHPSFQPDNALPVAPSALPVPGKTFIVDDEGNGVWGDVPVPRALQTSEIADIISDYRRAARNALNAGMDGVEIHAGNGYLLDQFINSNSNQRTDGYGGPLENRARLLLEVVAAVVDEVGADRVGVRLTPMGRFMGMGDESPEATFGYIVRSLNRWKLAYLHLVEPAVVGTVKDENFDPRWDAIIAQLRDAWDGVLMIAGGYDPESAEQALADGRADIIAFGRPFLANPDLPRRIREGLTLNAPDPSTFFGGDQRGYTDYPVYAH

SEQ ID NO: 2530 - protein, 396 aa, Ralstonia eutropha JMP134
MFDTILDWAANGLANWSWWEIVIYTLVVTHITIAGVTIFLHRCMAHRSLDLHPIAQHFFRFWLWLTTGMVTREWTAIHRKHHAKCETEDDPHSPQTRGIRKVLLEGAELYRAEAKNKETIAKFGHGCPNDWVERNVYSRFGWQGVGLMLIIDLALFGVIGMTVWAVQMLWIPINAAGVINGLGHWWGYRNYDCEDASTNVSPWGLVIGGEELHNNHHTYPTSAKFSIKWYEFDVGWGYIRAMQAVGLAKVKKTPPKARLVEARPVDENTLEAIIANRYDVMARYAKAVKSAFRQELEQLKEGRVAEYRTFKPASKWFHREEAKLAAPQRQQLASIVEQSKSLHTFVEMRRELAAIWGRSNLTREQLLQQLQAWCHRAEASGIQALHDFSLRLRRYA

SEQ ID NO: 2531 - protein, 363 aa, Sinorhizobium meliloti 1021
MEIPMNPMFTSVRVGRYMLPNRLVMAPMTRSRAAFDGTPGELATEYYVQRARLGLIVTEGTQPSDDGQGYLTTPGIYTPAHIAGWRKITSAVHDKGGHIFIQLMHAGRMSHPDNTPHHRQGVAPSAIAPGAGMFTATGMQDIPTPRALTTEEVRRTVAEFSHAARSAIEAGADGIEIHGANAYLVQQFFAPSANTRTDEYGGSIENRARFAIEVATAIAEEVGADRTAIRLSPGTALWGIDEGAEGPDLYRYLVAELDKLGLAYVHILHQSNEPLLADIRKLWRQPLILNRPGRPRGQIGADVASGLADLEAFGQMVLANPDFVARLKADAAMNESDPKTFYGGAAKGYIDYPVLSARTDTSS

SEQ ID NO: 2532 - protein, 158 aa, Xanthomonas campestris pv. vesicatoria str. 85-10
MNIVRYPQFPTHALQNEIKHVFDRFFEQNGDTDESAVVTAQWVPRVDIKEEPNHFVLYADLPGIDPSQIEVQMDKGILSIKGERKSESSTETERFSRIERRHGSFHRRFALPDSADADGITAAGHNGVLEIRIPKRPAATPRRIQVGNGQSTSGSTVQ

SEQ ID NO: 2533 - protein, 501 aa, Oryza sativa
MVVSVAATDSDTAQPVQYSTFFASRYVRDPLPRFRMPEQSIPREAAYQIINDELMLDGNPRLNLASFVTTWMEPECDKLIMDSVNKNYVDMDEYPVTTELQNRCVNMIAHLFNAPIKEDETAIGVGTVGSSEAIMLAGLAFKRKWQNKRKEQGKPCDKPNIVTGANVQVCWEKFARYFEVELKEVKLSEGYYVMDPVKAVEMVDENTICVAAILGSTLTGEFEDVKLLNNLLTEKNKETGWDVPIHVDAASGGFIAPFLYPELEWDFRLPLVKSINVSGHKYGLVYPGVGWVIWRSKEDLPEELIFHINYLGTDQPTFTLNFSKGSSQIIAQYYQLIRLGFEGYKNIMQNCMENTAILREGIEATGRFEILSKEAGVPLVAFSLKDSGRYTVFDISEHLRRFGWIVPAYTMPANAEHVAVLRVVIREDFSRSLAERLVSDIVKILHELDAHSAQVLKISSAIAKQQSGDDGVVTKKSVLETEREIFAYWRDQVKKKQTGIC

SEQ ID NO: 2534 - protein, 453 aa, Nocardioides sp. JS614
MPPSTPAVLWFRRDLRLADNPALVEAAADGPVLPLFVLDPVLWGPAGAARRAYLGASLRALDASLRERGTRLSVVRGDPARLVPRAARAVGAARVHVAADFGPYGSRRDGAVEQALTGAGAELVRTGSPYAVAPGRVTNTAGAPYRVFTPFHRAWAEHGWRGPVGVPEGTGWLRLAEGTAEIPDPALPDGLTLPAAGEAAARRRWAEFLDRVDEYAEDRDRPAVDGTSQMSAHLKWGEIHPRTMLADLARRRGAGAATYRKELAWREFYADVLHARPETARQYLRPEFARMRYDEPGEHLDAWRHGRTGFSVVDAGMRQLRATGWMHNRVRMITASFLVKDLHLEWQLGARHFLRWLVDGDLASNQHGWQWTAGCGTDAAPYFRVFNPTAQGRRFDPRGEYVRRWVPELADPDVVADPHDPSPSERQAVGYPEPIVDHAAERREALGRWERIR

SEQ ID NO: 2535 - protein, 252 aa, Vibrio parahaemolyticus RIMD 2210633
MLEIKSIPAFNDNYIWLIQNSDKRCAVVDPGDAQPVLDYLQANELTLEAILVTHHHNDHIGGVPDLVRAFPHVTVVGPKAEPIPTLTTPMEEGDKLELFGEIFLVLGLPGHTLGHIGYVGDSKLFCGDVLFSAGCGRIFEGTPEQMFESLSKIAALPEETQVFCAHEYTASNVAFALAVEPDNEQLRQYRDDVNRLRALNIPTLPTTLRKEKWINPFLRTTNPDVVKSVANRIKNSDPCSVFTALREWKNEF

SEQ ID NO: 2536 - protein, 540 aa, Klebsiella pneumoniae
MAAKDVKFGNDARVKMLRGVNVLADAVKVTLGPKGRNVVLDKSFGAPTITKDGVSVAREIELEDKFENMGAQMVKEVASKANDAAGDGTTTATVLAQAIVNEGLKAVAAGMNPMDLKRGIDKAVLAAVEELKALSVPCSDSKAIAQVGTISANSDETVGKLIAEAMDKVGKEGVITVEDGTGLEDELDVVEGMQFDRGYLSPYFINKPDTGAVELESPFILLADKKISNIREMLPVLEAVAKAGKPLLIIAEDVEGEALATLVVNTMRGIVKVAAVKAPGFGDRRKAMLQDIATLTGGTVISEEIGMELEKATLEDLGQAKRVVINKDTTTIIDGVGEESAIQGRVAQIRKQIEEATSDYDREKLQERVAKLAGGVAVIKVGAATEVEMKEKKARVDDALHATRAAVEEGVVAGGGVALVRVAAKLAGLTGQNEDQNVGIKVALRAMEAPLRQIVSNAGEEPSVVANNVKAGDGNYGYNAATEEYGNMIDFGILDPTKVTRSALQYAASVAGLMITTECMVTDLPKGDAPDLGAAGGMGG

SEQ ID NO: 2537 - protein, 594 aa, Salmonella typhimurium LT2
MSSKIFCKSWGAEYIAADVVRFRLWATGQQKVMLRLAGKDQEMQANGDGWFTLDVAGVTPGTEYNFVLSDGMVVPDPASRAQKTDVNGPSYVVDPGSYTWRNTGWKGSRWEQAVVYEMHTGTFTPEGTFRAAIAKLPYLAELGVTVIEVMPVAQFGGERGWGYDGVLLYAPHSAYGTPDDFKAFIDAAHGYGLSVVLDIVLNHFGPEGNYLPLLAPAFFHKERMTPWGNGIAYDVDAVRRYIIEAPLYWLTEYHLDGLRFDAIDQIEDSSARHVLVEIAQRIREDITDRPIHLTTEDSRNIISLHPRDQDGNAPLFTAEWNDDFHNAVHVFATGETQAYYNDFADAPEKHLARALAEGFAYQGEISPQTGEPRGVKSTGQPPVAFVDFIQNHDQVGNRAQGDRLITLAGAERTKVLLATLLLSPHIPLLFMGEEYGESRPFLFFTDFHGDLARAVREGRAKEFADHAGENVPDPNAPETFQRSKLNWKQQHSEEGKAWLAFTRELLLLRQKHIVPLLSAARESSGTVLQTAPGFIAVSWRFPGGTLSLALNISATTVLLPDLPGKTLFAWPNESTGSLSQHSLIVRLAQGESAS

SEQ ID NO: 2538 - protein, 235 aa, Aristolochia zollingeriana
IPQASRFLFMKNKVRMICDCYAKPVKVYQDDKLPFDLTLCGSTLRAPHSCHMQYMKNMSSVASLVMAVVVNEGEEDENPDPNQQQQQQQPKRKRLWGLVVCHNTSPRFVPFPLRYACEFLMQVFAIHVNNELELENQIREKNILRTQTLLCDMLLRDSPLSIVNRNPNIMDLVKCDGAALMYQNKVYTLGLAPTESQIRDINQWLLEDHMDSTGLSTDSLHDAGYPKALSLGDIV

SEQ ID NO: 2539 - protein, 1280 aa, Streptococcus pneumoniae TIGR4
MRKTPSHTEKKMVYSIRSLKNGTGSVLIGASLVLLAMATPTISSDESTPTTNEPNNRNTTTLAQPLTDTAAGSGKNESDISSPGNANASLEKTEEKPAASPADPAPQTGQDRSSEPTTSTSPVTTETKAEEPIEDNYFRIHVKKLPEENKDAQGLWTWDDVEKPSENWPNGALSFKDAKKDDYGYYLDVKLKGEQAKKISFLINNTAGKNLTGDKSVEKLVPKMNEAWLDQDYKVFSYEPQPAGTVRVNYYRTDGNYDKKSLWYWGDVKNPSSAQWPDGTDFTATGKYGRYIDIPLNEAAREFGFLLLDESKQGDDVKIRKENYKFTDLKNHSQIFLKDDDESIYTNPYYVHDIRMTGAQHVGTSSIESSFSTLVGAKKEDILKHSNITNHLGNKVTITDVAIDEAGKKVTYSGDFSDTKHPYTVSYNSDQFTTKTSWRLKDETYSYDGKLGADLKEEGKQVDLTLWSPSADKVSVVVYDKNDPDKVVGTVALEKGERGTWKQTLDSTNKLGITDFTGYYYQYQIERQGKTVLALDPYAKSLAAWNSDDSKIDDAHKVAKAAFVDPAKLGPQDLTYGKIHNFKTREDAVIYEAHVRDFTSDPAIAKDLTKPFGTFEAFIEKLDYLKDLGVTHIQLLPVLSYYFVNELKNHERLSDYASSNSNYNWGYDPQNYFSLTGMYSSDPKNPEKRIAEFKNLINEIHKRGMGAILDVVYNHTAKVDLFEDLEPNYYHFMDADGTPRTSFGGGRLGTTHHMTKRLLIDSIKYLVDTYKVDGFRFDMMGDHDAASIEEAYKAARALNPNLIMLGEGWRTYAGDENMPTKAADQDWMKHTDTVAVFSDDIRNNLKSGYPNEGQPAFITGGKRDVNTIFKNLIAQPTNFEADSPGDVIQYIAAHDNLTLFDIIAQSIKKDPSKAENYAEIHRRLRLGNLMVLTAQGTPFIHSGQEYGRTKQFRDPAYKTPVAEDKVPNKSHLLRDKDGNPFDYPYFIHDSYDSSDAVNKFDWTKATDGKAYPENVKSRDYMKGLIALRQSTDAFRLKSLQDIKDRVHLITVPGQNGVEKEDVVIGYQITAPNGDIYAVFVNADEKAREFNLGTAFAHLRNAEVLADENQAGPVGIANPKGLEWTEKGLKLNALTATVLRVSQNGTSHESTAEEKPDSTPSKPEHQNEASHPAHQDPAPEARPDSTKPDAKVADAENKPSQATADSQAEQPAQEAQASSVKEAVRNESVENSSKENIPATPDKQAELPNTGIKNENKLLFAGISLLALLGLGFLLKNKKEN

SEQ ID NO: 2540 - protein, 143 aa, Medicago sativa
DPFSLDVWDPFKDFPFTNSALSASSFPQENSAFVSTRIDWKETPEAHVFKADLPGLKKEEVKVEIEDDRVLQISGERNVEKEDKNDQWHRVERSSGKFMRRFRLPENAKMDQVKAAMENGVLTVTVPKEEIKKPEVKSIEISS

SEQ ID NO: 2541 - protein, 158 aa, Medicago sativa
MSLIPSFFGGRRSNVFDPFSLDVWDPFKDFPFNNSALSASFPRENSAFVSTRVDWKETPEAHVFKADLPGMKKEEVKVEIEDDRVLQISGERSVEKEDKNDQWHRLERSSGKFMRRFRLPENAKMDQVKAAMENGVLTVTVPKEEVKKPEVKTIDISG

SEQ ID NO: 2542 - protein, 666 aa, Vibrio vulnificus CMCP6
MKCRSKVTLIAASLWLAASAQALEAKLSEKDLPLLAPEVQHETASKRVTSRFTRSHYKHFNFNDDFSRAMFNRYIEMLDYNKNIFTQADIDSFEKWSTELDDQLKEGNNQIAFDVYNLSMKKRFERFSYALKLLDQEITFDTDDEIELDRTDAAWPKDQTELNELWRQRVKYDALNLKLTGKDWPEIKEILEKRYNNAMKRITQTRNEDVFQLYMNAFAREVDPHTSYLSPRNAEQFQSEMNLSLEGIGAVLQMTDDYTVIRSLVAGGPASKSKQLGEGDRIIGVGQDKKDIVDVIGWRLDDVVQLIKGPKGTKVHLQVLPEGKDSKSYVVTIVRDKIRLEDRAVKAEVIEKDGKKIGVLEVPSFYVGLSADTDKLLTDLKGKGVDGIIVDLRNNGGGALTEATALTGLFIEKGPVVQVRDSYGRVKVNADTDGQISYSGPMTVLVNRYSASASEIFAAALQDYGRAIILGENSFGKGTVQQHRSLNHIYDLFDKEIGYVQYTIQKFYRIDGGSTQNKGVVPDIPFPTAIDPEETGESVEDNALPWDSIEKADYQVLQRNDSLIEQLRVKHDERIANELEFKFIAEDIAKYKAEKDDNTLSLNEKVRKQESEQADKQRLDRINQRQALAGKEAFKTLDDVPKDYETPDAYLDESVAIMVDMLKKPS

SEQ ID NO: 2543 - protein, 339 aa, Bacillus licheniformis ATCC 14580
MSNRKLFTPWSLKGVTLKNRIVMSPMCMYSSHEKDGKVQPFHMTHYISRAVGQVGLIMVEATAVTPQGRISDQDLGIWDDAHIDGLAALTSQIKTYGSKTAIQLAHAGRKAEVEGTIYGPSAIPFDENSRTPVEMTKEDIKETVQAFKKGAERAKAAGFDIIEIHGAHGYLINEFLSPLSNKREDEYGGSPENRYRLLREVIDAVKEVWAGPLFVRVSASDYKTKGLDVADYVGFAKWMKEQGVDLIDVSSGAVVPADINVFPGYQVGFADTIRAQAEIQTGAVGLITSGLQAEEILQNGRADLIFVARELLRDPYWPKTAAKQLNTKIEGPVQYDRAW

SEQ ID NO: 2544 - protein, 277 aa, Bacillus thuringiensis serovar konkukian str. 97-27
MSLTSLKDYTTLHNGVKMPWFGLGVFKVEDGSQVIDSVKAAIKNGYRSIDTAAIYQNEEGVGQAIRESGVSREELFITSKVWNSDQGYETTLQAFETTLEKLGLEYLDLYLVHWPVKGKYTESWKALEKLYKDGRVRAIGVSNFHIHHLQDVFEIAEIKPMVNQVEYHPRLAQEELHAFCKEHNIQLEAWSPLMQGQLLDNPTLQDIAKKYNKSTAQIILRWDLHNEVVTIPKSIKEHRIIENANIFDFELSSDDMKAIQALNEDHRVGPDPDNFNF

SEQ ID NO: 2545 - protein, 744 aa, Emericella nidulans
MATSITAGLQKAQQAVQDTATKNKKIVDISHDTVNVHTDQEQRTDFGVAITDPDHWLRVTNETHSGPSLLEDHIARERIHRFDHERIPERVVHARGTGAYGNFTLKESIEDLTYAGVLTDTSRNTPVFVRFSTVQGSRGSADTVRDVRGFAVKFYTDEGNWDIVGNNIPVFFIQDAIKFPDFVHAVKPEPHNEVPQAQTAHNNFWDFVYLHPEATHMFMWAMSDRAIPRSYRMMQGFGVNTFSLVNKEGKRHFVKFHWIPHLGVHSLVWDEALKLAGQDPDFHRKDLMEAIDNKAYPKWDFAIQAIPEEDQDKFEFDIFDATKVWPEEQVPLRVVGELELNRNIDEFFPETEQVAFCTSHIVPGIDFSDDPLLQGRNFSYQDTQISRLGVNWEEIPINRPVCPFLNHNRDGAKRHRITKGTVNYWPNRFEANPPASDKGFKSHPAPITGRKRRDLTPKFKEYHNQAQLFYNSLSEVEKVHVKKAFSFELDHCDDPIVYERLAGQRLAEIDLPLAQAVAEMVGAPIPTKALRDNHGKTSVRLSQFDFTPKAPGIISRRIAIIIGDGYDKIAFNGMKAAILAAASAPLRHWHQTSAIYAQGEDKNSSKGVIPDHMYDGMRSTMFDATFIPGGSHIETLQKNGQIRYWIAETFGHLKALGAMGEAAQLVKEVLGNVMGVQIAGADSAEPVEWYGVVTARGPESAESLSEGFKVLKDAGDFTSKFFYQISQHRNWQRELDGLASTVAF

SEQ ID NO: 2546 - protein, 362 aa, Kluyveromyces lactis NRRL Y-1140
MPRTITYDIPSHYQLVDLVGEGAYGTVCSAIHKPTNTKVAIKKIQPFSRSMFVTRTLRELKLLKFFHSHENIISVLDIVRPTSWHKFEAVYLVQELMETDLQKIINQQNLSEDHIQYFVYQILRALKSLHSAQVIHRDLKPSNLLLNSNCDLKVCDFGLARCLASSDQSRENMVGFMTEYVATRWYRAPEIMLSFQEYTTAMDIWSCGCILAEMIMGKPLFPGKDYHHQLWIILEVLGSPTLEDFEQIKSKRAKEYISQLPMKKGIPWANVLNKEVNPLAIDLLSKMLTFNPDKRISAVEALEHPYLATYHDPDDEPDYPQLNLEDNFWKIDNEARDKNEEDDIPLELLKKMLYGEVMKPLN

SEQ ID NO: 2547 - protein, 284 aa, Triticum aestivum
  misc_feature (54)..(54): Xaa can be any naturally occurring amino acid
  misc_feature (88)..(88): Xaa can be any naturally occurring amino acid
  misc_feature (173)..(173): Xaa can be any naturally occurring amino acid
GLQEFGTSPTPSPLSLRQWRPAAQRNLRNQWSRLLAAKTQWLDAAASGRSHAAXLVNAYLSRSYMPGMDLGVLKDIPRIRDRASAKLXTRRCNAREMLLSAYKEMVCAMSDLVKASHAMRCFSKVSSGSPLVRFTDRQDDLNDLGDGGGAPVHRWVSMLEFENLAKELVEMFXVSELRLKRLIVLDLLSINLKEGADPSLEWSDELYDGEFNEFQRIGLGSGDSFPLPENWKADVLQARRPGHTPSHEVLQVYLTSWLANVNIKTSRIDEIFELVEEEMQIKLR

SEQ ID NO: 2548 - protein, 516 aa, Neurospora crassa
MSSNDAPVYTLAEGRPVQDPSAATVLMGSKPRGGALSLLADTQLIETLAHFPRERIPERVVHAKAAGAWGEFECTEDVSDFTSVDFLNKVGKKTKVLARISTVAGEKGSADTVRDIRGFAVKFFTEEGNWDFVGNDLPVFFIRDPVKFPSLNRSHKRHPQTNVPDSTMFWDFHNNNQEGVHCLMQLFGGRGIPASLRNVNAFGNHTYKFGKPEDGTFKYVKIHLKPDAGIKNLESDEALRLAGEEPDFHIKDMYNAIERGDYPTWTMYFQIMDPKDAETYRYNIFDITQTWSHRDYPLRPIGKLRLNKNPENHFQDIEQAAFSPSTMVPGIGPSADPMLQARMFSYPDAARYRVGPNYQQLPCNRALHVYSPYQRDGPMRVDGNYGGDPDYVRSSFRPMRFGPPDVAHDEWAGKVALFTSEVTDLDFEQPRDLWKIFKETGEDKRFAKNVAAHVGKALPEVQKKTIEMFSKVDQEVGEAIQRELDELEKKGGAGIEHDKAPVKGKGMRCKDSKDDE

SEQ ID NO: 2549 - protein, 281 aa, Corynebacterium glutamicum ATCC 13032
MDQKNKLSKSEGIPLVTLNDGKTIPQLGFGVFKVDPDEAERVVTEALEVGYRHIDTAAIYGNEEGVGRAIAKSGIPREELFITTKLWNDRHLDVEAAFEESLQKLGLDYVDLYLVHWPAPKNDNYVAAWKGLEKLGDRARSIGVCNFLPEHLEKLLAEATTVPAINQIELHPALQQRDAVEASLAAGITVESWGPLGQGRFDLGAEEPIAAAAKNHGKTPAQVVIRWHLQNGFVVFPKTVTKSRMVENIDVFDFELSDEEMAAITALERNDRGGSHPNDLN

SEQ ID NO: 2550 - protein, 386 aa, Citrus sinensis
WIPRAAGIRLRVPLLHLSNFQINDWPELSTKRYALMVLMLPSDSARQWHVHELELVEVVADQVAVALSHAAILEESMRARDLLMQQNIALDSARREAETAIRARNDFLAVMNHEMRTPMHAIIALSSLLQETELTPEQRLMVETILKSSNLLATLINDVLDLSRLEDGSLQLQIGTFNLHAVFREVLNLIKPIASVKKLLVALNLAPDLPEYAVGDEKRLMQTLLNVVGNAVKFTKEGNISITGFVAKSESLRDSRAPEFFPVPIENHFYLRVQVRDSGSGISPQDIPNLFTKFAQNQAIALRNSSGSGLGLAICKRFVNLMEGHIWIESEGLGKGCTAIFIVKLGIPEHSNDSNLSFIPKMPVHGQTNFPGLKVLVMDENGVSRQ

SEQ ID NO: 2551 - protein, 823 aa, Triticum aestivum
MATFAVSGATLGVARPAGAGGGLLPRSGSERRGGVDLPSLLLRKKDSSRAVLSRAASPGKVLVPDGESDDLASPAQPEELQIPEDIEEQTAEVNMTGGTAEKLESSEPTQGIVETITDGVTKGVKELVVGEKPRVVPKPGDGQKIYEIDPTLKDFRSHLDYRYSEYRRIRAAIDQHEGGLEAFSRGYEKLGFTRSAEGITYREWAPGAHSAALVGDFNNWNPNADTMTRDDYGVWEIFLPNNADGSPAIPHGSRVKIRMDTPSGVKDSISAWIKFSVQAPGEIPFNGIYYDPPEEEKYVFQHPQPKRPESLRIYESHIGMSSPEPKINSYANFRDEVLPRIKRLGYNAVQIMAIQEHSYYASFGYHVTNFFAPSSRFGTPEDLKSLIDRAHELGLLVLMDIVHSHSSNNTLDGLNGFDGTDTHYFHGGPRGHHWMWDSRLFNYGSWEVLRFLLSNARWWLEEYKFDGFRFDGVTSMMYTHHGLQMTFTGNYGEYFGFATDVDAVVYLMLVNDLIHGLHPDAVSIGEDVSGMPTFCIPVPDGGVGLDYRLHMAVADKWIELLKQSDESWKMGDIVHTLTNRRWLEKCVTYAESHDQALVGDKTIAFWLMDKDMYDFMALDRPSTPRIDRGIALHKMIRLVTMGLGGEGYLNFMGNEFGHPEWIDFPRGPQTLPTGKVLPGNNNSYDKCRRRFDLGDADFLRYHGMQEFDQAMQHLEEKYGFMTSEHQYVSRKHEEDKVIIFERGDLVFVFNFHWSNSFFDYRVGCSRPGKYKVALDSDDALFGGFSRLDHDVDYFTTEHPHDNRPRSFSVYTPSRTAVVYALTE

SEQ ID NO: 2552 - protein, 566 aa, Corynebacterium glutamicum ATCC 13032
MWAPLPHDVHLILNGETLPMHKTEGSWWRAEIAPKAGDRYGFSLFDGSSWSKTLPDPRSTSQPDGVHGLSEVSDDSYLWGDQQWTGRILPGSVLYELHVGTFSEDGTFEGVVDKLPYLRDLGVTAIELLPVQPFGGNRNWGYDGVLWHAVHAGYGGPAGLKKLIDASHQAGIAVYLDVVYNHFGPDGNYNGQFGPYTSGGSTGWGDVVNINGHDSDEVRNYILDAARQWFEDFHVDGLRLDAVHSLDDRGAYSLLAQLTMVAEDVSAQTGIPRSLIAESELNDPKFVTSREAGGFGLDAQWVDDIHHALHALVSGERNGYYSDFGSVDTLAKTLREVFEHTGNYSTYRGRNHGRPVHPDITPASRFVTYTTTHDQTGNRAIGDRPSTTLTPEQQVLKAAIIYSSPYTPMLFMGEEFGATTPFAFFCSHTDPELNRLTSEGRKREFARLGWNADDIPSPELESTFTSSKLDWEFTAEQRRINDAYKQLLHLRHTLGFSQPNLLTLEVEHGENWLSMANGRGRILANFSDDTITVPLGGELIYSFTSPTVTDTSTTLQPWGFAILTRN

SEQ ID NO: 2553 - protein, 1109 aa, Saccharophagus degradans 2-40
MSKQNKNKFTHSIQKTLIQWFLLLSLVPLFLVAFIGYQVARNSLVASAQDHLESDARNTMNFLNNWFEYRLMDSLSGAQDENNIKFLQELHEAAVQTELSIESFHKSIKWAEITASRQGGLVDISRNYDYIYDVFLIDVDGNILFTVAKESDLGTNLVHGKYANTKFGGTVRKTLATGQTLFADFEHYEPSAGIIAGFVVSPLVNSEGQRIGAYAMQFRIDRIINHLKLNSASMYRHYLVGPDGTLRTQRRQSEQLLITQINTAPVKRWLEANETAKHSDKPKLIKYSEADGTVYLGMHQNLTLRNLDWLLVSEVKEADALASSNWLAGVMLLSVWFTAMLLSVLAFFLSIRITNPIKAITIVANKLVKGDFSQRVQVQESNEFGLLANSFNELIQSRKYYELELLAAKNEAESSSRAKSEFLACMSHEIRTPMNGVLGMLGLVLNSSLTPEQERKLLLAQSSGQSLLSVINDILDYSKVEAGKLELEHLDFDPHRLLSDVVQSFNYSAQEKGIELVLDDIGLGGKVLRGDPSRLRQIINNLLSNALKFTSQGEIIVRAKLDSEINGLNQLRCSVTDTGIGIPSDKISGLFDSFTQVDSSTTRRYGGTGLGLSICKMLTRIMGGDIFVVSEVGKGTRFDFVVHVETGSCLPVDNAESDVTGLNVLLVDDNLTNLDVISGQLISWGIHVTKVAGPEQALVLVAEVQDTVFDLVLMDCHMPNINGIDLAERIQGSPCIKPNSVIILSSSADMASRFHMQEVGVVGCLMKPVSAPYLHQAIQYFIQIKKSNKQQFITPALLESVHATTESTANPNIVWGDNVRILVVEDNLVNQQVIAGILEDFGLAFTLVDDGQQAISALKENTGDLRYHFVFMDCQMPVLDGYNATKQIREGAAGEECKIVPIVALTANAMQGDRDKCLRAGMNDYVAKPVDADEVRLALVSWLPAELRTDEAAIENNPETPDTPDILEKKSPPAEENPVEPQVVKVDLGLLKLPKGLVIHTPAMLQPMFKNKPERYVKILTTLLNAHASFNTSLNEAFANNDTEQVRHLVHAMKGSSGNISMGKVHEYCKQVEAQIDADGAASAEYINKLQQLIEAMFDEANQIVELNS

SEQ ID NO: 2554 - protein, 148 aa, Oryza sativa (japonica cultivar-group)
MAAISTTTAAYFSSQPQLPATAAAKSGGRQQQRRRSSFVMLEAAAASGSGGGGGGAVGRTRSLTEEDLEELKGCLDLGFGFAYHEIPELCGTLPALELCYSMTRRFLDEQRAPGQEPESPATPPLPNWRISGPGAPIAVLYRVGRGFG

SEQ ID NO: 2555 - protein, 541 aa, Pantoea agglomerans
MAAKDVKFGNDARVKMLRGVNVLADAVKVTLGPKGRNVVLDKSFGAPTITKDGVSVAREIELEDKFENMGAQMVKEVASKANDAAGDGTTTATVLAQSIITEGLKAVAAGMNPMDLKRGIDQAVIAAVEKLKALSVPCSDSKAIAQVGTISANSDETVGQLIAQAMEKVGKEGVITVEEGTGLQDELDVVEGMQFDRGYLSPYFINKPETGAIELESPFILLADKKISNIREMLPVLEAVAKAGKPLLIIAEDVEGEALATLVVNTMRGIVKVAAVKAPGFGDRRKAMLQDIAILTGGTVISEEIGMELEKAALEDLGQAKRVVINKDTTTIIDGVGEEATIQGRVTQIRQQIEEATSDYDKEKLQERVAKLAGGVAVLKVGAATEVEMKEKKARVEDALHATRAAVEEGVVAGGGVALVRVAAQLVDLRGQNEDQNVGIKVALRAMESPLRQIVSNAGEEPSVVANNVKAGDGNYGYNAQTEEYGNMIDFGILDPTKVTRSALQYAASVAGLMITTECMVTDLPKGDAPDLGGGAGGMGG

SEQ ID NO: 2556 - protein, 546 aa, Leptospira interrogans serovar Copenhageni
MAKDIEYNETARRKLLEGVNKLANAVKVTLGPKGRNVVIDKKFGAPTITKDGVTVAKEIELEDPLENMGAQMVKEVSTKTNDVAGDGTTTATILAQSIINEGLKNVTAGANPMSLKKGIDKAVTAAVESIQKRAVKIENKKDIANVASISANNDNTIGNLIADAMDKVGKDGVITVEEAKSIETTLDVVEGMQFDRGYISPYMVTDAESMVATLNDPFILIYDKKISSMKDLIHILEKVAQAGKPLVIISEEVEGEALATIVVNTLRKTISCVAVKAPGFGDRRKSMLEDIAILTGGQVISEDLGMKLENTTLQMLGRANKVTVDKENTTIIEGKGQTKEIQGRIGQIKKQIEDTTSEYDREKLQERLAKLAGGVAVIHVGAATEVEMKEKKARVEDALSATRAAVEEGIVPGGGLTLLKAQEAVGSLKLDGDEATGAKIIFRALEEPIRMITSNAGLEGSVIVEHAKAKKGNEGFNALTMVWEDMIQAGVVDPAKVVRSALQNAASIGSMILTTEVTITDKPDKDAPNPMAGMGGGGMGGMGGMM

SEQ ID NO: 2557 - protein, 393 aa, Cryptococcus neoformans var. neoformans B-3501A
MTVIQSPKLFTPIQVGEYELKHRIVMAPLTRLRAETKTAIPSEWAETYYSQRASDGGLIVSEGTFIAEELRGYENVPGIYTPEQIAVWKKITSGVHSKGGRIFCQLWVLGRVADPNVIPVIYSVGTIRDDSPSYIAAPEPEGQRKPLTPVTEADMDRFIGHYIQASKNAIEAGFDGVEIHGANGYFIDQFLQTNSNDRIDQYGGSLENRMRFPLRVLNAVCDAIGPKRVGIRMSPFSEFQSMRMEDPLATFVPWAQAIVEAQPELAFIHAVEGRGILTPENEWYIQDNLNPIREVILNKGKSVRFIPAGGYMPDTAFEHAEKYPEDLIAFGRYFISNPDLPNRVRNGWPLHKYDRTTFYSQSSVGYNDYKDYKPETEALAQDEAAPKEGTTKA

SEQ ID NO: 2558 - protein, 273 aa, Nostoc sp. 36
MTIATSTKPQINWVNTLFFIGLHIGALFAFVPGNFSWTAVGVGFLLYWVTGGLGVTLGFHRLVTHRSFQTPKWLEYLLVFFGTLSCQGGPIEWIGTHRIHHLHSDTDADPHDSTKGFWWSHMDWLIHYCPAHADVPRFTKDIAEDPVYQFLEKYFILIQVALGVLLLLLGGWPFVIWGIFVRIVWVYHCTWLVNSATHKFGYRSYDSGDQSTNCWWVAVLVFGEGWHNNHHAFQYSARHGLEWWEIDLTWMTVQLLQAVGLATNVKLAPTKSS

SEQ ID NO: 2559 - protein, 215 aa, Setosphaeria turcica
MGAFGLVWKGPDTLGHYPVTDFGRSSAKDQLTNQAVAIKKIMKPFSTPVLSKRTYRELKLLKHLRHENIISLSDIFISPLEDIYFVTELLGTDLHRLLTSRPLEKQFIQYFLYQILRGLKYVHSAGVVHRDLKPSNILVNENCDLKICDFGLARIQDPQMTGYVSTRYYRAPEIMLTWQKYDVEVDIWSAGCIFAEMLEGKPLFPGKDHVNQFSS

SEQ ID NO: 2560 - protein, 234 aa, Asarum yakusimense
IPQAARFLFMKNKVRMICDCRAKSVKVYQDEHLSFDLTLCGSTLRAPHSCHLQYMENMSSIASLVMAVVINEGEEDDDGPDSTQQQAQPKRKRLWGLVVCHNTTPRFVPFPLRYACEFLMQVFAIHVNKELELENQIREKNILRTQTLLCDMLLRDAPLGIVTQSPNIMDLIKCDGAALLYENNVYRLGATPTESQLHEIVQWLSEHHMDSTGLSTDSLHEAGYPKALSLGDIV

SEQ ID NO: 2561 - protein, 242 aa, Malus x domestica
MEFPNQAPESSSQKKLGRGKIEIKRIENTTNRQVTFCKRRNGLLKKAYELSVLCDAEVALIVFSNRGRLYEYANNSVRATIDRYKKAYADPTNSGSVSEANTQFYQQEASKLRRQIREIQNSNRHILGEALSSLNAKELKNLEGRLEKGISRIRSKKNEMLFSEIEFMQKRETELQHHNNFLRAKIAENEREEQQHTHMMPGTSYDQSMPSHSYDRNFLPAVILESNNNHYPHQVQTALQLV

SEQ ID NO: 2562 - protein, 482 aa, Pseudomonas syringae pv. tomato str. DC3000
MQLIWLRSDLRVHDNTALTAAMQRGPTLAVYLLSPTQWRNHDDADCKVDFWLRNLVELEKALGKLNVPLLIREADTWDQAPEVLATLCKQFKVEGLHLNEEYGINETRRDQAVQQSMQADGVHFTSHLDQLLFKPGSILTKTGNYFQVFTQFKKVCYTRLHQAMPRTVHTPEAQQPLSIKSDAIPDQVKGFSTPSKTLRDLWPAGEVEASRRIEAFAGEQISYYKDERDFPARPGTSQLSAYLAAGVISPRQCLHAALASNQGEFETGDVGTVTWINELLWREFYKHTLVGYPRVSRHRAFRPETEALKWRDAPEELLAWQEARTGLPIIDAAMRQLLETGWMHNRLRMVVAMFLTKNLLIDWREGERFFMRHLIDGDLAANNGGWQWSSSTGTDSAPYFRIFNPLSQSERFDPEGVFIKRWLPELADLNKKQIHDPASVGGLFGVADYPKPIVDLSKSRARALAAFKALPTRQPAAGADNG

SEQ ID NO: 2563 - protein, 234 aa, Saruma henryi
IPQAARFLFMKNKVRMICDCRAKSVKVYQDEHLSFDLTLCGSTLRAPHSCHLQYMGNMSSIASLVMAVVINEGEEDDDGPDSTQQQAQPKRKRLWGLVVCHNTTPRFVPFPLRYACEFLMQVFAIHVNKELELENQIREKNILRTQTLLCDMLLRDAPLGIVTQSPNIMDLIKCDGAALLYENKVYRLGVTPTESQLHEIVQWLSEHHMDSTGLSTDSLHEAGYPKALSLGDIV

SEQ ID NO: 2564 - protein, 415 aa, Zea mays
  misc_feature (407)..(407): Xaa can be any naturally occurring amino acid
MQSTAAMRSGGGGNKRSLLLLLSAWWLLLGSLVAQLPAARGGSGHVVTRMPGFDGPLPFHLETGYVEVDEQLGVQLFYYFVRSEKDDPGEDPLLLWLSGGPGCSGLSGLAYEIGPFHFDARGYRGGFPTLLYRPETWTKVSNIIFMDSPVGTGFSYATSDEGLKSSDTQAVRQLAIFLRKWLEEHPGFLPNPLYIAGDSYGGMIIPALALEIDRSIELGEKIFSGLKGYIAGNPLTGGQFDTDSQIPYFHAMGLVSDELYKNARENCGGKYSAPLNAVCAEAVQAINNCTRDINKQYILDPACPDDDLLSPKTVAETDGTSRLMLESADFLLDSKCAEALYILSYAWGNDDTVQESLGIRKGTIGAWKRYSHALPYNYDIQSAADYHSRLATKGYRALIYSGDHDAXVIEFPRPT

SEQ ID NO: 2565 - protein, 235 aa, Medicago sativa subsp. x varia
MAMEALNSPTTATPFTPFEEPNLSYLETPWTKGKRSKRSRMDQSSCTEEEYLALCLIMLARSGNNNDKKSDSVATPLTTVKLSHKCSVCNKAFSSYQALGGHKASHRKAVMSATTAEDQITTTSSAVTTSSASNGKNKTHECSICHKSFPTGQALGGHKRCHYEGSVGAGAGAGSNAVTASEGVGLSHSHHRDFDLNLPAFPDFSKKFFVDDEVFSPLPAAKKPCLFKLEIPSHY

SEQ ID NO: 2566 - protein, 285 aa, Nostoc sp. 36
MTANFGAIAPERGNSPQLRWINVVFFGVFHALALLSPWFFSWSALGLLVFLHWLFGSIGICLGYHRLLSHKSFQVPKWLEYAIALIGALALQGGPIFWVGGHRQHHAHTEDIDLDPYSAQKGFWWSHILWIFYPRPEFFDYDTYKKYAPDLARQPFYCWLDRYFLLLQIPFALLLYVLGGWPFVFYGVFLRCVLLWHSTWFVNSASHLWGYRTFDADDGARNLWWVSIVTYGEGWHNNHHTYPHMAKSGLFWWEIDVTWWSIQLLQTLGLAKKVVSSPPQGATHG

SEQ ID NO: 2567 - protein, 471 aa, Bacillus licheniformis ATCC 14580
MSKTEPQLEQIQYRFPNGFWWGSAASATQTEGAAAEGGKGKNIWDHWYEKEPNRFFDGVGPEKTSRFYETYREDIQLMKELGHHSFRFSISWARLFPDGKGRLNKEGAAFYNRVIDELLAAGIEPFVNLYHFDMPLALQQIGGWENRQVVDHFASYAETCFRLYGDRVKKWFTHNEPIVPAEGGYLYDFHYPNIVDFQKAVQVAYHEILSNAKAVEAYRRLGGDGKIGIILNLTPSYPRSQHPADVRASEIADAFFNRSFLDPAVKGEFPQLLTDILKEEGYLPVMEEGDLELIKNHTVDLLGINYYQPRRVKAKEHLPHPDAPFMPERFFDHYEMPGRKMNRHRGWEIYEKGIYDILINVKENYGNIECFISENGMGVEGEERFRGEDGMIRDDYRISFIKEHLKWVHRAIQEGANVKGYHLWTFMDNWSWTNAYKNRYGFVSVNLDKNGERTIKKSGYWFKKVAENNGF

SEQ ID NO: 2568 - protein, 482 aa, Arabidopsis thaliana
MASRTTPSRSTPSRSTPSGSSSGGRTRVGKYELGRTLGEGTFAKVKFARNVENGDNVAIKVIDKEKVLKNKMIAQIKREISTMKLIKHPNVIRMFEVMASKTKIYFVLEFVTGGELFDKISSNGRLKEDEARKYFQQLINAVDYCHSRGVYHRDLKPENLLLDANGALKVSDFGLSALPQQVREDGLLHTTCGTPNYVAPEVINNKGYDGAKADLWSCGVILFVLMAGYLPFEDSNLTSLYKKIFKAEFTCPPWFSASAKKLIKRILDPNPATRITFAEVIENEWFKKGYKAPKFENADVSLDDVDAIFDDSGESKNLVVERREEGLKTPVTMNAFELISTSQGLNLGSLFEKQMGLVKRKTRFTSKSSANEIVTKIEAAAAPMGFDVKTNNYKMKLTGEKSGRKGQLAVATEVFQVAPSLYMVEMRKSGGDTLEFHKFYKNLTTGLKDIVWKTIDEEKEEGTDGGGTNGAMANRTIAKQST

SEQ ID NO: 2569 - protein, 189 aa, Brassica napus
MALEALNSPRIASPVPTLFEEHWTKGKRSKRSRSDHPHRLTEEEYLAFCLMLLARDGDRHHVEEEKTVYKCGVCDKVFLSYQALGGHKASHRNFSSGVDPRVRTPAAVKSHVCSICHKSFTTGQALGGHKRCHYDGSSNVVSNSEGVGSTSHVSGNSRRGFDLNITPINELSPDDEVKSPLPSKKLRLT

SEQ ID NO: 2570 - protein, 208 aa, Ashbya gossypii ATCC 10895
MSSRKKNILKVIILGDSGVGKTSLMHRYVNDKYSQQYKATIGADFLTKEVTVDGDKVATMQVWDTAGQERFQSLGVAFYRGADCCVLVYDVTNAKSFENVKSWRDEFLVHANVPSPESFPFVILGNKIDVEESKKVVTTRTSQELAKSLGNIPFFLTSAKNAINVDDAFEEIARSALQQSQADAGAYEDDFNDAINIQLDGEPSSCNC

SEQ ID NO: 2571 - protein, 481 aa, Clavibacter michiganensis subsp. michiganensis
MSHPAFASSDLSIPEEFTLGAATAAYQIEGAASKDGRGPSIWDTFSHTPGATAEGATGDTAAGHYDNVTTDLDLMASLHLDAYRFSISWSRVMPEGEGAVNGAGLAFYSTLVDGLLARGIRPVVTLNHWDLPQMLEDKYGGWRGRETAYAFERYAEIVGAALGDRVAIWSTHNEPWNNSFAGYGHGVFAPGVKSHEAALKAAHHLNLAHGLAVRALRRTITKDDAKVSIVLNIFRVEPESPADAEAARLFDAIANRVFTGPVLDGAYPADLLEDTKAFTDWHFLQPGDEQICNQPIDLLGVNYYEIMHIRRRPDYDPTTELMGGTEFPGSERVELFRPEGFDSTAMGWTVEPWGLEDHLVALSARWPSLPIMVMENGAAFDDVLTEVDGQPAVLDRHRTQYLIDHLTATLRARDRGANVDGYLVWSLLDNFEWAAGYGPRFGIIRVDYESFHRTPKLSAHWFAEACSTRTVPALATVDLSA

SEQ ID NO: 2572 - protein, 158 aa, Xanthomonas axonopodis pv. citri str. 306
MNIVRYPQFPTHALQNEIKHVFDRFFEQNGDTDESAVVTAQWVPRVDIKEEVNHFVLYADLPGIDPSQIEVQMDKGILSIRGERKSESSTETERFSRIERRYGSFHRRFALPDSADADGITAAGRNGVLEIRIPKRPAATPRRIQVGNGQNTSGSTVQ

SEQ ID NO: 2573 - protein, 200 aa, Triticum aestivum
  misc_feature (197)..(197): Xaa can be any naturally occurring amino acid
MVSADAARNIVGVIGNVISFGLFLCHAPMFRRICKAKDVEEYKPDPYLATLLTCMLWVFYGLPIVHPNSILIVTVNGIGLVVQLVYLIIFFIYSTNNKRSKMLAVLGIEAAFMAAVVVGVLHGAHTHEMRSMIVGILCVICGSVQYASNLTVMVRVIRTESVEYMPFFLSLAIFLSGCCWMAYALIEFDLYVAIPNXLDA

SEQ ID NO: 2574 - protein, 225 aa, Zea mays
REMCGGKYSDAASVACAEVTRAIANITSAVNREHVLEPACPDDDDDELFGPKTTMAETDGGTSRRLMLQSADYFLPAGFKCRRASYVLSRVWANDETVQESLGVRKGTIGAWKRCNQDILYNQNVQSVVPYHSRLAAKGYRALIYSGDHDRIVPFVGTQAWIRYLNLTVVDDWRPWYVGGQVAGFTRNSGNLIYATVKGAGHTAPEYKPTECQTMFRKWVSRDPL

SEQ ID NO: 2575 - protein, 231 aa, Glycine max
MVNVMEWQKQRWQPNGNAEMMYVKVMTDEQLETLRKQIAVYATICEQLIEMHKNISSHQDLAGIRLGNMYCDPLLGSGGHKIASRQRWTPSAMQLQILERIFDQGTGTPTKEKIKEITNELSQHGQISETNVYNWFQNRRARSKRKQQNVAPSANAESEVETEVDSKDKKTKPDEFQSPPSVSAVPADDNLGFQNHGSLQYLNPDDYLTGKMEAPENYDLYQPAGDFNMAG

SEQ ID NO: 2576 - protein, 232 aa, Thottea tomentosa
IPQAARFLFMKNKVRMICDCNTKPVKVYQDEKLPFDLTLCGSTLRAPHSCHLQYMRNMGSIASLVMAVVINEGEDDEDGSNEQQPQPTRKKLWGLVVCHNTTPRFVPFPLRYACEFLMQVFAIHVNKEFELENQIREKNILRTQTLLCDMLLRDSPMGIVSRSPNIMDLVKCDGAALVYQNKVYPLGLAPTESQINDIAQWLSECHMDSTGLSTDSLQDAGYPKALSLGDIV

SEQ ID NO: 2577 - protein, 348 aa, Triticum aestivum
  misc_feature (139)..(139): Xaa can be any naturally occurring amino acid
AYLGDIIEQVCTKKQAGTGPEFPGYLLDADLESDALGWQYISGSLPDSRELDHIDNPQLEGYKFDPHGEYVRRWLPELARLPTEWIHHPWDAPASVLQAAGVELGSNYPLPIVELDTAQVRLQEALSEMWQLEAASRAXAMDTGMEEGLGDSSEVPPIEFPQDLQMEVHWEPARVAPNVLTTAQRRQDQMVPTVTMTTSLNRVETEISADLGNSVDSRAEVPFRMHFEPRTEREEMIQSTGNAAGTNGIHHHNNFQQPQHRMRNIFAPSVSEASSSWTGRDGGVVPVWSPPAASGHSETYGADEADVSSRSYLDRHPQSHRIMNWHQLSQSLTTGRDVENSVQPNFIG

SEQ ID NO: 2578 - protein, 747 aa, Bacillus subtilis subsp. subtilis str. 168
MCGLAGIINLAAPRSQECTFHILKGMADAISYRGPDDEQYHIDSKVGFAFRRLSILDLVNGQQPFLNEDGSIVVMVNGEIYNYKELKASLHNHMFKTTSDCEVIVHLYEEKGIGFVDDIIGMFSIAIWDKNKNKVFLVRDRFGIKPLFYTELKHELIFASEIKSLFSHPHCPRQFNWKEALSDICLSGEAASNHKETTSFFVNIQNLDAGHYLEINLTTNERKTASYWSLQDILLRQGYRENLHPDDLIEGYRELLADSVHRCLQSDVEVGLFLSGGIDSAAVAHFAAEKQDLHTFTVLSQSTFTNEDAKYAHWLAKDLHLPNHQVLYQLGNDELLQPESYKHLLWICETPFCGPEQLYKFHLHKYAKAIRPNLKVMLTGQGSDEFNGGYSTTLSPAENPSWEGFIESVNTMEMNRLHRLQGNIFRVWEEHFGLSPINLSYLKSNDSSQADPWQSYVLTKYRDLQMYNCWHEDRIAAANHIENRVPFLDHRLVEWVCGIPDGLRKDLLWDKSVLRKSLTNELHTSYTHRPKVPFFYGKDVRYTHKMMFHLLKKNNYQLIEEAFSHSDASSIIQVEHIHAIMTYLEDDPEFTNFEFLLRLVNMGLLSKMTKETPSVQLDITSHLESITIKDWHSQEGDIASRLNISANKCEGQDILALNPGVTLLRPESDSEHCIYIAEEGFIQFIVSEEDVGAWLHILCDINGKDTLHTILDRHGVSLEEVAKYIQEAIEHNIILIKQKNLPEGAYR

SEQ ID NO: 2579 - protein, 932 aa, Clostridium thermocellum ATCC 27405
MPSDELDFCAFFDIEEHLYWQGDAMKSKRMIKQSTLSAIILAIFFFIAVMLIWSILYMNSCIRAEQNAERRRTEFKQLGIDLADASDYLTDEARKFAVTRKIVHLERYWEEINVTRTRDKVISRLQELDSPKEELELLAKAKKYSDALVETERRSMRLVLEALGVDESDMVPEVASFKLSEGDQRLSREDKLLKAIEIMYDARYDSDKKNIMDPIAKFQRIMNQRLESELEAARRGTAGATVLQIILAFVIILAIAVLIRILFTQVTYPIRDYILKLKDFSFDDEEFRLVPKGTVELNMLAENFNELYRSFHNELVRRKKAEETMKAARDEADKANRAKSEFLASMSHEIRTPINSIIGYQYLLKNSVLSPKQREYVENIGLAAKNLLAIINQILDFSKIEAGRMVLEEVDFNIDDVLNELMIIVGMEAKRKGIELRIKVDEDVPRFLKGDITRLKQVVMNLVSNGIKFTHEGYISIRVELVEKNEENACIKFSVTDTGIGISDEQKKLLFQAFTQGDASTSRKYGGTGLGLAICKRLVELMKGEINVESEVGKGSTFSFSLRLKIASCNENRNGKSKSVDTEEQYKNVKILLVEDSSVNLQMTKEILENMGIDTDTAQSGEEAVKKAESNEYELILMDIRMPGMDGYEATRRIRKLERGSMPIVALTADAVEGVAQKAKEAGMNGYLTKPLEPEKLLEVIRSMTNGGGKFKEEKSKSCAKAAEAENPYYEHKYETLDFDGAVNRLGGKRDKYIGILKSFVELHKDDGVKIRELAASGKRDELRRFLHSLKGSAANIGALRLKDLLARLEESCIPQNCEKNAKWMNDLEKEFERLIEEIMQYIRAFDSYKGSSPENHENNNVREDLEMLCKLLLTGDSEAKSFFEEKLAYLGNVLRPEDYHDLKKKISCYEFQKALAIVDKLKQDFSGKLTK

SEQ ID NO: 2580 - protein, 628 aa, Streptococcus mutans UA159
MNEREALRTFGTGENFHAQHYFGFHETEKNGVKGYIFRVWAPNAEDLHLIGDFTGWFDNPLQMDKNEAGVWEVFTDLPKEGHIYKYLVKRQGGQIVEKMDPFAIYLEERPGTGSLIRTIPEKKWKDGLWLGRRKRWGFFKRPVNIYEVHAGSWKQNEDGSPYSFEQLKDELVPYLVKMNYTHVEFMPLMAHPLGMSWGYQLMGFFAFEHTYGTPEQFQDFVEACHLNNIGVIVDWVPGHFTQNDDALAYFDGTPTFEYQDHDRAHNYRWGALNFDLGKNQVQSFLISSAKFWIDFYHIDGIRVDAVSNMLYLDYDEGPWQPNIEGNNRNLEGYYFLQRLNTVLKLAHPDVMMIAEESTATTKITGRREEGGLGFDYKWNMGWMNDILKFYEEDPIYRKYDFNLVTFSFMYLFSENFILPFSHDEVVHGKKSLMHKMWGDRYNQFAGLRNLYTYQICHPGKKLLFMGSEFGQFLEWKYDHALEWTNLEEEDGLNLKMQDFTSQLNQFYKDHKVLWQLDTSYDGLEIIDADNVDESVLSFIRKNEKGDLLVCVFNMVPVERKGFTIGVPVAGIYEEVWNTELEEFGGVWKEHNMTVKTQKNLWKEYENTLSFTLPALGASIWKIKRRLRK

SEQ ID NO: 2581 - protein, 271 aa, Lactobacillus acidophilus NCFM
MCFNKSVILNNGEKIPQIQLGTWLINNDEVNKVVRQAVNIGYRGFDTAKDYGNESGVGKGIWNSDIERSDIFLTTKLPTAVKDYEGTKKAIDAALDKFGLEYIDLLLIHSPQPWIEVNRTNDRHFKGNLENWRAMEEAVKAGKVRSIGVSNFLQEDIENIVNNGTITPAVNQIEVHIGKVPVELMDYCKKLGIKIEAYSPLSHGKLLNDDQIIAYAKKYNVTPAQLMLAFDMQLGCIVIPKSDNVTEMKENLNINFKISDEDIAKLIKIKE

SEQ ID NO: 2582 - protein, 233 aa, Haemophilus influenzae R2846
MLFALPALNDNYIWLYQRENLPLIIVDLPETDKLFTWLDKQNVTVEAVLLTHEHDDHTQGVSAFKKRYPTVPIYGPQECEKKGATQIVNEGKILTTHYQIDVIPTGGHTKQHVSFLVDNHLFCGDALFSAGCGRVFTGNYAQMFEGLQRLNALPDETIVCPAHEYTLGNLAFAETVLVEKSAVEKQRIFVETQRAENKPSLPTTLKLEREINPFLQAKTLEEFTALRKAKDMF

SEQ ID NO: 2583 - protein, 286 aa, Mycobacterium avium subsp. paratuberculosis K-10
MTVIDEIYSSSSAIPTVALNDEAKKPVLGLGVAKLSDEETESSVLAALEAGCRLIDTAASYGNEAAVGRAIAASGIPREELFVTTKLGTSRQGFHSAQESCKESLDRLGLDYLDLYLIHWPAPTLGKYVESFEGMIEARERGHVRSIGVSNFTEDLLATVIEETNEVPAVNQVELHPRLNQAELRQVHAQHDVTTQSYSPLGVGRLIEEPTVTTIAAEYGRTPAQVLVRWNLQLDNVVVSRSSKPERVAENLDVFDFTLEPEHMEAIEGLHDGTRVLHDPMTFMGT

SEQ ID NO: 2584 - protein, 399 aa, Polaromonas sp. JS666
MIFFDAAIDWLAHGLVAASWWQIVLYTLVTTHITIASVTIYLHRHQAHRAMDLHALPAHFFRFWLWLGTGQVTKEWVSVHRKHHAKCETMEDPHSPQAHGIETVFWKGAELYRAETKNKETLTKYGHGTPNDWLERNVYTRYSWQGVGLMMILNLALFGAAGLAVWAVQMVWIPVTAAGIINGIGHYWGYRNFEAPDASTNVSPWGIMIGGEELHNNHHTYPTSAKFSVKPYEFDIGWVYIRALEKVGLASVKKVPPKLQLGAIQPVADEKTLEALIAHRYEVMAGFARELRRAGKAEIEVLKARKADVSVLRTANRWLHRDDDKVPAAAKPQLAQARAEHPVLDKMVTMREELRQMWLSTSASREQLATDLQAWCHRAEESGIAALREFSMKLRAARA

SEQ ID NO: 2585 - protein, 468 aa, Streptococcus pyogenes M1 GAS
MTKTLPKDFIFGGATAAYQAEGATHTDGKGPVAWDKYLEDNYWYTAEPASDFYNRYPVDLKLSEEFGVNGIRISIAWSRIFPTGKGEVNPKGVEYYHNLFAECHKRHVEPFVTLHHFDTPEALHSDGDFLNRENIEHFVNYAEFCFKEFSEVNYWTTFNEIGPIGDGQYLVGKFPPGIQYDLAKVFQSHHNMMVSHARAVKLFKDSGYSGEIGVVHALPTKYPFDANNPDDVRAAELEDIIHNKFILDATYLGKYSDKTMEGVNHILEVNGGELDLREEDFAALDAAKDLNDFLGINYYMSDWMQAFDGETEIIHNGKGEKGSSKYQIKGVGRRKAPVDVPKTDWDWIIFPQGLYDQIMRVKADYPNYKKIYITENGLGYKDEFVDNTVYDGGRIDYVKKHLEVISDAISDGANVKGYFMWSLMDVFSWSNGYEKRYGLFYVDFETQERYPKKSAYWYKKVAETQVIE

SEQ ID NO: 2586 - protein, 236 aa, Oryza sativa
  misc_feature (11)..(11): Xaa can be any naturally occurring amino acid
MGRGKIEIKRXENTTNRQVTFCKRRNGLLKKAYELSVLCDAEVALIVFSSRGRLYEYANNSVKSTVERYKKANSDTSNSGTVAEVNAQHYQQESSKLRQQISSLQNANSRTIVGDSINTMSLRDLKQVENRLEKGIAKIRARKNELLYAEVEYMQKREVELQNDNMYLRSKVVENERGQQPLNMMGAASTSEYDHMVNNPYDSRNFLQVNIMQQPQHYAHQLQPTTLQLGQQPAFN

SEQ ID NO: 2587 - protein, 527 aa, Rubrivivax gelatinosus PM1
MKSRFLATMSHEIRTPLNGVVGAAELLQKNGLSEREKAQMVSLLTQSSRALMALINDILDWSKLDVGKVMIERHPINLRALVFESNELFAAQAANKDIELTSSCNPDVPRTLHGDPTRIRQIVNNLVSNAVKFTERGGVHIHLSIDGIDPSERHQEGDPRTVRIEVSDTGIGISPEKLGKLFKAFSQGDVSVTRNFGGTGLGLVISQELANLMGGRIEVSSTPGVGSVFTALLPMIATDQVASTGVPRARPDIILAATNVGLRRHIRSLLSDLRIDPTTVGHIPDESELSECRLLLVDAPMLAGITNLSACLDRHSAAGRRVAVLTPLNCDAVVGVLPEAVLLYKPVRLTSIRALVDAVDGVSTSTGEQRTGSDGAQSTPPLRGLRVLIAEDNQVNQVVFQAMLAQAEADCSIARNGQEALDALAEHKFDVVLMDVQMPVLDGISAVRELRARESSNPGSGRTTVVAMTANTEPQDIAQCRSAGMDDFLPKPFSIGQLTSVLARHAHRSPAAAGQALATGAAASTLK

SEQ ID NO: 2588 - protein, 259 aa, Pseudomonas putida KT2440
MIQIEALPAFSDNYIWLLQDTAKRRCAVVDPGDAGPVERWLAANPEWVLSDILVTHHHNDHVGGVERLRQLTGARVCGPANERIPGRDLALDEGDRVDVLGVTFQVMAVPGHTLGHIAFFSDQPATPILFSGDTLFAAGCGRMFEGTPEQMQPALARLAALPEQTQVYCAHEYTLSNLRFAKAVEPTNPHVQQRFEDVTRLRAENRISLPSTIGLERLTNPFLRTAETLVKQKADEWKGHSNNSHVAVFAALRSWKDTF

SEQ ID NO: 2589 - protein, 685 aa, Idiomarina loihiensis L2TR
MKHWAVKKCALALMCVVPVAVAIPPEHKISELPELEQEAQHDTASERIASYFTRYHFSSLTLDNELSEQIHERYFDLLDYSKMFLLKEDIEAAQEYRHLFDDMLKRGELDVAYDIYQKSLERRFQRYEYALSILDEDKPMDFSVEGDKYYYDREDADWAESKEELDELWQNRVKYDALNLKLAGKEWPEIVETLGKRYNSALNRLTKSKSEDVFQTVMNAFARSVEPHTSYLSPSNSERFQQNMNLELEGIGAVLQSEYDYTIIRSLVPGGPADKTDELSPEDKIIAVGQGSGEDEEEFVDIIGMRLDDVVELIKGPKGTTVRLQVLKASQGAGGTPSEVEIVRDKVKLEDRAAKAEVKEFEEGPYKGRRLGVIEIPGFYNNLTADVKKLIEDLESQKVEGLVIDLRGNGGGALTEAIGLSGLFIDKGPVVQVSDGRGRVDVSEDKDGKTYYDGPLFVMVDRYSASASEIFAAAMQDYERALIIGENTFGKGTVQQHRGLARRFDFYDKPLGSVQYTIAKFYRIDGGSTQLRGVQPDVVFPSFVEASDWGESKEDNALPWDKIDKASYSPVGEINSAEVKDLQQQLNQRIEDDPEFSYIFEEIERYREEKDKTWVSLVLTEREKKQEQQKAKQLERVNERLKRAGKEPIENVEDAPDEFTEVDPFLDQAALVAFDFIDKNQLASN

SEQ ID NO: 2590 - protein, 489 aa, Synechocystis sp. PCC 6803
MKHVPPTVLVWFRNDLRLHDHEPLHRALKSGLAITAVYCYDPRQFAQTHQGFAKTGPWRSNFLQQSVQNLAESLQKVGNKLLVTTGLPEQVIPQIAKQINAKTIYYHREVTQEELDVERNLVKQLTILGIEAKGYWGSTLCHPEDLPFSIQDLPDLFTKFRKDIEKKKISIRPCFFAPSQLLPSPNIKLELTAPPPEFFPQINFDHRSVLAFQGGETAGLARLQDYFWHGDRLKDYKETRNGMVGADYSSKFSPWLALGCLSPRFIYQEVKRYEQERVSNDSTHWLIFELLWRDFFRFVAQKYGNKLFNRGGLLNKNFPWQEDQVRFELWRSGQTGYPLVDANMRELNLTGFMSNRGRQNVASFLCKNLGIDWRWGAEWFESCLIDYDVCSNWGNWNYTAGIGNDARDFRYFNIPKQSQQYDPQGTYLRHWLPELKNLPGDKIHQPWLLSATEQKQWGVQLGVDYPRPCVNFHQSVEARRKIEQMGVIA

SEQ ID NO: 2591 - protein, 424 aa, Arabidopsis thaliana
MASQGCVDWQFSGSDAAEKAAQASLGTYSSEIFSLCDPQGKPILPPLSEEAETSHTAEKAVVKAVLCGTGNAYAPSIGLPVAKRAVAEYLNRDLDNKLTGDDVYMTVGCKQAIELAVSILAKPKANILLPRPGFPWDMVHSIYKHLEVRRYEFIPERDFEIDFNSVREMVDENTFAIFIINPHNPNGNYYTEAHLKQLATLARELGIMVVSDEVYRWSVFGSNPFVPMGKFSSIVPVITLGSISKGWIVPGWRTGWLALHDLNGVFRSTKVLKAAKEFLEITSKPPTVIQAAIPTILEKTPQDFFEKRGIFLKDKVDFGYSKLKNIPTLTCYMKPESCTFLWTKLDPLHFVDIEDDHDFCRKLAKEENLVVLPGIAFGQNNWLRHSIDMETPRLEDAFERLKSFCERHSVIVEASSLKDVNGVN

SEQ ID NO: 2592 - protein, 502 aa, Solanum melongena
MDLSKYRPSSAYDTPFLTTNAGGPVYNNVSSLTVGPRGPVLLEDYHLIEKLATFDRERIPERVVHARGASAKGFFEVTHDVSHLTCADFLRAPGVQTPVICRFSTVVHERGSPESIRDIRGFAVKFYTREGNFDLVGNNVPVFFNRDAKSFPDTIRALKPNPKSHIQENWRILDFFSFLPESLHTFAFFYDDVCLPINYRHMEGFGVHAYQLINKAGKAHYVKFHWKPTCGVKSMTEEEAIRVGGTNHSHATKDLYDSIAAGNYPEWKLFIQIMDPEDVDKFDFDPLDVTKTWPEDILPLMPVGRLVLNRNIDNFFAENEQLAFNPGHIVPGVYYSEDKLLQTRIFAYADTQRHRIGPNYMQLPVNAPKCAHHNNHRDGAMNFMHRDEEVDYLPSRFDPCRPAEQYPIPSCVLTGRREKCVIPKENNFKQAGERYRTWEPDRQDRYINKWVESLSDPRVTHEIRSIWISYLSQADKSCGQKVASRLLSSLQCEEDEENSWKC

SEQ ID NO: 2593 - protein, 434 aa, Chromobacterium violaceum ATCC 12472
MKQPHRQRKTVPSGGRPETETAAAMQPVHKSQKLANVCYDIRGPVLEHAKRMEDEGHRIIKLNIGNPAPFGFFAPDEIIEDVIVNLPAASGYSDSKGLFAARKAIMHYAQQKHLPNVAMDDIIVGNGVSELIVMAMQALLDNGDEVLVPAPDYPLWTAAVSLAGGKAVHYLCDEEQGWFPSIDDIRAKITPTTRAIVIINPNNPTGAVYPPALLQQIVDVARQHQLIIYADEIYDKVLYDAVRHTSIASLAPDLFVVTLNGLSKNYRACGYRAGWMILSGEKKHAKDYIEGLNMLASMRLCANVPSQYAIQTALGGYQSIDDLVAPGGRLARQRDLAHKLLTEIPGVSCVKPQGALYLFPRLDPKVYPIADDQQFILELLQQEKVLLVQGSGFNWIAPDHFRVVFLPNSDDLIEAIGRIARFLESYRKRHGAAE

SEQ ID NO: 2594 - protein, 182 aa, Brassica rapa subsp. pekinensis
VPGVPSIDKITFVLLRLDDGVVLDERVFVHDFVNLAYNMGVFMYDDLLAILSLRYQKIHLLQIRDSGHLVDARAIGYFCREDDELFLNSSSQAMMMTTTQDKNKQQNREDDGDNGLNHTQLNADNNSFLSGIKQRLLSFVFREIWNEESDNTVRVQSLKKKFYSHFQDYVDLIIWKVQFLDR

SEQ ID NO: 2595 - protein, 488 aa, Arabidopsis thaliana
MGSKLKLYPLLNHSSVFHPDSRYQSAPTMEEEQQQLRVLFAKYEMGRLLGKGTFGKVYYGKEITTGESVAIKIINKDQVKREGMMEQIKREISIMRLVRHPNIVELKEVMATKTKIFFIMEYVKGGELFSKIVKGKLKEDSARKYFQQLISAVDFCHSRGVSHRDLKPENLLVDENGDLKVSDFGLSALPEQILQDGLLHTQCGTPAYVAPEVLRKKGYDGAKGDIWSCGIILYVLLAGFLPFQDENLMKMYRKIFKSEFEYPPWFSPESKRLISKLLVVDPNKRISIPAIMRTPWFRKNINSPIEFKIDELEIQNVEDETPTTTATTATTTTTPVSPKFFNAFEFISSMSSGFDLSSLFESKRKLRSMFTSRWSASEIMGKLEGIGKEMNMKVKRTKDFKVKLFGKTEGRKGQIAVTAEVFEVAPEVAVVELCKSAGDTLEYNRLYEEHVRPALEEIVWSWHGDNHNNNIVKSNGNYVSDENSGSDC

SEQ ID NO: 2596 - protein, 720 aa, Bdellovibrio bacteriovorus HD100
MKQRRTAECVYLKKALKCFDPGVENTVGLENQVNPFGKLVHTSLMVQATLGFDWSQTELGPIENWDFGLINSLRIVFSCPVGMYCTWGPQRRVFYNDAYIPILKHRHPHALGSPLHEVWPEVWDQVHAIASKVESGGFVLESDVQFDIEVDGKPQGNYYTYGNSPLFNAEGKVSGMLCTILDTTTSVKRNQAAEESLARSNQEVRAERRKLRSILEKAPIAMAVLDGPEHRFSMTNDSYRDLFLGDCDVTGRRVKDVFPKTEKIGLIALLDEVYRTGKVFEAKNYEIHDRRADGVEFSVFVDVVYQPIYDFNDEIEGLVLAANNVTEQVMAERALQAAKSAAENANQAKSAFLANMSHEIRTPLGVILGFAEIIGTQDLDESERKNYFEIIHRNGLSLTRIIDDILDLSKIEAGKFEIEKSPVKLKKLLQEVLTMFFDQASRKNIYLNYELGEIAPLIILSDVVRIRQVLVNLIGNAIKFTMKGSVKVSCRAEQVTATRKKIVFSIEDTGIGMTQEQAERLFQPFTQADATSTRQFGGTGLGLALSRNLARALGGDVSIVRCEPRQGCTFEFSFQAEDVSELSVAGQAESAGAVEQKPLAGFKVLAVDDSRDNRELISTVLSSWGLDVTEAESGEEALTQALKEHFDLVLMDIQMPGLDGFGTLAGLRKQGFQGPVIALTAHAMKEDKDRSFAAGFLDHLTKPINSKVLLQAIQSHLKHS

SEQ ID NO: 2597 - protein, 476 aa, Oryza sativa
MAMETTSQDSQVIMGRYKLGRLLGRGTFAKVYKAYKLATGEAVAIKVFDKEAVQRSGTVEQVKREVDVMRRVHHRHVIRLHEVMATRSRIYFVMEYASGGELFTRLSRSPRFPEPVARRYFQQLITAVEFCHSRGVYHRDLKPENLLLDARGDLKVTDFGLSALDGGLRGDGLLHTTCGTPAYVAPEVLLKRGYDGAKADIWSCGVILFVLLAGYLPFNETNLVILYRNITESNYRCPPWFSVEARKLLARLLDPNPKTRITISKIMDRPWFQQATCPLGDMSLVASAPSVLLARKEASQQHDDEEDDGFAREKKKRSNVIMSSPVIDVRPSSMNAFDIISRSRGLDLSKMFDAEERRSEARFSTRETTTAIVSKLEEIAEAGRFSFKLKEKGRVELEGSQDGRKGALAIEAEIFKVAPEVHVVEVRKTGGDSPDFRDFYKQELKPSLGDMVWAWQGGDSPPLVPAAGRRPITKRS

SEQ ID NO: 2598 - protein, 154 aa, Castanea sativa
MALSLFGGRRSNVFDPFSLDIWDPFEGFSAVANVPPSARETTAFATARIDWKETPEAHIFKADLPGLKKEEVKVEVEDGNVLQISGERSKEHEEKNDKWHRVERSCGKFLRRFRLPENAKVEQVKANMENGVLTVIVPKEEQKKTEVKSIEISG

SEQ ID NO: 2599 - protein, 154 aa, Glycine max
KDAREGDDNLSTVHHELHFTVQECIDALGEVIYHIETYDVTTIRASTPMFLMSRKIKSLGVKMVISGEGSDEIFGGYLYFHKAPNKKEFHEETCRKIKALHLYDCLRANKATSAWGVEARVPFLDKSFISVAMDIDPQWKMIKRDSVQIEKWVT

SEQ ID NO: 2600 - protein, 584 aa, Bordetella pertussis Tohama I
MNEPAPLGATVCAPGKIRFRLWAPSAPPALALEIEGRAPIALRPGPDGYAQAIVDGAPGLRYRYRLAADCVVPDPASRLQDGDVHGHSVVVGPDRYPWRHTGWRGRPWQDSVIYEAHAGLCGGYAGLRRRLPEVARLGVTLLELMPIADFPGPRNWGYDGVLPYAPDTAYGTPDELKALIDAAHGLEMGVMLDVVYNHFGPDGNYLHRYAADFFDARADTPWGAAIDYRQQAVQRYFIDNALYWLRKYRFDGLRLDAVHAMGRTDWLAGLAREARAACPDRRVHLVVENDANQASLLEQGFDAQWNDDAHHVLHHLLTGERQGYYADYAQAPAALLARALGEGYVYQGQAAPTRGGRARGEPSAHLPPWAFVLFLHNHDQVGNRADGLRLTSLLAPGSPALRAAIALQLLAPHIPLLFMGEEYGSTAPFFYFTSHGPELAAAVRAGRAREFAASMHDCDPPPDPNDPDTYRRSCPWPPPGAERQAWFEYYRELLRLRARLLGERLTGARADGAAALGPAAVRAAWRLGDGARLTLYANLLPGSVIVPAPPAGQLAYATLAGAGQDLVAGVLRGGCALALWEPAP

SEQ ID NO: 2601 - protein, 280 aa, Listeria monocytogenes str. 4b H7858
MTLSFSDTYRLNNGIEMPRHGFGVYKLTDEARMRTALETAVDVGYRLFDTASFYHNEKELGDFFASSGLKRDEFFVTTKMWNTEQGYDETLRAFEKSQKKLQLDKIDLYLVHWPKQDTFFDTWRAVEKLYDEGLVRAIGVSNFEAHHLDRLRTSANVLPVVDQLETHPHFPNHLLHRYLEELHIVHQAWSPLGRGGVLQEQILIDLAEKHGKSPAQIVLRWHLQNNISIIPKSETPSRIRENAAIYDFELSEADMRQVERLNTGERVSHAPDVMYVRSEI

SEQ ID NO: 2602 - protein, 731 aa, Bordetella pertussis Tohama I
MMRDSPSIQGTLDAATQHALLAGRHADPFSVLGPHQAGAHTVVRVLAPGARTVMAVLPGGQRTPLLPMQPGLFENTVPGLQPGAPAAYRLCIEWEGGIQHTADPYAFGPVLDAAQLDHCAAGGWRYLAGLLGAHAASVDGCAGTRFALWAPNARRVAVVGDFNGWDGRRHAMRLRYPAGVWELFLPDVGPGARYKFQVLGADGHTVLKADPLARQAEAPPATASIVPDERPFAWTDKAWMEQRAARQRCDAPISIYEVHAGSWFDDAGAPRWQNLAARLPEYARSLGFTHIELLPVMAHPFGGSWGYQPLGLFAPAAAHGAPADFAHFVDRCHEAGLGVILDWVPAHFPDDAHGLARLDGTPLYEHADPREGRHPDWNTLIYNYGRREVRTFLIASAIHWLRHYHVDGLRVDAVASMLYRDYSRPAGQWIPNRHGRRENLEAIDFLRELNAAVGVQCPGAITVAEESTAWPGVTAPVANGGLGFDYKWNMGWMHDTLRYMRRDPIHRRHHHHDLSFGMVYAYAERFVLPLSHDEVVHGKGSLLGKMPGERAAQLAQLRLYYAFMWAHPGKKLLFMGGEFGQQGEWNHDAMLQWSLLDDPAHRGLQRLVADLNHVYATLPELHCRDADPSGFAWIVGDDADNSVLAFARVDASHCLVAVCNFTPVPRPGYRFGVPHAGDWRVRVDTGATRYGGAGGGPPICLRSEPIPAHGHPQSLVLDLPGFTALYLRHSE

SEQ ID NO: 2603 - protein, 394 aa, Pseudomonas putida KT2440
MWYNGLLDLSAWQLVGITLLMTHVTIVSVTVYLHRYSAHRALELNGALKHFFRFWLWLTTAQNTREWTAVHRKHHAKCETPDDPHSPVYKGLGTVLRKGAELYREEARNPETLRIYGKNCPDDWIERNLYSRYKLGGIALMAVIDLLLFGTIGITIWAVQMMWIPFWAAGVVNGLGHALGYRNFECRDAATNLVPWGIVIGGEELHNNHHTYPNSAKLSVKRWEFDMGWAWIRLFCLLRLAKVQRVAPIAHRVAGKASLDMDTAMAILNNRFQIMAQYRKLVIGPLVKQELARVDASVRHRFRRAKRLLSRETSLLEDRHHVRIESMLAHSQALKTIYEKRLALQQIWARTSANGHDMLAAMKDWVHEAETSGIQALRDFAAQLKTYSLRPTGA

SEQ ID NO: 2604 - protein, 478 aa, Buchnera aphidicola str. Bp (Baizongia pistaciae)
MNVNLMWFRNDLRLSDNSALHFSCRNNASTVLALFIATPKQWERHCLAPKKKMLIYKNIVALKKKITELGIIFYYYESTDYLESTNYIIEFCKIHKVTSIFFNLEYEFYERQRDKIIKKKLKKNNIIINCFHDSVLITPGSIKNSYGKMYKKFSYFKYKCIKQLQLNIPSCFPKPQNKNLHDHYSLDFTIPIFHTYLEKFDANIFPIGEDIVYEKLKFFIKYAFNKYNFDQEIFELNSTSMLSAHLSIGVISPRQCVTLLFKEYPDIIHKLEECKWINELLWREFYQHLLYFYPNIGQNQSLYHWENRIKWDNNLYYLNLWKQGNTGYPIIDAGMRQLKQLGWISNRLRMITASFLVKNLLIDWRKGEEYFMSQLIDGDFASNNGNWQWIASVGTDSMPYFRIFNPMLQSKKFDINAKFIRKYIPELSNVSTYNIHNPCDNNKTNKIHSKYPQPIINYYHSKKKTLLVFKHAKCSNKL

SEQ ID NO: 2605 - protein, 170 aa, Triticum aestivum
  misc_feature (89)..(89): Xaa can be any naturally occurring amino acid
RIIYAARGIFNRFIPDVHIDKDHRSGSAGGRSPGYGVTLVAETTTGCLLSVDVTVSCPIVDEINEESEKPELTSPEDLGVQAASMLLEXVAQGGVVDSTHHGLLFILCALCPPDVSKVPVGQLTPYGIETLRNIRDFLDVKFIIKPDPNSNTVTLKCVGAGVKNLARKIS

SEQ ID NO: 2606 - protein, 155 aa, Brassica napus
QTDILYDSGKSLNPAVDLGQIEGAFVQGLGFFMLEEYITDSEGLRLTDSTWTYKIPTVDTIPRQFNVEILNSGRHEKRVLSSKASGEPPLLLAASVHCATREAVKEARKQLRMWKGVNDSELMFQLPVPATMPVVKELCGLDIVESYLEWPPSVN

SEQ ID NO: 2607 - protein, 353 aa, Burkholderia fungorum LB400
MPTLFDPLQIGDITLPNRIIMAPLTRQRAGEIRVPNALMAKYYAERATAGLIISEATSVTPQGVGYADTPGIWSQEQVEGWKLVTSAVHAAGGRIFLQLWHVGRISDPLFLNGELPVAPSAIAAQGHVSLVRPERAYVTPRALELDEIAGVVEAFRKGAENAKAAGFDGVEVHGANGYLLDQFLQDSTNKRTDAYGGPIENRARLLLEVTDACIGVWGANRVGVHLAPRRDSHTMGDSDPAGTFGYVARELGKRKIAFIAAREALGDDRLGPQLKKAFGGPYIANEKFTTETAQQVLDAGEADAVAWGQLFIANPDLVRRFATNAPLNKPNPATYYARGETGYVDYPTLETVE

SEQ ID NO: 2608 - protein, 256 aa, Arabidopsis thaliana
MLFPHERKKEKERSQGFYLVTRLRIRMGRGKIEIKRIENSTNRQVTFCKRRNGLLKKAYELSVLCDAEVALIVFSTRGRLYEYANNNIRSTIERYKKACSDSTNTSTVQEINAAYYQQESAKLRQQIQTIQNSNRNLMGDSLSSLSVKELKQVENRLEKAISRIRSKKHELLLVEIENAQKREIELDNENIYLRTKVAEVERYQQHHHQMVSGSEINAIEALASRNYFAHSIMTAGSGSGNGGSYSDPDKKILHLG

SEQ ID NO: 2609 - protein, 592 aa, Bacillus anthracis str. 'Ames Ancestor'
MAETLAKRGPDDNKVWIKGNVAFGHKRLIVVDPEGGKQPMTCLKDEANYAICYNGELYNTEDIRKELLRRGYTFKGHSDTEVLLASYIEWKEECVDHLNGIYAFAVWDEQKEQVFIARDRLGVKPLFYKYDSGRLLFGSELKAILAHPDVKAEVTLEGLSEIFGLGPSRTPGHGIYTGIKELRPGHAMTFSKNGLCIWRYWNVESKKHEDSFEETVEKTRFLLQDAITRQLVSDVPLCTFLSGGVDSSAITAIAAKEYEKSGKGQLHTYSVDYEDNDKYFKANAFQPNSDAPFIHLMTETFQTIHHRCVISNEQLAQYLTEAVLVRDLPGMADIDSSLLWFCREIKQDFVVGLSGECADEIFGGYPWFYREDDLQSSAFPWMRSTEAREQLLKKEWRNKLNLQQYVQQRYEESIQEVPILDGESPLEAKRRQLFYLNMVWFMTTLLDRKDRMSMGASLEVRVPFADHRLVEYAWNIPWEMKMYKNREKGLLRKALEGLLPNDILYRKKSPYPKTHNPHYTKAVTVWIQDLLTDKGSILHELFDKEQLSGLIESGGSAFQTPWYGQLMTGPQLLAHLAQIHVWFKEYGVNIKE

SEQ ID NO: 2610 - protein, 678 aa, Ralstonia eutropha JMP134
MQLNQLTLRNRIVSTAHAEVYAEPGGLPGDRYIRYYEEKAKGGVGLAICGGSSPVSIDSPQGWWKSVNLSTDKIIDPLSRLAETMHRHGAKIMIQATHMGRRSAFHGEHWPHLMTPSGVREPVHRGNAKIIEVEEIRRIIADFAAAAKRVKDAGMDGIEISAAHQHLIDQFWSPRTNFRADEWGGSLENRMRFGVEVLQAVREVVGKDFCVGLRMCGDEFHEDGLDHEQLKEIAQAMSESGLVDYIGVVGSGADTHNTLANCMPPMALPPEPFVHLAAGIKSVIKVPLMHAQSIRDAGQAERLLANGMVDLVGMTRAQIADPHMVIKIRDGREDEIKQCVGANYCIDRQYNGLDVLCVQNAATSREATMPHIIEKSRGPKRKVVVVGAGPAGLEAARVARSRGHDVVLFEKNTEVGGQILLAAKAPQREQMQGIVRWFDMETKRLGVDRRLGVEADAKMIMAEKPDIIVLATGGRAFSDQVPGWAVAEGLAVSSWDVLAGRVEAKENVLVYDGVSTHAGAGVADYLASRGAKVEIVTPDVKVADDCGGTTFPIFYRRLYAQGVIHTPNYWLDRVYEEGGKKIAVLRNEYTEELEERAVDQVVIENGSTPNDALYWKLKPESLNRGQVDVHKLFASEPQPSLSETLGNGRFLLFRVGDCISMHNIHGAIYDALRLVKDF

SEQ ID NO: 2611 - protein, 488 aa, Bacillus anthracis str. 'Ames Ancestor'
MNPNNRLTTNQGAPVGDNQNSRTAGRRGPVLLEDYHLVEKLAHFDRERIPERVVHARGAGAHGVFVTKNSMKKYTKAAFLQNEGTETPVFVRFSTVIHGQGSPETARDPRGFAVKFYTEEGNYDIVGNHLPVFFIRDAIKFPDMVHSLKPAPDTNIQTPDRYWDFMTLSPESTHMMTWVFSDYGTPASYREMEGFGVHSFKWINAEGKIVYIKYHWKPQQGVRNLSAKEVQEVQGKDFNHATRDLFDAIEKGNYPKWDLHVQVMQLEETDSLDFDPLDPTKVWPEDRFPLMEVGTMTLNRNPKNFFAEVEQVAFSPSATVNGIEPSEDKLLQGRLFSYPDTQRYRLGANYLQIPVNCPYAAVHNQQRDGAMQINQNPSTINYEPSRHAENPVEDPAYRDSTMKVEGYVSREKIDKPNDFKQAGERYRSFSKEEQDNLIANLTSDLKDVNERTKLLAVCNFFRADQEYGMRLAQALNVDITQYVGNAPK

SEQ ID NO: 2612 - protein, 831 aa, Arabidopsis thaliana
MSEPKVRRWVGKYEVGRLIGECNFGKLRSAVDTETGDPVALMILDKDKVLKHKMAEQIKREISIMKLINHPNVVQLYEVLASKAKIYIVLEFISGGKLFDKIKNDGRMNEDEAQRYFQQLINAVDYCHSRGVYHRDLKPENLLLDAQENLKVAEFGLIALSQQAGGDGLRHTACGNPDYAAPEVLNDQGYDGAKADLWSCGVILFVLLAGYLPFEDSSLTTLYKKISSADFSCPPWLSSGVKNLIVRILDPNPMTRITIPEILEDVWFKKDYKPAVFEEKKEANLADVEAVFKDSEEGRVQLRSFPCVICSGGTTCGDVRSRTKLMNGLIERGRPQEAHSIFNTLIEEGHKPSLITYTTLVTALTRQKHFHSLLSLISKVEKNGLKPDTILFNAIINASSESGNLDQAMKIFEKMKESGCKPTASTFNTLIKGYGKIGKLEESSRLLDMMLRDEMLQPNDRTCNILVQAWCNQRKIEEAWNIVYKMQSYGVKPDVVTFNTLAKAYARIGSTCTAEDMIIPRMLHNKVKPNVRTCGTIVNGYCEEGKMEEALRFFYRMKELGVHPNLFVFNSLIKGFLNINDMDGVGEVVDLMEEFGVKPDVVTFSTLMNAWSSVGDMKRCEEIYTDMLEGGIDPDIHAFSILAKGYARAGEPEKAKQILNQMRKFGVRPNVVIYTQIISGWCSAGEMKKAMQVYKKMCGIVGLSPNLTTYETLIWGFGEAKQPWKAEELLKDMEGKNVVPTRKTMQLIADGWKSIGVSNSNDANTLGSSFSTSSKLNIPNNIASSRSPLFLKGMPEKPKLCIKSQFGLRQTLLVVLCRDQIGEAGRFCKFM

SEQ ID NO: 2613 - protein, 536 aa, Moorella thermoacetica ATCC 39073
MAKQVVFDREAREALEKGITKLTEAVRVTLGPRGRNVVLEKKFGAPTITNDGVTIAKEVELEDPLENVGALLVREVASKTNDVAGDGTTTACVLAQAIVREGMKNVAAGANPMFMKRGIEKAVAAVVENLKAQARPVETKDSISQVASISANDPQIGALVADAMEKVGKDGVITVEESKGMETAVDVVEGMQFDRGYISPYMVTDNERMEAVLEEPYILITDKKITAVADLVPVLERVVRTGKPLLIICEDMEGEALATLVVNKIRGTFTCVAVKAPAFGDRRKAMLQDIAILTGGQVITEEAGLKLENTTLDMLGQARQVRVGKEETTIVEGRGKEEAIEARIAQIRREYEESTSDYDREKLQERLAKLAGGVAVIKVGAATETEMKEKKMRIEDALAATRAAVEEGIVPGGGTALVRAQTALDGVQAQGDELTGVRLVYRALEEPMRQIAANAGVDGSVVVEKVRQSGDSMGFNAATREYVNLFEAGIVDPLKVTRSALENAASIASLVLTTESLIADIPEEEPPVPGGGMPPM

SEQ ID NO: 2614 - protein, 138 aa, Glycine max
MYRSSNIVARIFDRQICTPAPGTSVHHARRFYENLVPSYTVYEVECPDHSFRKFTDDGQYLISFSRNHQELIVYRPRWLSFSCKDEDCDKHDLPSRAKRFDSFFSQLYCVPLASCNELICKDFFLYMESNLSGLYATP

SEQ ID NO: 2615 - protein, 647 aa, Azoarcus sp. EbN1
MNMHYRDTGIPARKSPELEYGGLRPGRPSHHGPSHHMHRMPFGPERIDEHDESAGYRFRLWAPATKHVELCLVTPSGAKHYVPCAKSEGWHSCRVGEARAGDLYMFRLDGQLEVPDPASRFNPQDVHGPSLLVDPRQFGWEDGAWHGRPWHEAVIYELHVGTFTPEGRYDAAERRLAELARLGVTAIELMPLADFPGSRGWGYDGVLPFAPDAAYGSPDELKHFVQSAHRLGLMVLLDVVYNHFGPDGNYLQVYTPQFFTTEHATPWGGAIAFDGVASATVREFFIHNALYWLEEYRFDGLRLDAVQSIFDASPSHILEELSMWVRARAIHRQLHLVLEHVDNEASRLGVPQATGSYDAQWNDDFHHAAHVLLTGERDGYYADYADHPVRHLVRCLAEGFAYQGELSPFHGRPRGEPSAALPPTAFVNFLQNHDQVGNRAFGERLVTLAPPERLRAVVALQLLAPSPPLMFMGEEAGVTTPFLYFCDYQGELATAVREGRKREFAGFERFSTAGEGRHEIPDPCAEETFVASKLDWSARESEAGQQWLSFYRELLGLRHQFVVPRVPQIVAGACTTTMHGDEAFEIRWPCADGAALVLRANLSDTPVTFDRLEVAPFASLGPDADELRQFAPCSVRAYVVPSGRAGT

SEQ ID NO: 2616 - protein, 546 aa, Allochromatium vinosum
MSAKDVKFGGDARVRMMEGVNILANAVKVTLGPKGRNVVLEKSFGAPTVTKDGVSVAKEIELKDKFENMGAQMVKEVASKTSDIAGDGTTTATVLAQAMVREGLKAVAAGMNPMDLKRGMDKAVEAATEELKKLSKPCPRPMAIAQVGTISANSDDSIGTIIAEAMEKVGKEGVITVEDGTSLQNELDVVEGMQFDRGYLSPYFINNQQSQSAELDAPYILLYDKKISNIRDLLPVLEGVAKAGKPLLIIAEDVEGEALATLVVNTIRGIVKVCAVKAPGFGDRRKAMLQDIAILTGATVISEEVGLSLEKATLTDLGTAKRVQVGKDETTIIDGSGSEIDIKARCEQIRAQVEETSSDYDREKLQERLAKLAGGVAVIKVGAATEIEMKEKKARVEDALHATRAAVEEGIVPGGGVALVRAIAAVKDLKGANHDQDVGIAIARRAMEEPLRQIVANAGEEPSVILHKVAEGTGNFGYNAANGEYGDMVEMGILDPTKVTRSALQNSCSVAGLMITTEAMIADEPKDDAPAMPGGGMGDMGGMGMM

SEQ ID NO: 2617 - protein, 479 aa, Bacillus subtilis subsp. subtilis str. 168
MGNMPKDFLWGGALAAHQFEGGWNQGGKGPSVVDVMTAGAHGVPRKITDTIEENEFYPNHEAIDFYHRYKEDIALFAEMGLKCLRTSIGWSRIFPKGDEAEPNEAGLQFYDDVFDELLKHGIEPVITLSHFEMPLHLAREYGGFRNRKVVDFFVNFAEACFTRYKDKVKYWMTFNEINNQMDVNNPLFLWTNSGVVVGENENAKEVMYQTAHHELVASALAVAKGKDINPEFQIGAMVSHVPIYPFSSNPEDVMLAEEEMRQRYFFPDVQVRGYYPSYALKEFEREGYNITFEDGDDEILRNGTVDYLGFSYYMSTTVKSDVKNDNTGDIVNGGLPNGVENPYITSSDWGWAIDPTGLRYTLNRFYDRYQIPLFIVENGFGAVDTLEEDGKVHDPERIQYLKSHIEALKKAVTYDGVDLIGYTPWGIIDIVSFTTGEMKKRYGMIYVDRDNEGNGSMKRYKKDSFEWYKNVIQTNGEEL

SEQ ID NO: 2618 - protein, 542 aa, Cytophaga hutchinsonii
MAKQILFDRDAREKLKKGVDALADAVKVTLGPKGRNVILDKKFGSPAITKDGVSVAKDIELKDAIENMGAQLVKEVASKTADQAGDGTTTATVLTQAIFNAGLKNVAAGANPMDLKRGIDKAVSAIIADLKVQSKKISNSNEIAQVATISANNDHEIGKMIAHAMDKVGKDGVITVEEAKGTETEVKTVEGMQFDRGYLSPYFVTNTDKMEVELDRPYILIYDKKVSSMKELLPILEQVVQSGRPLLIIAEDVDGEALATLVVNKIRGALKIAAVKAPGFGDRRKAMLEDIAILTGGTVISEESGYKLENATLEYLGTAEKINIDKDNTTVVNGSGLKDNIVARVNQIKSQMENTTSDYDREKLQERLAKLSGGVAIMYIGAATEVEMKEKKDRVDDALHATRAAVEEGIVPGGGVALIRAGAALDNVAFHNEDEKTGIQIIRTAIESPLRAIVYNAGLEGSVIVQKVKEGTGDYGYNAREDRYEAMIAAGIIDPTKVTRLALENAASVASLLLTTECVVADEPEEKSAMPPMGGGGMGGMM

SEQ ID NO: 2619 - protein, 445 aa, Arabidopsis thaliana
MQRFCVCSPSSYRLNPITSMATGSGSLIWFRKGLRVHDNPALEYASKGSEFMYPVFVIDPHYMESDPSAFSPGSSRAGVNRIRFLLESLKDLDSSLKKLGSRLLVFKGEPGEVLVRCLQEWKVKRLCFEYDTDPYYQALDVKVKDYASSTGVEVFSPVSHTLFNPAHIIEKNGGKPPLSYQSFLKVAGEPSCAKSELVMSYSSLPPIGDIGNLGISEVPSLEELGYKDDEQADWTPFRGGESEALKRLTKSISDKAWVANFEKPKGDPSAFLKPATTVMSPYLKFGCLSSRYFYQCLQNIYKDVKKHTSPPVSLLGQLLWREFFYTTAFGTPNFDKMKGNRICKQIPWNEDHAMLAAWRDGKTGYPWIDAIMVQLLKWGWMHHLARHCVACFLTRGDLFIHWEQGRDVFERLLIDSDWAINNGNWMWLSCSSFFYQALSPFCFSF

SEQ ID NO: 2620 - protein, 155 aa, Ipomoea nil
MDLRLMGFDHPLFHHIMDYAGDDKSSNSSAPSRTFMLDAKAMAATPADVKEYPNSYVFIIDMPGLKSGDIKVQVDGDNVLSISGERKREAEEKEGAKYVRMERRVGKLMRKFVLPENANKEKITAVCQDGVLTVTVENVPPPEPKKPRTIEVKIG

SEQ ID NO: 2621 - protein, 187 aa, Triticum aestivum
MSTSSGAKEAPANNPGLQAEADPATKGYIMQQTMFRVKDPKVSLDFYSRVMGMSLLKRLDFAEMKFSLYFLGYEDLSAAPADPVQRTGWTFGQKATIELTHNWGTESDPEFKGYHNGNSDPRGFGHIGVTVDDVYKACERFERLGVEFVKKPDDGKMKGIAFIKDPDGYWIEIFDLKRIGEVTATAS

SEQ ID NO: 2622 - protein, 124 aa, Zea mays
  misc_feature (10)..(11): Xaa can be any naturally occurring amino acid
  misc_feature (115)..(115): Xaa can be any naturally occurring amino acid
HASSNTLDGXXGFDGTDTHYFHSGPRGHHWMWDSRLFNYGNWEVLRFLLSNARWWLEEYKFDGFRFDGVTSMMYTHHGLQVTFTGNFNEYFGFATDVDAVVYLMLVNDLIHGLYXEAVTIGEDV

SEQ ID NO: 2623 - protein, 167 aa, Ipomoea nil
MDLRNFGLSNFGLEPQLLSTIQDMLDFADDHDRAGRAPPEQPIRAYVRDAKAMAATPADVKEYPNSYVFIADMPGVKAAEIKVQVEDDNVLVVSGERTEREKDEKDGVKYLRMERRVGKFMRKFVLPENANVEAINAVYQDGVLQVTVEKLPPPEPKKPKTVEVKVA

SEQ ID NO: 2624 - protein, 126 aa, Clostridium perfringens str. 13
MASKMLHTCIRVKDLDKSLKFYKEALGLVETRRRDYPEYKFSLVYLSDKEDGYEVELTYNYDQEKPYNLGNGFSHIAVGVEDIEAERERHISLGYEVTPMKGLSDGAATYYFVTDPDGYKVEVIKL

SEQ ID NO: 2625 - protein, 124 aa, Zea mays
  misc_feature (48)..(48): Xaa can be any naturally occurring amino acid
  misc_feature (109)..(109): Xaa can be any naturally occurring amino acid
HASSNTLDGLNGFDGTDTHYFHSGPRGHHWMWDSRLFNYGNWEVLRFXLSNARWWLGEYKFDGFRFDGVTSMMYTHHGLQVTFTGNFNEYFGFATDVDAVVYLMLVNDXIHGLYPEAVTIGEDV

SEQ ID NO: 2626 - protein, 269 aa, Brassica napus
  misc_feature (93)..(93): Xaa can be any naturally occurring amino acid
MHIYIKERKLQSNKNKMGRGRVELKRIENKINRQVTFAKRRNGLLKKAYELSVLCDAEVALIIFSNRGKLYEFCSSYNMIKTLERYQKCSYGXSIEVNNKPAKELENSYREYLKLKGRYEGLQRQQRNLLGEDLGPLNSKELEQLERQLDGSLKPVRPVQTQYMLDQLSDLQSKEQMLLETNRALAIKLDDMIGVRSHHMGGGGGWEGNEQNVPYEHHHQAQSQGLFQPLECNPTLQIGYDNPVGSEQITTTTQAQAQPGNGYIPGWML

SEQ ID NO: 2627 - protein, 460 aa, Pediococcus pentosaceus ATCC 25745
MKGKLPDNFLWGNSTSSMQTEGGVHEGGKGPSVYDTYEATETTSNWDVAIDNYHHYEEDLDLMANQGMNCYRFQISWSRVNPTGDGDFNEEGIQYYDRLINDLLKRGIKPMICLYHFDMPLHLAEKYNGFMSRHVVDAFVRFGKKMVDCFSDRVKLWVTFNEQNLYSQTEAFHIAGYLKGDQTDEELQLIAHHVMTAHAQVANYVHETSDAQIGGMLAYVESYPKNCRPRDVYVARQIDEFLNRNLLEAWVHGHYSTEVTQYIKNHHFDIDFTEQDQIAFEKLKSDFISFSYYASNVVDSTKIPQGTMPNRYLDYGGVENPYLKATDWGWNIDPLGFRDVITKTYNEYGIPMFPIENGIGYREKFDGTEIQDDYRIEYHRDHIQAMIDAVVEDGVPVLGYLGWGLIDIPSSSGNMEKRYGMVYVNRGNHELRDMKRVPKKSYKWFKKVIETNGNDLENDL

SEQ ID NO: 2628 - protein, 492 aa, Oryza sativa (japonica cultivar-group)
MDPYKHRASSGSNSTFWTTNSGAPVWNNNSALTVGERGPILLEDYHLIEKLAQFDRERIPERVVHARGASAKGFFEVTHDISHLTCADFLRAPGVQTPVIVRFSTVVHERGSPETLRDPRGFAVKFYTREGNFDLVGNNMPGFFIRDGMKFPDMVHAFKPSPKTNMQENWRIVDFFSHHPESLHMFSFLFDDVGIPLNYRHMEGFGVNTYTLINKDGKPHLVKFHWKPTCGVKCLLDDEAVTVGGTCHSHATKDLTDSIAAGNYPEWKLYIQTIDPDHEDRFDFDPLDVTKTWPEDIIPLQPVGRMVLNKNIDNFFAENEQLAFCPAIIVPGIHYSDDKLLQTRIFSYADTQRHRLGPNYLMLPVNAPKCAYHNNHHDGSMNFMHRDEEVNYFPSRFDAARHAEKVPIPPRVLTGCREKCVIDKENNFQQAGERYRSFDPARQDRFLQRWVDALSDPRITHELRGIWISYWSQCDASLGQKLASRLNLKPNM

SEQ ID NO: 2629 - protein, 220 aa, Thermococcus litoralis
MKKVLITGFEPFGGDSKNPTEQIAKYFDRKQIGNAMVYGRVLPVSVKRATIELKRYLEEIKPEIVINLGLAPTYSNITVERIAVNIIDARIPDNDGYQPIDEKIEEDAPLAYMATLPVRAITKTLRDNGIPATISYSAGTYLCNYVMFKTLHFSKIEGYPLKAGFIHVPYTPDQVVNKFFLLGKNTPSMCLEAEIKAIELAVKVSLDYLEKDRDDIKIPL

SEQ ID NO: 2630 - protein, 632 aa, Archaeoglobus fulgidus DSM 4304
MKLFEPIEFGGMKVKNRIVLPAVGLNYTTPDGRVTDKLLRFYEERAKGGIGFAVVGIAKIEPHFFGGIAAHSDEFIPDLKKIADVFHKYDVKCALQLWHPGRYEISFDPNRQPVAPSPIPPPIFTKRTPKELTKEEILQIEEEFADAAVRAKKAGFDAVELIGSAGYLISQFFSPATNKRTDEYGGSLENRTRFAVEIIQKIKEKCGESYPVMIRIPGDEFIEGGNTVREMKQIAKILEDAGVVAINVMAGWHESRKPLTTMLVPRGGFAYLAAEIKSAVSVSVIASHRINDPIVAEKILQEGKADMVAMLRALIADPELPKKAKEGRFDEIRYCVACNQGCMDMVMQAQPVTCLVNPIVGREAEFENLKAEKPKKVVIVGGGPGGCMAAEMLARKGHKVVLFEKTDKLGGQLNLAAKSPLGYEFAEVGKYFMNVLPKLGVEVRYNTEADAGKVLAENPDVAVIAVGASPLIPPIPGVENAVTAFDVLAGRAEVGNSVVVIGGGGVGCDVAAELANEGKKVTIVEMLPKIGQDIGISTRWTVLMYLKEKGVEMLTNTKAVEIKPNAVVVEQNGERKELQCDTAVIAVGTKPNNGLYDELQGKVSELYKIGDCVKPRKALDATREGAELALKV

SEQ ID NO: 2631 - protein, 474 aa, Trichodesmium erythraeum IMS101
MSNLILFWHRRDLRISDNVGLTQASQEGQTVVGIFCLDENILKRDDIASARVTYMIGCLQHLQKRYKQIGSQLLIMSGKPIEAIPKLATFLEAKAVYWNLDVEPYSRKRDRQVKENLEAANIQVKTFWEQLLHSPEEIFTSTKKPYSVYTPFWKNWQGKKKSNPLNTPVLKGLTEDQLQYTKKIGVIDLPTAKQLGFNWDNKLILEPGETAALEKLEKFSNGAISSYQEQRNFPSLDGTSQLSVALKFGTIGIRTVWAKTQELIENCYSSEVFENIETWQKEIAWREFYQYVMYHYPELETGPYREHWKNFPWKNNKAHFQAWCEGNTGYPIVDAAMRQLNETGWMHNRCRMIVASFLTKDLIINWQWGEKYFMQNLIDGDLCANNGGWQWSASSGMDPKPLRIFNPVSQTQKYDPEGEYIRQWVCELRSVDTQYLVTGKIPAEEREAIGYPLPIVDHKKQQQLFKDLYREQKN

SEQ ID NO: 2632 - protein, 476 aa, Bacillus cereus ATCC 14579
MQNKIIVMFQKDFRLYDNPALFEAVQSGEVLPVYIQDETFSIGSASKWWLHHAVIDVKKQLEALGSTLIIRKGRTEEEILSLIEQLDITAVYWNICYDPDRLQSNQKMKMMLEDKGIICKEFNSHLLLEPWIIKKKDNTEYKVFTPFYNAFQKQVIPKPFSRVQSIKWGNSLPASLSVSELQLLPIIPWTSHMEVIWDPTEEGAYKTFKKFFSSKLVSYSEGRDFPGQNVHSMLAPYLSFGQISVKLMFHYLINKSTERQCSLFEKQVNSFIRQLIWREFSYYLLYHYPFTVYKPLNKSFENFPWDKEEELLRVWQKGKTGYPFIDAGMRELWQTGFMHNRARMAVASFLVKHLLIPWQEGAKWFMDTLLDADIANNTMGWQWVAGSGADASPYFRIFNPITQGEKFDKNGEYIRRWVPELRDIPNKYIHKPWEAPEHILQKSNIKLGDTYPFPIVDHKAARERALCAYKSMKEFV

SEQ ID NO: 2633 - protein, 192 aa, Oryza sativa
MASDGAAATPAKASPKKANLLDPHSIKHLLDETISDVVKSKGYAEDTRLGNWKLAIGAAVIAIALLAQFYPKKFPQNREFLLGCIALYVVLNVVLLILSYTKEKDAIMFTHPPAGSFNSTGLVISSKLPRFSDMYTITIASADPQSISANKPVHFTKSVTKWFTKEGVLVEGLFWKDVERLIDDYNTERKGK

SEQ ID NO: 2634 - protein, 373 aa, Xylella fastidiosa Temecula1
MGDRILLDTLDTDISDKNKPVRLYCYHINTAGVKKEFEFDLPAPPLGAQQTAVPSGDHVLHIARFDQGEIQALKHVSEDRNSSITQLHYISLGAVTTALHLPKNKVIDVVKDSEADKAGVEIGSFIGNGTNIKAGPENIGGKKVIKTDSRYEVVLPDGRKVTFSINKIIPKLNDIEGIRSAQLIGKTLVITFNEMSDENTQWALQQIKNTPATAILLDLRYNTGGSGIAGEKLLAGFLASGTRIATEIRGKKTNEINVPAGYTPTDKPTAVLISLLSASGAELAARTLQFHHRARIYGAQSSGQVLTSRFYKLTDGTYMQIADTNLLDPAGKPIEWYGVMPDVKKWKTLSDVRAGRDPVLECALTDLSGGQCH

SEQ ID NO: 2635 - protein, 327 aa, Psychrobacter arcticus 273-4
MTTLAQYLNTNAASPALNDVITTVTDVGKTISQLLRKGALADILGEAGNQNVQGEDQKKLDVLANDLLLDALAKNTHCAGVASEELDDAIPANAEGSLLVLFDPLDGSSNIDINMAVGTIFSILPYQHQGKVSENSDFLQAGNQQLAAGYLLYGTSTVLALTITDNVVMFSLDPDTNDYVLIEENVTVDADTSEYAINASNYRYWRAPMQQYIDELIAGEIGVRGRDFNTRWVAAMVGDVHRILCRGGLFTYPFDTKYANKAGKLRLMYEANPMSLLIERAGGGATDAVNRILDIEPTDIHQRVPVVLGSKNEVDYVKNLHLNYAEK

SEQ ID NO: 2636 - protein, 394 aa, Xylella fastidiosa Temecula1
MSKVLSLETWSPLYAHGVRVGDRILLDTLDTDISDKNKPVRLYCYHINTAGVKKEFEFDLPAPPLGAQQTAVPAGDHVLHIARFARFDQGEIQALKHVIEDRNSPMTQLHYIPLGAVTTRPHLIRTKVIDVVKDSEADKAGVEIGSFIGDGTDPKTESKNIGGKTVVKSNGIYKMILPDGKKVTFSINKEITLSNFEGIRSAQLIGKTLVIAFNEMTDENTQWALQQIKNTPATAIVLDLRDNTGGSSIAVPKLLAGFLASGTRIATEIRGKKTNEINVPTGYTPTDKPMAVLIGLVSASGAEVTARTLQFHRRARIYGAQSSGQVLMSRFYKLTDGSYIQIPHANLLDPAGKPLEWYGVMPDVKKWKTLSDVRAGRDPVLECALTDLSGGQCH

SEQ ID NO: 2637 - protein, 546 aa, Frankia sp. CcI3
MPKILTFNEDARRALEHGVNALANAVKVTIGPRGRNVVIDKHYGAATITNDGVTIAREIELEDPYENLGAQLAKEVATKTNDVAGDGTTTATVLAQEMVRFGLKQVTAGAAPLTLKLGIEAAVEAVSAALLKQAIEVNSKETIAQVAAISAQDPQVGELIAEAIDKIGKDGVITVEESQTLGLDLELTEGMQFDKGYISPYFVTDAEAQEAVLEDAYVLLYPGKISALNEILPVLEQVVQERKPLLIIAEEVEGEALSTLVVNSIRKTFQVVAVKAPGFGDRRKALLQDIAVLTGGQVVASEVGLSLDAVTLADLGRARRVVVDKDNTTIVDGVGEASSIADRVRQLKQEIEVSDSDWDREKLQERLAKLAGGVAVIRVGAATEVELKERKHRLEDAVSATRAAIEEGIIAGGGSALTHVASVLDDGLGRTGDELAGVRIVRRALDAPLSWIARNAGLEGAVIVSKVKELEPGRGYNAATGEYTDLIAAGVIDPVKVTRSAVANAASIAALLITTEGLVVEKPAEPAPQDGHGHGHGHSHPQGPGF

SEQ ID NO: 2638 - protein, 456 aa, Gibberella zeae PH-1
MTSSAKLGENPISTLANGQPTENPGSTQQIRYGQSNGGLVVLSDTQTIEILAHFARERIPERSVHAKAAGATGEFEVLEDLSDITDANFLSEKGKKTPMLMRISTVGGEKGSADTVRDVRGWSTKLYTEEGIQDFVFNDLPVFFIREPIKFPSMNRSHKRHPRTNVPDNAMFWDYHVNNPEGIHALMHLFGQRGIPASLRHISGFGVHTYTLNKADGSYVYVKWHYKPEGGIETMDSETAARLAGTDPDYHVKDLFNAIEKGDYPSWIVYIQVMRPEEVMAAPIDIFDCTYTWPHEKYPLRRVGQMTLKKNPDNYFQDIEQACFSPSNMVPGIGPSADPVLQARMFSYPDAHRYRVGPNYFQLPPNRPRNQVYAPCVRDGPGTMNGNYGGDPDYVFSQLRPVSARELWKIICGEDKGKRQFFNNIAPTIKDLPVKLQDYLSGVDPEIKTILTAHMN

SEQ ID NO: 2639 - protein, 1150 aa, Gibberella zeae PH-1
MGTRTASSAVADASLRGPGRTHSTRSSRSSRVPSFPPPSPSASAAPAAPAPATSTGTGANYNQSHTRQLSHSHSQSQSRSQSQSLSQAQSQAYASRSHSHSHSHSHSRSASNAANSHPPPHHSQHQRTSSSARTTSQNDHESSRLAANPKHHRTSSKDDRHPPPTRGPDPSRAHRRSSSSRSKNNNHNPPPEMAPSASAPSNGTSHASAAPPTNHADAPPRASTSKHARSRTVIPTQSGKWMLGKTIGAGSMGKVKLARKEDGSEQVACKIIPRGSTDDGHQSRADKERADQSKEIRTAREAAISTLLNHPHICALHDVVRTNHHWYMLFEYVNGGQMLDYIISHGKLKEKQARKFSRQIASALDYLHRNSIVHRDLKIENILISKTGDIKIIDFGLSNLFAPRGHLKTFCGSLYFAAPELLQARAYTGPEVDVWSFGIVLYVLVCGKVPFDDQSMPALHAKIKRGLVDYPAWLSSECKHLLSRMLVTDPKQRATMQEVLTHPWMAKGFNGPPDNYLPNREPLTTPLEPEVILAMQGFNFGTPESINAQLTKIIESDEYQRAIKLYQREKELPQPTKDAEKKRAFGFDFYKRRNSGNSRDTLSAPSSEALQMGNDPMNAFSPLLSVYYLVKEKQDRDHADMVPPAASQSREKEKEKEREREREREEKREREREREKEREREREREREAREKEKAREPELPEIAAPQAAHTNSSAYEMPGEKPTGGRSRPRARTHGEDDMPELPKQTPAPPPEPRVEQIQKKEGTAAGILRRFSTRKRREPERLDRDRSHPPVVQVHSPAEPSPLAPRKSFSIRRGRRDREDASDTQIRSSSNQGQHGELLSPPMSSGGNREGRRGSALGRSTSVNSAEMRRRKDHPATNESDQSVGNEESSSSRRAHGHSRSVSLRAKSIGHARRESIQQRRQRRDAAQEANVPEETDQELEQSGVSTERLDDTELSKPVFLKGLFSVSTTSGKSVPAIRTDIKRVLKQLNVDYTEIKGGFRCRHSPSIDLNKVQDPPMSPGNTPGHKRRFSFGGLIRGDDRDRDDFRDSDRPPTTPRTPGRSDRDRSFSNSETSFDSNSGRNAGPSRQVPGETSTQVQSDLGGSMVLEFEIFIVKVPLLSLHGIQFKRMAGNTWQYKSMADHILRELRL

SEQ ID NO: 2640 - protein, 473 aa, Photorhabdus luminescens subsp. laumondii TTO1
MKKQFPNNFLWGGALAANQVEGAHQIDGKGLSTSDMQPHGVIGHSIERNLGDFHIKDIGIDFYHRYPEDIALFAEMGFKCLRTSIAWTRIFPEGDEEIPNENGLAFYDRLFDEMIKYNIQPLITLSHFEMPYGLVKKYGGWGNRKTIAFFDHYARTVFERYQHKVKYWLTFNEINMSLFSCFTGAGLPENSKIQDIYQALHYQLVASANAVKACHEIIPDAKIGNMVAAAPYYPLTCHPDDILESLKKNREWLFFFDVQARGYYPSYMPRLFKEKNITLDITDEDKIALKETVDFLSFSYYMSSCATTNLEIIKTSGNIINPVKNPYLSSSEWGWQIDPKGIRYLLNMLYDRYQKPLFIVENGLGARDVIQNDGSIIDDYRIKYLNDHLFQIREAIEDGVQLLGYTSWGPIDLVSASTAEMSKRYGFIYVDRDDQGNGTLERRRKKSFNWYKAVISSHGNTLQAPEVENENNQ

SEQ ID NO: 2641 - protein, 482 aa, Zea mays
MAASVTVENLNPKVLKCEYAVRGEIVIHAQRRQQQLQTQPGSLPFDEILYCNIGNPQSLGQQPVTFFREVLALCDHPCLLEKEETKSLFSADAISRAKQILATIPGRATGAYSHSQGIKGLRDAIAAGIMSRDGFPANADDIFITDGASPGVHMMMQLLIRNEKDGILCPIPQYPLYSASIALHGGTLVPYYLNEKNGWGLEISDFKTRLEDVRSKGIDVRALVVINPGNPTGQVLAEDNQYDIVKFCKNEGLVLLADEVYQENIYVDNKKFNSFKKIVRSMGYGEDDLPLVSLQSVSKGYYGECGKRGGYMEITGFSAPVREQIYKIASVNLCSNITGQILASLVMNPPKAGDESYASYKAEKDGILESLARRAKALEDAFNKLEGFSCNKAEGAMYLFPQIHLPQKAIEAAKAAKKAPDAFYALRLLESTGIVVVPGSGFGQVPGTWHIRCTILPQEDKIPAVISRFRAFHEAFLAEYRD

SEQ ID NO: 2642 - protein, 541 aa, Sinorhizobium meliloti
MAAKEVKFTSDARDRMLRGVDIMANAVRVTLGPKGRNVVIDKSFGAPRITKDGVSVAKEIELEDKFENMGAQMLREVASRTSDIAGDGTTTATVLAQAIVREGAKAVASGMNPMDLKRGIDLAVEAIVKELRNNARKVSKNAEIAQVATISANGDAEIGRYLAEAMEKVGNEGVITVEEAKTAEIELEVVEGMEFDRGYLSPYFITNQEKMRVELEDAYILLHEKKLSNLQAMIPILESVIQSGKPLLIIAEDVEGEALATLVVNKLRASLKIAAVKAPGFGDRRKSMLEDIAILTGGTVISEELRIKLENTTMDTLGRAKRIMVDKETTTIVDGAGSKEDIGGRVAQIKAQIEDTTSDYDREKLQERLAKLAGGVAVIRVGGSTEVEVKEKKDRVDDALHATRAAVEEGILPGGGVALLPVVSALNGLATANDDQRVGIEIVRRAIEAPVRQIAENAGAEGSIIVGKLREKQDFAFGWNAQTGEFGDLFQMGVIDPAKVVRTAVQDAASIAGLLVTTEAMIAEKPKKDGQPQMPPGGMDF

SEQ ID NO: 2643 - protein, 203 aa, Thermobifida fusca YX
MRQLPELTISKIAVGPMDNNAYLLRCVRTGEAVLIDAAAEADRLLELIGDNGLARVITTHRHRDHWGALADVVGATGARTVAHPADAPELPVSTDELVEHGDTIPVGSCTLSVIHLRGHTPGSIALRYDDPAGHTHLFTGDSLFPGGVGKTWSDADFRSLITDVETRIFDQMDDDTWVYPGHGRDTTLGAERPSLPEWHRRGW

SEQ ID NO: 2644 - protein, 414 aa, Vibrio fischeri ES114
MNSINLNQPFTLTNGQVIKNRLFKSAMSEQLGDKLHNPTSGLVTLYARWAKGGIGLSMTGNVMVDRTALGEPKNVVLDDKSDLRLFSEWAKAGTQNSSHIWMQLNHPGKQIPKFLCANPVAPSAISLERGLEKGFNTPRALTESEIHEIITKFATSAKLAKQAGFTGVQIHGAHGYLVSQFLSSRHNKRNDKWGGSLENRLRFVLEVYNAIRKEVGAEFPVGIKLNSADFMKGGFTEKESMQVVQALSNNGIDLIEISGGTYESPSMMGAKDKNKPVKESTVKREAYFMDYMEKVRTLVNTPLVVTGGFRSAPAMNEALNTSATDFIGIARTMAVDPDFPNKLMHDSNYGMPLAEPTTGKPALDKMAMVGLVWYEHQMWRIADGKDADPQLSAFSVVLKTLLSAGWYAFKKRRA

SEQ ID NO: 2645 - protein, 322 aa, Candida tenuis
MSASIPDIKLSSGHLMPSIGFGCWKLANATAGEQVYQAIKAGYRLFDGAEDYGNEKEVGDGVKRAIDEGLVKREEIFLTSKLWNNYHDPKNVETALNKTLADLKVDYVDLFLIHFPIAFKFVPIEEKYPPGFYCGDGNNFVYEDVPILETWKALEKLVAAGKIKSIGVSNFPGALLLDLLRGATIKPAVLQVEHHPYLQQPKLIEFAQKAGVTITAYSSFGPQSFVEMNQGRALNTPTLFAHDTIKAIAAKYNKTPAEVLLRWAAQRGIAVIPKSNLPERLVQNRSFNTFDLTKEDFEEIAKLDIGLRFNDPWDWDNIPIFV

SEQ ID NO: 2646 - protein, 342 aa, Gibberella zeae PH-1
MSTTNSGQESEKVNTNIVTLTRFLTEEQAKHPEATGDFTLLCHALQFSFKSIAYYIRRATLVNLTGLAGSSNITGDDQKKLDVISNDLFIEAMRSSGKCALLVSEEEDEIIYFKDASDARYAVACDPIDGSSNLDAGVSVGTIFAIHKLPEGSKGCKEDILKPGTELLAAGFTMYGASAQLVITMRGGTVNGFTLDNGVGEFILSHPNMRLPKSRDIYSCNEGNSLYWDDKTINYFNSLKQAQENGKPYSARYIGSMVADAYRTLLYGGIFAYPADKKSPKGKLRILYECAPMALIFENAGGQAVDSKMNRLLEVVPEHIHDKAGIFMGSYDEVEKVKKFHQ

SEQ ID NO: 2647 - protein, 545 aa, Sinorhizobium meliloti
MAAKEVKFGRSGREKMLRGVDILADAVKVTLGPKGRNVVIDKSFGAPRITKDGVSVAKEIELEDKFENMGAQMVREVASKTNDIAGDGTTTATVLAQAIVREGAKAVAAGMNPMDLKRGIDLAVAEVVKDLLAKAKKINTSDEVAQVGTISANGEKQIGLDIAEAMQKVGNEGVITVEEAKTAETELEVVEGMQFDRGYLSPYFVTNPEKMVADLEDAFILLHEKKLSNLQAMLPVLEAVVQTGKPLLIIAEDVEGEALATLVVNKLRGGLKIAAVKAPGFGDRRKAMLEDIAILTGGTVISEDLGIKLESVTLDMLGRAKKVSITKENTTIVDGAGQKSDIEGRVAQIKAQIEETTSDYDREKLQERLAKLAGGVAVIRVGGATEVEVKEKKDRIDDALNATRAAVQEGIVPGGGVALLRSSVKITVKGENDDQDAGVNIVRRALQSPARQIVENAGDEASIVVGKILEKNTDDFGYNAQTGEYGDMIAMGIIDPVKVVRTALQDAASVASLLITTEAMIAELPKKDAPAMPGGMGGMGGMDMM

SEQ ID NO: 2648 - protein, 124 aa, Arabidopsis thaliana
MTTISLRKSNTRLPPEVNRVLYVRNLPFNITSEEMYDIFGKYGAIRQIRIGCDKATKGTAFVVYEDIYDAKNAVDHLSGFNVANRYLIVLYYQHAKMSKKFDQKKSEDEITKLQEKYGVSTKDK

SEQ ID NO: 2649 - protein, 541 aa, Sinorhizobium meliloti
MAAKEVKFQTDARERMLRGVDVLANAVKVTLGPKGRNVVIDKSFGAPRITKDGVSVAKEIELEDKFENMGAQMLREVASRTNDLAGDGTTTATVLAQAIVREGAKAVASGMNPMDLKRGIDLAVDAVVKELKNNARKISKNSEIAQVGTISANGDTEIGRYLAEAMEKVGNEGVITVEEAKTAETELEVVEGMQFDRGYLSPYFITNQDKMRVELEDPYILIHEKKLSNLQAMLPVLERVVQSGKPLLIIAEDVEGEALATLVVNKLRGGLKVAAVKAPGFGDRRKAMLEDIAILTGGTVVSEDLGIKLESVTLDMLGRAKKVSIEKENTTIIDGAGSKADIEGRTAQIRAQIEETTSDYDREKLQERLAKLAGGVAVIRVGGSTEVEVKEKKDRVDDAVHATRAAVEEGILPGGGVALLRAVKALDGLKTANNDQRVGVDLVRRAIEAPVRQIAENAGAEGSIIVGKLREKTEFSYGWNAQTNEYGDLYAMGVIDPAKVVRTGLQDAASVAGLLVTTEAMIAEKPKKEAAPAFRPRGMDF

SEQ ID NO: 2650 - protein, 1116 aa, Debaryomyces hansenii CBS767
MGTPELMKILEDPVLFQENHEKIRNDILKHIKSQNVTIKTLTNELDTSKSANKAFKQALSEIGTVVISVAMGDLSKKVEIHTVESDPEILKVKITINTMMDQLQAFANEVTKVATEVANGELGGQAKNEGSVGIWRSLTDNVNIMALNLTNQVREIADVTRAVARGDLSRKINVHAQGEILQLQMTINSMVDQLRTFAFEVSKVARDVGVLGILGGQALIEGVEGIWKELTDNVNAMALNLTTQVRNIANVTTAVAKGDLSKKVTADCKGEILDLKLTINQMVDRLQNFALEVTTLSREVGTLGILGGQANVQDVEGAWKAVTENVNLMATNLTNQVRSIATVTTAVAHGDLSQKIDVHAQGEILQLKNTINKMVDSLQLFASEVSKVARDVGINGKLGIQAQVSDVDGLWKEITSNVNTMASNLTSQVRAFAQITAAATDGDFTRFITVEASGEMDALKTKINQMVLNLRESIQRNTAAREAAELANSAKSEFLANMSHEIRTPLNGIIGMTQLSLDTELTQYQREMLSIVHNLANSLLTIIDDILDISKIEANRMTVEQIDFSLRGTVFGALKTLAVKAIEKSLDLTYQCDSSFPDNLIGDSFRLRQVILNLAGNAIKFTKKGRVSVSVKKSTRIIEDKERLLLEFCVSDTGIGIEKDKLGLIFDTFCQADGSTTRKFGGTGLGLSISKQLIHLMGGEIWVTSDYGEGSNFYFTVSVAPSAIRYTRQTEQLLPFGGHYILFISTEHTKDELGDIKNGALELGLNPVIVDNIKDGNLTEPVRYDIIMIDSIETAKNLRLLPEVKYIPLVLLHHSIPELNMRVCIDLGISSYGNTPCTISDLASALIPALESRSIAQNTDESASYNILLAEDNLVNQKLAVKILEKQGHHVEVVENGLEAFEALQKTKYDVVLMDVQMPVMGGFEATEKIRQWEKKSNPIDSLSFRTPIIALTAHAMLGDREKSLAKGMDDYVSKPLKPKLLMQTISKCIHNIKQLKELSKQNNSNRTSDFAKNLKKSSIEGSEIPNSNLLNIGSSPTSNSTYNGLSTSLASDGATFASPKMKKSISNDVFVNGRPGKLSMDNRSVTESAISLKPKSPKSDSMDLDNSSPRIEYLD

SEQ ID NO: 2651 - protein, 559 aa, Sulfolobus shibatae
MTFGYKIDGNEVIFTLWAPYQKSVKLKVLEKGLYEMERDDKGYFTITLNNVKVGDRYKYVLDDASEIPDPASRYQPEGVHGPSQIIQESKEFNNETFLKKEDLIIYEIHVGTFAPEGTFEGVIRKLDYLKDLGITAIEIMPIAQFPGKRDWGYDGVYLYAVQNSYGGPEGFRKLVDEAHMKGLGVILDVVYNHVGPEGNYMVKLGPYFSQKYKTPWGLTFNFDDAESDEVRKFILENVEYWIKEYNVDGFRLDAVHSIIDTSPKHILEEIADVVHKYNRIVIAESDLNDPRVVNPKEKCGYNIDAQWVDDFHHSIHAYLTGERQGYYLDFGNLDNIVKSYKDVFVYDGKYSKFRRKTHGKPVGELDGCNFVVYIQNHDQVGNRGKGERIIKLVDKESYKNAAALYILSSIISMIFMGEEYGEQKPFYFFSDFSDTKLIQGLREGRKKENGQDTDPQDESTFNASKLSWKIDEEIFSFYKILIKMRNELSIACDRRVYVENGENWLIIKGREYLSLCVFSRSSIEVKYSGTLLLSSNNSFPQHIEEGQYEFDKGFALYKL

SEQ ID NO: 2652 - protein, 370 aa, Nostoc punctiforme PCC 73102
MTTEINLFSSYQLGNLELPNRIVMAPLTRNRASKGNVPYELNATYYAQRASAGLIISEATQVTPEGQGYPATPGIHSPEQVEGWKLITDAVHQQGGRIFLQLWHVGRISHPDLQPNGALPVAPSAIAPKGEAATYEGPKPFVTPRALETSEIPQIVEQYRQGAANALAAGFDGVEIHSANGYLIDQFLRDRTNQRTDKYGGSIENRTRFLLEVTEAVTSVWDSNRVGVRLSPSGTFNDIGDSNPLETFGYAAQALNQFNLAYLHIYEATEADIRHGGIIVPTSHIRDRFTGTLIVNGGYTREKGDAVLANKAADLVAFGTLFISNPDLPRRLALNAPLNEANQATFYGGGEQGYTDYPFWSAANEAVAKA

SEQ ID NO: 2653 - protein, 537 aa, Arabidopsis thaliana
MATGSGSLIWFRKGLRVHDNPALEYASKGSEFMYPVFVIDPHYMESDPSAFSPGSSRAGVNRIRFLLESLKDLDSSLKKLGSRLLVFKGEPGEVLVRCLQEWKVKRLCFEYDTDPYYQALDVKVKDYASSTGVEVFSPVSHTLFNPAHIIEKNGGKPPLSYQSFLKVAGEPSCAKSELVMSYSSLPPIGDIGNLGISEVPSLEELGYKDDEQADWTPFRGGESEALKRLTKSISDKAWVANFEKPKGDPSAFLKPATTVMSPYLKFGCLSSRYFYQCLQNIYKDVKKHTSPPVSLLGQLLWREFFYTTAFGTPNFDKMKGNRICKQIPWNEDHAMLAAWRDGKTGYPWIDAIMVQLLKWGWMHHLARHCVACFLTRGDLFIHWEQGRDVFERLLIDSDWAINNGNWMWLSCSSFFYQFNRIYSPISFGKKYDPDGKYIRHFLPVLKDMPKQYIYEPWTAPLSVQTKANCIVGKDYPKPMVLHDSASKECKRKMGEAYALNKKMDGKVDEENLRDLRRKLQKDEHEESKIRNQRPKLK

SEQ ID NO: 2654 - protein, 547 aa, Rhodopseudomonas palustris CGA009
MAAKDVKFSGDARDRMLRGVDVLANAVKVTLGPKGRNVLIEKSFGAPRITKDGVTVAKEVELEDKFENMGAQMVREVASKTNDLAGDGTTTATVLAQAIVREGAKAVAAGMNPMDLKRGIEIAVAAVVKDIQKRAKPVASSAEIAQVGTISANGDAPIGKMIAQAMQKVGNEGVITVEENKSLETEVDIVEGMKFDRGYLSPYFVTNAEKMTVELDDAYILLHEKKLSGLQSMLPVLEAVVQSGKPLLIIAEDVEGEALATLVVNRLRGGLKVSAVKAPGFGDRRKAMLEDIAILTGGQLISEDLGIKLETVTLKMLGRAKKVVIDKENTTIVNGAGKKPEIEARVSQIKAQIEETSSDYDREKLQERLAKLAGGVAVIRVGGATEVEVKEKKDRVEDALNATRAAVQEGIVPGGGVALLRAKKAVGRISNDNPDVQAGINIVLKALEAPIRQIAENAGVEGSIVVGKILENKTETFGFDAQTEEYVDMLAKGIVDPAKVVRTALQDASSVASLLVTTEAMVAELPKADAPAMPAGGGMGGMGGMGF

SEQ ID NO: 2655 - protein, 481 aa, Bordetella pertussis Tohama I
MSTRKFRGFGLVAIGAVAGILLSVGVSAVAQRGSPLPLDELRQLSNVFAAIKNNYVEAVDDKTLIGNAISGMVSNLDPHSAYLDADAFREMQTATQGEFGGLGIEVGAEDGFVKVISPIEDTPAARAGIQAGDLIIKIDDTPTKGMSLNDAVKLMRGAPKSPITLTIMRADRPQPIVVKIVRDIIKVRSVRSKMLDSNVAYLRIAQFQEKTGPDLARHLKELGAKGAPKSLVLDLRNDPGGLLTSAIGVAGAFLPPDALVVSTDGRTPDSRHKYRATPSEYARGEGNYLNDLPGWVKTVPMVVLVNVGSASASEIVAGALQDHKRAKVLGNRTFGKGSVQVILPLSESTAVKLTTSRYFTPSGRSIQATGIEPDYVVADTADGDLFRLPREADLQRHLSNQQSPDAEVKSNNDDNTEVAGKAFEFGGKDDFQLQQALNLLAGKPVQKGSARAQAKADIKPSEGKTQRMTITPTGVEPAKSK

SEQ ID NO: 2656 - protein, 443 aa, Geobacter metallireducens GS-15
MFGTRKGKKIALLAVVLFAMLAGGGFVAQKHCAAQGGNDYESIELFTDVLAIVKKSYVEEVDTKKLIYGAINGMLASLDPHSSFMPPDMYKEMKIDTKGSFGGLGIEITIKDGILTVISPIEDTPAFRAGIKAGDQILKIDDRFTKDMTIMDAVKRMRGAKGTKVILTIVREGFDKPKDFTLVRDIIQVKSVRFSSLDNGYGYIRIAQFQEKTDDDLVKALATLKEENGGSLKGLVLDLRNDPGGLLDQAVKVADHFVEQGLIVYTEGREKDSRMQFNAHKGGTEPAYPMVVLINGGSASASEIVAGALQDHKRAVVMGTQSFGKGSVQTIIPLSDDSGLRLTTARYYTPNGRSIQAKGITPDIIVERAEIQPTEKKDGHIREKDLENHFESGEKVEGEDKKTEKGKVPAAKSDDQLKGDYQVLRALDLLKGWEILKTMNRAN

SEQ ID NO: 2657 - protein, 540 aa, Lactobacillus helveticus
MAKDIKFSENARRSLLKGVDKLADTVKTTIGPKGRNVVLEQSYGNPDITNDGVTIAKSIELKDRYENMGAKLVAEAAQKTNDIAGDGTTTATVLTQAIAREGMKNVTAGANPVGIRRGIEKATKAAVDELHKISHKVESKDQIANVAAVSSASKEIGALIADAMEKVGHDGVITIEDSRGINTELSVVEGMQFDRGYLSQYMVTDNDKMEADLDNPYILITDKKISNIQDILPLLQEIVQQGKSLLIIADDITGEALPTLVLNKIRGTFNVVAVKAPGFGDRRKAQLQDIAALTGGTVITEDLGLELKDTKIDQLGQARRITVTKDSTTIVGGAGSKEAIDERVDTIRKQIEDSTSDFDKKKLQERLAKLTGGVAVIHVGAATETELKERRYRIEDALNSTRAAVDEGYVAGGGTALVNVEKAVREVKGETTDEQTGINIVLRALSAPVRQIAENAGKDGSVILDKLEHQENEIGYNAATDKWENMVDAGIIDPTKVTRTALQNAASIAALLLTTEAVVAEIPEPKQAAPQGGAGAPMGM

SEQ ID NO: 2658 - protein, 1249 aa, Magnaporthe grisea 70-15
MADAATLAAVAAIVENIATNSGAPGKNASFRSSTYVQLPGPESDEKKQLERELAALVIRVQQLETRANAAPATIFPDTPNETAYSLFGDDSSSPTSSSSGREPKRLKSASSTTRNGFTTDGRPSKLNAITDEELEGLREHVDGQSRLLDSQRAELDGVNAQLLEQKQLQERALAIIEQERVATLERELWKHQKANEAFQKALREIGSIVTAAARGDLSKRVKINPIEMDPEITTFKRTMNAMMDQLGVFSSEVSRVAREVGTEGILGGQAQIEGVDGTWKELTDNEVTRVARDVGTEGMLGGQADVEGVKGMWNELTVNVNAMANNLTTQVRDIINVTTAVAKGDLTQKVQAECRGEIFELKNTINSMVDQLQQFAREVTKIAREVGTEGRLGGQATVHDVQGTWRDLTENVNGMAMNLTTQVREIANVTSAVAAGDLSKKIRVEVKGEILDLKNTINTMVDRLGTFAFEVSKVARAVGTDGTLGGQAQVENVEGKWKDLTENVNTMASNLTSQVRGISTVTQAIANGDMSRKIDVEAKGEILILKETINNMVDRLSIFCNEVQRVAKDVGVDGIMGGQADVAGLKGRWKEITTDVNTMANNLTAQVRAFGDITNAATDGDFTKLVEVEASGEMDELKRKINQMVYNLRDSIQRNTQAREAAELANKTKSEFLANMSHEIRTPMNGIIGMTQLTLDTDLTQYQREMLNIVNNLAMSLLTIIDDILDLSKIEAKRMVIEEIPYTLRGTVFNALKTLAVKANDKFLDLTYRVDSSVPDHVIGDSFRLRQIILNLVGNAIKFTEHGEVSLTIQKGNDVTCLPNEYMIEFVVSDTGIGIPTDKLGLIFDTFQQADGSMTRKFGGTGLGLSISKRLVNLMGGDVWVKSQYGKGSSFYFTCRVRLADVDISLIRKQLKPYKGHQVLFIDKGKTGHGPEVGQMLGQLGLVPIVLESEQNHTLTRVRGKECPYDVIVVDSIDTARRLRGIDDFKYLPIVLLAPTVHVSLKSCLDLGITSYMTMPCKLIDLGNGMVPALENRATPSLSDNTKSFEILLAEDNTVNQRLAVKILEKYNHVVTVVSNGAEALEAVKDNKYDVILMDVQMPVMGGFEATAKIREYERSLGTQRTPIIALTAHAMMGDREKCIEAQMDEYLSKPLQQNHLIQTILKCATLGGALLEQNRERELELARHAEHKGGLSTDPARASSVMRPPLHHRPVTTAESLSGGAESPSLMANDGEDPIQRARSSLSEPGCL

SEQ ID NO: 2659 - protein, 142 aa, Brassica rapa subsp. pekinensis
RQVTFCNRRNGLLKKAYELSVLCDAEVTLIVFSSRGRLYEYSNNSVKGTIERYKKAISDNTNTGTVAEINGQYYQQESAKLRQQIISIQNSNRQLMGETIGSMSPKELRNLEGRLDRSINRIRSKKNELLFAEIDYMQKREL

SEQ ID NO: 2660 - protein, 208 aa, Bacillus anthracis str. 'Ames Ancestor'
MKWIQMPLGPLQTNAYILKNDKNECVIFDPGHEGEKLVTYLQEEQLKPLAVLLTHAHFDHIGAVDAVRDAFHIPVYVHKEEDWLGDATVNGSQIFMMNRSITAKPADHIIDAEGTLAIGSFNFEIFETPGHSPGSISYYCKEASAVFSGDVLFQMSIGRTDLPGGSFAELIGSIEEKLFVLPDETAVLCGHGPETSIGFEKENNPFLQ

SEQ ID NO: 2661 - protein, 469 aa, Bacillus cereus ATCC 10987
MVVAFLIGAGGMFAGMSLFGVNPAEVTQTISNGNASTAQGNLAKINEAYALIDSRYVEDVKDEKLVEGAIQGMLSTLKDPYSTYMDKETAKQFSESLDPELEGIGAEVNKTDGKLIIVSPIKGSPAEKIGIKPNDQILSVDGNSVKDLSREEAVLKIRGKKGTTVAIEIKRAGVADPIVFKIKREKIPIFTVFSSVKQESGKDIGYMQITSFAENTAKEFKDQLKELEKKNIKGLVIDVRGNPGGYLNSVEEILGEIMTDKKPMLQVEQRNGEKKKFSTELKERKPYPISVLIDNGSASASEILAGALKEGEGYDLIGEKTFGKGTVQQAVPFKDGSNIKLTMFKWLTPDGNWIHKKGIKPTVEVKQPDYYHATPIQIEKTLSYNANDVQVKHAQEMLKSLGYVPGREDGYFSKETESALKAFQNANKMEATGQLDKKTAEAIQTKIIEKIRSGENDLQLQSALKLMAK

SEQ ID NO: 2662 - protein, 407 aa, Polaromonas sp. JS666
MKPITKSAKLANVLYDIRGPIMDAAKQMEEEGHHLIKLNLGNLAVFGFDAPEEIQQDMIRNLPSSAGYSDSKGIFAARKAVMHETQKQGISGVTLDDIYLGNGASELIAMATNALLDDGDELLLPTPDYPLWTASTSLSGGKPVHYLCDEDNGWMPNLDDIRAKITPKTKGIVVINPNNPTGALYSDELLKQIVEIARTHGLVILADEVYDKVLYDGAHHTAIASLSTDVLTLTFNSLSKSYRSCGYRAGWLVVSGPKKRAEDYIEGLNMLANMKLCSNVPGQWAIQTALGGYQSINDLTGEGGRLRRQRDLAYELITAIPGVSCVKPSAALYMFPKLDPKVYPIKDDRQFFLELLKETKVMLVQGTGFNWASPDHFRIVFLPHEEDLREAVGRIAKFLENYRNNNI

SEQ ID NO: 2663 - protein, 651 aa, Oryza sativa (japonica cultivar-group)
MAGSERTVVWFRRDLRIDDNPALASAARDGAVLPVFIWCPADEGQFYPGRCSRWWLKQSLPHLSQSLESLGCPLVLIRAESTLEALLRCIDSVGATRLVYNHLYDPVSLVRDDKIKKELSALGISIQSFNGDLLYEPWEIYDDSGLAFTTFNMYWEKCMELPIDASPSLAPWKLVPVPGLESVRSCSVDDLGLESSKDEESSNALLMRAWSPGWRNAEKMLEEFVSHGLLEYSKHGMKVEGATTSLLSPYLHFGEVSVRKVYQLVRMQQIKWENEGTSEAEESIHFFMRSIGLREYSRYLCFNFPFTHEKSLLGNLKHYPWKVDEERFKSWRQGMTGYPLVDAGMRELWATGWTHNRIRVIISSFAVKFLLIPWTWGMKYFWDVLLDADLESDILGWQYISGSLPDGHELSRLDNPEVQGQKYDPDGVYVRTWIPELARMPTEWIHHPWDAPSCILEVAGVELGFNYPKPIVDLHIARECLDDSISTMWQLDTAEKLAELDGEVVEDNLSNIKTFDIPKVVLRETSPCALPIDQRVPHASSKDHNLKSKVLKASNRSSICVDMIRSSKMEATSSVANSPVSRKRSFCETAFHVPSYSSSAEVHSHIQDHGGSLVGPSRYLLQEAGRNYVDEVEDSSTADSGSSISRQRKAA

SEQ ID NO: 2664 - protein, 466 aa, Oryza sativa
MPEKGTVVMSRYELGRSLGHGTFSKVYQARSLVSGETVAVKVIDKEKALRAGAGMVDQIEREVAVMRLVGRHPNVVRLHEVMASRSKIYFVMELVRGGELLARLVAGGGRLGEDAARRYFHQLVAAVDFCHSRGVYHRDLKPENLLVDDDGSGGGGNLKVTDFGLSALSASRRHDGLLHTTCGTPSYVAPEIIGDKGYDGATADVWSCGVILFLLLAGYLPFFDSNLMEMYKKITNGEFKVPDWFTPDARSLISRLLDPNPTTRITIDELVKHPWFKKGHTKRPASSNTMKLNEEEKPANAAMNMKPASLNAFDIISLSQGFDLSGMFCCHGHSSRTQDQLFVTGKPATAIVSRLEEIAETEHFTVKKKQKKRQEEDGMAVKLQGWKEGRKGQLAIDAEIFEVSPSCYVVEVKKTAGDTLEYQAFCNRDLRPSLNDICWTSPATAASEKNQLPAVSEVSPLSSPRN

SEQ ID NO: 2665 - protein, 466 aa, Fusobacterium mortiferum
SFPKNFLWGSATAAYQVEGAWNQDGKGPSIWDLYSKLPGTTFEGTNGDIAADHYNRYKEDVKTMAEMGLKTYRFSIAWTRIFPEGSGKINEKGIEFYSNLIDELLKYNIEPMITLYHWDLPQALQDKYAGWESREIIDDFVEYARVCFKNFGDRVKYWIVMNEPNVFIGLGYGIALHPPGGKDRKKELNAGHITALANAKAIKLFREIVPNGMIGSSIAYGPAYAASESEEDKLALEKYYNYNVWWWFDPYFKGEYPADMLKYNQEKYGAPEILDGDMELLKSAKSDFIGINYYCTQMIADNKEGVGYNGMNTTGEKNSQKENGVPGLFKNVRNTNLEYTDWDWAIDPDGLRYGMVQLKERYNLPIIISENGLGAVDPIDEEGNIQDIPRIDYLREHIIACEKAIEEGVDLLGYCTWSYIDLLSWLNGYKKQYGFIYVDRKNNLERKKKASYFWYKDVIASNGEKL

SEQ ID NO: 2666 - protein, 1122 aa, Ralstonia metallidurans CH34
MRKLIKGEKLAALPLSISQIRNLVYVFVTCLLVLIGLSWFVLLKYRMDEAVDRQKILFQARAEQVEANLTAVRRMTLRAQGTLERLIEVGVGKPMAQTTSRDWIDHLQKRGERPYVALPISAGREAIPADASIAPLANVLAFMLRVSSVQYQGLENVWLVDLNADRFYVTPRNLPQARETLRNDATYQAFVEGSIARLRSRKLLEQLKAAPGRVVMLEPGYDWVSRTPIVTVATLIHVDGEPRAVFAMDFPLSAIFPEDDDLEDGFFVQTAEGTILRPDSMSRDPLPPAVSQALVKRAHVATNLPTFVGSGLLPSVMVLDGPVDRSGWRAVEVVETGMLWESLRRNTLWLFALTGLTCTLMLAWVRLVDRRIMRPTQTQSLRLQESEVLGRTIIESTGVGLVILDSTNAAVLMENDVSDRITAHAKPGELARFHRAACNALADGERGNTVGRHGKFNFELAHTDETVSYLTVRVVESTYQGKPAKLCAMDDVTAARQSESTLLQAIHDADAANRAKSAFLATMSHEIRTPLNGMLGSIELLEVSALDAAQRDQLEVMQQSAQSLIQIINDVLDFSKIEAGQMALQARPCQIDSLVEDVCRRFAPDAERRSLQLLCVIDPALHAPILLDPLKTEQVLGNLVSNAIKFTEQGKVVVEATTMTEGGRDWLKLRVIDTGIGIAIEDQQRLFAPFVQAEQSDSRRFGGTGLGLSICNRLVGLMNGSIRLVSEPGLGSCFDVRIPMEPVTVTQPADIVQTGLLNDLYIANGLSGLTVGLCSPSRETYHGIEHLLQHYGAVVVRFDSSQPPATPVDVVVCEHGDIHACPDADVVIESNASLLPDTSQTPIRASRYAWRGLVQAILTAAGLELPMPVQRRADSAQGHLALKSLRILLVEDHRVNQVVMRRLLEWLGQRVDVAGDGREALALTASQSYDLILTDLQMPSMDGYELARTMRERGITVPIIAVTASVGPDLQSACQKAGINRCLTKPVRLAALRELIEPLDASPPLPGTEPSLIPKEAMMSLSEYLGEDLAELSEAAAAGDTVRLMRKLHALAGALATLGHASESQACRWLERTIEESGLAGMEEQWIALRTALETLIAQYAGVDLGQPVRRASAPGLPLPDR

SEQ ID NO: 2667 - protein, 298 aa, Oryza sativa (japonica cultivar-group)
MAGSERTVVWFRRDLRIDDNPALASAARDGAVLPVFIWCPADEGQFYPGRCSRWWLKQSLPHLSQSLESLGCPLVLIRAESTLEALLRCIDSVGATRLVYNHLYDPVSLVRDDKIKKELSALGISIQSFNGDLLYEPWEIYDDSGLAFTTFNMYWEKCMELPIDASPSLAPWKLVPVPGLESVRSCSVDDLGLESSKDEESSNALLMRAWSPGWRNAEKMLEEFVSHGLLEYSKHGMKVEGATTSLLSPYLHFGEVSVRKVYQLVRMQQIKWENEGTSEAEESIHFFMRSIGLREYSR

SEQ ID NO: 2668 - protein, 641 aa, Listeria monocytogenes EGD-e
MKFNSMFSPIDIGPMKVPNRFVVSPMCNNYANTDGTLSDTSLAYYKERALGGFGLITFEATVVDVRAKGGANKACLYSDHQIASFKRVIDVCHDAGAKISVQLQHAGPEGNSKVSGYPLRAASAIASAAGRNTPEAISREELYELIELYGEAALRAKKAGADAVEVHCAHGYLVSSFLSARTNKRVDEFGGCFENRMRLPRLIIESIRKRVGHSIAILCRINSTDGVDGGLSVQDSATVAAYLEDCGLDGLHVSRSVHIRDEYMWAPTVLHAGFSSDLVTQIKRAVSIPVITVGRFTEPHYAELMVREGRADLVAFGRQSLADPETPNKAAAGKLDELLPCIACLQGCVANMYAGKPITCLVNPLLGRESEAYLPKTPSKKVVVVGGGVGGLYAGWMAGSRGHDVTVYEASDMIGGQMRLAAYPPGKGDLTNMVRSYIKKCEQFDVEIKTNTPVTLELIQEVAPDAVIIATGATPLVLPIPGIEDAGLIHAVDLLDGKEKCGQKVLVVGGGMVGSETAAFLGEAGHDVTVVELRDEVGADVISEHRKFLMHDFDEYKIKSVTNAKVTSFFEDGVTYSLADNKEQRIDGFDSVVLAMGSRAYNPLEEAIKAIVPETYVIGDAVRARRALDATKEALDAVLQL

SEQ ID NO: 2669 - protein, 141 aa, Glycine max
  misc_feature (5)..(6): Xaa can be any naturally occurring amino acid
  misc_feature (8)..(9): Xaa can be any naturally occurring amino acid
  misc_feature (21)..(21): Xaa can be any naturally occurring amino acid
  misc_feature (40)..(40): Xaa can be any naturally occurring amino acid
  misc_feature (46)..(46): Xaa can be any naturally occurring amino acid
VDTDXXRXXFMNAFDRAMNLXDDNFSFLASTKQIVSSADXDDKVIXVFERGDLIFVFNFHPENTYEGYKVGCDLPGKYRVVLDSDAWEFGGHGRVRSPNLSGGKHEYNQERNYCPQIFLKLQNKYKPLNFCFTSQKFFDSA

SEQ ID NO: 2670 - protein, 796 aa, Gibberella zeae PH-1
MKNTINLMVDRLGTFAVEVSKVAREVGTDGTLGGQAQVANVEGKWRDLTENVNTMASNLTAQVRSISTVTQAIANGDMSQKIKVEANGEIQVLKETINNMVDRLSSFCYEVQRVAKDVGVDGKMGAQADVGGLDGRWKEITTDVNTMASNLTTQVRAFSDITNLATDGDFTKLVDVEASGEMDELKRKINQMISNLRDSIQRNTQAREAAELANKTKSEFLANMSHEIRTPMNGIIGMTQLTLDTDLTQYQREMLNIVNNLANSLLTIIDDILDLSKIEARRMVIEEIPYTLRGTVFNALKTLAVKANEKFLDLTYMVDSSVPDYVIGDSFRLRQIILNLVGNAIKFTEHGEVSLTIKESMGQSHVRPGEYAVEFVVQDTGIGIAQDKLDLIFDTFQQADGSMTRKFGGTGLGLSISKRLVNLMGGDLWVNSQHGKGSEFHFTCLVKLAPDDAALIEQQIRPYRGHQVLFVDKAQSQNAASIKPMLEKIGLKPVVVDSEKSPALARLHTGGSLPYDAILVDSIDTARRLRAVDDFKYLPIVLLAPVVHVSLKSCLDLGITSYMTTPCKLIDLGNGMIPALENRATPSLADNTKSFEILLAEDNTVNQRLAVKILEKYHHVVTVVGNGWEAVKAVQSKKFDVILMDVQMPIMGGFEATGKIREYERGIGSHRTPIIALTAHAMMGDREKCIQAQMDEYLSKPLQQNHLIQTILKCATLGGPLLEKNRERELALHAETKSKHKEGGQGLLRPTLESRAFTSREPLLGNGKESPAIIATDEDPMARARLDLSDMRSLTN

SEQ ID NO: 2671 - protein, 698 aa, Pseudomonas aeruginosa UCBPP-PA14
MKRFLPRTALLLLLGASSLPLFASTAVSVGSAQNSWDSLQPDREQVIASLNVVELLKRHHYNKPPLNDERSAKIYDSYLKMLDPARMYFTAGDIAEFDRWRNRFDDFLKSGDLDPGFVIYKRHLDRLKGRLDYALAMLDKGVDKIDFSVDESLLIDREKAPWAKDTAELDDLWRKKVKDEVLRLKITGKDDKAIQEQLTKRYKNQLSRLKQTRSEDIFQAYINAFAQSYDPHTQYLSPDNAENFDINMSLSLEGIGAVLQSDNDYVKVVRLVPAGPAAKSKQIATSDKIIGVAQGKGEMVDVVGWRLDEVVKLIRGPKGSQVRLEVIPASNAPNDQTSKIVAITREAVKLEDQAAKKSIIKVDHEGRSYKLGVIDLPAFYLDFKAYRAGDPNYKSTTRDVKKLVAELQKDKVDGIVLDLRNNGGGSLQEATELTGLFIDQGPTVLVRNSDGRVDVLNDDEGKAFYTGPLAVLVNRLSASASEIFAGAMQDYHRALILGGQTFGKGTVQTIQPLNHGELKLTLAKFYRVSGQSTQHQGVIPDISYPSIVDDKEIGESALPDSMPWDTIRPVVKDEANPFKPFLAQLKAQHDARTENNADFVYARERLALAQELMKEKTVSLNEAKRRAQQTSIENRQLAMENALRKSKGQEPLKELKREDENALPEEDDKTKPQDDAYLTESGHILLDYLNLNSAVAKH

SEQ ID NO: 2672 - protein, 476 aa, Humicola grisea var. thermoidea
MSLPPDFKWGFATAAYQIEGSVNEDGRGPSIWDTFCAIPGKIADGSSGAVACDSYKRTKEDIALLKELGANSYRFSISWSRIIPLGGRNDPINQKGIDHYVKFVDDLIEAGITPFITLFHWDLPDALDKRYGGFLNKEEFAADFENYARIMFKAIPKCKHWITFNEPWCSAILGYNTGYFAPGHTSDRSKSPVGDSAREPWIVGHNILIAHARAVKAYREDFKPTQGGEIGITLNGDATLPWDPEDPADIEACDRKIEFAISWFADPIYFGKYPDSMRKQLGDRLPEFTPEEVALVKGSNDFYGMNHYTANYIKHKTGVPPEDDFLGNLETLFYNKYGDCIGPETQSFWLRPHAQGFRDLLNWLSKRYGYPKIYVTENGTSLKGENDMPLEQVLEDDFRVKYFNDYVRAMAAAVAEDGCNVRGYLAWSLLDNFEWAEGYETRFGVTYVDYANDQKRYPKKSAKSLKPLFDSLIRKE

SEQ ID NO: 2673 - protein, 466 aa, Hypocrea jecorina
MLPKDFQWGFATAAYQIEGAVDQDGRGPSIWDTFCAQPGKIADGSSGVTACDSYNRTAEDIALLKSLGAKSYRFSISWSRIIPEGGRGDAVNQAGIDHYVKFVDDLLDAGITPFITLFHWDLPEGLHQRYGGLLNRTEFPLDFENYARVMFRALPKVRNWITFNEPLCSAIPGYGSGTFAPGRQSTSEPWTVGHNILVAHGRAVKAYRDDFKPASGDGQIGIVLNGDFTYPWDAADPADKEAAERRLEFFTAWFADPIYLGDYPASMRKQLGDRLPTFTPEERALVHGSNDFYGMNHYTSNYIRHRSSPASADDTVGNVDVLFTNKQGNCIGPETQSPWLRPCAAGFRDFLVWISKRYGYPPIYVTENGTSIKGESDLPKEKILEDDFRVKYYNEYIRAMVTAVELDGVNVKGYFAWSLMDNFEWADGYVTRFGVTYVDYENGQKRFPKKSAKSLKPLFDELIAAA

SEQ ID NO: 2674 - protein, 551 aa, Triticum aestivum
  misc_feature (104)..(104): Xaa can be any naturally occurring amino acid
  misc_feature (291)..(291): Xaa can be any naturally occurring amino acid
  misc_feature (326)..(326): Xaa can be any naturally occurring amino acid
  misc_feature (391)..(391): Xaa can be any naturally occurring amino acid
MRAYPGEQIEQVCTKKQAGTAPEFPGYRRPTRPPPTPPPSRPHRPPPTQAPGSPPVPTMDPYKHRPTSGANSGYWTTNSGAPVWNNNNALTVGQRGPILLEDYXLIEKLAQFDRERIPERVVHARGASAKGFFEVTHDVSQLTCADFLRAPGVQTPVIVRFSTVVHERGSPETLRDPRGFAVKFYTREGNFDLVGNNMPVFFIRDGMKFPDMVHAFKPSPKTNMQENWRIVDFFSHHPESLHMFTFLFDDVGIPLNYRHMDGFGVNTYTLISRDGKAHLVKFHWKPTCGVXCLLDNEAVTVGGTCHTHATKDLTDAIAAGNYPEWXKLFIQTIDADHEDKFDFDPLDVTKTWPEDIIPLQPVGRMVLNKNIDDFFAENEQLAFCPAVTVPXIHYSDDKLLQTRIFSYADTQRHRLGPNYLMLPVNAPKCAHHNNHHDGLMNFMHRDEEVNYFPSRFDPTRHAEQYPIPPRVLSGCREKCIIEKENNFKQAGERYRSFDPARQDRFLQRWVDALTDARVTHEIQGIWVSYWSQCDASLGQKLASRLKIKPSM

SEQ ID NO: 2675 - protein, 407 aa, Oryza sativa (japonica cultivar-group)
MSWFHPDAWGVQRKPISSSVLTRRRRDRELNHGTAGDLVDLACRHIIAAVAYSPPLPDPDPIRSAPHLFIPARELITARSTAADNTQAKRGRFRVLISSSSSSSHSPLAWAGRKSQMVALLRSCRRLIPHLSACAAAAPSSSSSCAPRARPISRGLRLLPVVLAMAGYSSGSAAEGRRLLFRQLFEKESSTYTYLLADVGDPEKPAVLIDPVDRTVDRDLNLIKELGLKLVYAMNTHVHADHVTGTGLIKTKLPGVKSVIAKVSKAKADHFIEHGDKIYFGNLFLEVRSTPGHTAGCVTYVTGEGDDQPSPRMAFTGDALLIRACGRTDFQIFTLPKDTLLYPGHDYKGFTVSTVEEEVAYNARLTKDKETFKKIMDNLNLAYPKMIDVAVPANLLCGIQDPPPSKV

SEQ ID NO: 2676 - protein, 550 aa, Azoarcus sp. EbN1
MAAKEVKFGDSARDRMVAGVNILANAVKVTLGPKGRNVVLERSFGAPTVTKDGVSVAKEIELKDKFENMGAQMVKEVASKTSDIAGDGTTTATVLAQSIVREGMKFVAAGMNPMDLKRGIDKAVIAVTEELKKLSKPCSTNKEIAQVGSISANSDADIGEIIAKSMDKVGKEGVITVEDGKSLQNELDVVEGMQFDRGYLSPYFINNPDKQVAILENPFILLFDKKISNIRDLLPVLEQVAKAGRPLLIVAEDVEGEALATLVVNNIRGILKTCSVKAPGFGDRRKAMLEDIAVLTGGQVIAEEVGLTLEKATLAELGQAARIEIGKENTIIIDGAGEGSRIEGRVKQIRAQIEEATSDYDREKLQERVAKLAGGVAVIKVGAATEVEMKEKKARVEDALHATRAAVEEGIVPGGGVALLRARANLGTLKGDNHDQDAGIKIVLRALEQPLREIVANAGDEPSVVVNRVVEGTGNFGYNAATGEYGDLVDMGVLDPTKVERIALQNAASVAGLMLTTDCMVGELAEEKPSMGGMGGMGGMGGMGGMDMGM

SEQ ID NO: 2677 - protein, 483 aa, Citrus sinensis
MAFALSNQVQLLSKIAAGNGHGEDSPYFDGWKAFESDPYHPTKNPNGVIQMGLAENLLCHELVEDWLMNNPKASICSAEGLNEFKGIAIFQDYHGLPEFRNAVAKFMGKVRGNRITFDPDRIVMSGGATGAHETVAFCLADPGDAFLVPTPYYPGFDRDLRWRTGVQLVPVVCDSSNDFKVTMEALEAAYEKAQESNIRIKGVLITNPSNPLGTFLDRETLKDIVSFINEKNIHLVCDEIYAATVFTKEPSFVSIAEIIDQDIACNRNLIHIVYSLSKDMGFPGFRVGIIYSYNDQVVSCARKMSSFGLVSSQTQHLIATMLSDDQFVEKFIAESAKRIAERHKAFTWGLSQVGIGCLKSNAGLFLWMDLHHLLKEQTYEAEMALWRVIINEVKLNVSPGSSFHCPNPGWFRVCFANMDDRTMEIALSRITSFMLKNVEAKVPNKKKLCWQRSLRLSMSSRRMDDFMASPCMSPQSPLVQART

SEQ ID NO: 2678 - protein, 544 aa, Treponema denticola ATCC 35405
MAKQLLFNEEARKSLLAGVEQISNAVKVTLGPKGRNVLIDKSFGAPTVTKDGVSVAREVELENKFENMGAQLLKEVATKTNDVAGDGTTTATVLAYSMVKEGLKAVAAGMTPLELKRGIDKAVAIAVEDIQKNSKEIKGSEEVAHVASVSANNDAEIGKIIADAIAKVGKDGVIDVGEAQTMETVTDYVEGMQFDRGYISSYFVTDRDRMETVFENPYILIYDKSISTMKDLLPLLEQVAQSGRPLLIIAEDVEGEALATLVVNSLRGALKTCAVKAPGFGDRRKEMLEDIAVLTGGQVVSEELGFKLEAAQISMLGQAKSIKIDKDNTMIIDGAGKSKDIKDRVTQIKAQLDATDSEYDSEKLRERLAKLSGGVAVIKIGAVTEVEMKEKKHRVEDALSATRAAIEEGIVAGGGLAMIQAIAALEKADMSSLTEDEKVGFKIVKRALEEPIRQIAENAGLDGAVIAEKAKEKKGVGFDAAKMEWTDMVKAGIIDPAKVTRSALQNAASIASLLLTTECAITDIPEKQAGPAMPSPDMGGMGMY

SEQ ID NO: 2679 - protein, 367 aa, Pseudomonas syringae pv. tomato str. DC3000
MSAAALFTPFRLGGLELSSRVVMAPMTRSFSPGHVPNSKVIEYYRRRAAAGVGLIITEGTTVNHPASNGYPNVPQFFGDAPLAGWKKVVDAVHAEGGKIAPQLWHVGAVRRLGTEPDGSIPAYGPMEKVKDGQVLVHGMSKQDIDEVVAAFAQAAADAKAIGMDGVEIHGAHGYLVDQFFWEGSNQRSDEYGGSLANRSRFAIELIKAVRAAVGPDYPIIFRFSQWKQQDYSARLVQTPEALGEFVQPLSDAGVDIFHCSTRRFWEPEFEGSELNLAGWTRKLTGKPTITVGSVGLDGEFLQFMVNTEKVAQPASLENLLERLGKDEFDLVAVGRALLVDPDWAVKVREGREQDILPFSREALTTLV

SEQ ID NO: 2680 - protein, 446 aa, Zea mays
KENPPHRRGGPGGRAGMAYAARRKKRVGRYEVGRTIGQGTFAKVKFAVDADTGAPVAMKVLDKETIFAHRMLHQIKREISIMKIVRHPNIVRLNEVLAGKTKIYIILELVNGGELFDKIARYGKLRENEARKYFQQLIDAIDYCHSKGVYHRDLKPQNLLLDSRGNLKLSDFGLSTLSQNGVGLVHTTCGTPNYVAPEVLSSNGYDGSAADIWSCGVILYVLMAGYLPFEENDLPHLYEKITAAQYSCPYWFSPGAKSLIQRILDPNPRTRITIEEIREDPWFKKNYVTIRCGEDENVSLDDVQAIFDNIEDKYVSDEVTHKDGGPLMMNAFEMIALSQGLDLSALFDRQQEFVKRQTRFVSRKPAKTVVATIEVVAESMGLKVHSRNYKVFEVAPSLFMVDVRKVAGDTPEYHRFYENLCSKLCSIIWRPTEVSAKSTPLRTTTC

SEQ ID NO: 2681 - protein, 333 aa, Azoarcus sp. EbN1
MRRVTLTQFLIEQQRAGRTSPDLRLLIEVVARAVKAIAVNVSKGALADLLGEAGTDNVQGEAQKKLDVIANEILLQANEWGGHLAAMASEEVEEVHQIPFDYPKGGYLLLFDPLDGSSNIDVNISVGTIFSVLRFPEGIQEPNEQCFLQPGREQVAAGYALYGPSTLLILTVGNGVHGFTLDREMGSFVYTHPFMTVPVDTQEYAINASNARHWEPPVQRYVAELQQGRTGPRGKDFNMRWVASMVADVHRVLTRGGIFMYPLDEKCRDQGGKLRLMYEANPMAMIVEQAGGSATTGRQRILDVQPAKLHQRVPVILGSTHEVERVTAYHREG

SEQ ID NO: 2682 - protein, 252 aa, Arabidopsis thaliana
MFQVPCSKDNYAYLLHDEDTGTVGVVDPSEAAPVIEALSRKNWNLTYILNTHHHDDHIGGNAELKERYGAKVIGSAVDKDRIPGIDILLKDSDKWMFAGHEVRILDTPGHTQGHISFYFPGSATIFTGDLIYSLSCGTLSEGTPEQMLSSLQKIVSLPDDTNIYCGRENTAGNLKFALSVEPKNETLQSYATRVAHLRSQGLPSIPTTVKVEKACNPFLRISSKDIRKSLSIPDSATEAEALRRIQRARDRF

SEQ ID NO: 2683 - protein, 546 aa, Psychrobacter arcticus 273-4
MAKDVKFGIDARKQMMDGVNILANAVRVTLGPKGRNVVIDKSFGAPTITKDGVSVAKEIELENKFENMGAQLVREVASRTNDVAGDGTTTATVLAQSILQEGMKSVAAGMNPMDLKRGIDKAVRAAVEQIHLLSTPADDSKAIAQVGSISANSDTKIGELIAQAMEKVGKQGVITVEEGSSFEDTLEVVEGMQFDRGYISPYFANKQDSLTAEFENPYILLVDKKISNIREIVPLLEQVMQQSKPLLIIAEDVENEALATLVVNNMRGGLKTCAVKAPGFGDRRKAMLEDIATLTGGTVISEEIGLSLETATLEQLGTAKKVTVGKENTVIVDGAGHSADIENRVESIRRQVEESTSDYDKEKLQERMAKLAGGVAVIKVGAATETEMKEKKDRVDDALHATRAAVEEGVVPGGGVALVRAMNALSELRGDNDDQNAGINILRRAMEAPLRQIVTNSGEEASVVVNEVKSGSGNYGYNAASGEYGDMLEMGILDPAKVARSALENAASVAGLMLTTEVMITDLPQGDDGMAGMGAGGGMGGMGGMM

SEQ ID NO: 2684 - protein, 140 aa, Oryza sativa
MRKYRLAGLVAALLVLHSLATPSAQAEAHRAGGEGEEKMSSDGGPVLGGVEPVGNENDLHLVDLARFAVTEHNKKANSLLEFEKLVSVKQQVVAGTLYYFTIEVKEGDAKKLYEAKVWEKPWMDFKELQEFKPVDASANA

SEQ ID NO: 2685 - protein, 245 aa, Populus tremuloides
MGRGRVELKRIENKINRQVTFAKRRNGLLKKAYELSVLCDAEVALIIFSNRGKLYEFCSTSNMLKTLERYQKCSYGAEEVNKPAKELENSYREYLKVKARFEGLQRTQRNLLGEDLGPLNTKDLEQLERQLESSLNQVRSTKTQYMLDQLADLQNKEHLLQEANRGLTIKLDEISARNSLRPSWEGDDQQNMSYGHQHAQSQGLFQALECNPTLQIGYNPVGSDQVSAITHATQQVHGFIPGWML

SEQ ID NO: 2686 - protein, 702 aa, Xanthomonas campestris pv. vesicatoria str. 85-10
MAKSPSKSAQVPALAPANTTVDGSRGTGDELHQKAGGTHPQLTTNQGIPVGDNQNSLRATPRGPTLLEDFILREKITHFDHERIPERIVHARGSAAHGYFELTKSLSQYTTAKIFTEVGEKTPLFTRFSTVAGGAGSVDTPRDVRGFAVKFYTKEGNWDLVGNNIPVFFIQDAMKFPDLIHAVKMEPDRGFPQAASAHDTFWDFISLTPESMHMVMWAMSDRTIPRSLRMIEGFGIHSFRFLNDKGESTFVKFHWRPKLGLQSTIWDEAVKIAGADQDFHRRDLFEAIQNGDFPEWELGVQLFTEAQAATFPFDHLDSTKVIPEELVPLQIVGRMVLDRWPDNFFAETEQVAYCPANIVPGIDFSNDPLLQGRLFSYLDTQLSRLGGPNFHQIPINAPKCPFANNQRDGHMQMSVPKGRVAYEPSSLQADAPREALRGFPSHATAAEEGTKGRVRAERFADHYSQARLFFRSQTAPEQAHIASALVFELSKVETAHVREAIVGHLRHIDQELAQRVADGMGMTALPPAPPAAVAPIDMPLSPALQVIGKMKDTLKGRTVGILIHDGSDAAAIKAVRKAAEAAGATVKIVAPKLGGAKLSDGKPLAADGQLAGTPSVVFDAVAVLLSSEAAKLLTRESAALDFVSFAWAHLKAIAFDEGAQLLLKAGNVGKDAGVVPAADTKAFITAAKTRQWAREPKVRMLA

SEQ ID NO: 2687 - protein, 455 aa, Streptomyces griseus
MSVAVVLFTSDLRLHDNPVLRAALRDADEVVPLFVRDDAVHRAGFDAPNPLAFLADCLAALDAGLRHRGGRLIVRRGEAATEVRRVAEETGAARVHIAAGVSRYAARREQRIREALADSGRELHVHDAVVTALAPGRVVPTGGKDHFAVFTPYFRRWEAEGVRGTQTAPRTVRVPDGVASDPLPDRDCVENLSPGLARGGEEAGRKLVTSWLNGPMADYEDGHDDLAGDATSRLSPHLHFGTVSAAELVHRAREKGGLGGEAFVRQLAWRDFHHQVLADRPDASWSDYRPRHDRWRSDADEMHAWKSGLTGYPLVDAAMRQLAHEGWMHNRARMLAASFLTKTLYVDWREGARHFLDLLVDGDVANNQLNWQWVAGTGTDTRPNRVLNPVIQGKRFDARGDYVRGWVPELAEVEGSAIHEPWKLQGLDRAGLDYPDPVVDLAEARARFERARGLD

SEQ ID NO: 2688 - protein, 686 aa, Azoarcus sp. EbN1
MTHPLSALRPTPPLPGGNYPHLLEPLDLGFCTLKNRVLMGSMHTGLEESGNGFEKLAAFYARRARGGVGLIVTGGIAPNADGVIFPGASMLTSEDEVPHHRAIAAAVHAEGGKICMQILHTGRYAYHRGSVAPSALKAPISPANPREMNEADIERTIEDYARCAALAKSAGYDGVEVMGSEGYLINEFTVPHTNHRTDGWGGSVGNRHRFPVEIVRRVRERVGAEFIIIYRLSMLDLVEGGAPWEEIVALAKAVEAAGATLINTGVGWHEARIPTIATMVPRGAFSWVTRRMKGEVGIPLITSNRINTPEVAENVLTRGDADMVSMARPFLADPDFVVKAATGRAAEINTCIACNQACLDHIFEAKPCTCLVNPIACRELEFVITPATAKKRVAVVGAGPAGMAAAATAAERGHSVTLFDSAAEIGGQFNLAKHIPGKEEFAETLRYFRHRLDKAGVEVKLERRVGANDLVGRFDTVLLATGISPRTPDIPGIDHPKVTSYVDVITRRKAVGRTVAVIGAGGIGFDVSEFLTHADLADDPIEHYRREWGIDATYARRGGLGTASEEKPPRQLWLLQRKPTKVGEGLAKTTGWIRRTLLARRGVKMLAGVRYEKIDDAGLHLRIGDERQVLPVDTVVVCAGQEPLRDLEAPLQAAGMPVIRIGGADVAAELDAKRAIDQGTRVAAAL

SEQ ID NO: 2689 - protein, 294 aa, Listeria monocytogenes EGD-e
MTKTLQDRMILPGNGTIPYIGLGVFQVTEQEFIAGAVEKAIEVGYRLFDTAAVYNNEAIVGQAIASSAVSREELFISSKVWNGDLGYDETLFAFERTLRNLKLDYLDLYLIHWPVAGKYRDSWRAMERLHDEKLIKSIGVANFKQHHLSDLLVAANEKPVLNQVETHPLLPQNDLRKYLVEQNIAHAAWSPLAKGILMQNPVITEIAKKHQASVDQVILQWHLNRNTIIFPKSITSSRIEENSRLSYFQLDASDMEKIDRLETGKRVGPDPDDLEYFLSSIERERAYLASENEE

SEQ ID NO: 2690 - protein, 310 aa, Zygosaccharomyces rouxii
MVTLQNSTSTLKLNTGQTIPQVGLGTWRSKENEGYKAVIEALKAGYRHIDGAAVYGNEGEVGKAIQDSGVPRNEIFLTTKLWCTHQRNPQEALDQSLQRLGLDYVGLYLVHWPVPLRTENIKDGNLFQFAEKPDGSKDVDLEWNFIKTWELMQKLLESGKTKAIGVSNFSVNNLKDLLAAPTTKVTPAVNQVEFHPLLPQEELIQYCSEKGIVIEAYSPLGGENAPILSDPTVQEIAKANGVEAGHVVISWAVQKGLVTLPKSVTPSRIVGNLKVLTLSDSDVAKVDGLLKAKGERRTCYQDFSPFPIFQ

SEQ ID NO: 2691 - protein, 487 aa, Medicago truncatula
MGLVSMDQPQLLSKIATGDGHGETSSYFDGWKAYDKNPFHPTKNPQGVIQMGLAENQLTADLVQNWIMSNPEASICTLEGVHNFKEMANFQDYHGLPEFRNAVAKFMSRTRGNRVTFDPDRIVMSGGATGAHEATAFCLADPGDAFLVPTPYYPGFDRDLRWRTGVKLVPVICESANNFKLTKQALEEAYEKATEDNIRIKGLLITNPSNPLGTVMDRNTLRTVVNFINEKRIHLISDEIYAATVFSHPSFISIAEILEHDTDIECDRNLVHIVYSLSKDMGFPGFRVGIIYSYNDTVVNCARKMSSFGLVSTQTQYLMAKMLSDDEFVKKFLTESAKRLAQRYRIFTSGLTKVGINCLQSNGGLFVWMDLRGLLKEATLESELELWRVIIHEVKINVSPGVSFHCSEPGWFRVCYANMDDRDVQIALQRIRSFVVQNNKEVMVSEKNTKPCWHSNLRLSLKTRRFDDIVMSPHSPFPQSPLVKATT

SEQ ID NO: 2692 - protein, 273 aa, Nostoc punctiforme PCC 73102
MTIATSTKPQINWVNTLFFIGLHIGALFAFVPGNFSWTAVGVGFLLYWVTGGLGVTLGFHRLVTHRSFQTPKWLEYLLVFFGTLSCQGGPIEWIGTHRIHHLNSDTDTDPHDSNKGFWWSHMGWLTHYCPAHADVPRFTKDIAEDPVYQFLEKYFILIQVALGVLLLLLGGWPFVIWGIFVRIVWVYHCTWLVNSATHKFGYQSYDSGDKSTNCWWVAVLVFGEGWHNNHHAFQYSARHGLEWWEIDLTWMTVQLLQAVGLATNVKLAPAKSS

SEQ ID NO: 2693 - protein, 156 aa, Arabidopsis thaliana
MSLVPSFFGGRRTNVFDPFSLDVWDPFEGFLTPGLTNAPAKDVAAFTNAKVDWRETPEAHVFKADVPGLKKEEVKVEVEDGNILQISGERSSENEEKSDTWHRVERSSGKFMRRFRLPENAKVEEVKASMENGVLSVTVPKVQESKPEVKSIDISG

SEQ ID NO: 2694 - protein, 251 aa, Sinapis arvensis
ENQLCFDLIESWLAKNPDAASLKRNGQSIFRELALFQDYHGMPEFKKAMAEFMEEIRGNRVTFDPKKIVLAAGSTSANETLMFCLAEPGDAFLLPTPYYPGFDRDLKWRTGAEIVPIHCSSSNGFQITESALQQAYQQAHKLDLKVKGVLVTNPSNPLGTALTRRELNLLVDFIASKNIHLISDEIYSGTMFGFEQFISVMDVLKDKKLENTEVSKRVHVVYSLSKDLGLPGFRVGAIYSNDEMIVSAATK

SEQ ID NO: 2695 - protein, 605 aa, Legionella pneumophila str. Lens
MFGFISDLLTAAVSSLDELLQDTPAHQIILGTAALYFLYNQYHNPSISRWYLSRNNASMKQRIIDSAYALAKNLPGVNQIIEKELNKELSSTREKLRIQRSGMTLREEIPEEGLSPQDILSAFDVDVEKCHFDFLSVNNDSPEREFLVGGGDGKDSGALYAIHPKELTELLKEVYGATALTNPLHDKWPRINAMQAEVIRWCQNLFHGSKEGYGLLTHGGTTSIIEAMAAYVIRARAKGIDYPEIVVPETAHAAFKKAAELTGAILITVPVDKKTGAVNPRVMSSYITRNTAVIVGSAPSFMNGIHDPVSELGQLAKKKNVPFHVDACLGGFLTAFLDTSSEPMDFRVPGVTSISADLHKYGCCPKGTSVCLFSEDSPALSVYAALNWSGGLYATPGILDGSTSGARVAEVYATLSYYGKNKYQEIAKSIIKLRNAIQKELTALVEEGNGLTSEDIYVYGNPQWSILGFRSNTCNAHFIADELEKRGWKLNLLQNPDGFHLCLTHVHTLVRGFETQFIKDLREAVIDVKNYPPGKKASGNVKVYGAVGMMPIELQKEICKQYQKARLDFTAASHGSLGIFTTSPTEEDDGLRNRKVGEQKVQTSL

SEQ ID NO: 2696 - protein, 138 aa, Zea mays
AGRAGAQHRIVSLVAALLILLALAVSSTRNAQEDSMADNTGTLAGGIKDVPGNENDLHLQELARFAVDEHNKKANALLGFEKLVKAKTQVVAGTMYYLTIEVKDGEVKKLYEAKVWEKPWENFKELQEFKPVEECASA

SEQ ID NO: 2697 - protein, 371 aa, Candida albicans SC5314
MSSVASKKIITFEGHRNFRLRLVLATLSGKPIKITKIRSQDLNPGLKDHEVSFLRLLEAVTNGSHIEISYTGTTIIYRPGIIIGGDLTHNCPDTKSIGYFIEPMLMLAPFSKKKFSIIFKGLTNIAGNDTGVDAIKWGLLPVMEKFGVREVSLHILKRGSAPLGGGEVHLLCSSLIPQPLTIHALDIPKFSAIRGVAYCTRVSPSIVNRMIDSARAVLKPTGCEVNITADVWRGENSGKSPGFGITLVAESKRGWRIVTENVGSAGSLPEDSGELTAYQLLEEISNSGVVGRYQLPLALVYMTIGKEDIGRLKIQKSEIDENLVSVLRDIQEVFGTEAFFKDDAEELDSDDKFMTVSIKGVGFTNVSKKIA

SEQ ID NO: 2698 - protein, 124 aa, Zea mays
HASSNTLDGLNGFDGTDTHYFHSGPRGHHWMWDSRLFNYGNWEVLRFLLSNARWWLEEYKFDGFRFDGVTSMMYTHHGLQVTFTGNFNEYFGFATDVDAVVYLMLVNDLIHGLYPEAVTIGEDV

SEQ ID NO: 2699 - protein, 200 aa, Glycine max
  misc_feature (199)..(199): Xaa can be any naturally occurring amino acid
YDIVKFCKNEGLVLLADEVYQENIYADNKKFHSFKKIVRSLGYGEEDLPLVSYQSVSKGYYGECGKRGGYMEITGFSAPVREQIYKIASVNLCSNITGQILASLVMNPPKASDESYASYKAEKDGILASLARRAKALEVAFSKLEGITCNKAEGAMYLFPQICLPQKAIEAAKAANKAPDAFYALRLLESTGIVVVPGXG

SEQ ID NO: 2700 - protein, 314 aa, Arabidopsis thaliana
MEKTLVGGCGGENEEVILGKELDFLGREQVSNIRRDSFVEPLGSILLQLEAFWVFPWLVFINGICITLSYHRNLSHRSFDLPKWLEYLFAYGGVLAFQGDPIEWVSNHRYHHKHCETQRDPHSPTQGFWFSHMAWIFDTSSILENNTLFPIRGRDLTLTKPLGACSQCGGEENVDDLVRQPFYRFLQRTVLLHMMAYSFLFYFCGGMPLLVWGIGITIAVRLHLTFLVNSVCHIWGTRAWNTSDFSKNNWWVAILTLGEGWHNNHHAFEFSARHGLEWWQLDITWCLIRFLEAIGLATNVKLPTETQMKGKALV

SEQ ID NO: 2701 - protein, 135 aa, Arabidopsis thaliana
  misc_feature (79)..(79): Xaa can be any naturally occurring amino acid
  misc_feature (90)..(90): Xaa can be any naturally occurring amino acid
  misc_feature (92)..(92): Xaa can be any naturally occurring amino acid
  misc_feature (102)..(103): Xaa can be any naturally occurring amino acid
  misc_feature (109)..(109): Xaa can be any naturally occurring amino acid
  misc_feature (112)..(112): Xaa can be any naturally occurring amino acid
  misc_feature (115)..(116): Xaa can be any naturally occurring amino acid
  misc_feature (119)..(119): Xaa can be any naturally occurring amino acid
  misc_feature (121)..(122): Xaa can be any naturally occurring amino acid
  misc_feature (128)..(133): Xaa can be any naturally occurring amino acid
MASSMLSSTAVVTSPAQATMVAPFTGLKSSASFPVTRKANNDITSITSNGGRVSCMKVWPPIGKKKFETLSYLPDLSDXVNLVKEVDLPXSXTKWVPCVEFXXGHGFFXPLXTGXXPGXLXXGRVLGXXXXXXFF

SEQ ID NO: 2702 - protein, 105 aa, Lactococcus lactis
MLYGKENRDEAEFLEPIFGSESEQVDLPKYKLAQQSIEPRVAYQLVQDEMLDEGNARLNLATFCQTYMEPEAVKLMSQTLEKNAIDKSEYPRTTEIENRCVNMIA

SEQ ID NO: 2703 - protein, 173 aa, Candida albicans SC5314
MCLCLSDLFLIVLSVLFPPLPVWIRKGCCSCDSLINIALCMLGYFPGLIHSWYIIAKYPPYYYQQQQQQQQRKDTIYYVYRSDLENQTPRRDGRDGRDECHHDHHHHHHHHHNQAESQSAGLIVSNNHNNNNNNYGSVVEGSSSSNLTPVAPIPVENGAPPPAYTEIDNKTQH

SEQ ID NO: 2704 - protein, 509 aa, Triticum aestivum
MEGNTRGGGHSDALKNYNVGRTLGIGTFGKVRIAEHKHTGHKVAIKILNRRQMRTMEMEEKAKREIKILRLFIHPHIIRLYEVIYTPTDIFVVMEYCKYGELFDCIVEKGRLQEDEARRIFQQIISGVEYCHRNMVAHRDLKPENLLLDSKYNVKLADFGLSNVMHDGHFLKTSCGSPNYAAPEVISGKLYAGPEVDVWSCGVILYALLCGTLPFDDDNIPKLFKKIKGGIYILPSHLSALARDLIPRMLVVDPMKRITIREIREHPWFQNRLPRYLAVPPPDTAQQAKMIDEDTLKEIVNLGYDKDHVCESLCNRLQNEATVAYYLLLDNRFRATSGYLGADYLQSMGRSFNQFTSLESASPSTRQYLPASNDSQGSGLRPYYPVERKWALGLQSRAQPREIMIEVLKALQELNVCWKKNGHYNMKCRWCPGFPQVSDMLDANHSFVDDSTIMDNGDANGRLPAVIKFEIQLYKTKDDKYLLDMQRVTGPQLLFLDFCAAFLTNLRVL

SEQ ID NO: 2705 - protein, 176 aa, Gossypium barbadense
LFSFILILTHFLLKSSIRIQVLGWICVAISVSVFAAPLNIMARVIRTESVEFMPFTLSFFLTLSAVMWFAYGLFIKDLCVALPNVLGFILGMLQMLLYAIYRHSEKVNIEEKKLPAEQMKSINVVLTTLGASEVHPVVLDIHTDDTKEEDNKNNEPTGEPDKQTDVKMEDANESPV

SEQ ID NO: 2706 - protein, 157 aa, Lactococcus lactis
FVDPELEWDFRLKNVISINTSGHKYGLVYTGVGWVLWRDKKYLPEELIFKVSYLGGELPTMAINFSHSASQLIGQYYNFVRYGFDGYKAIHERTHKVAMYLAEEIEKTGMFEIMNDGSQLPIVCYKLKENSNLGWNLYDLADRLFNEGMASACLSTS

SEQ ID NO: 2707 - protein, 197 aa, Davidia involucrata
MVVMETWLLNCYHRYKEDVKILKKMGLNAYRFSISWSRVLPCGRLSGGVNKEGINYYNNLIDELLHNGIEPYVTLFHWDLPQALEDEYGGFLSPRIVEDFCNYVELCFWEFGDRVKHWITFNEPWSYSVAGYVNGVFPPGRGATSPEPVRRSNIKTISALHRSSGNQGLRMIINSGDPGTEPYIVSHYQLLAHAAAV

SEQ ID NO: 2708 - protein, 695 aa, Psychrobacter arcticus 273-4
MNKNIDHTDPAKDMNMERGNGGETHQRAGDDTKILTTQQGVPISDNQNSLKAGPRGPTLLEDFVLREKIHHFDHERIPERIVHARGSAAHGYFELTESLEEYTTAKILTETGKQTPLFTRFSTVAGSKGSKDTPRDVRGFAVKIYTEEGNWDLVGNDMPIFFIQDAMKFPDLVHAVKPEPDRGFPQAASAHDTFWDFVSLSPETMHNVIWLMSDRGIPRSLRMIEGFGIHSYRLINKAGKSTFMRFHWKPVLGVQSTTWDEAVKISGADPDYHRRDLFESINNGDFPEWEFGVQLFTEEEASKFPFDHLDATKMIPEEMVPVKIVGKMVLNRYPDNFFAETEQVAFCPSHVPPGIDFSNDPLLQGRLFSYLDTQLSRLGSPNFAQIPINAPKCPFANNQQDGHMQMQVPKTRVLYEPQSLDPTRPRESVKRGFASFAETLDDGVKGRIRAESFADHYSQPRMFYRSQTTIEQAHIASAYAFELGKVDTAHVRSRTLGHLRNIDEDLASRVAKALGMELPEAADAAAPIQDMEISPAVRTIGLSPKSLKGRMIGILVAEGSKHSEIEKYEKAAQAQGASVKIIAPNKEVTLDDDTIIQADERVAGGPSVMFDAVVSIIMPDQAKKLAKDSATLDWFTDAYVHCKAISYCGATDEFILSKLPIEKDAFVTPLSDLDVFIENAKSRLWEREPKVRDLA

SEQ ID NO: 2709 - protein, 499 aa, Secale cereale
PQIVNDGVTVAREVELEDPVENIGAKLVRQAAAKTNDLAGDGTTTSVVLAQGLIAEGVKVIAAGANPVQITRGIEKTAKALVLELKKMSKEVEDSELADVAAVSAGNNYEIGNMIAEAMSKVGRKGVVTLEEGRSSENNLYVVEGMQFERGYISPYFVTDSEKMTTEYENCKLLLVDKKITNARDLINVLEEAIRGQYPILIIAEDIEQEALATLVVNKLRGSLKICAIKAPGFGERKTQYLDDIAILTGGTVIRDEVGLTLDKADNTVLGTAAKVVLTKESTTIVGDGSTQEEVTKRVAQIKNLIEAAEQDYEKEKLNERIAKLAGGVAVIQVGAQTETELKEKKLRVEDALNATKAAVEEGIVVGGGCTLLRLAAKVDAIKDTLENDEQKVGAEIVRRALCYPLKLIAKNAGVNGSVVTEKVLSNDNFKFGYNAATGQYEDLMAAGIIDPTKVVRCCLEHAASVAKTFLTSDVVVVEIKEPEAAPLANPMDNSGFGY

SEQ ID NO: 2710 - protein, 174 aa, Lycopersicon esculentum
NCVGFVCPEYFKSDFVYRTLWLQDSPSEDITSILYDVFDYFEDVREQHGKVFVHCCQGVSRSTSLVIAYRMWREGQSFDDAFEYVKAARGIADPNMGFACQLLQCQKRVHASPLSPSSLLRMYRVAPHSPYDPLHLVPKMLNDPSPAALDSRGAFIIHIPSSVYVWIGKKCEAI

SEQ ID NO: 2711 - protein, 703 aa, Xanthomonas axonopodis pv. citri str. 306
MAKSPSKSAQVPAVSPAASATPDVSRGTGDELHQKAGGTHPQLTTNQGIPVGDNQNSLRATPRGPTLLEDFILREKITHFDHERIPERIVHARGSAAHGYFELTKSLSQYTTAKIFTEVGEKTPLFTRFSTVAGGAGSVDTPRDVRGFAVKFYTKEGNWDLVGNNIPVFFIQDAMKFPDLIHAVKMEPDRGFPQAASAHDTFWDFISLTPESMHMIMWAMSDRTIPRSLRTIEGFGIHSFRFLNEKGESTFVKFHWRPKLGLQSTIWDEAVKIAGADQDFHRRDLFEAIQRGDFPEWELGVQLFTEAQAETFPFDHLDSTKVIPEELIPLQIVGRMVLDRWPDNFFAETEQVAYCPANIVPGIDFSNDPLLQGRLFSYLDTQLSRLGGPNFHQIPINAPKCPFANNQRDGHMQMGVPKGRVAYEPSSLQADAPREALRGFPSHATPAEEGAKGRVRAESFADHYSQARLFFRSQTAPEQAHIASALVFELSKVETAHVREAIVGHLRHIDQELAQRVADGMGMTALPPAPPAAVAPIDMPLSPALQVIGKMKDTLKGRTVGILIHDGSDAAAIKAVRKAAEAAGATVKIVAPKLGGAKLNDGKQLAADGQLAGTPSVVFDAVAVLLSSEAAKLLTRESAALDFVSFAWAHLKAIAFDEGAQLLLKAGNVGKDAGVVPAADTKAFIAAAKTRQWAREPKVRMLA

SEQ ID NO: 2712 - protein, 242 aa, Zea mays
MRVAATRPASSAPVALLAALALLFLVGSASLAIGAMASHVLGGKSENPAAANSLETDGLARFAVDEHNKRENALLEFVRVVEAKEQTVAGTVHHLTLEALEAGRKKVYEAKVWVKPWLDFKELQEFRHTGDATSFTISDLGAKRGGHEPGWRDVPVHDPVVKDAASHAVKSIQQRSNSLLPYELVEIVRAKAEVVEDFAKFDILMKLKRGTKEEKMKAEVHKNLEGAFVLNQMQPEHDESSS

SEQ ID NO: 2713 - protein, 274 aa, Saccharomyces cerevisiae
MQVKSIKMRWESGGVNYCYLLSDSKNKKSWLIDPAEPPEVLPELTEDEKISVEAIVNTHHHYDHADGNADILKYLKEKNPTSKVEVIGGSKDCPKVTIIPENLKKLHLGDLEITCIRTPCHTRDSICYYVKDPTTDERCIFTGDTLFTAGCGRFFEGTGEEMDIALNNSILETVGRQNWSKTRVYPGHEYTSDNVKFVRKIYPQVGENKALDELEQFCSKHKVTAGRFTLKDEVEFNPFMRLEDPKVQKAAGDTNNSWDRAQIMDKLRAMKNRM

SEQ ID NO: 2714 - protein, 477 aa, Streptococcus mutans UA159
MSKLPENFLWGGAVAAHQLEGGWQEGGKGISVADVMTAGRHGVAREITAGVLEGKYYPNHEAIDFYHHYKEDVKLFAEMGFKCFRTSIAWTRIFPKGDEAEPNEAGLQFYDDLFDECLKYGIEPVVTLSHFELPYHLVTEYGGFTNRKVIDFFVHFAEVCFRRYKDKVKYWMTFNEINNQANYQEDFAPFTNSGIVYKEGDDREAIMYQAAHYELVASARAVKIGHAINPNLNIGCMVAMCPIYPATCNPKDILMAQKAMQKRYYFADVHVHGFYPEHIFKYWERKAIKVDFTERDKKDLFEGTVDYIGFSYYMSFVIDAHRENNPYYDYLETEDLVKNPYVKASDWDWQIDPQGLRYALNWFTDMYHLPLFIVENGFGAIDQVEADGMVHDDYRIDYLGAHIKEMIKAVDEDGVELMGYTPWGCIDLVSAGTGEMRKRYGFIYVDKDDEGKGTLKRSPKLSFNWYKEVIASNGDDI

SEQ ID NO: 2715 - protein, 540 aa, Clostridium difficile
MAKEIKFSEETRRALEAGVNKLADTVKVTLGPKGRNVILDKKFGSPLITNDGVTIAKEIELEDRFENMGAQLVKEVATKTNDVAGDGTTTATVLAQAIIREGLKNVTAGANPILLRKGIQKAVTVAVEELKNQSRIVETQEAISQVASISAGDEEVGKLIAEAMEIVGKDGVITVEESQTMNTELDAVEGMQFDRGFVSAYMVTDVDKMEAVLNDPYILITDKKISNIQELLPVLEQIVQQGKKLLIIAEDVEGEALSTLVVNKLRGTFDVVAVKAPGFGDRRKEMLQDIAILTGAQVISEELGYDLKEADLSMLGRASSVKVTKESTTIVDGSGDKKAIEDRVTQIKHQVEQTTSDFDREKLMERLAKLAGGVAVVKVGAATEVELKERKLRIEDALNATRAAVEEGIVAGGGTAFVSVIPAIGTLIESLEGEVKLGAQIVKKALEEPLRQIAINAGLEGAVIVQNVVNSEAETGFDALNEKYVNMIEAGIVDPTKVSRSALQNAASIASTFLTTEAAVADLPEKEDAGMPGTGMDGMY

SEQ ID NO: 2716 - protein, 348 aa, Oryza sativa (japonica cultivar-group)
MVEQLRREISIMRMVRHPNVVGIREVLASRARVFVVMEYARGGELFAKVARGRLTEEHARRYFQQLVAAVGFCHGRGVAHRDLKPENLLLDEEGRLKVTDFGLAALPEQLRQDGLLHTQCGTPAYVAPEVLRKRGYDGARADLWSCGVVLYVLLCGFLPFQHENYAKMYQKIFKAEYQVPPWVSGDARRLIVRLLVVDPAKRISIPEIMRTPWFKKGFVPPVPTSPVSPKKWEEDDVLLDGGDSGAMSPRTCNAFQLISSMSSGFDLSGMFESEQKAATVFTSRAPAATVIQKLEAVGRSLGYSATRGKGWKLRLEATASVQRDVKSVGCISFSFFARGYVQAKSRDV

SEQ ID NO: 2717 - protein, 130 aa, Streptococcus mutans UA159
MKFLHTCIRVKDLDASLKFYQEALDFKEVRRNDFPEYKFTLVYLQLEDDPDYELELTYNYDHEAYDLGNGYGHIAVGVDDLEATHQAHQKAGYTVTDLSGLPGKPKMYYFITDPDGYKIEVIRLKQFQEK

SEQ ID NO: 2718 - protein, 346 aa, Mycoplasma penetrans HF-2
MKKNLFDSFKIGNVEIKNRIVMPPMCMHTAKNGEVNDFHILHYGSRSIGGVGLIIVEATSVQQHYGNITDQDLGIWDDSFIFGLSKIATAIHKFGAKAAIQLGHAGRKCESKYVDKIYGPSPIKFESKYVNYLTPTEMTIKEIQEVKQHFIDAAIRAKKAGFDMVEIHAAHGYLLSSFLTPISNQRDDVYGQNKALLLEEILTGIKKANGSDYPIIVRISAYDWHPNGNKPQDFIEMLNPLIKQSLIDAIDVSTGGTTEDAKITAYDCYQIPFCLEIKQNVNVPCIGGGLIVDAKSANKIVENEAADAVYIGRQLLRNPYWPIQASEDLNIDIKFPKQYERAKLVK

SEQ ID NO: 2719 - protein, 534 aa, Nicotiana plumbaginifolia
MGNCCSRGQPDDNEHTSNNDQKSNTKNDQSISNNSQQQQNNGSITPSKSPDPSSKPSKNSPIGPVLGRPMEDVRKTYSIGKELGRGQFGITHLCTHKQSGEQFACKTIAKRKLVNKEDIEDVKREVQIMHHLTGQQNIVELKGAYEDKHSVHLVMELCAGGELFDRIIAKGHYTERAAATLLRTIVQIVHTCHSMGVIHRDLKPENFLLLNKDEDSPLKATDFGLSVFYKQGDVFKDIVGSAYYIAPEVLKRRYGPEVDIWSVGVMLYILLSGVPPFWAETEHGIFNAILRGHVDFSSDPWPAISHGAKDIVKKMLTIDPKQRLTAIQVLNHPWIKEDGEAPDTPLDNAVLSRLKQFRAMNNFKKVALRVIAGCLSEEEIMGLKQMFKSMDTDNSGAITLEELKQGLAKQGTKLSDHEIEQLMEAADADGNGTIDYEEFITATMHMNRMDKEEHLYTAFQYFDKDNSGFITIEELEQALREFGMTDGKDIKEIVAEVDSNNDGRINYEEFVAMMRKGTPETAANLKKRRESFVA

SEQ ID NO: 2720 - protein, 336 aa, Pseudomonas syringae pv. tomato str. DC3000
MSRVTLSRYLIEQTRSNNTPADLRFLIEVVARACKEISHAVSKGALGGVLGSMGTENVQGEVQKKLDVISNEILLEANEWGGHLAGMASEEMDNAYQIPGKYPKGAYLLVFDPLDGSSNIDINAPVGTIFSVLRCPNEYLSQNEALNEKAFLQPGTEQVAAGYAIYGPQTMLVLTLGDGVKGFTLDREMGSFVLTHEDITIPETTQEFAVNMSNQRHWEAPVQRYVSELLAGEDGPLKKNYNMRWVAAMVADVHRILTRGGLFMYPRDSREPSKPGKLRLMYEANPMSFLVEQAGGASTDGHQRILDIQPEGLHQRVAVYLGSKEEVERATAYHKE

SEQ ID NO: 2721 - protein, 1425 aa, Ashbya gossypii ATCC 10895
MTAGHRDERPDREGGSERDEHLNRVVQSVSDATKRLSQISNSSTAHTKTGKRKNRDTVGPWKLGKTLGKGSSGRVRLAKNMQSGKLAAIKIVPKRNVRHNQKQVTALPYGIEREIIIMKLITHPNIMALYEVWENKSELYLVLEYVEGGELFDYLIARGKLPEQEAIHYFKQIVQGVSYCHNFNICHRDLKPENLLLDKKNKTVKIADFGMAALETTNRLLETSCGSPHYASPEIVMGQKYHGSPSDVWSCGIILFALLTGHLPFNDDNVRKLLLKVQHGRYQMPSNVSKEAKDLISKILVVDPEKRITVDKILEHPLLVKYDNPGKGGLACPLEKPEERPKVLDIHSIDDIDETILSNLQILWHGAPKEYLVDKLLQSGFTEEKLFYALLLRYQQRQSVEPTSVPSNMASTNGSGAFARASNNDQSVINAPKVTQKSQFSINSLLVSPKKTREGYVASSSRVFKHSVSRRSLHVSPSPMKSSTSCRSLKSSSSKRLQSPNPKAITQPVKVTSPQPRRRTLHNSASKRSLYSLTSISKRSLNLNEFLQEANEVKTPKLPSMPLQDQPRSEAPKTPTKTTYGADSHGGEKPTFISVLHDCPTVDSEGMVFKSSSGTPMIAANAPIIQPAFIFGVGAFPGTKQPSSNSLSKPSLNSQSSPKQAQEATANSMRETIRDRQTLVVEKRVPSKTESVPPAFPRVRPIMERKHGSDLTLVRDTRSVAKEKRSSLSLDPRRTAPEPPRGIETLLRRYSLKNSIKSRSSLKKKRDSGAWSITDKTIFQDLGQVPEDEEQEKDSEEKGNDTFISTTETSDTPSSKFKVTTSTPIKKDDATAISAENAAVGTEQSGSEDEATNFDSNAHSYPISTDLKTEDDLTPIKPQGQTDLLRMPSSFMNSSNTFANLNNFISNIDKEYSPENSDSGRIEKDEPAGKAQPEQITVKKRQRTLAPGGYLSPSIPRMESENSLNQELGSRISDLSDLSFANDMPTYTNTAHAVSISPGTRNVCSFSPLEPRSPQDVSNNGKMRSNLHIPLRQLSEDMCDKTITTQEGESVNIFEDAPEEEGSLTTSTSGSVPNIHQKAISIDTMNTSCALVPVSHVRTSIHMNGDSSVLDWSTSDGILSKARPLPTSNHVRKKSGNRLSNNLTLSKSMMSMFKNLDQINVTDIQDPMPVSDLLSKGVDPIEPIEPLKNDQVTLKAESIGAESDSINMDLADRKHVTIFHDNVSDKNFKSTRMENSDKGSLGSGAPQATHLFHTGNKDMKSHETLLSPITETPAAALSATSLTRKESISSDGKSVKDETKKSGKGNWFMRLIMSFTKPKKTVIQEHMTVLPFDDVNIITLQQFSYQGVEYEIRQMERRKDKQKVEYDCRLLDGDFKFKINIYGENSAATKVSVKQKGRSDELAFTKLNTDIEALIKAKENAANVK

SEQ ID NO: 2722 - protein, 371 aa, Zea mays
MGSGGANTAPLITPYKMGKFDVSHRVVLAPLTRQRSYGNVPQPHAILYYQQRATKGGLLIAEATGVSDTAQGYKDTPGIWTHEQVEAWKPIVDGVHQKGGIFFCQIWHVGRVSNSTFQPNGQAPISSTDKPLKPQVRANGIDVATFAVPRRLETDEIPLVVNDFRVAARNAIEAGFDGVEIHGAHGYLIDQFLKDGVNDRTDKYGGSLENRCRFALEVTQAVVDEIGADKVGIRLSPFASYSEAPDSDPEALGLYMANALNEFGILYCHMVEPRMVKLGEKFETPYSLRPIRDAFRGTFIVAGGYGREDGNRAISTGYADLVAFGRLFLANPDLPRRFEVDAPLNKYNRDTFYIPDPVVGYTDYPFLSSDV

SEQ ID NO: 2723 - protein, 537 aa, Bifidobacterium animalis subsp. lactis
MAKIIEYDEEARQGMLAGLDKLADTVKVTLGPKGRNVVLDKTYGAPTITNDGVSIAKEIDLEDPFERIGAELVKEVAKRTDDVAGDGTTTATVLAQSLVHEGLKNVVAGSNPIALRRGIEKASDALVKQLVASAKPVETKEQIAATATISAGDPEVGEKIAEALDKVGQDGVVTVEDNNRFGLDLDFTEGMRFDKGYISPYFVTNAEDQTAVLDDPYILLTSSKVSSQQDVVHIAELVMKTGKPLLIVAEDVDGEALPTLILNNIRGTFKSCAVKAPGFGDRRKAMLQDMAILTGGQVVSEDLGLKLDSIDLSVFGTAKKVIVSKDETTIVSGGGSKEDVAARVAQIRAEIEKTDSDYDREKLQERLAKLAGGVAVIKVGAATEVEAKERKHRIEDAVRNAKAAIEEGLVPGGGVALVQAAEKVEKDFNLEGDEATGAAIVFSGIEAPIKQIAENAGLSGAVVIDKVRSLPEGEGFNAATDTYEDLMAAGVTDPVKVTRSALQNAASIAGLFLTTEAVVANKPEPAAAPAAGQDMGY

SEQ ID NO: 2724 - protein, 435 aa, Triticum aestivum
  misc_feature (250)..(250): Xaa can be any naturally occurring amino acid
  misc_feature (276)..(276): Xaa can be any naturally occurring amino acid
  misc_feature (324)..(324): Xaa can be any naturally occurring amino acid
  misc_feature (359)..(359): Xaa can be any naturally occurring amino acid
MMGRKALDYEELNENVKKVQYAVRGELYLRASELQKEGKRIIFTNVGNPHALGQKPLTFPRQVVALCQAPFLLDDPNVGLIFPADAIARAKHYLSLAPGGLGAYSDSRGIPGVRQEVAEFIQRRDGYPSDPELIYLTDGASKGVMQMLNAIIRNERDGILVPVPQYPLYSAAISLFGGSLVPYYLEEEANWGLDLVSTRQSVAEARSKGITVRAMVIINPGNPTGQCLSEANIRELLNFCYQENLVLRAXEVYHPNVYQDEPPFISARKVMFDLGXPPVSREVQLISFHTVSKGYWGECGQRGGYFEMTNIPSKTVDEIYKESXWTLSPNVPGHIFMGLMINPSKTVYILYLTNSIQAXTFLQSAMTTAQIMTDCFHRVLMLLFYSSKRAVIISLFLKLQDLLMKTNFPMKDIFSISITIIPCTSNHQRLLHNAS

SEQ ID NO: 2725 - protein, 481 aa, Bacillus subtilis
MLYLEKTNGVINMSSNEKRFPEGFLWGGAVAANQVEGAYNEGGKGLSTADVSPNGIMSPFDESMTSLNLYHNGIDFYHRYKEDIALFAEMGFKAFRTSIAWTRIFPNGDEEEPNEEGLRFYDDLFDELLKHHIEPVVTISHYEMPLGLVKNYGGWKNRKVIEFYERYAKTVFKRYQHKVKYWMTFNEINVVLHAPFTGGGLVFEEGENKLNAMYQAAHHQFVASALAVKAGHDIIPDSKIGCMIAATTTYPMTSKPEDVFAAMENERKTLFFSDVQARGAYPGYMKRYLAENNIEIEMAEGDEELLKEHTVDYIGFSYYMSMAASTDPEELAKSGGNLLGGVKNPYLKSSEWGWQIDPKGLRITLNTLYDRYQKPLFIVENGLGAVDKVEEDGTIQDDYRINYLRDHLIEAREAIADGVELIGYTSWGPIDLVSASTAEMKKRYGFIYVDRDNEGNGTFNRIKKKSFNWYQQVIATNGESL

SEQ ID NO: 2726 - protein, 180 aa, Arabidopsis thaliana
MTTYGTNQKSSNDLAPKLEYITRGINQHKRSGLATRRPWKQMLDLGSFNFPRKLATVITRIRANTVYFQTNYTIVVLFSVFLSLIWNPFSLLVLLALLGAWLFLYFLRDEPLTVFDREIDHRIVLIIMSVITLSILFLTDAKLNIAVAIVAGALAVLSHAAVRKTEDLFQTDEETSLLNP

SEQ ID NO: 2727 - protein, 232 aa, Medicago truncatula
MALEALNSPTSTTPKFTFDEPNLPWTKRKRSKRSRSCTEEEYLALCLIMLARGHTNRHDFNPLNPPPTTIDNNNNNTKLSYKCSVCNKEFSSYQALGGHKASHRKNSVGGGGDDHPSTSSAATTSSANTNGGGVRSHECSICHRSFPTGQALGGHKRCHYEGVVGGGASAVTVSEGMGSTHSHQRDFDLNIPAFPEFANKVGEDEVESPHPVMMKKKARVFVVPKIEIPNFQ

SEQ ID NO: 2728 - protein, 445 aa, Clostridium cellulovorans
MEKLRFPKDFIFGTATAAYQIEGAYKEDEKGESIWDRFSHIPGNVAKMHNGDIACDHYHRYKEDVQLLKSLGIKSYRFSIAWPRIFPKGFGEINQKGIQFYRDLIDELIKNDIEPAITIYHWDLPQKLQDIGGWANPQVADYYVDYANLLFREFGDRVKTWITHNEPWVASYLGYALGVHAPGIKDMKMALLAAHNILLSHFKAVKAYRELEQDGQIGITLNLSTCYSNSADEEDIAAAHRSDGWNNRWFLDAALKGTYPEDMIKIFSDTNIMPELPKELFTEVFETSDFLGINYYTRQVVKNNSEAFIGAESVAMDNPKTEMGWEIYPQGLYDLLTRIHRDYGNIDLYITENGAAFNDMVNRDGKVEDENRLDYLYTHFAAALSAIEAGVPLKGYYIWSFMDNFEWAEGYEKRFGIVHVNYKTQERTIKKSAYWYKELIERSNK

SEQ ID NO: 2729 - protein, 334 aa, Actinobacillus pleuropneumoniae serovar 1 str. 4074
MKTLGEFIIEKQAEYPEAKGELSGILSSIRLAAKIIHREINRAGLSQDILGVAGSENIQGEAQMKLDVFANETMKKALLAREEVAGFASEEDDNFVAFENDRAKNAKYILMTDPLDGSSNIDVNVSVGTIFSIYKRVSPIGSPVTMEDFLQEGRKQVASGYVTYGSSTMLVYTTGNGVNGFTYDPSLGLFILSHPDMKIPTEGKYYSINEGQYVTFPMGVKKFIKYCQESDEATKRPYSSRYIGSLVSDFHRNLLKGGIYIYPTSTVYPKGKLRLLYEGNPMAFLAEQAGGMATDGFNPILDIKPSELHQRVPFFVGSTSMVKQADKFMQECAE

SEQ ID NO: 2730 - protein, 666 aa, Vibrio vulnificus YJ016
MKCRSKVTLIAASLWLAASAQALEAKLSEKDLPLLAPEVQHETASKRVTSRFTRSHYKHFNFNDDFSRAMFNRYIEMLDYNKNIFTQADIDSFEKWSTELDDQLKEGNNQIAFDVYNLSMKKRFERFSYALKLLDQEITFDTDDEIELDRTDAAWPKDQTELNELWRQRVKYDALNLKLTGKDWPEIKEILEKRYNNAMKRITQTRNEDVFQLYMNAFAREVDPHTSYLSPRNAEQFQSEMNLSLEGIGAVLQMTDDYTVIRSLVAGGPASKSKQLGEGDRIIGVGQDKKDIVDVIGWRLDDVVQLIKGPKGTKVHLQVLPEGKDSKSYVVTIVRDKIRLEDRAVKAEVIEKDGKKIGVLEVPSFYVGLSADTDKLLTDLKGKGIDGIIVDLRNNGGGALTEATALTGLFIEKGPVVQVRDSYGRVKVNADTDGQISYSGPMTVLVNRYSASASEIFAAALQDYGRAIILGENSFGKGTVQQHRSLNHIYDLFDKEIGYVQYTIQKFYRIDGGSTQNKGVVPDIPFPTAIDPEETGESVEDNALPWDSIEKADYQVLQRNDSLIEQLRVKHDERIANELEFKFIAEDIAKYKAEKDDNTLSLNEKVRKQESEQADKQRLDRINQRQALAGKEAFKTLDDVPKDYETPDAYLDESVAIMVDMLKKPS

SEQ ID NO: 2731 - protein, 422 aa, Schizosaccharomyces pombe
MDRRHRVYRVFNQEMYVEPNFKVVKELGQGAYGIVCAARNVASKDQEAVAIKKITNVFSKSILTKRALREIKLLIHFRNHRNITCIYDLDIINPYNFNEVYIYEELMEADLNAIIKSGQPLTDAHFQSFIYQILCGLKYIHSANVIHRDLKPGNLLVNADCELKICDFGLARGCSENPEENPGFMTEYVATRWYRAPEIMLSFSSYHKGIDVWSVGCILAELLGGTPLFKGKDFVHQLNLILHQLGTPDEETLSHISSSRAQEYVRSLPKQRPIPFETNFPKANPLALDLLAKLLAFDPNRRISVDDALEHPYLAVWHDPSDEPVCDSVFDFSFEYIEDANELRRVILDEVLNFRQKVRRRSHPTNPTVNIPQPAQTVPSNDNGSFNVSSSSSSQTSNKKRHDHSYNETAAIDHKSDDNRHN

SEQ ID NO: 2732 - protein, 326 aa, Triticum aestivum
  misc_feature (255)..(255): Xaa can be any naturally occurring amino acid
  misc_feature (263)..(263): Xaa can be any naturally occurring amino acid
  misc_feature (266)..(266): Xaa can be any naturally occurring amino acid
  misc_feature (270)..(270): Xaa can be any naturally occurring amino acid
  misc_feature (286)..(286): Xaa can be any naturally occurring amino acid
  misc_feature (290)..(290): Xaa can be any naturally occurring amino acid
  misc_feature (301)..(301): Xaa can be any naturally occurring amino acid
MGVAHASSSAGEAVYSTFSSRYVREELPRYRMPEGSIPKEAAYQIISDELMLDGNPRLNLASFVTTWMEPECGKLMMDSVNKNYVDMDEYPVTTELQNRCVNMIAHLFNAPIGEDETAIGVSTVGSSEAIMLAGLAFKRKWANKMKEQGKPCDKPNIVTGANVQVCWEKFARYFEVELKEVKLTEGYYVMDPKKAVEMVDENTICVAAILGSTLTGEYEDVKMLNDLLVAKNKETGWDVPIHVDAASGRFIAPFXQPELEWDXRLXLVRXHVSGHSMACVPGVGWXIWRXKPNLPETYFHXNYLGTIAHGHTNFPGGYQNMAQIIT

SEQ ID NO: 2733 - protein, 470 aa, Arabidopsis thaliana
MKQLSTKVTSNGHGQDSSYFLGWEEYEKNPYDEIKNPNGMIQMGLAENQLCFDLIESWLTKNPDAASLKRNGQSIFRELALFQDYHGMPEFKKAMAEFMEEIRGNRVTFDPKKIVLAAGSTSANETLMFCLAEPGDAFLLPTPYYPGFDRDLKWRTGAEIVPIHCSSSNGFQITESALQQAYQQAQKLDLKVKGVLVTNPSNPLGTALTRRELNLLVDFITSKNIHLISDEIYSGTMFGFEQFISVMDVLKDKKLEDTEVSKRVHVVYSLSKDLGLPGFRVGAIYSNDEMIVSAATKMSSFGLVSSQTQYLLSALLSDKKFTSQYLEENQKRLKSRQRRLVSGLESAGITCLRSNAGLFCWVDMRHLLDTNTFEAELDLWKKIVYNVKLNISPGSSCHCTEPGWFRVCFANMSEDTLDLALKRLKTFVESTDCGRMISRSSHERLKSLRKKTVSNWVFRVSWTDRVPDER

SEQ ID NO: 2734 - protein, 486 aa, Bacillus firmus
MNSGVHVGNSDSLKAVWFRRDFRLHDHTALKHAIEAIEKHGGKWLAFFYLDPKTASVEPVHHDYFFQTVMQFKQMLKTNGGDLYIITGTIEGGQLSKLLQAFPEIDAVYANDDRVGDGRLRDEAAEHFLAKQSIPFYTFEDAYLTEPDQVLKKDGTPYKVFTPYYKAWAKERKRTPAVIKRDVLLGSVHKGTAPDREAETLFNNLIKKCSYDWSAIGEEHAIKRLQMFTKKRLSGYKANRDFPSITGTSRLSPYIKTGAVSSRSIYYHILNAEADSYSAETFLKELAWRDFYRMVHFYEPDCKDREIMEGYRELNWSHDQDDLTSWKRGETGFPIVDAGMRQLLNEGWMHNRLRMITASFLTKDLLIDWRLGERYFERMLIDYDPSSNIGGWQWAASVGTDAVPYFRIFNPVTQSKRFDENGTYIRTYIPELNHVPDHYIHEPWKMSEEEQVKYKCRLDEDYPLPIVDHSKQRKKALSFFKGDDEE

SEQ ID NO: 2735 - protein, 484 aa, Zea mays
  misc_feature (377)..(377): Xaa can be any naturally occurring amino acid
  misc_feature (439)..(439): Xaa can be any naturally occurring amino acid
  misc_feature (460)..(460): Xaa can be any naturally occurring amino acid
  misc_feature (463)..(463): Xaa can be any naturally occurring amino acid
  misc_feature (470)..(470): Xaa can be any naturally occurring amino acid
MAATVAVDNLNPKVLKCEYAVRGEIVIHAQRLQQQLQTQPGSLPFDEILYCNIGNPQSLGQQPVTFFREVLALCDHPDLLKKEEIKTLFSADSISRAKQILALIPGRATGAYSHSQGIKGLRDAIASGIASRDGFPANADDIFLTDGASPGVHLMMQLLIRNEKDGILVPIPQYPLYSASIALHGGSLVPYYLNESTGWGLEISDVKKQLEDARSRGIDVRALVVINPGNPTGQVLAEENQYDIVKFCKNEGLVLLADEVYQENIYADNKKFHSFKKIVRSLGYGEEDLPLVSYQSVSKGYYGECGKRGGYMEITGFSAPVREQIYKIASVNLCSNITGQILASLVMNPPKASDESYASYKAEKDGILASLARRAKXALEAAFSKLEGITCNKAEGAMYLFPQICLPQKAIEAAKAANKAPDAFYALRLLESTGIVVVXPGSGFGQVPGTWHFRCTILPXEEXIPAIISXFTVFHEAFMAEYRD

SEQ ID NO: 2736 - protein, 473 aa, Aeropyrum pernix K1
MAADDIKSRLDRVLRELFLLSSRDINPWTGRVFTHVYDPGMDEVRKAASKALELYRDKTMLDFTVYPSIIELEKQLLGFAGHLFHAPEGYSGTFTYGGTESIILAVLAARERWRRAGKSGAGKIVMPITAHPAFAKAAYLLGLKVERVPVDSVTLQADPAIIEEKIDRDTVMIVASAVDYPYGSLDPVEDLGDIAAARDVWLHVDACIGGMVLAFASDAGEEVGKFDFGVEGVRSFSVDMHKYGYAPKGSSILLFRRARDKKPTIFVDSSWPGYPLVNQAILSTRSAGTLAAAWAVARTLGVEGYRELAGMVLEARRRIQKGLESLGLEVLGRPKAGILSFTDSDIDVVEVATRLGRAGWVVQLQPGNKHLGFPTSIHLTISPIHARVVDSFLAAVEESIRGAPEPESRFEPALIEEGFKAVEDLLRRIENAGFDDKAVRVVNEMIYLLKPDVVAELIKEAMLEIFKPSWPGW

SEQ ID NO: 2737 - protein, 221 aa, Cupriavidus necator
MIPMTQKLTFTRFVIAEQHGSKTVDSDLIALLLDVSIACRKIASSIAKGSPLALGGEAAGRDVPGEIQSKTDMATPCFFARSEALARHLAGMASEGMEGAYPVPLRSPQGRYLLVCDPLDGSANIDVNVSGGIIFSVLRCPEGISAPEERDLLQAGSAQMAAGYALYDAPALLVLKTGSGIHGFTLDADSGQYVLTHPNAKIPQVPAGSRSALRPSTSGQS

SEQ ID NO: 2738 - protein, 817 aa, Ostreococcus tauri
MRHIHALSTRRARFVDPPVRLTRARAVDDADAHARSTHPRAMHPSASSTVRARVTRTGGRTTRARRVFHAASPSTGAAPACPPKRSATRPRASSETEVETSTTTARSMEAADGSEAVALDEQLAPHVEHLRYRYATFRERKSAIEAAEGSLDAFSRGYERFGFTTDASGEITFREWAPAASHVALIGDFNDWNGDATPLRRSEFGTWEVTLPKGAIAHGSRVKVRVYNDQGQFDRIPAWIRRATVEPGVMGAGYDGVYWAPEEKYEFKNAKPKKPVASRIYEAHVGMSSNDPKINSYREFADDVLPRVAAGGYNTVQLMAVMEHAYYGSFGYHVTNPFAVSSRSGTPEDLKYLVDKAHGLGVRVLLDVVHSHASSNTNDGIAGFDLGQRDVDSYFGTGEAGYHWLWDSRLYKYDNWEVMRYLLSNLRYWVDEYNFDGFRFDGVTSMLYHHHGLQMEFSGDYEQYFSTSTNVDGVVYLMLANELLHSLYPEIEVIAEDVSGMPTLCLPVDKGGVGFDARLAMSIPDFWVKYLKTKPDEQWSTFEMVSTLCNRRYTEKAIAYVESHDQSIVGDKTTAFWLMDAEMYDGMSTLNEPSVVIERGIALHKMLRLVTASLGGEGYLTFMGNEFGHPEWVDFPREGNGWSHDYCRRRWDLADADHLRYQHLLNFDKGMLALDDQYSYIAAAHQHVSTADDNRQILVFERGPLVFVFNFHPHQTYEGLEIGVPEPGKYQLAFDTDAREFGGKSRCGFSVDHFTSPDGPESWVGPYEQPPRAAKMLVLSPARSAQVYFKVPEPAPSAEPSVSDIVREIDADAGAAR

SEQ ID NO: 2739 - protein, 439 aa, Vigna radiata
MAASVSTVGAVNRAILNLNGSGAGASAPTSAFFGTSLKKAVASRVPNSKVTNGSFKIVAAEKEIEESQQTNKDRWKGLAYDISDDQQDITRGKGMVDPLFQAPMDAGTHYAVMSSYEYLSTGLRQLDNIKDGFYIAPAFLDKLVVHITKNFMTLPNIKVPLILGIWGGKGQGKSFQCELVFAKMGINPIMMSAGELESGNAGEPAKLIRQRYREAADLIAKGKMCALFINDLDAGAGRLGGTTQYTVNNQMVNATLMNIADNPTNVQLPGMYNKEENARVPIIVTGNDFSTLYAPLIRDGRMEKFYWAPTRDDRVGVCKGIFRTDGVPEEDITKLVDTFPGQSIDFFGALRARVYDDEVRKWISGVGVDATGKKLVNSKEGPPTFDQPKMSLDKLLQYGNMLVQEQENVKRVQLADKYLNEAALGNANEDAIKSGSFFK

SEQ ID NO: 2740 - protein, 236 aa, Gibberella zeae PH-1
MASSSTPSTPLLYSCIAHNTTILSECTTSASSQTSSLASLILPKIEHTNPQKLTYTHGQHQIHYVAESPSEHRDYPSAGGLTFLVIADSSLGRRVPFGYLFEIRKRFLQQFPESTDFSDMPNYGAASFNSELKNLMVDYGTTTGGRDDAIGNAKREIDDVRGIMTKNIESLLERGERLDLLVDKTDRLGGSAREFRVRSRGLKRKMWWKNVKLMGLLALVIFLIIMAIVIAVKNGS

SEQ ID NO: 2741 - protein, 547 aa, Desulfovibrio vulgaris subsp. vulgaris str. Hildenborough
MASKEILFDTKAREKLSRGVDKLANAVKVTLGPKGRNVVIEKSFGSPVITKDGVSVAKEIELEDKFENMGAQMVKEVASKTSDIAGDGTTTATILAQAIYREGVKLVAAGRNPMAIKRGVDKAVESLVRELGNLAKPTRDQKEIAQVGTISANSDSTIGNIIAEAMSKVGKEGVITVEEAKGLETTLEVVEGMQFDRGYLSPYFVTDPEKMVCELDEPFILCNEKKISTMKDMLPVLEQVAKMQRPLVIIAEDVDGEALATLVVNKLRGALQVVAIKAPGFGERRKAMLQDIAVLTGGQVVSEDMGIKLENISVADLGTAKRVVIDKENTTIVDGAGKGDDIKARVKQIRAQIEETTSDYDREKLQERLAKLVGGVAVIHVGAATETEMKEKKDRVEDALNATRAAVEEGIVPGGGTALVRVAKVLDDIKPADDDETAGVNIIRRAIEEPLRQIASNAGFEGSIVVERVREGKDGFGFNAATGEYEDLIGVGVIDPKKVTRIALQNAASVASLLLTTECAIAEKPEPKKDMPMPGGMGGMGGMGGMY

SEQ ID NO: 2742 - protein, 545 aa, Bacteroides fragilis NCTC 9343
MAKEILFNIEARDQLKKGVDALANAVKVTLGPKGRNVIIEKKFGAPHITKDGVTVAKEIELTDAYQNTGAQLVKEVASKTGDDAGDGTTTATVLAQAIIAEGLKNVTAGASPMDIKRGIDKAVAKVVDSIKHQAEKVGDNYDKIEQVATVSANNDPVIGKLIADAMRKVSKDGVITIEEAKGTDTTIGVVEGMQFDRGYLSAYFVTNTEKMECEMEKPYILIYDKKISNLKDFLPILEPAVQSGRPLLVIAEDVDSEALTTLVVNRLRSQLKICAVKAPGFGDRRKEMLEDIAVLTGGVVISEEKGLKLEQATIEMLGTADKVTVSKDNTTIVNGAGAKENIKERCDQIKAQIAATKSDYDREKLQERLAKLSGGVAVLYVGAASEVEMKEKKDRVDDALRATRAAIEEGIVAGGGVAYIRAIESLDGLKGENDDETTGIAIIKRAIEEPLRQIVANAGKEGAVVVQKVSEGKGDFGYNARTDVYENMHAAGVVDPAKVTRVALENAASIAGMFLTTECVIVEKKEDKPEMPMGAPGMGGMGGMM

SEQ ID NO: 2743 - protein, 312 aa, Magnaporthe grisea 70-15
MADKDFTLNTGAKIPAFGLGTWQGDKGVIKEAVLTAIKSGYRLIDGAYVYGNEEEVGQGIREAISSGIVKREDLFVVSKCWATYTTRCELGLDQSLKLLGLDYVDLYLVHWPILMNPEGNDEKFPKHADGSRDIIHTHNHVDTWKLMEKLPATGKTKAVGVSNYSKAWLEQLLPHATTVPAVNQVENHPQLPQQELVDFCKEKGIHIMAYSPLGSTGGPLLTAEPVVKIAEKHSISPAAVLLGYQIARGITVIPKSVNPDRIKANAQLKDLDAEDMKLLNDYSEQLAKDGKLNRYVFPPFGTDFGFPDKVGQ

SEQ ID NO: 2744 - protein, 440 aa, Burkholderia fungorum LB400
MWRKNFLLGAATASYQIEGAVNEDGRLPSIWDTFSAIPGKVLAGDTGAVACDHYHRWEADVDMLAGLGFEGYRLSIAWPRVMDTAGVPNRKGLEFYKRLLARLKEKGIATFVTLYHWDLPQHLEDRGGWLNRDTAYRFADYADLMSRELAGSVDGWMTLNEPWCSAYLGYGNGHHAPGLADARYATQAMHHLLLAHGLAMPVLRANDPASQKGVVANIGRGTANSGSAADQRAAHLFEVQHNAWILDPLLEGRYPRDLFELWPGTEPLVLDGDMQTVAAPLDFLGINYYFRTNVASDGAHGFREVPLQGVERTQMGWEVYPDGLRDLLIGFKATYRNLPPIYITENGMASDDKVIDGRVDDMQRISFLKRHLAAVDEAIKAGVEIRGYFLWSLMDNFEWAFGYERRFGVVHVDYATQKRTVKRSAELVSKFLKERKARRE

SEQ ID NO: 2745 - protein, 709 aa, Pseudomonas aeruginosa UCBPP-PA14
MSEQNNEQRSQAAGTDTVDRGNSNAKLEQLEAYREDATGEALSTNTGTRIADNQNTLKAGERGPSLLEDFIMREKITHFDHERIPERVVHARGSAAHGYFEAYEDLSDLTKAGFLAEAGKRTPVFVRFSTVQGPRGSADTVRDVRGFAVKFYTDEGNFDLVGNNMPVFFIQDAIKFPDFVHAVKPEPHNEIPTGASAHDTFWDFVSLTPESAHMVMWLMSDRAIPIAYRNMQGFGVHTFRLVNAAGESVLVKFHWRPKSGTCSLVWDEAQKLAGKDPDFNRRTLWEDIEKGDYPEWELGLQVIPENQQDSFDFDLLDPTKLVPEELVPVRVVGRMVLNRNPDNFFAETEQVAFHVGHLVPGIDFTNDPLLQGRLFSYTDTQLLRLSGPNFNEIPINRPLCPFHNNQRDAPHRQTINRGRASYEPNSIDGGWPKETPPAARNGGFSSYHEPVSGSKLRKRADSFADHFSQAALFWHSMSEAEQAHIVAAYSFELSKVERQSIREREVNQILLNIDPQLAARVAANVGVQLAAPANPAPQPKPSPALSQMNLLSGDIRSRKVAILIADGVAESDVSDLRDALRQEGADAKLIAPSASPVQAENGAELNPEGTWDGLPSVAFDAVFVPGGAASSQAIGADGRGLHYLLEAYKHLKPVAFAGDAQALASQLSLPGDPGVLLGATATDVFPGLRQALMQHRIWQREAATKAIPA

SEQ ID NO: 2746 - protein, 732 aa, Pseudomonas aeruginosa UCBPP-PA14
MSEPMSERERWQLELDKLQRGLQGDPFAFLGPQRDPGGEGGVLRAYLPGAQRVELLDEDGATLAELEQSDPGSGLFQRRLERLPPRYRLRVHWPDGVQESEDPYAFGPLLGELDLYLFAEGNHRQLASCLGAQLTRHEGVEGVRFAVWAPNAVRVSVVGDFNGWDGRRHPMRRRYPSGVWELFVPRLGEGELYKYELQGHDGLLPLKADPLALACETPPGTASKTCAALRHEWRDQDWLARRAERQGYAAPLSIYEVHAGSWRHRDGRPPHWSELAEELIPYVRQLGFTHIELMPVMEHPFGGSWGYQPLGLFAPTARYGTPEDFAAFVDACHQAGIGVILDWVPAHFPTDAHGLGRFDGTALYEYEHPFEGFHQDWDTYIYNLGRSEVHGFMLASALHWLRTYHVDGLRVDAVASMLYRDYSRKEGEWLPNRHGGRENLEAIDFLHHLNQVVASETPGALVIAEESTAWPGVSRPVAEGGLGFSHKWNMGWMHDSLAYIGEDPLHRRYHHHQLTFGLLYAFSEHFILPISHDEVVHGKHSLLDKMPGDRWQKFANLRLYLSFMWSHPGKKLLFMGCEFGQWREWNHDGELDWYLLRYPEHQGVQDLVAALNRLYRDLPALHARDGEALGFEWLIGDDQANSVYAWLRHAAGEPSLLAVHNFTPVPRQGYRIGVPQGGDWDVLLNSDAQAFAGSGSGSQGRVSSESCGAHGQAQSLLLDLPPLGTLLLRPAG

SEQ ID NO: 2747 - protein, 112 aa, Glycine max
  misc_feature (68)..(68): Xaa can be any naturally occurring amino acid
ARVPFVDKEFIRVAGNIDPEGKMINKDEGRIEIWTLQMTFDDEDHPYMAKHILYNHNEQSSDGVGYGXIDGLKAYDEQHATDRFMLNTGHTITCNTYTANELYHYRMISERV

SEQ ID NO: 2748 - protein, 251 aa, Salmonella enterica subsp. enterica serovar Paratyphi A str.
MNLNSIPAFQDNYIWVLTNDEGRCVIVDPGEAAPVLKAIAEHKWMPEAIFLTHHHHDHVGGVKELLQHFPQMTVYGPAETQDKGATHLVDDGDTIRVLGEKFTLFATPGHTLGHVCYFSHPYLFCGDTLFSGGCGRLFEGTPSQMYQSLMKINSLPDDTLICCAHEYTLANIKFALSILPHDSFINEYYRKVKELRVKKQMTLPVILKNERKINLFLRTEDIDLINEINKETILQQPEARFAWLRSKKDTF

SEQ ID NO: 2749 - protein, 381 aa, Debaryomyces hansenii CBS767
HTPSGLELEYYEERSKYRGSLLIAEATFVSEQAGLNGTVPTTWNSEPAGYVPGIWNDKHAQAWKKITDRVHENGSYMSSQFWFLGRVGDPQLLKDRGLGYVAPSAIYPDEEFKKKAETAGNPIRALTGDEIHDLIYKTYPNAARKAIAAGFDYIELHAAHGYLLDQFLQPTNNQRTDKYGGSIENRARVVLELVDHLSTVVGAKKLAIRISPWATFQGMKADQDSTHAVTTFSYLLHELQKRADDGNEIAYVSLVEPRVQGGDDVEKSQQVGDNTFVGQIWKGIILKSGNYTYDAPDFKTLLNDISDNRTMVGFARYYTSNPDLVKRLYEGWDLTPYERLTFYGSSNWGYNTFDNYNGKRQFTKDIESGKLPKAIEEIEVK

SEQ ID NO: 2750 - protein, 446 aa, Zea mays
MAEPAAAGRKTRVGPYEVGKTIGEGSFAKVKHAHDSRTGAVRAIKVLDRNHVLRHKMVEQIKREISTLKLIKHPNVVQLHEVMASRTKIYMVLEFVDGGELFDKIVNSGRLGEDEARIYFHQLINAVDYCHSRGVYHRDLKPENLLLDSHGTLKVSDFGLSAFAPQTKEDGLLHTACGTPNYVAPEVLADKGYDGMAADVWSCGIILFVLMAGYLPFDDANLMRLYKLICHATFSCPPWFSSGARKFIKRILDPNPDTRITIAEILEDEWFKKGYKPPHFEQGEDVNLDDVDAAFNDSEDRLVAEKREKPESMNAFALISRSQGFNLGNLFEKEMMGMVKRETSFTSQCTAQEIMTKIEDACGPLGFNVRKQNYKMKLKGDKSGRKGHLSVATEVFEVAPSLHMVELRKTGGDTLEFHNFYKNFSSELKDIVWKAESDANNKQTNK

SEQ ID NO: 2751 - protein, 254 aa, Lycopersicon esculentum
AREKAHLEFVEVLNVKEQVVAGMMYYITLAVTDAGKKKIYEANIWVKEWEHFIKVVEFKPVSDDSVKTGDIVDVPDPNIPPLQDLARFAVQDYNKAQNAHLEYVENLNVKEQLVAGTLYYITLVATDAGKKKIYETKIWVKEWEDFKKVVEFKLVGDDSPNPGGITNVPFPNLPEFKDLARFAVQDYNKKENAHLEFVENLNVKEQVVAGIIYYITLVATDAGKKKIYETKILVKGWENFKEVQDFKLVGDAIK

SEQ ID NO: 2752 - protein, 204 aa, Chloranthus spicatus
LCDAEVALIVFSNRGKLYEFCSSSSMLKTLERYQKCNYGAPDTTVSTREMQSSQQEYLKLKARVEALQRSQRNFLGEDLGPLSGKELEQLERQLDMSLKQIRSTRTQYMLDQLTDLQRREQMLCETNKALKRRLDEVTPANPHQGWDPNPHGVSYGRQAAQQQGDGFFHPLECEPTLQIGYQHDQITIAAPGPSVSNYMPGWLA

SEQ ID NO: 2753 - protein, 459 aa, Streptococcus pneumoniae R6
MLRFPKDFVWGSSTSGPQTEGRVAGDGKGDNLWDYWFQVEPNRYYNGIGSDKTSTFYENWERDIELLLETGHTVFRTSIQWSRIFPQGCGKVNPQGVDFYRKVFEAIKAKGIRLLVNLYHFDLPFALQEDGDGWENKATVSAYEDYARFCFETYGDLVDQWITFNEPIVPVEFGYFYDAHYPHKVDAEAAVKVAYHTQLASSRAVKACHELLPDSKIGIVLNLTPAYPRSQHPADVKAARIAALFQAQSFLDPSVLGTYPQELVEILHEHGLLPDATEEELELIRDNTVDFLGVNYYQPLRVMAPRFAKHPESPLLPEHFYEPYVMPGRKINSHRGWEIYEQGIYDIAQNIKENYGNIEWMLTENGMGVEGEEKFRQDGMIQDDYRIDFVKGHLRELHRAIEDGANCKGYLIWTFIDCWSWLNSYKNRYGLVELDLETQERRLKKSGHWFKELSDNNGF

SEQ ID NO: 2754 - protein, 328 aa, Ostreococcus tauri
KMTTIAEDVSGMPTLCRPVKEGGVGFDYRLQMAIADKWIEVLSEWGPDENWDMGNLVFTMENRRYGEKCISYAESHDQALVGDKTTAFWLMDAEMYTNMSTLVPDTPTISRGIALHKMIRQFTMGLGGEGYLNFMGNEFGHPEWIDFPRDDRVEASTGKFIPGNGNSYHLCRRRFDLTDMDHLRYKYLNAFDGAMNKVAGAFKYLASSHQYTSCKSDADKVIVFERGDLVFVFNWNPTQSFSDYRIGCKEKTTYKLVLSSDNPEFGGYSNLWTYTAPEFIAEDYAFNGRPASFLAYVPSRTVAVYAPADLADKLLGYSSESTAADTAA

SEQ ID NO: 2755 - protein, 851 aa, Ostreococcus tauri
MATRAIASARSRAPARAREGTSLARARRWTRSPHRGVSGRRSRATRWTLDAVSTEDAEGWRRETSKAKETRPTRTTVADAGRGVDDVHARTRVAREAKRRTAPRGVPGVCDTPRRGDASALGATRVVGCPDDTVNFAVYTSAATAVSLVLWTPEGLARGEIAGEIELDETTNKTGSVWHVALPRCAEDVLYGYRVDGPYEPEAGHRFDKSKILLDPYAKFTVSRPEYGVASKKEDGTEDCWPQYAGGVPKKLRSDGKEDFDWEGVTSPKRPMRDLVVYEAHARGLTADLETKAKPGTYAAIEEALPYLKQLGVNAIELMPCHEFNEMEYHSLNHVTGEFRRNFWGYSTVNFFSPMTRYAEAGADDCGREAAREFKRMIRECHRAGIEVIMDVVFNHTAEGNEQGLTLSFRGLDNRVYYMVAPEGQFYNYSGCGNTMNCNHPVVREFILECLRYWVLEYHIDGFRFDLASILTRASSMWDRANIFGEPTAETPMLEEVVIGTPLQDPPLIDAISNDPVLAGTKLIAEAWDAGGLYQVGSFPHYGVWSEWNGKFRDDVRNFIKGVDGYAGLFAERLCGSPNLYADRSPSASINFVTAHDGFTLRDCVSYNEKQNHANGEENRDGEEHNASWNCGLSCDDDGECWDPEIVALRDRQMRNFVVALFVAQGVPMMYMGDEYGHTKCGNNNTYCHDNALNWIDWSEASSPLAGDGLARFTKQVIALRKKHSAFRLDSFPSADNIQWHGHLPDTPMWDEESRFVAFTLQDKPETDKFYIAFNSHHEPAMLKLPSPPERCKWKLILDTSLESPFDVLSAEDIAEADSYTAEAMFLPGLRKNTYLCADRSAVIFRAVSLA

SEQ ID NO: 2756 - protein, 492 aa, Mesembryanthemum crystallinum
MDPYKYRPSSAFNSPYFTTNSGAPVYNNNSSLTVGTRGPILLEDYHLVEKLANFDRERIPERVVHARGASAKGFFEVTHDVSHLTCADFLRAPGVQTPVIVRFSTVIHERGSPETIRDPRGFAVKFYTREGNFDMVGNNFPVFFIRDGMKFPDMVHALKPNPKSHIQENWRVLDFFSHHPESLHMFTFLFDDVGVPTDYRHMEGSGVNTYTLISKSGKVHYVKFHWKPTCGVKCLLEEEAVKIGGANHSHATQDLYDSIAAGNYPEWKLYIQTIDPADEDKFDFDPLDVTKTWPEDILPLQPVGRLVLNKNIDNFFAENEQLAFCPGIVVPGVYYSDDKLLQTRIFSYADTQRHRLGPNYLQLPVNAPKCAHHNNHYDGQMNFMHRDDEVDYFPSRYDPVRHAERYPIPPNVLNGNRDRQIIQKENNFKQPGERYRSWDPARQERFICRWVDALSDPRITHEIRNIWISYWSQADKSVGMKLASRLNVRPTM

SEQ ID NO: 2757 - protein, 1256 aa, Streptococcus pneumoniae R6
MRKTPSHTEKKMVYSIRSLKNGTGSVLIGASLVLLAMATPTISSDESTPTTNEPNNRNTTTLAQPLTDTAADSGKNESDISSPRNANASLEKTEEKPATEPTTSTSPVTTETKAEEPIEDNYFRIHVKKLPEENKDAQGLWTWDDVEKPSENWPNGALSFKDAKKDDYGYYLDVKLKGEQAKKISFLINNTAGKNLTGDKSVEKLVPKMNEAWLDQDYKVFSYEPQPAGTVRVNYYRTDGNYDKKSLWYWGDVKNPSSAQWPDGTDFTATGKYGRYIDIPLNEAAREFGFLLLDESKQGDDVKIRKENYKFTDLKNHSQIFLKDDDESIYTNPYYVHDIRMTGAQHVGTSSIESSFSTLVGAKKEDILKHSNITNHLGNKVTITDVAIDEAGKKVTYSGDFSDTKHPYTVSYNSDQFTTKTSWHLKDETYSYDGKLGADLKEEGKQVDLTLWSPSADKVSVVVYDKNDPDKVVGTVALEKGERGTWKQTLDSTNKLGITDFTGYYYQYQIERQGKTVLALDPYAKSLAAWNSDDAKIDDAHKVAKAAFVDPAKLGPQDLTYGKIHNFKTREDAVIYEAHVRDFTSDPAIAKDLTKPFGTFEAFIEKLDYLKDLGVTHIQLLPVLSYYFVNELKNHERLSDYASSNSNYNWGYDPQNYFSLTGMYSSDPKNPEKRIAEFKNLINEIHKRGMGAILDVVYNHTAKVDIFEDLEPNYYHFMDADGTPRTSFGGGRLGTTHHMTKRLLVDSIKYLVDTYKVDGFRFDMMGDHDAASIEEAYKAARALNPNLIMLGEGWRTYAGDENMPTKAADQDWMKHTDTVAVFSDDIRNNLKSGYPNEGQPAFITGGKRDVNTIFKNLIAQPTNFEADSPGDVIQYIAAHDNLTLFDIIAQSIKKDPSKAENYAEIHRRLRLGNLMVLTAQGTPFIHSGQEYGRTKQFRDPAYKTPVAEDKVPNKSHLLRDKDGNPFDYPYFIHDSYDSSDAVNKFDWTKATDGKAYPENVKSRDYMKGLIALRQSTDAFRLKSLQDIKDRVHLITVPGQNGVEKEDVVIGYQITAPNGDIYAVFVNADEKAREFNLGTAFAHLRNAEVLADENQAGSVGIANPKGLEWTEKGLKLNALTATVLRVSQNGTSHESTAEEKPDSTPSKPEHQDPAPEARPDSTKPDAKVADAENKPSQATADSQAEQPAQEAQASSVKEAVQNESVENSSKKNIPATPDRQAELPNTGIKNENKLLFAGISLLALLGLGFLLKNKKEN

SEQ ID NO: 2758 - protein, 493 aa, Mesembryanthemum crystallinum
MDPYKYRPSSSYNTSFMTTKTGQPVWNDDSSLTVGARGPILLEDYHLLEKIASWDRERIPERVVHARGASAKGFFEVTNDITHLTCADFLRAPGVQTPVIVRFSTVIHERGSPETMRDPRGFALKFYTREGNFDLVGNNFPVFFNRDAMKFPDVVRAFKPNPKSHIQEMWRILDFCSHLPESLHTFAWFFDDVGIPINYRHMEGFGVHTFTMLNRAGKETYVKFHWKPTCGVKSIVTEEEAIQVGGANHSHATQDLYDSIAAGNYPEWRLFIQTMDPADEDKFDFDPLDITKTWPEDILPLQPVGRLVLNKNIDNFFTENEMLAFNPASIVPGIHFSHDKMLQARTFAYADTQRHRLGVNFLLLPVNAPKCAHHNDHHDGFMNFMHRDEEVNYFPSRSNVCHHAERFPIPSHTLTGRRERRIIPKENNFKQPGDRYRSWDPARQERYLARWVKALSDPKVTPEIRGVWVSWLSQSDRSLGMKLANKLNVRPTM

SEQ ID NO: 2759 - protein, 540 aa, Streptococcus pneumoniae TIGR4
MSKEIKFSSDARSAMVRGVDILADTVKVTLGPKGRNVVLEKSFGSPLITNDGVTIAKEIELEDHFENMGAKLVSEVASKTNDIAGDGTTTATVLTQAIVREGIKNVTAGANPIGIRRGIETAVAAAVEALKNNAIPVANKEAIAQVAAVSSRSEKVGEYISEAMEKVGKDGVITIEESRGMETELEVVEGMQFDRGYLSQYMVTDSEKMVADLENPYILITDKKISNIQEILPLLESILQSNRPLLIIADDVDGEALPTLVLNKIRGTFNVVAVKAPGFGDRRKAMLEDIAILTGGTVITEDLGLELKDATIEALGQAARVTVDKDSTVIVEGAGNPEAISHRVAVIKSQIETTTSEFDREKLQERLAKLSGGVAVIKVGAATETELKEMKLRIEDALNATRAAVEEGIVAGGGTALANVIPAVATLELTGDEATGRNIVLRALEEPVRQIAHNAGFEGSIVIDRLKNAELGIGFNAATGEWVNMIDQGIIDPVKVSRSALQNAASVASLILTTEAVVANKPEPVAPAPAMDPSMMGGMM

SEQ ID NO: 2760 - protein, 331 aa, Candida albicans SC5314
MSGPVNSVSKQMNVDTDIITLTRFILQEQQTVAPTATGELSLLLNALQFAFKFIAHNIRRAELVNLIGVSGSANSTGDVQKKLDVIGDEIFINAMRSSNNVKVLVSEEQEDLIVFPGGGTYAVCTDPIDGSSNIDAGVSVGTIFGVYKLQEGSTGGISDVLRPGKEMVAAGYTMYGASAHLALTTGHGVNLFTLDTQLGEFILTHPNLKLPDTKNIYSLNEGYSNKFPEYVQDYLKDIKKEGYSLRYIGSMVADVHRTLLYGGIFAYPTLKLRVLYECFPMALLMEQAGGSAVTIKGERILDILPKGIHDKSSIVLGSKGEVEKYLKHVPK

SEQ ID NO: 2761 - protein, 789 aa, Ralstonia eutropha JMP134
MRVLCIGGGPAGLYFGLLMKLQDPANEVIVAERNRPYDTFGWGVVFSDATMDNLKVADPVSAAEINEAFNHWDDIDVHIGGRTIRSGGHGFIGIGRKRLLNILQARCEALGVKLVFETDVSDDQALAMQYQADLVIASDGLNSRIRTRYAGTFQPDIDTRQCRFVWLGTHKLFDAFTFAFEKTEHGWFQAHAYRFDDNTSTFIVETPQEVWSAAGIEQMSQEEGIAYCEKLFAKYLDGNKLISNATHLRGSANWIRFPRVICKHWVHWNTLPDGRRVPVVLMGDAAHTAHFSIGSGTKLALEDAIDLATEIAASGPSAHDALPAALERYAATRSVEVLKIQNAARNSTEWFENVERYASLAPEQFAYSLLTRSQRISHENLRVRDAGYVRKFEHWLAGEAGVPAESLRLREDKPVPPMFTPYRVRGVTLKNRVVVSPMAMYSSVDGVPGDFHLVHLGSRALGGAGMVVAEMTCVSPDARITPACPGLWNDAQRDAWKRIVDFVHANSDARIAMQIGHAGRKGSTQLGWEKMDHPLPHGNWPLFSASPIPYLPGESQVPREMTREDMDRVRDDFVGAARRAAEAGFDWLELHCAHGYLLSSFISPLSNQRTDEYGGTLANRLRYPLEVFAAVREVWPADKPMSVRISAHDWVEGGITPDDAVEIARAFKAVGADMIDCSSGQVSPDQAPVYGRMYQTPFADRIRNEADIPTIAVGAIFEADHVDSIIAAGRADLCAVARPHLADPAWTLHEAAKLGYRDVSWPRQYEAGKRQLETNLERAAALARAVVEH

SEQ ID NO: 2762 - protein, 130 aa, Leptospira interrogans serovar Copenhageni str. Fiocruz L1-130
MTNAVLNEKNHSVTSEETKKERVRILAPRVDIYSDEENIYLLADLPGVEEKDVQVQLEKDQLIISGKTSNKDIQGELRYSEFRTGEYKRTFTLTESVEEDRISAVYKNGVLNLTLPKRKPLTKKIEVRSE

SEQ ID NO: 2763 - protein, 557 aa, Schizosaccharomyces pombe
MCGILAVHHVAEDIEAFKPKALHLSKQLRHRGPDWSGKAIRNQTILCHERLAIVGVESGAQPLVSDDGKLVLTVNGEIYNHLKLRENLKGNYKFKTYSDCEVILYLYREHGPACANMLDGMFSWVLYDQDKDKVVAARDPIGITTLYQGFSSDSPDTAYFASELKALHPVCDKIIAFPPGHYYDSETKQTVRYFKPSWWDENKIPSNPVDYKLLRETLEASVRKRLMAEVPYGVLLSGGLDSSLIASIAARETEKLANSTSQSEEARTITAWPKLHSFAIGLPGSPDLLAARKVADFLHTFHHEHTFTIDEGLDALRDVIYHLETYDVTTIRASTPMYLLSRKIKAQGVKMVLSGEGSDEIFGGYLYFGNAPSREAFHSECVRRVKNLHLSDCLRANKSTMAWGLEARVPFLDKDFLEVALNIDPEEKMYINGRKEKYILRKAFDTTHDSSLQPYLPQDILWRQKEQFSDGVGYSWIDALKDTAELCISDDEFALPRREWGDDIPTTKEAFWYRKLFDEIFPRQCADTVMRWVPKAEWGCPEDPSGRYQAGHVAALK

SEQ ID NO: 2764 - protein, 243 aa, Oryza sativa (japonica cultivar-group)
MGQSKKKFRGVRQRHWGSWVSEIRHPLLKRRVWLGTFETAEEAARAYDEAAILMSGRNAKTNFPVARNATGELTPAAAVAGRDGRVGGGSGSSSSMTANGGGNSLSQILSAKLRKCCKTPSPSLTCLRLDPEKSHIGVWQKRAGARADSSWVMTVELNKDTAVSSAATVAAATAVSSSDQPTPSDSTVTTTSTSTTGSPSPPPPAMDDEERIALQMIEELLGRSGPGSPSHGLLHGGEGSLVI

SEQ ID NO: 2765 - protein, 308 aa, Oryza sativa (indica cultivar-group)
MGINVYTTGVLIFLESTCVLMDPQLQVKALCEKAKEILMEESNVQPVKSPVTICGDIHGQFHDLVELFRIGGKCPDTNYLFMGDYVDRGYYSVETVTLLVALKVRHPHRITILRGNHESRQITQVYGFYDECLRKYGNANVWKIFTDLFDYFPLTALVESEIFCLHGGLSPSIENLDSVRSLDRVQEVPHEGPMCDLLWSDPDDRCGWGISPRGAGYTFGQDISEQFNHTNNLKLVARAHQLVMEGYNWAHEQKVVTIFSAPNYCYRCGNMASILEVDDCNSHTFIQFEPAPRRGEPDVTRRTPDYFL

SEQ ID NO: 2766 - protein, 266 aa, Ralstonia eutropha JMP134
MLKVEPIPAFQDNYIWAIHDGRNAAVVDPGEAAPVERFLKDKGLALGAIVITHHHGDHQGGVAELLSAYPTTHDGAPMPVIGPAGERIGGRTQAVREGDTVTLPAPALQFRVLDVPGHTAGHVAYAGDLPGVGPVVFCGDTLFATGCGRLFEGTPAQMLASLDKLASLPGETRVYCAHEYTRSNVRFARAVEPGNTALADWEARVESLREAGQPTVPSTIGLERQVNPFLRSREPTVREAVKAQGGSVAGDAEAFGALRGWKDNFR

SEQ ID NO: 2767 - protein, 235 aa, Arabidopsis lyrata subsp. petraea
  misc_feature (96)..(96): Xaa can be any naturally occurring amino acid
  misc_feature (144)..(145): Xaa can be any naturally occurring amino acid
MEEGRSSHDGESSKKIGRGKIEIKRIENTTNRQVTFCKRRNGLLKKAYELSVLCDAEVALVIFSTRGRLYEYANNSVRGTIERYKKACSDAVNPPXVTEANTQYYQQEASKLRRQIRDIQNSNRHIVGESLGSLNFKELKNLEXXLEKGISRVRSKKNELLVAEIEYMQKREMELQHNNMYLRAKIAEGARLNPEQQESSVIQGTTVYESGVSSHDQSQHHNRNYIPVNLLEPNQ

SEQ ID NO: 2768 - protein, 254 aa, Sinapis alba
MGRGRVQLKRIENKINRQVTFSKRRAGLLKKAHEISVLCDAEVALVVFSHKGKLFEYSTDSCMEKILERYERYSYAERQLIAPESDVNTNWSMEYNRLKAKIELLERNQRHYLGEDLQAMSSKELQNLEQQLDTALKHIRSRKNQLMHDSINELQRKEKAIQEQNSMLSKQIKEREKILRAQQEQWDQQNHGHNMPPPPPPQQIQHPYMLSHQPSPFLNMGGLYQEEDPMEMRRNDLDLSLEPVYNCNLGCFAA

SEQ ID NO: 2769 - protein, 692 aa, Gloeobacter violaceus PCC 7421
MREALALSTAQICINNYQNFAVDPLLRRQPPVQVLRVLSSAELEACFSRSPWKFVAAVPIFCNGTLAGNLWICDEQERLLSAAQSALLEHAAGLVGERLEAEERLDEIHQRNLMYEKYIEMAPDQIGLLDSELRTLTVNAALSRFSGMPKEWILGKSLWEMGIPESILAQMADWEQLIRRVFETGEPGTTSFAYSVGDASCKLYCYSLAVPQFNCRGEVVAVLNITYDRAALEMPFNPEDWAGMGEQLMREVAAHRVTQEELARLNAELEERVRERTVRYKLLNQKLRAEIGERQRIEVELQAAQARAEAAARAKSDFLAAASHELRTPMHGIISMTDLLLESDLGAEQRELAAIIGYCGETMLSLINNILDISKIEAGRMELDVVPFELPRLIDSVVAMFAEQLRSKDLRLQVLIDPEVPAQLEGDPVRLAQVLTNLVGNSLKFTPRGQIAIRVHPAAQGGDDLRLRFEVVDTGIGMAPETTGRLFQSFFQADTSTTRKYGGTGLGLAISRQLVELMGGQIGVESRLEQGSTFWFVLPLKVSAPVEPPPPSAPMTVRLPQYGPILIVEDNAVNQKVLLRHLERLGCGAEVAETGAEALTVLASRSFALVLMDCQMPVMDGFQATAEIRRREDSARRTPIVGITANASAGVYDLCLAAGMDDCLIKPVRRDQLTAAIERWALPVVGTEWATG

SEQ ID NO: 2770 - protein, 215 aa, Debaryomyces hansenii CBS767
MSGRKKTLLKVIILGDSGVGKTSLMQQFVNNKFSHQYKATIGADFLTKEITIDNNKQVTLQIWDTAGQERFQSLGVAFYRGADCCVLCYDVTNEKSLNNLSSWKDEFLIQSNVSNPQDFPFIIIGNKIDVDDSKKIPSLQKKLNNITNNQLGGLNYPVFETSAKDSINVELAFEVVAKMALQQEELNDANGNDVSDDYNDAINIHLENDAGGCAC

SEQ ID NO: 2771 - protein, 547 aa, Klebsiella pneumoniae
MAAKDVKFGNDARVKMLRGVNVLADAVKVTLGPKGRNVVLDKSFGAPTITKDGVSVAREIELEDKFENMGAQMVKEVASKANDAAGDGTTTATVLAQAIVNEGLKAVAAGMNPMDLKRGIDKAVLAAVEELKALSVPCSDSKAIAQVGTISANSDETVGKLIAEVDKVGKEGVITVEDGTGLEDELDVVEGMQFDRGYLSPYFINKPDTGAVELESPFILLADKKISNIREMLPVLEAVAKAGKPLVIIAEDVEGEALATLVVNTMRGIVKVAAVKAPGFGDRRKAMLQDIATLTGGTVISEEIGMELEKATLEDLGQAKRVVINKDTTTIIDGVGEESAIQGRVAQIRKQIEEATSDYDREKLQERVAKVAGGVAVIKVGAATEVEMKEKKARVDDALHATRAAVEEGVVAGGGVALVRVAAKLAGLTGQNEDQNVGIKVALRAMEAPLRQIVSNAGEEPSVVANNVKAGDGNYGYNAATEEYGNMIDFGILDPTKVTRSALQYAASVAGLMITTECMVTDLPKSDAPDLGAAGGMGGMGGMGGMM

SEQ ID NO: 2772 - protein, 578 aa, Arabidopsis thaliana
MCGILAVLGCVDNSQAKRSRIIELSRRLRHRGPDWSGLHCYEDCYLAHERLAIVDPTSGDQPLYNEDKTIAVTVNGEIYNHKALRENLKSHQFRTGSDCEVIAHLYEEHGEEFVDMLDGMFAFVLLDTRDKSFIAARDAIGITPLYIGWGLDGSVWFASEMKALSDDCEQFMCFPPGHIYSSKQGGLRRWYNPPWFSEVVPSTPYDPLVVRNTFEKAVIKRLMTDVPFGVLLSGGLDSSLVASVALRHLEKSEAACQWGSKLHTFCIGLKGSPDLKAGREVADYLGTRHHELHFTVQDGIDAIEEVIYHVETYDVTTIRASTPMFLMSRKIKSLGVKMVLSGEGSDEIFGGYLYFHKAPNKKEFHEETCRKIKALHQYDCLRANKSTSAWGVEARVPFLDKEFINVAMSIDPEWKMIRPDLGRIEKWVLRNAFDDEKNPYLPKHILYRQKEQFSDGVGYSWIDGLKDHANKHVSETMLMNASFVFPDNTPLTKEAYYYRTIFEKFFPKSAARATVPGGPSVACSTAKAVEWDAAWSQNLDPSGRAALGVHVSAYGEDKTEDSRPEKLQKLAEKTPAIV

SEQ ID NO: 2773 - protein, 1124 aa, Mougeotia scalaris
MSSSKRSQSSGRSSTQTRIQNRVTQASADAKLSTAFEVSSSSGGDSFDYTKSVTASLNPTEPLAAKSVTAYLQRMQRGSIIQSFGCMMAVEPGTFRIIAYSENVSEMLGVTPQSVPTGDHQNAIGIGTDVRSLLSPSSVSVVEKAVAANDVSMMNPIAVYSLATQKLFFAILHMNDVGLVIDLEPISSSSDSAMFSAGAVQSHKLAAKAISRLQSLPGGDICGLCDVVVEEVRELTGYDRVMAYKFHDDEHGEVVAEIRRSDLEPYLGLHYPATDIPQASRFLFIKNRIRMICDCTSPQVKVVQDSRIPQEMSLAGSTMRGVHGCHTQYMMNMGSTASLVMSVTINDTNEIAGGPGMKGRKLWGLIVCHHSTPRHIPFPIRSACEFLMQVFGLQLNMEVELAAQHREKHILRTQTLLCDMLLRDAPMGIVSQSPNVMDLVKCDGAALLFGGRCWLLGISPTQEQVKDIATWLISSHTDTTGLSTDSLVDAGYPKARELGVDVCGMAAARITENDFLFWFRGHAQKEVKWAGAKDGGSEEDGSRMHPRSSFKAFLEVVKQRSLPWEDVEMDAIHSLQLILRGSFQDIEDKEDRKIVHARLKEMHLQGMEELSSVASEMVRLIETATAPILAVDTAGCVNGWNFKISELTGLSIPEVMGKSLVKDLTHPSSKDTVEKLLYMALNGEEEQNVEIRLKTWGMQQGKGPVILMVNACASRDVSEKVVGVCFVAQDVTGEKIVQDKFTRIQGDYTTIVRSHNSLIPPIFGSDESGFCVEWNPAMERLSGVKREEAIGKMLTRELFGGILRLKNVDGLTKFMIVLNAAMSSHDTDKFPFTFYDRSGKIVEVLLTTSKRCNSEGVVTGVFCFLHTASSELQQALTVQKAAERVAEVKAKELAYIRQEIQNPLDGIHFARSFMEHTVLSEDQKQLIETSATCEKQLRRILADMDLASIEKGYLELETGEFSMATVMNSVVSQGMIQSTQKNLQLYCDTPPDFKSLSVFGDQVRLQQVLADFLLNAVQFTPPSGWVEIKVEPVVKKLPGGVSVANVDFRVSHPGEGLPEDLIDQMFDRADARVKSQEGLGLSICRKLVRLMNGEVQYRREGERNFFLLQLELPLAQRDDQASMK

SEQ ID NO: 2774 - protein, 492 aa, Lycopersicon esculentum
MDPSKYRPSSAYDTPFLTTNAGGPVYNNVSSLTVGPRGPVLLEDYYLIEKLATFDREKIPERVVHARGASAKGFFEVTHDISHLTCADFLRAPGAQTPVICRFSTVVHERGSPESIRDIRGFAVKFYTREGNFDLVGNNVPVFFNRDAKSFPDTIRALKPNPKSHIQENWRILDFFSFLPESLHTFAFFYDDVCLPTDYRHMEGFGVHAYQLINKEGKAHYVKFHWKPTCGVKCMSEEEAIRVGGTNHSHATKDLYDSIAAGNYPEWKLFIQTMDPEDVDKFDFDPLDVTKTWPEDLLPLIPVGRLVLNRNIDNFFAENEQLAFNPGHIVPGIYYSEDKLLQTRIFAYADTQRHRIGPNYMQLPVNAPKCGHHNNHRDGAMNMTHRDEEVDYLPSRFDPCRPAEQYPIPSCVLNGRRTNCVIPKENNFKQAGERYRSWEPDRQDRYINKWVESLSDPRVTHEIRSIWISYLSQADKSCGQKVASRLTVKPTM

SEQ ID NO: 2775 - protein, 547 aa, Actinobacillus pleuropneumoniae
MAAKDVKFGNDARVKMLKGVNVLADAVKVTLGPKGRNVVLDKAYGAPTITKDGVSVAREIELEDKFENMGAQMVKEVASKANDAAGDGTTTATVLAQAIVNEGLKAVAAGMNPMDLKRGIDKAVVAVVEELKAISKPCETSKEIEQVGTISANSDETVGKLIAQAMEKVGKEGVITVEDGTGLDDALDVVEGMQFDRGYLSPYFINKPEAGTVELENPYIILVDKKISNIREILPVLEAVAKAGKPLLIVAEDIEGEALATLVVNTMRGIVKVAAVKAPGFGDRRKAMLQDIAILTAGTVISEEIGMELEKATLEELGQAKRVVITKDNTTIIDGIGDEAQIKARVAQIRQQIEDSTSDYDKEKLQERVAKLAGGVAVIKVGAATEVAMKEKKDRVDDALHATRAAVEEGIVPGGGVALVRAASKVATTLTGDNEEQNVGIKLALRAMEAPLRQIVTNAGEEASVVARNVKDGNGNYGYNAGTEQYGDMLEMGILDPPKVTRSALQFAASIAGLMITTECMITDLPKEEKLDPAAAMGGMGGMGGMM

SEQ ID NO: 2776 - protein, 545 aa, Bacteroides thetaiotaomicron VPI-5482
MAKEILFNIDARDQLKKGVDALANAVKVTLGPKGRNVIIEKKFGAPHITKDGVTVAKEIELADAYQNTGAQLVKEVASKTGDDAGDGTTTATVLAQAIVAEGLKNVTAGASPMDIKRGIDKAVAKVVESIKAQAETVGDNYDKIEQVATVSANNDPVIGKLIADAMRKVSKDGVITIEEAKGTDTTIGVVEGMQFDRGYLSAYFVTNTEKMECEMEKPYILIYDKKISNLKDFLPILEPAVQTGRPLLVIAEDVDSEALTTLVVNRLRSQLKICAVKAPGFGDRRKEMLEDIAILTGGVVISEEKGLKLEQATIEMLGTADKVTVSKDYTTIVNGAGVKENIKERCDQIKAQIVATKSDYDREKLQERLAKLSGGVAVLYVGAASEVEMKEKKDRVDDALRATRAAIEEGIIPGGGVAYIRAIDSLEGMKGDNADETTGIGIIKRAIEEPLREIVANAGKEGAVVVQKVREGKGDFGYNARTDVYENLHAAGVVDPAKVARVALENAASIAGMFLTTECVIVEKKEDKPEMPMGAPGMGGMGGMM

SEQ ID NO: 2777 - protein, 552 aa, Anabaena variabilis
MAKPIEFTLFAPYNKGAALIASFSDWQEIPMKKGDDGYFRTTVELEDGTYQYKFRVQTRSWFFEEDQWVDVTDPYATDIDESSGKDNSIARIKDGEKIVDTYVWQHDDKPLPADHELVIYELHVGDFSGGEDDPYARGKYKHVIEKLDYLCELGINAIELLPVKEYPGDYSWGYNPRYFFATESSYGSTADLKKLVDECHQRGIRIIMDGIYNHSEASSPLTQIDHDYWYHHEPRDPDNNWGPEFNYEHYDENLETYPARKFIGDTVRYWVGEYHLDGIRYDAARQIANYDFMHWIAQEAKKTAGAKPFYNVAEHIPETTSITNLDGPMDGCWHDSFYHTIKAHICGDTFDLENLKDVIDPKRQGFLGATNVVNYLTNHDHDHIMVELGNREIFHDEAFRRAKLGTAILMTAVGVPLIWMGEEFGEYKPKQQDQSKIDWTLLGNDLNRSLFDYHKGLIGLRKNNHALYTENIDFIHENPEAKVLAYSRWNDEGSRVVVVTNFSEDFLAGYHVPNFPSGGTWHEWTGDYDVEAGDDGIITDIGPYEAKVFVWQ

SEQ ID NO: 2778 - protein, 373 aa, Datisca glomerata
MASSAVSTIGAVNRSPLNLNNNGTGGLLPNTAFFGSSLKKMNSRLTNPRIAAGNIKAVADDDEEKQTSKDRWGGLAFDTSDDQQDITRGKGMVDSLFQAPMQTGTHYAVMSSYEYLSTGLRQYLDNNMDGFYIAPAFMDKLVVHITKNFMTLPNIKVPLILGIWGGKGQGKSFQCELVFAKMGINPIMMSAGELESGNAGEPAKLIRQRCREAADIIKKGKMSCLFINDLDAGAGRLGGTTQYTVNNQMVNATLMNIADNPTNVQLPGMYNKEENPRVPIIVTGNDFSTLYAPLIRDGRMEKFYWAPTREDRIGVCTGIFRSDNVAKEDIVKLVDTFPGQSIDFFGALRARVYDDEVRKWISGVGVQDVGKSL

SEQ ID NO: 2779 - protein, 1146 aa, Populus tremula
MASQSQRQSNQPAHNQAQSSGTSNMRQHHHPTESVSKAIAQYTVDAQLHAVFEQSGGTGKSFDYSKSVRTPNQSVPEEQITAYLSKIQRGGHIQPFGCMIAADEQSFRVIAYSENAKDMLGLTPQSVPSLEKQEILFVGADVRILFRPSSAVLLEKAFGAREITLLNPIWIHSKNSGKPFYAILHRIDVGIVIDLEPARTEDPALSIAGAVQSQKLAVRAISQLQSLPGGDIKLLCDTVVDSVRELTGYDRVMVYKFHEDEHGEVVAENKRVDLEPYIGLHYPSTDIPQASRFLFKQNRVRMIVDCHAIPVSVIQDEGLMQPLCLVGSTLRAPHGCHAQYMENMGSIASLAMAVIIYGNDEEAIGGRNSMRLWGLVVCHHTSARCIPFPLRYACEFLMQAFGLQLNMELQLASQLLEKHVLRTQTLLCDMLLRDSPTGIVTQSPSIMDLVKCDGAALYYQGQYYPLGVTPTEAQIKDIVEWLLTLHGDPTGLSTDSLADAGYPGAAFLGDAVCGMAVAYIAERDFLFWFRSHTAKEVKWGGAKHHPEDKDDGQRMHPRSSFKAFLEVVKSRSLPWENAEMDAIHSLQLILRDSFRDAEATNSKAVVHNQLKDMELQGMDELSSVAREMVRLIETATAPIFAVDVDGRINGWNAKVAELTGLSVEEAMGKSLVHDLVYKEYEEIVDKLIHRAVKGEEDKNVEIKLRTFCSEHQKKAVFVVVNACSSKDYMDNIVGVCFVGQDVTGQKVVMDKYVLIQGDYKAIVHSPNPSIPPIFASDENTCCLEWNTAMEKLTGWSRGEVVGKMLVGEVFGSCCRLKGPDALTKFMIALHNAIGGIDTDKLPFSFFDRNEKNVQTLLTANKRVNMKGDIIGAFCFLQIASPELQPSLKVQKQQEKKSFARMKELAYICQEIKNPLSGIHFTNSLLENTDLTEDQQQFLETSAACEKQILKIIRDIDLESIENGSLELEKAEFLLGSVINAVVSQAMLLLRERNLQLLRDIPEEIKTLAVYGDQARIQQVLADFLLNMVRYAPSSAGWVEIHVCPTLKQISDGHTLVHTEFRYLERVLQTRMLGLQHPPRSFLNCKLTLVMLHREGMVPKIQFQGLSVCQGRLIWLSFPENTTVALYPLTIWFLLLHRHQSRSITHT

SEQ ID NO: 2780 - protein, 153 aa, Thermobifida fusca YX
MALPVTRRRERLIPTQWGAFPEFEELYDRMGRLLESAFGEPIISPTTWTPFADLLEDDKSYIVEAEVPGMSKDDINIQVSGNELIISGKVEEQEKEGVRAHRRMRRYGEFEYRTVLPGEIDAEGVRAKLDNGVLTVTAPKSAHERPRHVAIES

SEQ ID NO: 2781 - protein, 1146 aa, Populus tremula
MASQSQRQSNQPAHNQAQSSGTSNMRQHHHPTESVSKAIAQYTVDAQLHAVFEQSGGTGKSFDYSKSVRTPNQSVPEEQITAYLSKIQRGGHIQPFGCMIAADEQSFRVIAYSENAKDMLGLTPQSVPSLEKQEILFVGADVRILFRPSSAVLLEKAFGAREITLLNPIWIHSKNSGKPFYAILHRIDVGIVIDLEPARTEDPALSIAGAVQSQKLAVRAISQLQSLPGGDIKLLCDTVVDSVRELTGYDRVMVYKFHEDEHGEVVAENKRVDLEPYIGLHYPSTDIPQASRFLFKQNRVRMIVDCHAIPVSVIQDEGLMQPLCLVGSTLRAPHGCHAQYMENMGSIASLAMAVIIYGNDEEAIGGRNSMRLWGLVVCHHTSARCIPFPLRYACEFLMQAFGLQLNMELQLASQLLEKHVLRTQTLLCDMLLRDSPTGIVTQSPSIMDLVKCDGAALYYQGQYYPLGVTPTEAQIKDIVEWLLTLHGDPTGLSTDSLADAGYPGAAFLGDAVCGMAVAYIAERDFLFWFRSHTAKEVKWGGAKHHPEDKDDGQRMHPRSSFKAFLEVVKSRSLPWENAEMDAIHSLQLILRDSFRDAEATNSKAVVHNQLKDMELQGMDELSSVAREMVRLIETATAPIFAVDVDGRINGWNAKVAELTGLSVEEAMGKSLVHDLVYKEYEEIVDKLIHRAVKGEEDKNVEIKLRTFCSEHQKKAVFVVVNACSSKDYMDNIVGVCFVGQDVTGQKVVMDKYVLIQGDYKAIVHSPNPSIPPIFASDENTCCLEWNTALEKLTGWSRGEVVGKMLVGEVFGSCCRLKGPDALTKFMIALHNAIGGIDTDKLPFSFFDRNEKNVQTLLTANKRVNMKGDIIGAFCFLQIASLELQPSLKVQKQQEKKSFARMKELAYICQEIKNPLSGIHFTNSLLENTDLTEDQQQFLETSAACEKQILKIIRDIDLESIENGSLELEKAEFLLGSVINAVVSQAMLLLRERNLQLLRDIPEEIKTLAVYGDQARIQQVLADFLLNMVRYAPSSAGWVEIHVCPTLKQISDGHTLVHTEFRYLERVLQTRMLGLQHPPRSFLNCKLTLVMLHREGMVPKIQFQGLSVCQGRLIWLSFPENTTVALYPLTIWFLLLHRHQSRSITHT

SEQ ID NO: 2782 - protein, 1146 aa, Populus tremula
MASQSQRQSNQPAHNQAQSSGTSNMRQHHHPTESVSKAIAQYTVDAQLHAVFEQSGGTGKSFDYSKSVRTPNQSVPEEQITAYLSKIQRGGHIQPFGCMIAADEQSFRVIAYSENAKDMLGLTPQSVPSLEKQEILFVGADVRILFRPSSAVLLEKAFGAREITLLNPIWIHSKNSGKPFYAILHRIDVGIVIDLEPARTEDPALSIAGAVQSQKLAVRAISQLQSLPGGDIKLLCDTVVDSVRELTGYDRVMVYKFHEDEHGEVVAENKRVDLEPYIGLHYPSTDIPQASRFLFKQNRVRMIVDCHAIPVSVIQDEGLMQPLCLVGSTLRAPHGCHAQYMENMGSIASLAMAVIIYGNDEEAIGGRNSMRLWGLVVCHHTSARCIPFPLRYACEFLMQAFGLQLNMEFQLASQLLEKHVLRTQTLLCDMLLRDSPTGIVTQSPSIMDLVKCDGAALYYQGQYYPLGVTPTEAQIKDIVEWLLTLHGDPTGLSTDSLADAGYPGAAFLGDAVCGMAVAYIAERDFLFWFRSHTAKEVKWGGAKHHPEDKDDGQRMHPRSSFKAFLEVVKSRSLPWENAEMDAIHSLQLILRDSFRDAEATNSKAVVHNQLKDMELQGMDELSSVAREMVRLIETATAPIFAVDVDGRINGWNAKVAELTGLSVEEAMGKSLVHDLVYKEYEEIVDKLIHRAVKGEEDKNVEIKLRTFCSEHQKKAVFVVVNACSSKDYMDNIVGVCFVGQDVTGQKVVMDKYVLIQGDYKAIVHSPNPSIPPIFASDENTCCLEWNTALEKLTGWSRGQVVGKMLVGEVFGSCCRLKGPDALTKFMIALHNAIGGIDTDKLPFSFFDRNEKNVQTLLTANKRVNIKGDIIGAFCFLQIASPELQPSLKVQKQQEKKSFARMKELAYICQEIKNPLSGIHFTNSLLENTDLTEDQQQFLETSAACEKQILKIIRDIDLESIENGSLELEKAEFLLGSVINAVVSQAMLLLRERNLQLLRDIPEEIKTLAVYGDQARIQQVLADFLLNMVRYAPSSAGWVEIHVCPTLKQISDGHTLVHTEFRYLERVLQTRMLGLQHPPRSFLNCKLTLVKLHREGMVPKIQFQGLSVCQGRLIWLSFPENTTVALYPLTIWFLLLHRHQSRSITHT

SEQ ID NO: 2783 - protein, 520 aa, Oryza sativa
MGNSLGCSASGERLVSAARDGDAVEARMLLELSPALARYSTFGGLNSPLHFAAAKGHLDIVTLLLEKGADVNVRNYCGQTALMHACRHGHWEVVQMLLLFRCNVTRADYLSGRTALHFAAHDGLVRCVRLLLADFVPSAPLEDGASSTVDGGECQTNSGSSPCSSLGLKFNESARLRYINKPADGGVTALHMAALNGHFDCMQLLIDLGANVSAVTFPYGTTANLIGAGSTPLHYAAGGGNAECCQLLLSKGASKLTLNCNGWLPIDVARMFGRRFLEPLLSPNSNSSIPAYQPSNYLALPFMSILNIAREFGLLHTVASVDDSDLCAVCLERSCSVAAEGCCHEFCIKCALYLCSTSNTRVEFTGPPGSIPCPLCRNGIMSFTKLPSTPTEGLKSSSALTFCNPCMLNTRSVDSPATISKAEIRRNRVAAVSSELVCPLTCSPFPSSALPTCRCSDDDPCDAIETQDGSEVQSPQPSHCASMEMDKREQQDLDRTSCSGMFWSRRSCHREEQCNAEINA

SEQ ID NO: 2784 - protein, 539 aa, Gibberella zeae PH-1
MNSNQLDPRQHPLEAIGAAIGAEEQTELQTRSSNFQGADEGPASVIAKVSGAQSGGKREDGSSDLPNNKGTPRPNPTYSKTVGGLPLVSDTFLLQKQQHFNRSKTLERVVHSCGAGAFGYFECTRDVTELTKANFLSSVGEKTPVFVRFSTATLGREFPDASRNPRGFAIKFYTKEGNYDIVGLNFPVFFCRDPIQGPDVIRSQSRNPSNFLLDHDALFDFLANNPEANHAGIMLFSDHGTPQGWRFSHGYGCHTFKWVNADGEFMYVKYHFIAKHGQKQFADSEAMQMCGEDPDYSKRDLWEAIEKGEDIEWMVHVQIMDPRQADPDTLGFDPFDATKIWPRSEFRMKELGRLVLNKNPENFHRDVEQAVFSPGSMVPGIEDSPDPLLQFRMFLYRDAQYHRVGTNLHQIPVNCPFMAKSYASPFDGPMHVDTDRAGSKQYPLNSFAHKFRPDTDEAPYEVNDNFIKYLAQVYIISVDYAQGIYNLLDEPRFEFSKVKKLGETKFAEAADDWYKEPKFRDKPGSKLVGYPPEIAVYQP

SEQ ID NO: 2785 - protein, 1146 aa, Populus tremula
MASQSQRQSNQPAHNQAQSSGTSNMRQHHHPTESVSKAIAQYTVDAQLHAVFEQSGGTGKSFDYSKSVRTPNQSVPEEQITAYLSKIQRGGHIQPFGCMIAADEQSFRVIAYSENAKDMLGLTPQSVPSLEKQEILFVGADVRILFRPSSAVLLEKAFGAREITLLNPIWIHSKNSGKPFYAILHRIDVGIVIDLEPARTEDPALSIAGAVQSQKLAVRAISQLQSLPGGDIKLLCDTVVDSVRELTGYDRVMVYKFHEDEHGEVVAENKRVDLEPYIGLHYPSTDIPQASRFLFKQNRVRMIVDCHAIPVSVIQDEGLMQPLCLVGSTLRAPHGCHAQYMENMGSIASLAMAVIIYGNDEEAIGGRNSMRLWGLVVCHHTSARCIPFPLRYACEFLMQAFGLQLNMELQLASQLLEKHVLRTQTLLCDMLLRDSPTGIVTQSPSIMDLVKCDGAALYYQGQYYPLGVTPTEAQIKDIVEWLLTLHGDPTGLSTDSLADAGYPGAAFLGDAVCGMAVAYIAERDFLFWFRSHTAKEVKWGGAKHHPEDKDDGQRMHPRSSFKAFLEVVKSRSLPWENAEMDAIHSLQLILRDSFRDAEATNSKAVVHTQLKDMELQGMDELSSVAREMVRLIETATAPIFAVDVDGRINGWNAKVAELTGLSVEEAMGKSLVHDLVYKEYEEIVDKLIHRAVKGEEDKNVEIKLRTFCSEHQKKAVFVVVNACSSKDYMDNIVGVCFVGQDVTGQKVVMDKYVLIQGDYKAIVHSPNPSIPPIFASDENTCCLEWNTALEKLTGWSRGEVVGKMLVGEVFGSCCRLKGPDALTKFMIALHNAIGGIDTDKLPFSFFDRNEKNVQTLLTANKRVNIKGDIIGAFCFLQIASPELQPSLKVQKQQEKKSFARMKELAYICQEIKNPLSGIHFTNSLLENTDLTEDQQQFLETSAACEKQILKIIRDIDLESIENGSLELEKAEFLLGSVINAVVSQAMLLLRERNLQLLRDIPEEIKTLAVYGDQARIQQVLADFLLNMVRYAPSSAGWVEIHVCPTLKQISDGHTLVHTEFRYLERVLQTRMLGLQHPPRSFLNCKLTLVMLHREGMVPKIQFQGLSVCQGRLIWLSFPENTTVALYPLTIWFLLLHRHQSRSITHT

SEQ ID NO: 2786 - protein, 1146 aa, Populus tremula
MASQSQRQSNQPAHNQAQSSGTSNMRQHHHPTESVSKAIAQYTVDAQLHAVFEQSGGTGKSFDYSKSVRTPNQSVPEEQITAYLSKIQRGGHIQPFGCMIAADEQSFRVIAYSENAKDMLGLTPQSVPSLEKQEILFVGADVRILFRPSSAVLLEKAFGAREITLLNPIWIHSKNSGKPFYAILHRIDVGIVIDLEPARTEDPALSIAGAVQSQKLAVRAISQLQSLPGGDIKLLCDTVVDSVRELTGYDRVMVYKFHEDEHGEVVAENKRVDLEPYIGLHYPSTDIPQASRFLFKHNRVRMIVDCHAIPVSVIQDEGLMQPLCLVGSTLRAPHGCHAQYMENMGSIASLAMAVIIYGNDEEAIGGRNSMRLWGLVVCHHTSARCIPFPLRYACEFLMQAFGLQLNMELQLASQLLEKHVLRTQTLLCDMLLRDSPTGIVTQSPSIMDLVKCDGAALYYQGQYYPLGVTPTEAQIKDIVEWLLTLHGDPTGLSTDSLADAGYPGAAFLGDAVCGMAVAYIAERDFLFWFRSHTAKEVKWGGAKHHPEDKDDGQRMHPRSSFKAFLEVVKSRSLPWENAEMDAIHSLQLILRDSFRDAEATNSKAVVHTQLKDMELQGMDELSSVAREMVRLIETATAPIFAVDVDGRINGWNAKVAELTGLSVEEAMGKSLVHDLVYKEYEEIVDKLIHRAVKGEEDKNVEIKLRTFCSEHQKKAVFVVVNACSSKDYMDNIVGVCFVGQDVTGQKVVMDKYVLIQGDYKAIVHSPNPSIPPIFASDENTCCLEWNTALEKLTGWSRGEVVGKMLVGEVFGSCCRLKGPDALTKFMIALHNAIGGIDTDKLPFSFFDRNEKNVQTLLTANKRVNMKGDIIGAFCFLQIASPELQPSLKVQKQQEKKSFARMKELAYICQEIKNPLSGIHFTNSLLENTDLTEDQQQFLETSAACEKQILKIIRDIDLESIENGSLELEKAEFLLGSVINAVVSQAMLLLRERNLQLLRDIPEEIKTLAVYGDQARIQQVLADFLLNMVRYAPSSAGWVEIHVCPTLKQISDGHTLVHTEFRYLERVLQTRMLGLQHPLRSFLNCKLTLVKLHREGMVPKIQFQGLSVCQGRLIWLSFPENTTVALYPLTIWFLLLHRHQSRSITHT

SEQ ID NO: 2787 - protein, 420 aa, Thermus thermophilus HB27
MGPLLVWHRGDLRLHDHPALLEALARGPVVGLVVLDPNNLKTTPRRRAWFLENVRALREAYRARGGALWVLEGLPWEKVPEAARRLKAKAVYALTSYTPYGRYRDAKVQEALPVPLHLLPAPHLLPPDLPRAYRVYTPFARRFLGVEAPLPAPEALPKGPEEGEIPREDPGLPLPEPGEEAALAGLRAFLEAKLPAYAEERDRLDGEGGSRLSPYFALGVLSPRLAAWEAERRGGEGARKWVAELLWRDFSYHLLYHFPWMAERPLDPRFQALPWQEDEALFRAWYEGRTGVPLVDAAMRELHATGFLSNRARMNAAQFAVKHLLLPWKRCEEAFRHLLLDGDRAVNLQGWQWAGGLGVDAAPYFRVFNPVLQGERHDPEGRWLKRWAPEYPSYAPKDPVVDLEEARRRYLRLARDLARG

SEQ ID NO: 2788 - protein, 377 aa, Pseudomonas putida
MPDTSFSNPGLFTPLQLGSLSLPNRVIMAPLTRSRTPDSVPGRLQQIYYGQRASAGLIISEATNISPTARGYVYTPGIWTDAQEAGWKGVVEAVHAKGGRIALQLWHVGRVSHELVQPDGQQPVAPSALKAEGAECFVEFEDGTAGLHPTSTPRALETDGIPGIVEDYRQAAQRAKRAGFDMVEVHAANACLPNQFLATGTNRRTDQYGGSIENRARFPLEVVDAVAEVFGPERVGIRLTPFLELFGLTDDEPEAMAFYLAGELDRRGLAYLHFNEPDWIGGDITYPEGFREQMRQRFKGGLIYCGNYDAGRAQARLDDNTADAVAFGRPFIANPDLPERFRLGAALNEPDPSTFYGGAEVGYTDYPFLDNGHDRLG

SEQ ID NO: 2789 - protein, 311 aa, Arabidopsis thaliana
MAAPIRFFELNTGAKLPCVGLGTYAMVATAIEQAIKIGYRHIDCASIYGNEKEIGGVLKKLIGDGFVKREELFITSKLWSNDHLPEDVPKALEKTLQDLQIDYVDLYLIHWPASLKKESLMPTPEMLTKPDITSTWKAMEALYDSGKARAIGVSNFSSKKLTDLLNVARVTPAVNQVECHPVWQQQGLHELCKSKGVHLSGYSPLGSQSKGEVRLKVLQNPIVTEVAEKLGKTTAQVALRWGLQTGHSVLPKSSSGARLKENLDVFDWSIPEDLFTKFSNIPQEKFCRATEFAHETHGFYKTIEELWDGEI

SEQ ID NO: 2790 - protein, 285 aa, Mycoplasma penetrans HF-2
MKYIKLANGLHMPIIGLGVYKAEGENCENTIIKAIDDYGYRMIDTAQVYFNEEFVGNAIKQTKIKREDIFITTKVWISNYGYNNTMYSISKSLKKLQTNYIDLVLLHQPFGDYYSAWKALEVLYKKGIVKAIGVSNFEADRLVDFCLHVDVKPVINQIELHPLRQRIEDLHWNNKYGVAVESWASFGRATSEIMENPILVSLAEKYNKTVPQIILRWLIQQNIVVIPKTVTESRLKENMDIFDFEISDDDMDLIKTINQNKTVSKHHHDPSTAEEIFSKFPEIRR

SEQ ID NO: 2791 - protein, 492 aa, Brassica napus
MDPYKYRPSSAYNAPFYTTNGGAPVSNNISSLTIGERGPVLLEDYHLIEKVANFTRERIPERVVHARGISAKGFFEVTHDISNLTCADFLRAPGVQTPVIVRFSTVVHERASPETMRDIRGFAVKFYTREGNFDLVGNNTPVFFIRDGIQFPDVVHALKPNPKTNIQEYWRILDYMSHLPESLLTWCWMFDDVGIPQDYRHMEGFGVHTYTLVSKSGKVLFVKFHWKPTCGIKNLTDEEAKVVGGANHSHATKDLHDAIASGNYPEWKLFIQTMDPADEDKFDFDPLDVTKIWPEDILPLQPVGRLVLNRTIDNFFNETEQLAFNPGLVVPGIYYSDDKLLQCRIFAYGDTQRHRLGPNYLQLPVNAPKCAHHNNHHEGFMNFMHRDEEINYYPSKFDPVRCAEKVPIPNKSYTGIRTKCIIKKENNFKQPGDRYRSWAPDRQDRFVKRWVEILSEPRLTHEIRSIWISYWSQADRSLGQKLASRLNVRPSI

SEQ ID NO: 2792 - protein, 281 aa, Ostreococcus tauri
SHRGHLEYRWNKFKGLRQAIEDNEGGLEKFSRGYEKMGFTRTAEGITYREWAPNASAACLRGDFNGWDLGENGKWMTKNDFGVFEVFLPNNEDGSPAIPHGSRVKIHLQIPNAEPVDKIPAWIKYAVQQPGEIPFNGIYYDPPVEEQYNFKFERPDAPSELRIYEAHVGMSSTEPKINSYVEFADDVLPRIKDLGYNAVQLMAIQEHAYYASFGYHVTNFFAVSSRCGTPDELKYLVDKAHSMGISVIMDLVHSHASSNSMDGLNMFDGSNGQYFHSGPEG

SEQ ID NO: 2793 - protein, 389 aa, Chlamydomonas reinhardtii
MADPGAQPVPAPQSAEEPVTGGLQESVEVTASGKLDSYNREYNQFLVCGSLFECPAKYLPIKPIGKGAYGVVCSAKNLDNQEKVAIKKIANAFDNVIDAKRTLREIKLLRHLQHENIVQIKDIIPPTNRDAFKDLYVVYELMDTDLHQIIRSPQALSNDHSQYFLYQLLRGLKYIHSANILHRDLKPSNLLVNANCDLKICDFGLARTSTSNEREFMTEYVVTRWYRAPELLLSCSGYTTAIDVWSVGCIFAELLGRKPLFPGKDYVHQLSLITKVIGSPSEEELGFITSEKAKRYIRSLPRSERVDFGQLWPHVTKTALDLIDKMLVFDPTKRITVEQALEHPYLASLHDVSDEPVCPTPFTFDFDSEHLTPDVVREVILQDMAELHT

SEQ ID NO: 2794 - protein, 106 aa, Oryza sativa
MAEEAQSHAREGGRHPRQPAGRENDLTTVELARFAVAEHNSKANAMLELERVVKVRQQVVGGFMHYLTVEVKEPGGANKLYEAKVWERAWENFKQLQDFKPLDATA

SEQ ID NO: 2795 - protein, 1146 aa, Populus tremula
MASQSQRQSNQPAHNQAQSSGTSNMRQHHHPTESVSKAIAQYTVDAQLHAVFEQSGGTGKSFDYSKSVRTPNQSVPEEQITAYLSKIQRGGHIQPFGCMIAADEQSFRVIAYSENAKDMLGLTPQSVPSLEKQEILFVGADVRILFRPSSAVLLEKAFGAREITLLNPIWIHSKNSGKPFYAILHRIDVGIVIDLEPARTEDPALSIAGAVQSQKLAVRAISQLQSLPGGDIKLLCDTVVDSVRELTGYDRVMVYKFHEDEHGEVVAENKRVDLEPYIGLHYPSTDIPQASRFLFKQNRVRMIVDCHAIPVSVIQDEGLMQPLCLVGSTLRAPHGCHAHYMENMGSIASLAMAVIIYGNDEEAIGGRNSMRLWGLVVCHHTSARCIPFPLRYACEFLMQAFGLQLNMELQLASQLLEKHVLRTQTLLCDMLLRDSPTGIVTQSPSIMDLVKCDGAALYYQGQYYPLGVTPTEAQIKDIVEWLLTLHGDPTGLSTDSLADAGYPGAAFLGDAVCGMAVAYIAERDFLFWFRSHTAKEVKWGGAKHHPEDKDDGQRMHPRSSFKAFLEVVKSRSLPWENAEMDAIHSLQLILRDSFRDAEATNSKAVVHTQLKDMELQGMDELSSVAREMVRLIETATAPIFAVDVEGRINGWNAKVAELTGLSVEEAMGKSLVHDLVYKEYEEIVDKLIHRAVKGEEDKNVEIKLRTFCSEHQKKAVFVVVNACSSKDYMDNIVGVCFVGQDVTGQKVVMDKYVLIQGDYKAIVHSPNPSIPPIFASDENTCCLEWNTALEKLTGWSRGEVVGKMLVGEVFGSCCRLKGPDALTKFMIALHNAIGGIDTDKLPFSFFDRNEKNVQTLLTANKRVNMKGDIIGAFCFLQIASPELQPSLKVQKQQEKKSFARMKELAYICQEIKNPLSGIHFTNSLLENTDLTEDQQQFLETSAACEKQILKIIRDIDLESIENGSLELEKAEFLLGSVINAVVSQAMLLLRERNLQLLRDIPEEIKTLAVYGDQARIQQVLADFLLNMVRYAPSSAGWVEIHVCPTLKQISDGHTLVHTEFRYLERVLQTRMLGLQHPLRSFLNCKLTLVMLHREGMVPKIQFQGLSVCQGRLIWLSFPENTTVALYPLTIWFLLLHRHQSRSITHT

SEQ ID NO: 2796 - protein, 366 aa, Methanosarcina acetivorans C2A
MVIMAEDTDLFSQYRMGDLTLPNRMVMAPMTRSRAGDDDIPVPLTATYYVQRASAGMIITEGSQVSPQGVGFMHTPGIYSAAQAASWKKITDAVHKAGGRIFIQLWHVGRVSHSDLLGGALPVAPSALPVEGYIHTPGGKKPIPVPRALKTDEVPDIVRQFRQAAENARAAGFDGVEIHGANTYLLDQFLRSGSNKRTDKYGGSLENRARLPLEVTKAVIEVWGGDRVGYRISPHNIAHSMSDANPGETFSYFAKELNKTGLGYLHLIEPIGGRSGFVPPEARLGPILRRIFERTFILNGGYGLQSGNEAIDSGEADLIAFGVPFLANPDLPERFRQNAPLNEPKLDTFYVGGEKGYTDYPALVNR

SEQ ID NO: 2797 - protein, 1146 aa, Populus tremula
MASQSQRQSNQPAHNQAQSSGTSNMRQHHHPTESVSKAIAQYTVDAQLHAVFEQSGGTGKSFDYSKSVRTPNQSVPEEQITAYLSKIQRGGHIQPFGCMIAADEQSFRVIAYSENAKDMLGLTPQSVPSLEKQEILFVGADVRILFRPSSAVLLEKAFGAREITLLNPIWIHSKNSGKPFYAILHRIDVGIVIDLEPARTEDPALSIAGAVQSQKLAVRAISQLQSLPGGDIKLLCDTVVDSVRELTGYDRVMVYKFHEDEHGEVVAENKRVDLEPYIGLHYPSTDIPQASRFLFKQNRVRMIVDCHAIPVSVIQDEGLMQPLCLVGSTLRAPHGCHAQYMENMGSIASLAMAVIIYGNDEEAIGGRNSMRLWGLVVCHHTSARCIPFPLRYACEFLMQAFGLQLNMELQLASQLLEKHVLRTQTLLCDMLLRDSPTGIVTQSPSIMDLVKCDGAALYYQGQYYPLGVTPTEAQIKDIVEWLLTLHGDPTGLSTDSLADAGYPGAAFLGDAVCGMAVAYIAERDFLFWFRSHTAKEVKWGGAKHHPEDKDDGQRMHPRSSFKAFLEVVKSRSLPWENAEMDAIHSLQLILRDSFRDAEATNSKAVVHTQLKDMELQGMDELSSVAREMVRLIETATAPIFAVDVDGCINGWNAKVAELTGLSVEEAMGKSLVHDLVYKEYEEIVDKLIHRAVKGEEDKNVEIKLRTFCSEHQKKAVFVVVNACSSKDYMDNIVGVCFVGQDVTGQKVVMDKYVLIQGDYKAIVHSPNPSIPPIFASDENTCCLEWNTALEKLTGWSRGEVVGKMLVGEVFGSCCRLKGPDALTKFMIALHNAIGGIDTDKLPFSFFDRNEKNVQTLLTANKRVNIKGDIIGAFCFLQIASPELQPSLKVQKQQEKKSFARMKELAYICQEIKNPLSGIHFTNSLLENTDLTEDQQQFLETSAACEKQILKIIRDIDLESIENGSLELEKAEFLLGSVINAVVSQAMLLLRERNLQLLRDIPEEIKTLAVYGDQARIQQVLADFLLNMVRYAPSSAGWVEIHVCPTLKQISDGHTLVHTEFRYLERVLQTRMLGLQHPLRSFLNCKLTLVMLHREGMVPKIQFQGLSVCQGRLIWLSYPENTTVALYPLTIWFLLLHRHQSRSITHT

SEQ ID NO: 2798 - protein, 686 aa, Pseudomonas syringae pv. syringae B728a
MAFEAMFQPIQIGKLTIRNRVLSTAHAEVYATDGGMTTDRYVKYYEEKAKGGIGLAICGGSSSVAIDSPQGWWKSVNLATDRIIPHFQNLADAMHKHGAKIMIQITHMGRRSRWDGDHWPTLLSPSGIREPVHRATCKTIEPEEIWRVIGNYASAAARAKAGGLDGVELSAVHQHMIDQFWSPRVNKRTDEWGGSFENRMRFGLEVIKAVRKEVGPDFCVGLRICGDEFHPDGLSHEDMKQIARYYDDTGMIDFIGVVGSGCDTHNTLANVIPNMSYPPEPFLHLAAGIKEVVKAPVLHAQNIKDPNQATRILEGGYVDMVGMTRAHIADPHLIAKIKMGQIDQIKQCVGANYCIDRQYQGLDVLCIQNAATSREYMGVPHIIEKSAGPKRKVVVVGAGPAGMEAARVSAERGHDVTLFEKKDFIGGQITTASKAPQRDQIAGITRWFQLELARLKVDLRLGTAADAATILDLRPDIVVLAVGGHPFLEQNEHWGAAEGLVVSSWDVLDGKVAPGKNVLVYDTICEFTGMSVADFLADKGCQVEIVTDDIKPGVAIGGTSFPTYYRSMYPKEVIMTGDMMLEKVYREGDKLVAVLENEYTGAKEERVVDQVVVENGVRPDEAIYYALKEGSRNKGQIDIDALFAIQPQPSLSQPGDGYLLFRIGDCVAQRNTHAAIYDGLRLCKDF

SEQ ID NO: 2799 - protein, 1146 aa, Populus tremula
MASQSQRQSNQPAHNQAQSSGTSNMRQHHHPTESVSKAIAQYTVDAQLHAVFEQSGGTGKSFDYSKSVRTPNQSVPEEQITAYLSKIQRGGHIQPFGCMIAADEQSFRVIAYSENAKDMLGLTPQSVPSLEKQEILFVGADVRILFRPSSAVLLEKAFGAREITLLNPIWIHSKNSGKPFYAILHRIDVGIVIDLEPARTEDPALSIAGAVQSQKLAVRAISQLQSLPGGDIKLLCDTVVDSVRELTGYDRVMVYKFHEDEHGEVVAENKRVDLEPYIGLHYPSTDIPQASRFLFKQNRVRMIVDCHAIPVSVIQDEGLMQPLCLVGSTLRAPHGCHAQYMENMGSIASLAMAVIIYGNDEEAIGGRNSMRLWGLVVCHHTSTRCIPFPLRYACEFLMQAFGLQLNMELQLASQLLEKHVLRTQTLLCDMLLRDSPTGIVTQSPSIMDLVKCDGAALYYQGQYYPLGVTPTEAQIKDIVEWLLTLHGDPTGLSTDSLADAGYPGAAFLGDAVCGMAVAYIAERDFLFWFRSHTAKEVKWGGAKHHPEDKDDGQRMHPRSSFKAFLEVVKSRSLPWENAEMDAIHSLQLILRDSFRDAEATNSKAVVHTQLKDMELQGMDELSSVAREMVRLIETATAPIFAVDVDGCINGWNAKVAELTGLSVEEAMGKSLVHDLVYKEYEEIVDKLIHRAVKGEEDKNVEIKLRTFCSEHQKKAVFVVVNACSSKDYMDNIVGVCFVGQDVTGQKVVMDKYVLIQGDYKAIVHSPNPSIPPIFASDENTCCLEWNTAMEKLTGWSRGEVVGKMLVGEVFGNCCRLKGPDALTKFMIALHNAIGGIDTDKLPFSFFDRNEKNVQTLLTANKRVNMKGDIIGAFCFFRIASPELQPSLKVQKQQEKKSFARMKELAYICQEIKNPLSGIHFTNSLLENTDLTEDQQQFLETSAACEKQILKIIRDIDLESIENGSLELEKAEFLLGSVINAVVSQAMLLLRERNLQLLRDIPEEIKTLAVYGDQARIQQVLADFLLNMVRYAPSSAGWVEIHVCPTLKQISDGHTLVHTEFKYLERVLQTRMLGLQHPLRSFLNCKLTLVMLHREGMVPKIQFQGLSVCQGRLIWLSYPENTTVALYPLTIWFLLLHRHQSRSITHT

SEQ ID NO: 2800 - protein, 624 aa, Methylococcus capsulatus str. Bath
MCGISGLVQLEGVADTSAMRRSVETMVKALAHRGPDDSGVAGDGSAVFGMARLAIRGCHDGRQPMVDAETGVMMVCNGEIDNHAELRGWLAERGRAVEHATDVAVIPGLYLELGDGFVERLVGAFALAVWDPRRGRLLLARDRAGERPLFYACRDGRVSFASQAAALVAGSPEPYPADEAAVQAFLKAGYFEAPASPFAGMRKVLPGERIAIDVKGVERSRYWRLNFTRGPARKNPLDEFDAVFREAVRRQSEVEVDFGAFLSGGVDSSLVTAVMRSVHPDRKLKAFGLRFSESSYDEGVFAERVAESLGVDYTPIWVRPEDFPETLADLVRQSGEPLADPAWVPTALLARRASDEVRVALVGEGADELFGGYPTYFGARLAERYSRLPGGLRALIRKAVEAWPVSDKKVTVSFLLKRFVQGDELDFLARHVLWTSSIPPALLRRLGVTPPETPHVAGPQETMLDRLQQHDLETSLAEGLLTKADRASMRSALELRAPFLDKDVIEFAATLPERERVQGLETKVFLKRVALRYLPKDIVYRKKRGLSVPLSAWLRGPLHDWAEARISSPRLEELGINRAAALELLREHERRSADHARALWTLIVVSEWLEWKAGMEAHPAAFTA

SEQ ID NO: 2801 - protein, 1243 aa, Agrobacterium tumefaciens str. C58
MRRHPEIFDSTGMDCRGVEYRLTEGCGLLEKACRAVAALELPACIKDGELRYVVVNEAYGRVMGRAPSAFEGQTSLSLSGDIRDAEREDRERRSLVFATDEAIACHAALSAQSHMLRCERFIGDDGSLFLFEVFEEMPSAVSRKSAAVGGASDILFSSGVMDFIDAGIVVYDRDNQLVYCNARFAEFYSDLDIELKPGIRLEALMKTLYSSSVYRCAKNDGPSFEDWMQKQLHDFSLPYLERVEQFADGRWVRMVNKRLENGMLVGLRVDVTEFKAHETLLSTQIRETWLLRAALEQLPVGVFLRDQDRRLTYANAAYNTFLGGNLADHIGKTETEMFPQNGPRFRQENERILQTGEAIERTGNMPWRDGGAVPVITRLGRVATPDDEYYLVGSVTDVSLLQDREKALIAAQAEAEALHRQLQAVLRALPVGVLLLNADLVIEYVNPFFYQVWGEIGGEKSLVGKSYREFMEMNFDSGLYDYGDRPFDDVYEERVQRLLKADAFAPREVRSKSGKVTVISKTRLEGGKILSTYADVTDVRMRDAEISKARAELERVGEYMQGATRAMAQGLVLVEQGTIIMSNEAMARMFDVPPHLLEKGRNWAGFFAHCAGRGDFGTAAEAGETLRIWRENIAANRPFSWLVHVAGKSWLNLEATNSSGNYWLIIVTDVTEMKVREEELQRLLSRAEAADRAKSEFLANMSHEIRTPMNGVLGMAELLAKSKLDTRQKTFTDIIVKSGNALLTIINDILDFSKIEAGQMKLRSVPFDPAEAVEDVVSLLSSAALEKDIELIVRIDASVSGKVIGDAGRFRQIVTNIVGNAVKFTETGHVLVELSAQSAEASESIFSLRVEDSGIGIPVDKLETIFDKFSQVDGSATRRHEGTGLGLAITVGLVGLFDGKINVVSEVGRGSAFEVDIPFQVMERRRDVPLLSVAIDDIRVLVIDDNDVNRRILTEQLRSWGIDGHAVENGPSGIAVLQEAASLGFAIDAIILDYHMPVMNGLDVVERIRADKRFDDIAIVFLTSMDVVGDETLFTDLSVQAHLMKPARARLLRSTLFDVVRDVRLKRIRQHPLAQGTGGEKARPESRPAEKKQRAEAPATVPERSRPCLLDVLVAEDNDVNQIVFSQILQQAGLRFLIVGNGKRAVQAWEEYNPALILMDVSMPVMNGHQATQAIRAAEQAAGDSRHVPVIGVTAHTQEADRERCLEAGMDDYLSKPISPESLEDKIAQWLGENVLRRDAPGV

SEQ ID NO: 2802 - protein, 1146 aa, Populus tremula
MASQSQRQSNQPAHNQAQSSGTSNMRQHHHPTESVSKAIAQYTVDAQLHAVFEQSGGTGKSFDYSKSVRTPNQSVPEEQITAYLSKIQRGGHIQPFGCMIAADEQSFRVIAYSENAKDMLGLTPQSVPSLEKQEILFVGADVRILFRPSSAVLLEKAFGAREITLLNPIWIHSKNSGKPFYAILHRIDVGIVIDLEPARTEDPALSIAGAVQSQKLAVRAISQLQSLPGGDIKLLCDTVVDSVRELTGYDRVMVYKFHEDEHGEVVAENKRVDLEPYIGLHYPSTDIPQASRFLFKQNRVRMIVDCHAIPVSVIQDEGLMQPLCLVGSTLRAPHGCHAQYMENMGSIASLAMAVIIYGNDEEAIGGRNSMRLWGLVVCHHTSARCIPFPLRYACEFLMQAFGLQLNMELQLASQLLEKHVLRTQTLLCDMLLRDSPTGIVTQSPSIMDLVKCDGAALYYQGQYYPLGVTPTEAQIKDIVEWLLTLHGDPTGLSTDSLADAGYPGAAFLGDAVCGMAVAYIAERDFLFWFRSHTAKEVKWGGAKHHPEDKDDGQRMHPRSSFKAFLEVVKSRSLPWENAEMDAIHSLQLILRDSFRDAEATNSKAVVHTQLKDMELQGMDELSSVAREMVRLIETATAPIFAVDVEGRINGWNAKVAELTGLSVEEAMGKSLVHDLVYKEYEEIVDKLIHRAVKGEEDKNVEIKLRTFCSEHQKKAVFVVVNACSSKDYMDNIVGVCFVGQDVTGQKVVMDKYVLIQGDYKAIVHSPNPSIPPIFASDENTCCLEWNTALEKLTGWSRGEVVGKMLVGEVFGSCCRLKGPDALTKFMIALHNAIGGIDTDKLPFSFFDRNEKNVQTLLTANKRVNMKGDIIGAFCFLQIASPELQPSLKVQKQQEKKSFARMKELAYICQEIKNPLSGIHFTNSLLENTDLTEDQQQFLETSAACEKQILKIIRDIDLESIENGSLELEKAEFLLGSVINAVVSQAMLLLRERNLQLLRDIPEEIKTLAVYGDQARIQQVLADFLLNMVRYAPSSAGWVEIHVCPTLKQISDGHTLVHTEFRYLERVLQTRMLGLQHPLRSFLNCKLTLVKLHREGMVPKIQFQGLSVCQGRLIWLSFPENTTVALYPLTIWFLLLHRHQSRSITHT

SEQ ID NO: 2803 - protein, 469 aa, Bacillus cereus E33L
MVVAFLIGAGGMFAGMSLFGVNPAEVTQTISSGNVSTAQGNLAKINEAYALIDSRYVEDVKDEKLVEGAIQGMLSTLKDPYSTYMDKETAKQFSESLDPELEGIGAEVNKTDGKLIIVSPIKGSPAEKIGIKPNDQILSVDGNSVKDLSREEAVLKIRGKKGTTVAIEIKRAGVADPIVFKIKREKIPIFTVFSSVKQESGKDIGYMQITSFAENTAKEFKDQLKELEKKNIKGLVIDVRGNPGGYLNSVEEILGEIMTDKKPMLQVEQRNGEKKKFSTELKERKSYPISVLIDNGSASASEILAGALKEGEGYDLIGEKTFGKGTVQQAVPFKDGSNIKLTMFKWLTPDGNWIHKKGIKPTVEVKQPDYYHATPIQIEKTLSYNANDVQVKHAQEMLKSLGYVPGREDGYFSKETESALKAFQNANKMEATGQLDKKTAEAIQTKIIEKIRSGENDLQLQSALKLMAK

SEQ ID NO: 2804 - protein, 1146 aa, Populus tremula
MASQSQRQSNQPAHNQAQSSGTSNMRQHHHPTESVSKAIAQYTVDAQLHAVFEQSGGTGKSFDYSKSVRTPNQSVPEEQITAYLSKIQRGGHIQPFGCMIAADEQSFRVIAYSENAKDMLGLTPQSVPSLEKQEILFVGADVRILFRPSSAVLLEKAFGAREITLLNPIWIHSKNSGKPFYAILHRIDVGIVIDLEPARTEDPALSIAGAVQSQKLAVRAISQLQSLPGGDIKLLCDTVVDSVRELTGYDRVMVYKFHEDEHGEVVAENKRVDLEPYIGLHYPSTDIPQASRFLFKQNRVRMIVDCHAIPVSVIQDEGLMQPLCLVGSTLRAPHGCHAQYMENMGSIASLAMAVIIYGNDEEAIGGRNSMRLWGLVVCHHTSARCIPFPLRYACEFLMQAFGLQLNMELQLASQLLEKHVLRTQTLLCDMLLRDSPTGIVTQSPSIMDLVKCDGAALYYQGQYYPLGVTPTEAQIKDIVEWLLTLHGDPTGLSTDSLADAGYPGAAFLGDAVCGMAVAYIAERDFLFWFRSHTAKEVKWGGAKHHPEDKDDGQRMHPRSSFKAFLEVVKSRSLPWENAEMDAIHSLQLILRDSFRDAEATNSKAVVHNQLKDMELQGMDELSSVAREMVRLIETATAPIFAVDVDGRINGWNAKVAELTGLSVEEAMGKSLVHDLVYKEYEEIVDKLIHRAVKGEEDKNVEIKLRTFCSEHQKKAVFVVVNACSSKDYMDNIVGVCFVGQDVTGQKVVMDKYVLIQGDYKAIVHSPNPSIPPIFASDENTCCLEWNTAMEKLTGWSRGEVVGKMLVGEVFGSCCRLKGPDALTKFMIALHNAIGGIDTDKLPFSFFDRNEKNVQTLLTANKRVNMKGDIIGAFCFLQIASPELQPSLKVQKQQEKKSFARMKELAYICQEIKNPLSGIHFTNSLLENTDLTEDQQQFLETSAACEKQILKIIRDIDLESIENGSLELEKAEFLLGSVINAVVSQAMLLLRERNLQLLRDIPEEIKTLAVYGDQARIQQVLADFLLNMVRYAPSSAGWVEIHVCPTLKQISDGHTLVHTEFRYLERVLQTRMLGLQHPLRSFLNCKLTLVMLHREGMVPKIQFQGLSVCQGRLIWLSFPENTTVALYPLTIWFLLLHRHQSRSITHT

SEQ ID NO: 2805 - protein, 461 aa, Oryza sativa (japonica cultivar-group)
MEKKASILMNRYELGRMLGQGTFAKVYHARNLASNQSVAIKVIDKEKVLRVGMIDQIKREISIMRLVRHPNIVQLHEVMASKSKIYFAMEYVRGGELFSRVARGRLKEDAARKYFQQLIGAVDFCHSRGVYHRDLKPENLLVDENGNLKVSDFGLSAFKECQKQDGLLHTTCGTPAYVAPEIINKRGYDGAKADIWSCGVILFVLLAGYLPFHDSNLMEMYRKISKGDVKFPQWFTTDVRRLLSRLLDPNPNIRITVEKLVEHPWFKKGYKPAVMLSQPNESNNLKDVHTAFSADHKDNEGKAKEPASSLKPVSLNAFDIISLSKGFDLSGLFENDKEQKADSRFMTQKPASAIVSKLEQIAETESFKVKKQDGLVKLQGSKEGRKGQLAIDAEIFEVTPSFFVVEVKKSAGDTLEYEKFCNKGLRPSLRDICWDGQSEHPSLAQSSTLTQSSKSISRHAI

SEQ ID NO: 2806 - protein, 69 aa, Zea mays
MVVDQVQILDRHHLFGKFASVDGGVSTRTDQNLAFFGGYNMVTTHIVLLHKNPSEDIHALVEQYYDHFH

SEQ ID NO: 2807 - protein, 492 aa, Zantedeschia aethiopica
MDPYRQRPSSAFNSPFWTTNSGAPVWNNNNSLTVGARGPILLEDYHLLEKLAQFDRERIPERVVHARGASAKGFFEVTHDVSHLTCADFLRAPGVQTPVIVRFSTVIHERGSPETLRDPRGFAVKFYTREGNFDLVGNNFPVFFIRDGIKFPDMVHALKPNPKTHIQENWRILDFFSHHPESLHMFTFLFDDIGIPTDYRHMDGSGVHTYTLVSKEGKAHYVKFHWKPTCGVKSLLDDEAVVVGGANHSHATKDLTDAIAAGNYPEWKLYIQIMDPDHEDRFDFDPLDVTKTWPEDILPLQPVGRMVLNKNIDNFFAENEQLAFCPAIIVPGIYYSDDKLLQTRIFSYADTQRHRLGPNYLMLPANAPKCAHHNNHHEGFMNFMHRDEEVNYFPSRYDPVRHAEQFPIPPRILNGGREKCCIQKENNFKQPGEKYRSWAPDRQERFIKRWIDALSDPRVTHEIRTIWITYWSQCDKFLGQKLASRLNIKPTL

SEQ ID NO: 2808 - protein, 511 aa, Burkholderia sp. 383
MSSTSHRVLRHAVAAICVALSASPHAAELTRDTGAPVGDNENSQTAGPAGPVLLQDSALIEKLQRFDRERIPERVVHARGTGAFGEFVPTADISNLTKAKVFTPGTRTPVFVRFSTVMGYRGSPEQARDPRGFAVKFYTQQGNWDMVGINWPVFFIRDGIKFPDFVHANKPSAVTGVQDPNLAFDFFANTPEATNMLTMLYTNAGMPDSYRHMDGFAVHAFKFVNAHGDVHYVKFHWKSQQGVHGLRPQDIDASIGRDWNMMTNDLYGALKQGDFPKWDLYVQVLTPQDLNRFDFDALDDTKVWTGVPERKIGTMTLNRVPDNYFQSTEESAFAPSRLVPGIEPSEDRMLQDRLFAYADTQMYRLGANYMDLPINRPVVPVVNNNQDGKMNAGDRKGEVNYEPSTLHELAPNPQYKSVRMALGGTTQQEAIHKKLRFRQAGEYYRGLSQQDRDDLITALSGDLGKVTNAHNQYAMLSYFYKADADYGTRLAQAVHADVGQVQALAAKLSEN

SEQ ID NO: 2809 - protein, 213 aa, Brassica napus
  misc_feature (22)..(22): Xaa can be any naturally occurring amino acid
  misc_feature (161)..(161): Xaa can be any naturally occurring amino acid
RRVGSFKKVARSMGYGEKDISXVSFQSISKGYYGECGKRRGYMEVTGFTSDVREQIYKVASVNLCSNISGQILASLVMSPPKPGDESYESYIAEKEGILSSMARRAKTLEEALNKLEGITCNRAEGAMYLFPCINLPQKAIAAAEAAKTAPGAFYCKRLLXATGIVLVPGSGFRQVPGTWHFRCTILPQEDKIPAIVNRLTEFHKSFMDEFRN

SEQ ID NO: 2810 - protein, 455 aa, Picrophilus torridus DSM 9790
MLKRFPERGIPLDEINSILDGYGKNDIKNSRGRLFTYFYDPGLKDLDDLSSILLKFYNRNGMDYHAFPSTLKIENDLISMMSDLMHGNDDTSGTFTTGGTESILLAMKAARDLFLEKKEYVPEIVAPVTAHPAFSKAAKYLGMKITRVPVNEDYIADDTINEYINDRTAAVIASAPSFPYGGIDNIKDISEIALDKNTWFHVDACVGGMILPFLKGLGLNIKDFDFKLPGVSSMSIDLHKYGFTPKGSSVVLYKNHDLRKRQIYVNADWPGYPMSNMGMQATKSAGPLAGSWATLNYLGLDGYKKLAEKTLKAYRMIRSGITDLGYKIIGRPDATIFAFTHNDKDIIDLGIKMIENGWYPQIQPGNVFIDMPDSVHLNISPVHLDVADEFLEFFNELDKNVKPRDKNSYNVNSVEKALEMIKMEKSMLFRIIRYSRPEVSEKIFLEMTDEDFTYS

SEQ ID NO: 2811 - protein, 428 aa, Oryza sativa (japonica cultivar-group)
MAAAGAGSSEVAARVLLQRYQPFAPPPGEYHQFGSGGAAAAGDMTEAVLIRTPLKRKHDREENEAAESNDWMMSPGYTNPAGSPVPTPLSGKGSKAFAKSKAAKGQKSCPQTPLCASSPGNPVTPVGGCRYDSSLGLLTKKFLNLLKGAPGGIVDLNNAAETLEVQKRRIYDITNVLEGIGLIEKKLKNNIRWKGIDDSRPGEVSDDMSILQADIEALSLQEHSVDQQISEMRDKLRGLTEDENNQKWLYVTEDDIKSLPCFQNQTLIAIKAPHGTTLEVPDPDEVNDYPQRRYRIVLRSTMGPIDVYLVSQFEEMSGMETPPRTVQPVSMDSLENPRTPLAAEPNKAAESQPNIQDGLLMPSDAPSSSQDIGGMMKIVPSELDTDADYWLLSDAGVSITDMWKTARILFQTVYHSCILPFWLSSIIM

SEQ ID NO: 2812 - protein, 215 aa, Glycine max
NRQEDSLSRARNGVYALKDVHEPTIEDVLLPGKNMVAAGYCMYGSSCTLVLSTGAGVNGFTLDPSLGEFILTHPNIKIPKKGKIYSVNEGNAKNWDRPTATYVEKCKFPEDGSSPKSLRYIGSMVADVHRTLLYGGIFLYPADKKSPNGKLRVLYEVFPMSFLMEQAGGQSFTGKERALDLVPTKLHERSPIFLGSYDDVEEIKALYAAAEGEQE

SEQ ID NO: 2813 - protein, 410 aa, Bacteroides fragilis YCH46
MNTHSASKLFTPVTIGPLTLRNRTIRSAAFEGMCPGNAPSPMLLDYHRSVAAGGVGMTTIAYASVTRSGLSFPRQLWLRPEIIPGLREVTAAIHAEGAAASIQIGHCGNMSHKSICGVTPISASSGFNIYSPTWVRGMKREELPEMAKAYGRAVCLAREAGFDAVEVHAGHGYLISQFLSPYTNHRKDEYGGSLENRMRFMTMVMNEVMKAAGKDLAVFVKMNMRDGFRGGMEIEETLEVARRLESLGAHALVLSGGFVSKAPMYVMRGAMPIKTLTHYMDCWWLKFGVKLAGRMMIPTVPFKEAYFLEDALKFRSEIKIPLIYVGGLVSREKIDEVLNEGFEAVQMARALLNEPGFVNRMRREEKARCNCGHSNYCIGRMYTIEMACHRHLTEELPLCLKKEIEQLENK

SEQ ID NO: 2814 - protein, 457 aa, Oryza sativa
MMELEKNGNILLRRYEIGKLLGQGTFAKVYHGRNIVTSQSVAIKVIDKDKIFKVGLMDQIKREISVMKLVRHPNIVQLYEVMATKSKIYFVLEYVKGGELFNKVAKGRLKEDAARKYFQQLVSAVDFCHSRGVYHRDLKPENLLVDENGNLKITDFGLSALAESRRQDGLLHTTCGTPAYVAPEVISRKGYDGVKVDTWSCGVILFVLMAGYLPFQDSNLMEMYRKIGKAEFKCPAWFSSDVRKLVSRILDPNPRSRMPITKIMETYWFKKGLDSKLILKNVETNEPVTALADVNVVFSSMGSSSSKKTEEKQDAGKLTNLNAFDIISLSEGFDLSGLFEETDKKKEARFTSSQSASAIISKLEDVASCSKLTVKKKEGGVLKMEGASEGRKGVLAIDAEIFEVTPSFHLVEIKKNNGDTLEYQHLWKEDMKPALKDIVWAWQGERQDQQPEDHGQP

SEQ ID NO: 2815 - protein, 482 aa, Candida albicans SC5314
MGSNSSKSAPTLQRSDTNNSTRSTRSNRSIRSRRSISSIKDSQQQQSDSQQQQEEEEEQSQSQQRPQPILSRNNSATSENPILIRRNTNETLQTPNFSDTLSPHSHSQQQQQQPGSPLSTSMNGNTISRTSTNHSIISTTSHKSSSQQSNLPLKKETTTSSLSTNSNTIDIDSLIDKLLNAGFSGKRTKNVCLKNTEIELICASAREIFLSQPSLLELAPPVKVVGDVHGQYHDLIRIFSKCGFPPKTNYLFLGDYVDRGKQSLETILLLLCYKIKYPENFFLLRGNHECANVTRVYGFYDECKRRCNIKTWKLFIDTFNTLPIAAIVAGKIFCVHGGLSPVLNSMDEIRNIARPTDVPDFGLLNDLLWSDPADTINEWEDNERGVSYVFSKVAINKFLSKFNFDLVCRAHMVVEDGYEFFNDRTLVTVFSAPNYCGEFDNWGAVMGVSEDLLCSFELLDPLDSAALKQVMKKEKQERKKST

SEQ ID NO: 2816 - protein, 594 aa, Gluconobacter oxydans 621H
MRHAVRPMIHFMPRSREAACRPALCLAFCMFILIAPTGPAKAQTPADTAGTAGQAAPAISAASPVPQPALSVSLTREVLVAALGFLEPRTLEAHSARDFCLWGLDGLTAIDPTLSVTETRPEVSGPAPSPGGAMAAEKTSGDASAQGPTILNVLQGQTVVFSRIMPASDSNGAWADLVTAAMQAAWQHSATLREAGSDALLQGFFDELFNHLDPYSRYLGPSPASSDRTRRTGNTGTVGLSLGQSGRMIMITAVNANGPAWEAGVDTGERLVSVNGRSTRGQDVTTVQGWLEGDEHTSVTLGIAAKGHRTTTLRLERTQVPPETVFASTDGPFTVLRVTSFSTQTAEEISQYIDQVVDEPTPDTPAPSASKNKTAGIILDLRGDRGGVLQQAVTTAALLLDHGVAVTTHGRNPLANHIWAVQGGDMTNGTPVVILVDGRTASAAEILASALADHRRAVVIGSETLGKGLVQVIGQMPNGGELFVTWSRNQAPLGWPIQGLGVMPQVCTSLGAESLQAQLSALKQGNTLQGEAVQMARAARYPVPVTKILDIRKHCPAAIGSDADMDAARVLLSSPAAYRAALESVPDENSAPIH

SEQ ID NO: 2817 - protein, 492 aa, Oryza sativa
MDPYKHRPSSGSNSTFWTTNSGAPVWNNNSALTVGERGPILLEDYHLIEKLAQFDRERIPERVVHARGASAKGFFEVTHDISHLTCADFLRAPGVQTPVIVRFSTVVHERGSPETLRDPRGFAVKFYTREGNFDLVGNNMPVFFIRDGMKFPDMVHAFKPSPKTNMQENWRIVDFFSHHPESLHMFSFLFDDVGIPLNYRHMEGFGVNTYTLINKDGKPHLVKFHWKPTCGVKCLLDDEAVTVGGTCHSHATKDLTDSIAAGNYPEWKLYIQTIDPDHEDRFDFDPLDVTKTWPEDIIPLQPVGRMVLNKNIDNFFAENEQLAFCPAIIVPGIHYSDDKLLQTRIFSYADTQRHRLGPNYLMLPVNAPKCAYHNNHHDGSMNFMHRDEEVNYFPSRFDAARHAEKVPIPPRVLTGCREKCVIDKENNFQQAGERYRSFDPARQDRFLQRWVDALSDPRITHELRGIWISYWSQCDASLGQKLASRLNLKPNM

SEQ ID NO: 2818 - protein, 476 aa, Acinetobacter sp. ADP1
MSQKKSVIFKNLLPVIKQYQQAGFTHEKIVALLKDQHDLDLVTTETFKSYLYRYAKVTPTPSESLKMTNTIQTPREIKKSSKLEHVCYDIRGPVLRAANEMEEQGHKIIKLNIGNPAPFGFEAPQEIINDVALNLPNAIGYTDSKGIFPARKAICQYYQQKGIRDMHVNDVYVGNGVSELIVMAMQGLLNDGDEMLVPMPDYPLWTAAVNLSGGTAIHYKCDEENSWYPDIVDMESKITPNTRGIVVINPNNPTGSVYPRHVLQQIVALAKKHDLILFADEIYDKIIYDGIEHVALASLAGDQLCISFNGLSKSYRVAGYRSGWMAITGDKSRAKDYIEGLDMLASMRLCANHQAQYAIQTALGGYQSINDLIRPSGRLYEQRNIAWEMLNEIHGVSCVKPEGAMYCFPKLDPNIYQVEDDEQLMLDFLRAEKVLLVQGTGFNWPTHDHFRLVFLPAENELREAITRLSRFLATRR

SEQ ID NO: 2819 - protein, 1146 aa, Populus tremula
MASQSQRQSNQPAHNQAQSSGTSNMRQHHHPTESVSKAIAQYTVDAQLHAVFEQSGGTGKSFDYSKSVRTPNQSVPEEQITAYLSKIQRGGHIQPFGCMIAADEQSFRVIAYSENAKDMLGLTPQSVPSLEKQEILFVGADVRILFRPSSAVLLEKAFGAREITLLNPIWIHSKNSGKPFYAILHRIDVGIVIDLEPARTEDPALSIAGAVQSQKLAVRAISQLQSLPGGDIKLLCDTVVDSVRELTGYDRVMVYKFHEDEHGEVVAENKRVDLEPYIGLHYPSTDIPQASRFLFKQNRVRMIVDCHAIPVSVIQDEGLMQPLCLVGSTLRAPHGCHAQYMENMGSIASLAMAVIIYGNDEEAIGGRNSMRLWGLVVCHHTSARCIPFPLRYACEFLMQAFGLQLNMELQLASQLLEKHVLRTQTLLCDMLLRDSHTGIVTQSPSIMDLVKCDGAALYYQGQYYPLGVTPTEAQIKDIVEWLLTLHGDPTGLSTDSLADAGYPGAAFLGDAVCGMAVAYIAERDFLFWFRSHTAKEVKWGGAKHHPEDKDDGQRMHPRSSFKAFLEVVKSRSLPWENAEMDAIHSLQLILRDSFRDAEATNSKAVVHNQLKDMELQGMDELSSVAREMVRLIETATAPIFAVDVEGRINGWNAKVAELTGLSVEEAMGKSLVHDLVYKEYEEIVDKLIHRAVKGEEDKNVEIKLRTFCSEHQKKAVFVVVNACSSKDYMDNIVGVCFVGQDVTGQKVVMDKYVLIQGDYKAIVHSPNPSIPPIFASDENTCCLEWNTALEKLTGWSRGEVVGKMLVGEVFGSCCRLKGPDALTKFMIALHNAIGGIDTDKLPFSFFDRNEKNVQTLLTANKRVNMKGDIIGAFCFLQIASPELQPSLKVQKQQEKKSFARMKELAYICQEIKNPLSGIHFTNSLLENTDLTEDQQQFLETSAACEKQILKIIRDIDLESIENGSLELEKAEFLLGSVINAVVSQAMLLLRERNLQLLRDIPEEIKTLAVYGDQARIQQVLADFLLNMVRYAPSSAGWVEIHVCPTLKQISDGHTLVHTEFRYLERVLQTRMLGLQHPPRSFLNCKLTLVKLHREGMVPKIQFQGLSVCQGRLIWLRFPENTTVALYPLTIWFLLLHRHQSRSITHT

SEQ ID NO: 2820 - protein, 468 aa, Streptococcus agalactiae NEM316
MTKTLPKDFIFGGATAAYQAEGATHTDGKGPVAWDKYLEDNYWYTAEPASDFYHKYPVDLALAEEYGVNGIRISIAWSRIFPTGYGEVNLKGVEFYHKLFEECHKRHVEPFVTLHHFDTPEALHSNGDFLNRDNIEHFVNYAAFCFEEFPEVNYWTTFNEIGPIGDGQYLVGKFPPGIQYDLAKVFQSHHNMMVSHARAVKLYKDKGYKGEIGVVHALPTKYPLDPENSADVRAAELEDIIHNKFILDATYLGYYSEMTMAGVKHILKENGGELDLREEDFQALEAAKDLNDFLGINYYMSDWMQAFDGETEIIHNGKGEKGSSKYQIKGVGRRVAPDYVPKTDWDWIIYPQGLYDQIMRVKNDYPNYKKIYITENGLGYKDEFVDNTVYDDGRIDYVKQHLEVLSEAISDGANVKGYFIWSLMDVFSWSNGYEKRYGLFYVDFETQERYPKKSAHWYKQVAKTQIIE

SEQ ID NO: 2821 - protein, 154 aa, Brassica napus
  misc_feature (124)..(124): Xaa can be any naturally occurring amino acid
  misc_feature (139)..(139): Xaa can be any naturally occurring amino acid
  misc_feature (150)..(150): Xaa can be any naturally occurring amino acid
MSVTSTVEENHRKKPSSSEKEAEKRRQRWAFWGRKWRRLDYFKLTASLFVHSMALLAPFYFSWSALWVTFLFYTIGGLGITVSYHRNLAHRSFKVPKWLEYLLAYCALLAIQGDPIDWVSIIRXHLQDIITKSRIHSEXFSHLLWIYDSXYLVS

SEQ ID NO: 2822 - protein, 1146 aa, Populus tremula
MASQSQRQSNQPAHNQAQSSGTSNMRQHHHPTESVSKAIAQYTVDAQLHAVFEQSGGTGKSFDYSKSVRTPNQSVPEEQITAYLSKIQRGGHIQPFGCMIAADEQSFRVIAYSENAKDMLGLTPQSVPSLEKQEILFVGADVRILFRPSSAVLLEKAFGAREITLLNPIWIHSKNSGKPFYAILHRIDVGIVIDLEPARTEDPALSIAGAVQSQKLAVRAISQLQSLPGGDIKLLCDTVVDSVRELTGYDRVMVYKFHEDEHGEVVAENKRVDLEPYIGLHYPSTDIPQASRFLFKQNRVRMIVDCHAIPVSVIQDEGLMQPLCLVGSTLRAPHGCHAQYMENMGSIASLAMAVIIYGNDEEAIGGRNSMRLWGLVVCHHTSARCIPFPLRYACEFLMQAFGLQLNMELQLASQLLEKHVLRTQTLLCDMLLRDSPTGIVTQSPSIMDLVKCDGAALYYQGQYYPLGVTPTEAQIKDIVEWLLTLHGDPTGLSTDSLADAGYPGAAFLGDAVCGMAVAYIAERDFLFWFRSHTAKEVKWGGAKHHPEDKDDGQRMHPRSSFKAFLEVVKSRSLPWENAEMDAIHSLQLILRDSFRDAEATNSKAVVHNQLKDMELQGMDELSSVAREMVRLIETATAPIFAVDVEGRINGWNAKVAELTGLSVEEAMGKSLVHDLVYKEYEEIVDKLIHRAVKGEEDKNVEIKLRTFCSEHQKKAVFVVVNACSSKDYMDNIVGVCFVGQDVTGQKVVMDKYVLIQGDYKAIVHSPNPSIPPIFASDENTCCLEWNTALEKLTGWSRGEVVGKMLVGEVFGSCCRLKGPDALTKFMIALHNAIGGIDTDKLTFSFFDRNEKNVQTLLTANKRVNIKGDIIGAFCFLQIASPELQPSLKVQKQQEKKSFARMKELAYICQEIKNPLSGIHFTNSLLENTDLTEDQQQFLETSAACEKQILKIIRDIDLESIENGSLELEKAEFLLGSVINAVVSQAMLLLRERNLQLLRDIPEEIKTLAVYGDQARIQQVLADFLLNMVRYAPSSAGWVEIHVCPTLKQISDGHTLVHTEFRYLERVLQTRMLGLQHPPRSFLNCKLTLVMLHREGMVPKIQFQGLSVCQGRLIWLSFPENTTVALYPLTIWFLLLHRHQSRSITHT

SEQ ID NO: 2823 - protein, 246 aa, Arabidopsis thaliana
MEDGASNEVAESSKKIGRGKIEIKRIENTTNRQVTFCKRRNGLLKKAYELSVLCDAEVALVIFSTRGRLYEYANNSVRGTIERYKKACSDAVNPPTITEANTQYYQQEASKLRRQIRDIQNLNRHILGESLGSLNFKELKNLESRLEKGISRVRSKKHEMLVAEIEYMQKREIELQNDNMYLRSKITERTGLQQQESSVIHQGTVYESGVTSSHQSGQYNRNYIAVNLLEPNQNSSNQDQPPLQLV

SEQ ID NO: 2824 - protein, 244 aa, Datisca glomerata
GFYIAPAFMDKLVVHITKNFMTFPNIKVPLILGIWGGKGQGKSFQCELVFAKMGINPIMMSAGELESGNAGEPAKLIRQRCREAADIIKKGKMSCLFINDLDAGAGRLGGTTQYTVNNQMVNATLMNIADNPTNVQLPGMYNKEENPRVPIIVTGNDFSTLYAPLIRDGRMEKFYWAPTREDRIGVCTGIFRSDNVAKEDIVKLVDTFPGQSIDFFGALRARVYDDEVRKWISGVGVQDVGKSL

SEQ ID NO: 2825 - protein, 1146 aa, Populus tremula
MASQSQRQSNQPAHNQAQSSGTSNMRQHHHPTESVSKAIAQYTVDAQLHAVFEQSGGTGKSFDYSKSVRTPNQSVPEEQITAYLSKIQRGGHIQPFGCMIAADEHSFRVIAYSENAKDMLGLTPQSVPSLEKQEILFVGADVRILFRPSSAVLLEKAFGAREITLLNPIWIHSKNSGKPFYAILHRIDVGIVIDLEPARTEDPALSIAGAVQSQKLAVRAISQLQSLPGGDIKLLCDTVVDSVRELTGYDRVMVYKFHEDEHGEVVAENKRVDLEPYIGLHYPSTDIPQASRFLFKQNRVRMIVDCHAIPVSVIQDEGLMQPLCLVGSTLRAPHGCHAHYMENMGSIASLAMAVIIYGNDEEAIGGRNSMRLWGLVVCHHTSTRCIPFPLRYACEFLMQAFGLQLNMELQLASQLLEKHVLRTQTLLCDMLLRDSPTGIVTQSPSIMDLVKCDGAALYYQGQYYPLGVTPTEAQIKDIVEWLLTLHGDPTGLSTDSLADAGYPGAAFLGDAVCGMAVAYIAERDFLFWFRSHTAKEVKWGGAKHHPEDKDDGQRMHPRSSFKAFLEVVKSRSLPWENAEMDAIHSLQLILRDSFRDAEATNSKAVVHNQLKDMELQGMDELSSVAREMVRLIETATAPIFAVDVEGRINGWNAKVAELTGLSVEEAMGKSLVHDLVYKEYEEIVDKLIHRAVKGEEDKNVEIKLRTFCSEHQKKAVFVVVNACSSKDYMDNIVGVCFVGQDVTGQKVVMDKYVLIQGDYKAIVHSPNPSIPPIFASDENTCCLEWNTALEKLTGWSRGEVVGKMLVGEVFGSCCRLKGPDALTKFMIALHNAIGGIDTDKLPFSFFERNEKNVQTLLTANKRVNIKGDIIGPFCFFQIASPEFQPSLKVQKQQEKKSFARMKELAYICQEIKNPLSGIHFTNSLLENTDLTEDQQQFLETSAACEKQILKIIRDIDLESIENGSLELEKAEFLLGSVINAVVSQAMLLLRERNLQLLRDIPEEIKTLAVYGDQARIQQVLADFLLNMVRYAPSSAGWVEIHVCPTLKQISDGHTLVHTEFRYLERVLQTRMLGLQHPPRSFLNCKLTLVMLHREGMVPKIQFQGLSVCQGRLIWLSFPENTTVALYPLTIWFLLLHRHQSRSITHT

SEQ ID NO: 2826 - protein, 370 aa, Cucumis melo
QMGLAENQLSFEFVEKWMKNNPQASICSVEGIDEFKDIAIFQDYHGLPEFRNAVANFMGKVRGNRVKFDPDRVVMSGGATGAHETMAFCLADPGEAFLVPVPYYPGFDRDLRWRTGVEIVPVKCESSNNFKLTREALETAYEEAEKSNIRIKGLLITNPSNPLGTVYDRQTLETAVSFINEKNIHLVCDEIYAATVFSEPGFISISEVIDNMNDVECDRNLIHVVYSLSKDMGFPGFRVGIIYSYNDAVVACARKMSSFGLVSSQTQYLIASMLLDDVFVDNFLAGSAEKLAVRHRNFTKGLAQVGIGYLKGSGGLFLWMDLRHLLKEKTLEAEMALWKVVINQVKVNVSPGSSFHCSEPGWFRVCFANM

SEQ ID NO: 2827 - protein, 1146 aa, Populus tremula
MASQSQRQSNQPAHNQAQSSGTSNMRQHHHPTESVSKAIAQYTVDAQLHAVFEQSGGTGKSFDYSKSVRTPNQSVPEEQITAYLSKIQRGGHIQPFGCMIAADEQSFRVIAYSENAKDMLGLTPQSVPSLEKQEILFVGADVRILFRPSSAVLLEKAFGAREITLLNPIWIHSKNSGKPFYAILHRIDVGIVIDLEPARTEDPALSITGAVQSQKLAVRAISQLQSLPGGDIKLLCDTVVDSVRGLTGYDRVMVYKFHEDEHGEVVAENKRVDLEPYIGLHYPSTDIPQASRFLFKQNRVRMIVDCHAIPVSVIQDEGLMQPLCLVGSTLRAPHGCHAQYMENMGSIASLAMAVIIYGNDEEAIGGRNSMRLWGLVVCHHTSARCIPFPLRYACEFLMQAFGLQLNMELQLASQLLEKHVLRTQTLLCDMLLRDSHTGIVTQSPSIMDLVKCDGAALYYQGQYYPLGVTPTEAQIKDIVEWLLTLHGDPTGLSTDSLADAGYPGAAFLGDAVCGMAVAYIAERDFLFWFRSHTAKEVKWGGAKHHPEDKDDGQRMHPRSSFKAFLEVVKSRSLPWENAEMDAIHSLQLILRDSFRDAEATNSKAVVHNQLKDMELQGMDELSSVAREMVRLIETATAPIFAVDVEGRINGWNAKVAELTGLSVEEAMGKSLVHDLVYKEYEEIVDKLIHRAVKGEEDKNVEIKLRTFCSEHQKKAVFVVVNACSSKDYMDNIVGVCFVGQDVTGQKVVMDKYVLIQGDYKAIVHSPNPSIPPIFASDENTCCLEWNTALEKLTGWSRGEVVGKMLVGEVFGSCCKLKGPDALTKFMIALHNAIGGIDTDKLPFSFFDRNEKNVQTLLTANKRVNIKGDIIGAFCFLQIASPELQPSLKVQKQQEKKSFARMKELAYICQEIKNPLSGIHFTNSLLENTDLTEDQQQFLETSAACEKQILKIIRDIDLESIENGSLELEKAEFLLGSVINAVVSQAMLLLRERNLQLLRDIPEEIKTLAVYGDQARIQQVLADFLLNMVIYTQSSAGWVEIHVCPTLKQISDGHTLVHTEFRYLERVLQTRMLGLQHPPRSFLNCKLTLVKLHREGMVPKIQFQGLSVCQGRLIWLSFPENTTVALYPLTIWFLLLHRHQSRSITHT

SEQ ID NO: 2828 - protein, 682 aa, Escherichia coli W3110
MNMFFRLTALAGLLAIAGQTFAVEDITRADQIPVLKEETQHATVSERVTSRFTRSHYRQFDLDQAFSAKIFDRYLNLLDYSHNVLLASDVEQFAKKKTELGDELRSGKLDVFYDLYNLAQKRRFERYQYALSVLEKPMDFTGNDTYNLDRSKAPWPKNEAELNALWDSKVKFDELSLKLTGKTDKEIRETLTRRYKFAIRRLAQTNSEDVFSLAMTAFAREIDPHTNYLSPRNTEQFNTEMSLSLEGIGAVLQMDDDYTVINSMVAGGPAAKSKAISVGDKIVGVGQTGKPMVDVIGWRLDDVVALIKGPKGSKVRQEILPAGKGTKTRTVTLTRERIRLEDRAVKMSVKTVGKEKVGVLDIPGFYVGLTDDVKVQLQKLEKQNVSSVIIDLRSNGGGALTEAVSLSGLFIPAGPIVQVRDNNGKVREDSDTDGQVFYKGPLVVLVDRFSASASEIFAAAMQDYGRALVVGEPTFGKGTVQQYRSLNRIYDQMLRPEWPALGSVQYTIQKFYRVNGGSTQRKGVTPDIIMPTGNEETETGEKFEDNALPWDSIDAATYVKSGDLTAFEPELLKEHNARIAKDPEFQNIMKDIARFNAMKDKRNIVSLNYAVREKENNEDDATRLARLNERFKREGKPELKKLDDLPKDYQEPDPYLDETVNIALDLAKLEKARPAEQPAPVK

SEQ ID NO: 2829 - protein, 680 aa, Escherichia coli W3110
MFFRLTALAGLLAIAGQTFAVEDITRADQIPVLKEETQHATVSERVTSRFTRSHYRQFDLDQAFSAKIFDRYLNLLDYSHNVLLASDVEQFAKKKTELGDELRSGKLDVFYDLYNLAQKRRFERYQYALSVLEKPMDFTGNDTYNLDRSKAPWPKNEAELNALWDSKVKFDELSLKLTGKTDKEIRETLTRRYKFAIRRLAQTNSEDVFSLAMTAFAREIDPHTNYLSPRNTEQFNTEMSLSLEGIGAVLQMDDDYTVINSMVAGGPAAKSKAISVGDKIVGVGQTGKPMVDVIGWRLDDVVALIKGPKGSKVRQEILPAGKGTKTRTVTLTRERIRLEDRAVKMSVKTVGKEKVGVLDIPGFYVGLTDDVKVQLQKLEKQNVSSVIIDLRSNGGGALTEAVSLSGLFIPAGPIVQVRDNNGKVREDSDTDGQVFYKGPLVVLVDRFSASASEIFAAAMQDYGRALVVGEPTFGKGTVQQYRSLNRIYDQMLRPEWPALGSVQYTIQKFYRVNGGSTQRKGVTPDIIMPTGNEETETGEKFEDNALPWDSIDAATYVKSGDLTAFEPELLKEHNARIAKDPEFQNIMKDIARFNAMKDKRNIVSLNYAVREKENNEDDATRLARLNERFKREGKPELKKLDDLPKDYQEPDPYLDETVNIALDLAKLEKARPAEQPAPVK

SEQ ID NO: 2830 - protein, 1146 aa, Populus tremula
MASQSQRQSNQPAHNQAQSSGTSNMRQHHHPTESVSKAIAQYTVDAQLHAVFEQSGGTGKSFDYSKSVRTPNQSVPEEQITAYLSKIQRGGHIQPFGCMIAADEQSFRVIAYSENAKDMLGLTPQSVPSLEKQEILFVGADVRILFRPSSAVLLEKAFGAREITLLNPIWIHSKNSGKPFYAILHRIDVGIVIDLEPARTEDPALSIAGAVQSQKLAVRAISQLQSLPGGDIKLLCDTVVDSVRELTGYDRVMVYKFHEDEHGEVVAENKRVDLEPYIGLHYPSTDIPQASRFLFKQNRVRMIVDCHAIPVSVIQDEGLMQPLCLVGSTLRAPHGCHAQYMENMGSIASLAMAVIIYGNDEEAIGGRNSMRLWGLVVCHHTSTTCIPFPLRYACEFLMQAFGLQLNMELQLASQLLEKHVLRTQTLLCDMLLRDSHTGIVTQSPSIMDLVKCDGAALYYQGQYYPLGVTPTEAQIKDIVEWLLTLHGDPTGLSTDSLADAGYPGAAFLGDAVCGMAVAYIAERDFLFWFRSHTAKEVKWGGAKHHPEDKDDGQRMHPRSSFKAFLEVVKSRSLPWENAEMDAIHSLQLILRDSFRDAEATNSKAVVHNQLKDMELQGMDELSSVAREMVRLIETATAPIFAVDVDGRINGWNAKVAELTGLSVEEAMGKSLVHDLVYKEYEEIVDKLIHRAVKGEEDKNVEIKLRTFCSEHQKKAVFVVVNACSSKDYMDNIVGVCFVGQDVTGQKVVMDKYVLIQGDYKAIVHSPNPSIPPIFASDENTCCLEWNTAMEKLTGWSRGEVVGKMLVGEVFGSCCRLKGPDALTKFMIALHNAIGGIDTDKLPFSFFDRNEKNVQTLLTANKRVNIKGDIIGPFCFFQIASPEFQPSLKVQKQQEKKSFARMKELAYICQEIKNPLSGIHFTNSLLENTDLTEDQQQFLETSAACEKQILKIIRDIDLESIENGSLELEKAEFLLGSVINAVVSQAMLLLRERNLQLLRDIPEEIKTLAVYGDQARIQQVLADFLLNMVRYAPSSAGWVEIHVCPTLKQISDGHTLVHTEFRYLERVLQTRMLGLQHPPRSFLNCKLTLVMLHREGMVPKIQFQGLSVSQGRLIWLSFPENTTVALYPLTIWFLLLHRHQSRSITHT

SEQ ID NO: 2831 - protein, 590 aa, Leptospira interrogans serovar Copenhageni str. Fiocruz L1-130
MAIFILFCEPTSGKSPVKADFTLKDFDNVVSHVSRYYIDKNIDKNRAYREAAIYALLSLPHSIYLYPESYFKERDKYEEKDEIFPGKTFKISTDDSFILFDPDYAEVEKIRDRKLKEDANKSKVSDEEVKKIVEREKIRKNVLASKWERTGFNKKDFDRVLAFIETNLDKYKDSPLKDPFGESEEKSKEPFTMNDVILAAANGYLSSLDPHSNVFLRSAWEESMAKIQDGSFEGIGAILSGGGNKEVVVENPLEGRPAVNAGIRSGDVILAVDGKSIKGILLDKVVEKIKGKKGSKVALTIQRKGVPGTLHIEVVRDTIEIKNLSSKLIEGHEHIGYIKLTGFVKSEEGPSVDREIIEKYKELDKEAQAKGTRLKALILDLRNNAGGYLDLAIDIADMFIEKGLIVSTKSPNRSPEDAYAKNKDITNLPLAVLINAKSASASEIVASAIKHHGRGILLGERTFGKATVQKLMPLGNDYLIKLTQARYYSPSGNTIQVVGVKPDIDISSEEDGSFPFRFREENMWNHLSELPPEAEEKSSFDVKKLEAWVQKNGKASDFIASHKNDPIKPDYQLIRSLDYIEALLSTQKKK

SEQ ID NO: 2832 - protein, 838 aa, Malus x domestica
MMMLAPTGLVLRHPTHTPLSFTFTSTNDEYPSRLGLGLRGKEQQAVRLLRFGTSQNSSSLLRRRGSPSTTTASGCSKAEPTSKSKAVFIDDSPIITDTDQGMENLGILSIDQSLQPYKDHFNYRINRYLDQRRLIETYEGGLQEFAQGYLKFGFNREEGGIVYREWAPAAQEAQLIGDFNGWDGSKHKMDKNQFGVWSIKIPDSGENSAIPHNSRVKFRFKHGGGVWVDRIPAWIQYATVDPARFAAPYDGVYWDPPPSERFQFKYPRPPKPKAPRIYEAHVGMSSSEPRISSYREFADDVLPRIQANNYNTVQLMAVMEHSYYASFGYHVTNFFAVSSRSGTPEDLKYLIDKAHSLGLRVLMDVIHSHASNNITDGLNGFEVGQSSQESYFHTGDRGYHKLWDSRLFNYANWEVLRFLLSNLRWWLEEFKFDGFRFDGVTSMLYHHHGINMAFSGDYHEYFSEATDVDAVVYLMLANYLIHKVLPDATVIAEDVSGMPGLGRPVSEGGIGFDYRLAMAIPDKWIDYVKNKSDEEWSMKEISWNLTNRRYTEKCISYAESHDQAIVGDKTIAFFLMDREMYSGMSCLVDASPTIERGVALHKMIHFLTMALGGEGYLNFMGNEFGHPEWIDFPREGNGWSYEKCRRQWNLVDTDHLRYKFMNAFDKAMNLLDEKFSFLSSTKQIVSSTNEEDKVIVFERGDLVFVFNFHPRNTYEGYKVGCDLPGKYRVALDSDAWEFGGHGRVGHNVDHFTFPEGIPGVPETNFNNRPNSFKILSPAQTCVVYYRVDESEEADAEETLIEEEVGVGQENFEEQTGPINEDNAVGPRAQESDQGSSSD

SEQ ID NO: 2833 - protein, 101 aa, Arabidopsis thaliana; identical to SEQ ID NO: 156

SEQ ID NO: 2834 - protein, 461 aa, Debaryomyces hansenii CBS767
MSDSMATKEEATKVFNKLRQQPANQVCFDCSNKNPTWTSIPFGILLCLECSAAHRNLGVHISFVKSSNLDSWQRIQLRHFKFGGNQVAKEFYTKNGGSKFLGNKDGIDINAKYTAPVALKYKEKLKQKAQQDEAKHPDEVSIDDLEESGGLLTDSSNNVSTDDFFSNWTKPINSTPSPLSSKNITPNASNDDLSVKKPVTTRTTSRLVNNSSGANQPKGSILSSKGNGPRSSRLANKRINKEAEEIDFEEIERKAKQEAEEAKALGYNPTTESTSDTSNAKPAKSEPKKPGLPLGSRKQDTEGSEDLSAKNVPIKEATQKFQKLGFGMTAGSNEVVNEKSKNYKPVKYTGEVSNKFGTQKGISSDEYFGRGPRFDENANAEARDKLQSFNGAQSISSSSYFGEDESAQNNTQGAGLTDIESSAREFASRFSGNANQDLDVLKDAFEEGANKLGSYLRDFLR

SEQ ID NO: 2835 - protein, 764 aa, Nostoc sp. PCC 7120
MSMTTIAPEQVNRIVWNQHHDPFEILGSHPIEQNGKTVWVVRAYLPNASAAWVVLPEQRQEYPMQTVHDPHFFECIIETSELSNYQLKTKEGEHERVSYDPYAFRSPRLTDFDLHLFAEGNHHRIYEKLGAHFTEVGGVKGVYFAVWAPNARNVSVLGDFNLWDGRKHQMRKGATGVWELFIPEIGVGEHYKYEIKNFAGHIYEKSDPFGFQQEPRPKTASIVSNLNSYNWSDEDWLEQRRHTDPLTQPISVYEVHLGSWLHAASAEPAQLPNGETEPVVIASELNPGARFLTYRELASRLIPYVKELGYTHIELLPIAEHPFDGSWGYQVTGYYAPTSRFGTPEDFMYFVDQCHQNNIGVLVDWVPGHFPKDGHGLAFFDGTHLYEHADPRKGEHKEWGTLVFNYSRNEVRNFLVANALFWFDKYHIDGIRVDAVASMLYLDYCRKEGEWLPNQYGGRENLEAADFLRQVNHLLFSYFPGVLSIAEESTDWPMVSWPTYTGGLGFNLKWNMGWMHDMLDYFSMDPWFRQFHQNNITFSMWYNHSENFMLALSHDEVVHGKSNIIGKMPGDKWQKLANVRCLFAYMFAHPGKKTMFMSMEFGQWSEWNVWADLEWPLLQFEPHQQLKKFFTELNKLYRSEPALYTLDFAREGFDWIDCSDNRHSVVSFIRREKDTENFVVVICNFTPQPHSHYRIGVPEKGFYTELFNSDARQYGGSNMGNLGGKWTDDWSMHNRPYSLDLCLPPLGVLILKMDKEKTAKALGS

SEQ ID NO: 2836 - protein, 544 aa, Mesorhizobium sp. BNC1
MAAKDVKFSRDARERMLRGVNILADAVKVTLGPKGRNVVLDKSFGAPRITKDGVTVAKEIELEDKFENMGAQMVREVASKTNDIAGDGTTTATVLAQAIVQEGAKAVAAGMNPMDLKRGVDLAVAEVVDYLAKAAKKIKTSEEVAQVGTISANGEKEIGQMIAEAMQKVGNEGVITVEEAKTAETELEVVEGMQFDRGYLSPYFITNPEKMVAELEDVYILLHEKKLSNLQAMLPVLEAVVQSGRPLLIIAEDVEGEALATLVVNKLRGGLKIAAVKAPGFGDRRKAMLEDIAVLTGGQVISEDLGIKLENVTLDMLGRAKRVSIAKETTTIVDGAGQKSEIEGRVAQIKSQIEETTSDYDREKLQERLAKLAGGVAVIRVGGATEVEVKEKKDRVDDALNATRAAVEEGIVPGGGTALLRASSEIKAKGENADQEAGVNIVRRAIQAPARQIASNAGAEASIVVGKILDNNAVTFGYNAQTGEYGDMIGMGIVDPMKVVRTALQDAASVAGLLITTEAMIAELPKKDSPAPAMPGGGMGGMDF

SEQ ID NO: 2837 - protein, 458 aa, Arabidopsis thaliana
MSLKIKFLLLLVLYHHVDSASIVKFLPGFEGPLPFELETGYIGIGEDENVQFFYYFIKSENNPKEDPLLIWLNGGPGCSCLGGIIFENGPVGLKFEVFNGSAPSLFSTTYSWTKMANIIFLDQPVGSGFSYSKTPIDKTGDISEVKRTHEFLQKWLSRHPQYFSNPLYVVGDSYSGMIVPALVQEISQGNYICCEPPINLQGYMLGNPVTYMDFEQNFRIPYAYGMGLISDEIYEPMKRICNGNYYNVDPSNTQCLKLTEEYHKCTAKINIHHILTPDCDVTNVTSPDCYYYPYHLIECWANDESVREALHIEKGSKGKWARCNRTIPYNHDIVSSIPYHMNNSISGYRSLIYSGDHDIAVPFLATQAWIRSLNYSPIHNWRPWMINNQIAGYTRAYSNKMTFATIKASVDTRQSIDQTRPLSCSKGGSVANPCNKRLMTFTYNYLPTNIHVKRSCLC

SEQ ID NO: 2838 - protein, 552 aa, Coxiella burnetii RSA 493
MAAKVLKFSHEVLHAMSRGVEVLANAVKVTLGPKGRNVVLDKSFGAPTITKDGVSVAKEIELEDKFENMGAQMVKEVASRTSDDAGDGTTTATVLAQAILVEGIKAVIAGMNPMDLKRGIDKAVTAAVAELKKISKPCKDQKAIAQVGTISANSDKSIGDIIAEAMEKVGKEGVITVEDGSGLENALEVVEGMQFDRGYLSPYFINNQQNMSAELENPFILLVDKKISNIRELIPLLENVAKSGRPLLVIAEDIEGEALATLVVNNIRGVVKVAAVKAPGFGDRRKAMLQDIAVLTGGKVISEEVGLSLEAASLDDLGSAKRVVVTKDDTTIIDGSGDAGDIKNRVEQIRKEIENSSSDYDKEKLQERLAKLAGGVAVIKVGAATEVEMKEKKARVEDALHATRAAVEEGVVPGGGVALIRVLKSLDSVEVENEDQRVGVEIARRAMAYPLSQIVKNTGVQAAVVADKVLNHKDVNYGYNAATGEYGDMIEMGILDPTKVTRTALQNAASIAGLMITTECMVTEAPKKKEESMPGGGDMGGMGGMGGMGGMM

SEQ ID NO: 2839 - protein, 636 aa, Vigna radiata
MMESCDCIDTQYPPDELLVKYQYISDVLIALAYFSIPVELIYFVQKSAFFPYRWVLMQFGAFIVLCGATHFINLWTFSPHSKAVAVVMTIAKVSCAIVSCATALMLVHIIPDLLSVKTRELFLKNKAEELDREMGLILTQEETGRHVRMLTHEIRSTLDRHTILKTTLVELGRTLGLEECALWMPSRNGLNLQLSHTLTYHVQVGSTVQTNNPIVNEVFNSPRAMRIPPTCPLARIRPLVGRYVPPEVVAVRVPLLNLSNFQINDWPDISAKNYAIMVLILPTDSVRRWRDHELELVDVVADQVAVALSHAAILEESMRARDQLMEQNVALDLARREAEMAIHARNDFLAVMNHEMRTPMHAIIALSSLLLETELTPEQRVMIETVLKSSNVLATLINDVLDLSRLEDGSLELEMGKFNLHGVLGEIVELIKPIASVKKLPITLILAPDLPTHAIGDEKRLTQTLLNVVGNAVKFTKEGYVSIRASVAKPESLQDWRPPEFYPTSSDGHFYIRVQVKDSGCGIPPQDIPHLFTKFAQSRSGPARPSSGAGLGLAICKRFVNLMGGHIWIESEGPGKGSTATFIVKLGICGNPDPSDHQATTRSQAYSGSGGLARFKPFIKDEDDSGFSTRRNQRSF

SEQ ID NO: 2840 - protein, 162 aa, Triticum aestivum
MEGRMFGLETPLMTALQHLLDVPDGEAGGPGNAAGEKQGPTRAYVRDARAMAATPADVKELPGAYAFVVDMPGLGSGDIKVQVEDERVLVISGERRREEKEDAKYLRMERRMGKMMRKFVLPENADMEKISAVCRDGVLTVSLEKLPPPETKKPKTIQVQVA

SEQ ID NO: 2841 - protein, 416 aa, Arabidopsis thaliana
MSLKIKFLLLLVLYHHVDSASIVKFLPGFEGPLPFELETGYIGIGEDENVQFFYYFIKSENNPKEDPLLIWLNGGPGCSCLGGIIFENGPVGLKFEVFNGSAPSLFSTTYSWTKMANIIFLDQPVGSGFSYSKTPIDKTGDISEVKRTHEFLQKWLSRHPQYFSNPLYVVGDSYSGMIVPALVQEISQGNYICCEPPINLQGYMLGNPVTYMDFEQNFRIPYAYGMGLISDEIYEPMKRICNGNYYNVDPSNTQCLKLTEEYHKCTAKINIHHILTPDCDVTNVTSPDCYYYPYHLIECWANDESVREALHIEKGSKGKWARCNRTIPYNHDIVSSIPYHMNNSISGYRSLIYSGDHDIAVPFLATQAWIRSLNYSPIHNWRPWMINNQIAGYTRAYSNKMTFATIKARRWTHGRV

SEQ ID NO: 2842 - protein, 267 aa, Zea mays
MATHASDNGSGHAEWRFARAAKEGALAVAGDKMSIRAARFKISASVDGRDPRPVLPLAHGDPSVFPAFRTAAEAEDAVAAALRTGKFNCYPAGVGLPEARRALAEHLSSDLPYKLSTDDIFLTAGGTQAIEVVVSVLAQPGANILLPRPGYPNYEARAGLHNLQVRHFDLIPERGWEIDIDSLESIADKNTTAMVAEVARKLGILVIADEVYGNLVFGDTPYVPMGVFGHIAPVLSIGSLSKRWIVPGWRLGWVAVCDPNKILQETK

SEQ ID NO: 2843 - protein, 547 aa, Pseudomonas fluorescens Pf-5
MAAKEVKFGDSARKKMLTGVNVLADAVKATLGPKGRNVIIEKSFGAPTITKDGVSVAKEIELKDRFENMGAQLVKDVASRANDDAGDGTTTATVLAQSIVNEGLKAVAAGMNPMDLKRGIDKATIAIVKELKGLSKPCADSKAIAQVGTISANSDNSIGDIIAEAMEKVGKEGVITVEEGSGLENELSVVEGMQFDRGYLSPYFINKPDTMVAELDGPLILLVDKKISNIREMLPVLEAVAKAGRPLLIVAEDVEGEALATLVVNNMRGIVKVAAVKAPGFGDRRKAMLQDIAVLTGGTVISEEIGLSLESTTLEHLGNAKRVILSKENTTIIDGAGVEADIQARVTQIRQQVADTSSDYDREKLQERLAKLSGGVAVIKVGAGSEVEMKEKKARVEDALHATRAAVEEGVVPGGGVALIRALQGINDLKGDNADQDVGIAVLRRAIEAPLRQIVANSGDEPSVVVDKVKQGAGNFGYNAATSEYGDMIEMGILDPTKVTRSALQAASSIGGLILTTEAAVAEIVEDKPAAGGMPDMGGMGGMGGMM

SEQ ID NO: 2844 - protein, 377 aa, Carboxydothermus hydrogenoformans Z-2901
MSRKKIIALVVVVFLLWGIFSLAGLFWKKSGDKIETLLTVIALIKSQYYQPVSTEKLINGAIKGMVEGLDDPYSTYLDPEQFKHLNEQITGTFGGVGLIVTMEENHIVVVKPIPDTPAAKAGIKAGDIIVNISGRDTKGMDLDTAVSLMRGPVGTRVEVGILRPGEKETRMFTLVRENITIPTVESKMLDDKIGYIMLSQFTENSPQAVRKAIGDLKKKGMKGLIFDLRDNPGGELKAAVEIADIFVPRGKTIVYVDYRNQPDEEEKAEVPELGIPVVVLVNGGSASASEIVAGALKDWGVAVLVGEKTFGKGVVQSIFRLPGNAGLKLTVARYLTPKKHDINKKGIMPDVVVKQPAGSKEDRQLLKAKEILAEKIK

SEQ ID NO: 2845 - protein, 484 aa, Lactobacillus plantarum
MTEKLTTETGQPWANNEHSQTAGARGPVLMQDYNLLEKLAHFDRERIPERVVHAKGAGAKGFFELENDMGEYTKADLFNGVGKKTPVILRFSQVAGEKGYPDTVRDVRGFALKFYTQQGNYDLVGNNTPVFFVNDPLKFPDFIHSQKRDPKTNRRTQNMQWDFWAHSPESLHQVTYLMGDRGLPASYRTMNGYGSHTFKWVNQNGEQFWVKYHFISDQGVKNMTAQAAEKAMSQDLDYLQDDLYDAIQEKNYPSWTMYVQILPYEEGLNYKWDIFDVTKVISHKDYPLIKVGKLTLNENPTNNFTDIEEAAMSPANFVPGIEPSPDKLLQGRLFSYKDAQRYRLGANFEDLPVNKPVVPVHNYERDGYMKINNQGAEVNYEPNALHGPEEVPDAALSPDSVRGETRAQPYRYQVDYTTQAGDLYRLMSEPEQERLINTIKDALGQVTLPGVKELEIKQFYEADKNYGTRVANALGMNIADIISD

SEQ ID NO: 2846 - protein, 1146 aa, Populus tremula
MASQSQRQSNQPAHNQAQSSGTSNMRQHHHPTESVSKAIAQYTVDAQLHAVFEQSGGTGKSFDYSKSVRTPNQSVPEEQITAYLSKIQRGGHIQPFGCMIAADEQSFRVIAYSENAKDMLGLTPQSVPSLEKQEILFVGADVRILFRPSSAVLLEKAFGAREITLLNPIWIHSKNSGKPFYAILHRIDVGIVIDLEPARTEDPALSIAGAVQSQKLAVRAISQLQSLPGGDIKLLCDTVVDSVRELTGYDRVMVYKFHEDEHGEVVAENKRVDLEPYIGLHYPSTDIPQASRFLFKQNRVRMIVDCHAIPVSVIQDEGLMQPLCLVGSTLRAPHGCHAQYMENMGSIASLAMAVIIYGNDEEAIGGRNSMRLWGLVVCHHTSARCIPFPLRYACEFLMQAFGLQLNMELQLASQLLEKHVLRTQTLLCDMLLRDSPTGIVTQSPSIMDLVKCDGAALYYQGQYYPLGVTPTEAQIKDIVEWLLTLHGDPTGLSTDSLADAGYPGAAFLGDAVCGMAVAYIAERDFLFWFRSHTAKEVKWGGAKHHPEDKDDGQRMHPRSSFKAFLEVVKSRSLPWENAEMDAIHSLQLILRDSFRDAEATNSKAVVHTQLKDMELQGMDELSSVAREMVRLIETATAPIFAVDVEGRINGWNAKVAELTGLSVEEAVGKSLVHDLVYKEYEEIVDKLIHRAVKGEEDKNVEIKLRTFCSEHQKKAVFVVVNACSSKDYMDNIVGVCFVGQDVTGQKVVMDKYVLIQGDYKAIVHSPNPSIPPIFASDENTCCLEWNTALEKLTGWSRGEVVGKMLVGEVFGSCCRLKGPDALTKFMIALHNAIGGIDTDKLTFSFFDRNEKNVQTLLTANKRVNIKGDIIGAFCFLQIASPELQPSLKVQKQQEKKSFARMKELAYICQEIKNPLSGIHFTNSLLENTDLTEDQQQFLETSAACEKQILKIIRDIDLESIENGSLELEKAEFLLGSVINAVVSQAMLLLRERNLQLLRDIPEEIKTLAVYGDQARIQQVLADFLLNMVRYAPSSAGWVEIHVCPTLKQISDGHTLVHTEFRYLERVLQTRMLGLQHPPRSFLNCKLTLVKLHREGMVPKIQFQGLSVSQGRLIWLSFPENTTVALYPLTIWFLLLHRHQSRSITHT

SEQ ID NO: 2847 - protein, 612 aa, Carboxydothermus hydrogenoformans Z-2901
MCGIAGMISFSKDLSPFVPLLEKMTQSLTHRGPDALGIWHSENIILGHRRLAVIDPERGRQPMIRTFGDWQYVIVYNGELYNTKELRDELEARGHHFYTTCDTEVLLVSYIEWGKECLSKLNGIFAFAIFDEKENQLFLARDRLGVKPLFYALVNDTLIFASEIKTLLLHPDIPSRLSTDGLKEVLFLGPARTPGMGVFAHISELLPGDYAVFNPEGLFIKPYWRLTSNPHPDDFPTTVKKTRELLEDAVIRQLVSDVPICTLLSGGLDSTVITAFAASHLHSRGETLNTFSVDYAENELYFTESAFQPNCDAMFIPLVAKEFNTLHRNIVLTQEELFEALFPALIARDLPGMVDIDSSLWLFSREIKKEATVGLSGECADEIFGGYPWFFRKEALEAKTFPWALSLDRRKTLFRQDLIAELKPDEYVQKRYHEALEEIPEISGLSPEEKRLREITYLTLTRWMPILLDRKDRMTMAWGLEVRVPYCDHRLVEYLWNVPWHFKTAGGQEKGLLRQAVADLIPDYILKRKKSPYPKTHHPLYTKLVREALTQILAENSSPINFLIDENEVRKLITNPSPPNARPWFGQLMGDTQIMAYLIQLNYWFKKYHISF

SEQ ID NO: 2848 - protein, 727 aa, Physcomitrella patens
MAACTIVWFRRDLRLEDNPALIAAARAGTVVPVFVWSPAEDGQFHPGRVSRWWLKQSLTHLELSLKKLGSPLILRKSPDTLSVLLEIAEATGATQVFYNHLYDPVSLVRDHRVKQGLSQRGIVVHTFNGDLLYEPWEVYDEEGQAFTVYEAFWKKCMSMPFEPEAPLLPPRRLTGPIGKIVGCNAEELGLEDEFEKSSNALLARAWCPGWGFANKSLDSFLRSPLIDYARDRQKADGASGTPTSLLSPHLHFGELSVRKIFHEVRKRQITWAREGNAGGEASVNMFLRALGFREYSRYLSFHFPFTHERSLLANLKSFPWRADEGYFKAWRQGRTGYPLVDAGMRELWATGWAHNRIRVVVASFSVKFLQLPWRWGMKYFWDVLLDADLECDVLGWQYISGSLPDGHELDRIENPEVEGYRFDPDGDYVRRWIPELARLPNEWVHHPWDAPPSALRAAGVELGTNYPRPIVEIGAARERLQASLAEMWERDAAMKAALANGLEEGLGETVEVAGTGGPEHERMDVPRVMVHMQRDADMSCNSSRRDQLVPEIVPNQFHIRAHESIMNRSAAMVEDGEEAGRAAVPMVFASVRRGMGGNYGGHHVEGNGGEVAQASAPIQWPTVTAVDYELDSTAESASVTGRGGSEGGTVPVWSQSVSARTPIQVREGLVPEVRRGPGLSRRQLQASVQRVNLEGMTSNKQAEEEDFYVPKLVKWTQPRKRRVKQDG

SEQ ID NO: 2849 - protein, 1146 aa, Populus tremula
MASQSQRQSNQPAHNQAQSSGTSNMRQHHHPTESVSKAIAQYTVDAQLHAVFEQSGGTGKSFDYSKSVRTPNQSVPEEQITAYLSKIQRGGHIQPFGCMIAADEQSFRVIAYSENAKDMLGLTPQSVPSLEKQEILFVGADVRILFRPSSAVLLEKAFGAREITLLNPIWIHSKNSGKPFYAILHRIDVGIVIDLEPARTEDPALSIAGAVQSQKLAVRAISQLQSLPGGDIKLLCDTVVDSVRELTGYDRVMVYKFHEDEHGEVVAENKRVDLEPYIGLHYPSTDIPQASRFLFKHNRVRMIVDCHAIPVSVIQDEGLMQPLCLVGSTLRAPHGCHAHYMENMGSIASLAMAVIIYGNDEEAIGGRNSMRLWGLVVCHHTSARCIPFPLRYACEFLMQAFGLQLNMELQLASQLLEKHVLRTQTLLCDMLLRDSPTGIVTQSPSIMDLVKCDGAALYYQGQYYPLGVTPTEAQIKDIVEWLLTLHGDPTGLSTDSLADAGYPGAAFLGDAVCGMAVAYIAERDFLFWFRSHTAKEVKWGGAKHHPEDKDDGQRMHPRSSFKAFLEVVKSRSLPWENAEMDAIHSLQLILRDSFRDAEATNSKAVVHNQLKDMELQGMDELSSVAREMVRLIETATAPIFAVDVDGRINGWNAKVAELTGLSVEEAMGKSLVHDLVYKEYEEIVDKLIHRAVKGEEDKNVEIKLRTFCSEHQKKAVFVVVNACSSKDYMDNIVGVCFVGQDVTGQKVVMDKYVLIQGDYKAIVHSPNPSIPPIFASDENTCCLEWNTALEKLTGWSRGEVVGKMLVGEVFGSCCRLKGPDALTKFMIALHNAIGGIDTDKLPFSFFERNEKNVQTLLTANKRVNMKGDIIGAFCFLQIASPELQPSLKVQKQQEKKSFARMKELAYICQEIKNPLSGIHFTNSLLENTDLTEDQQQFLETSAACEKQILKIIRDIDLESIENGSLELEKAEFLLGSVINAVVSQAMLLLRERNLQLLRDIPEEIKTLAVYGDQARIQQVLADFLLNMVRYAPSSAGWVEIHVCPTLKQISDGHTLVHTEFRYLERVLQTRMLGLQHPPRSFLNCKLTLVMLHREGMVPKIQFQGLSVCQGRLIWLSFPENTTVALYPLTIWFLLLHRHQSRSITHT

SEQ ID NO: 2850 - protein, 520 aa, Arabidopsis thaliana
MAQALAQPPLVVTTVVPDPPPPPPPPHPKPYALRYMADLLGRIGIMDTDKDGNISPQSPRSPRSPRNNILMGKYELGKLLGHGTFAKVYLAQNIKSGDKVAIKVIDKEKIMKSGLVAHIKREISILRRVRHPYIVHLFEVMATKSKIYFVMEYVGGGELFNTVAKGRLPEETARRYFQQLISSVSFCHGRGVYHRDLKPENLLLDNKGNLKVSDFGLSAVAEQLRQDGLCHTFCGTPAYIAPEVLTRKGYDAAKADVWSCGVILFVLMAGHIPFYDKNIMVMYKKIYKGEFRCPRWFSSDLVRLLTRLLDTNPDTRITIPEIMKNRWFKKGFKHVKFYIEDDKLCREDEDEEEEASSSGRSSTVSESDAEFDVKRMGIGSMPRPSSLNAFDIISFSSGFDLSGLFEEEGGEGTRFVSGAPVSKIISKLEEIAKIVSFTVRKKEWSLRLEGCREGAKGPLTIAAEIFELTPSLVVVEVKKKGGDREEYEEFCNKELRPELEKLIHEEVVVEEALYLPSDTE

SEQ ID NO: 2851 - protein, 477 aa, Enterococcus faecalis V583
MEHHQLKAFPQDFLWGSASAAYQVEGAWNEDGKGASVWDEFVRLPGKTFKETTGDLAVDHYHRFKEDVALMKQQGLKAYRFSIAWTRILPEGRGRVNQAGLKFYSDLIDELLAAGIEPMVTLYHWDLPAVLQKEYGGWESRKIIDDFVAYAKILFDAFRGKVRYWISLNEQNVFTSLGYQLAVHPPGVTDNKRMYEANHIANLANAAVINAFHELEMPGKIGPSFAYTPVYAVDAHPANVLAAENAEDLLSHFWLDVYLWGEYPIAALNYLQEQGVAPTIKEGDLALLRSAKPDFLGINYYRTDTVAANPLDGVGIGKMNTTGEKGSETESGVPGLFKKVNNPYVERTNWDWAIDPQGLRIALRRLASRYQVPILITENGLGEYDTLTEDKQIHDTYRIDYLRSHIQAIQEAITDGVSVIGYCTWSYTDLLSWLNGYQKRYGFVYVDQDETQKGSLERIPKDSYYWYQKVIETNGLI

SEQ ID NO: 2852 - protein, 1146 aa, Populus tremula
MASQSQRQSNQPAHNQAQSSGTSNMRQHHHPTESVSKAIAQYTVDAQLHAVFEQSGGTGKSFDYSKSVRTPNQSVPEEQITAYLSKIQRGGHIQPFGCMIAADEQSFRVIAYSENAKDMLGLTPQSVPSLEKQEILFVGADVRILFRPSSAVLLEKAFGAREITLLNPIWIHSKNSGKPFYAILHRIDVGIVIDLEPARTEDPALSIAGAVQSQKLAVRAISQLQSLPGGDIKLLCDTVVDSVRELTGYDRVMVYKFHEDEHGEVVAENKRVDLEPYIGLHYPSTDIPQAPRFLFKQNRVRMIVDCHAIPVSVIQDEGLMQPLCLVGSTLRAPHGCHAQYMENMGSIASLAMAVIIYGNDEEAIGGRNSMRLWGLVVCHHTSARCIPFPLRYACEFLMQAFGLQLNMELQLASQLLEKHVLRTQTLLCDMLLRDSPTGIVTQSPSIMDLVKCDGAALYYQGQYYPLGVTPTEAQIKDIVEWLLTLHGDPTGLSTDSLADAGYPGAAFLGDAVCGMAVAYIAERDFLFWFRSHTAKEVKWGGAKHHPEDKDDGQRMHPRSSFKAFLEVVKSRSLPWENAEMDAIHSLQLILRDSFRDAEATNSKAVVHNQLKDMELQGMDELSSVAREMVRLIETATAPIFAVDVDGRINGWNAKVAELTGLSVEEAMGKSLVHDLVYKEYEEIVDKLIHRAVKGEEDKNVEIKLRTFCSEHQKKAVFVVVNACSSKDYMDNIVGVCFVGQDVTGQKVVMDKYVLIQGDYKAIVHSPNPSIPPIFASDENTCCLEWNTAMEKLTGWSRGEVVGKMLVGEVFGSCCRLKGPDALTKFMIALHNAIGGIDTDKLPFSFFDRNEKNVQTLLTANKRVNIKGDIIGPFCFLQIASPEFQPSLKVQKQQEKKSFARMKELAYICQEIKNPLSGIHFTNSLLENTDLTEDQQQFLETSAACEKQILKIIRDIDLESIENGSLELEKAEFLLGSVINAVVSQAMLLLRERNLQLLRDIPEEIKTLAVYGDQARIQQVLADFLLNMVRYAPSSAGWVEIHVCPTLKQISDGHTLVHTEFRYLERVLQTRMLGLQHPPRSFLNCKLTLVMLHREGMVPKIQFQGLSVCQGRLIWLSFPENTTVALYPLTIWFLLLHRHQSRSITHT

SEQ ID NO: 2853 - protein, 1146 aa, Populus tremula
MASQSQRQSNQPAHNQVQSSGTSNMRQHHHPTESVSKAIAQYTVDAQLHAVFEQSGGTGKSFDYSKSVRTPNQSVPEEQITAYLSKIQRGGHIQPFGCMIAADEQSFRVIAYSENAKDMLGLTPQSVPSLEKQEILFVGADVRILFRPSSAVLLEKAFGAREITLLNPIWIHSKNSGKPFYAILHRIDVGIVIDLEPARTEDPALSIAGAVQSQKLAVRAISQLQSLPGGDIKLLCDTVVDSVRELTGYDRVMVYKFHEDEHGEVVAENKRVDLEPYIGLHYPSTDIPQASRFLFKHNRVRMIVDCHAIPVSVIQDEGLMQPLCLVGSTLRAPHGCHAQYMENMGSIASLAMAVIIYGNDEEAIGGRNSMRLWGLVVCHHTSARCIPFPLRYACEFLMQAFGLQLNMELQLASQLLEKHVLRTQTLLCDMLLRDSPTGIVTQSPSIMDLVKCDGAALYYQGQYYPLGVTPTEAQIKDIVEWLLTLHGDPTGLSTDSLADAGYPGAAFLGDAVCGMAVAYIAERDFLFWFRSHTAKEVKWGGAKHHPEDKDDGQRMHPRSSFKAFLEVVKSRSLPWENAEMDAIHSLQLILRDSFRDAEATNSKAVVHNQLKDMELQGMDELSSVAREMVRLIETATAPIFAVDVDGRINGWNAKVAELTGLSVEEAMGKSLVHDLVYKEYEEIVDKLIHRAVKGEEDKNVEIKLRTFCSEHQKKAVFVVVNACSSKDYMDNIVGVCFVGQDVTGQKVVMDKYVLIQGDYKAIVHSPNPSIPPIFASDENTCCLEWNTALEKLTGWSRGEVVGKMLVGEVFGSCCKLKGPNSLTKFMIALHNAIGGIDTDKLPFSFFDRNEKNVQTLLTANKRVNMKGDIIGAFCFLQIASPELQPSLKVQKQQEKKSFARMKELAYICQEIKNPLSGIHFTNSLLENTDLTEDQQQFLETSAACEKQILKIIRDIDLESIENGSLELEKAEFLLGSVINAVVSQAMLLLRERNLQLLRDIPEEIKTLAVYGDQARIQQVLADFLLNMVIYTQSSAGWVEIHVCPTLKQISDGHTLVHTEFRYLERVLQTRMLGLQHPPRSFLNCKLTLVMLHREGMVPKIQFQGLSVCQGRLIWLSFPENTTVALYPLTIWFLLLHRHQSRSITHT

SEQ ID NO: 2854 - protein, 152 aa, Zea mays
MSLVRRSNVFDPFSMDLWDPFDTMFRSIVPSAASTNSETAVFASARIDWKETPEAHVFKADLPSVKKEEVKVEVEDGNVLVISGQRSREKEDKDDKWHRVERSSGQFVRRFRLPENAKVDQVKAGLENGVLTVTVPKAEEKKPEVKAIEISG

SEQ ID NO: 2855 - protein, 1146 aa, Populus tremula
MASQSQRQSNQPAHNQAQSSGTSNMRQHHHPTESVSKAIAQYTVDAQLHAVFEQSGGTGKSFDYSKSVRTPNQSVPEEQITAYLSKIQRGGHIQPFGCMIAADEQSFRVIAYSENAKDMLGLTPQSVPSLEKQEILFVGADVRILFRPSSAVLLEKAFGAREITLLNPIWIHSKNSGKPFYAILHRIDVGIVIDLEPARTEDPALSIAGAVQSQKLAVRAISQLQSLPGGDIKLLCDTVVDSVRELTGYDRVMVYKFHEDEHGEVVAENKRVDLEPYIGLHYPSTDIPQASRFLFKQNRVRMIVDCHAIPVSVIQDEGLMQPLCLVGSTLRAPHGCHAQYMENMGSIASLAMAVIIYGNDEEAIGGRNSMRLWGLVVCHHTSARCIPFPLRYACEFLMQAFGLQLNMELQLASQLLEKHVLRTQTLLCDMLLRDSPTGIVTQSPSIMDLVKCDGAALYYQGQYYPLGVTPTEAQIKDIVEWLLTLHGDPTGLSTDSLADAGYPGAAFLGDAVCGMAVAYIAERDFLFWFRSHTAKEVKWGGAKHHPEDKDDGQRMHPRSSFKAFLEVVKSRSLPWENAEMDAIHSLQLILRDSFRDAEATNSKAVVHTQLKDMELQGMDELSSVAREMVRLIETATAPIFAVDVEGRINGWNAKVAELTGLSVEEAMGKSLVHDLVYKEYEEIVDKLIHRAVKGEEDKNVEIKLRTFCSEHQKKAVFVVVNACSSKDYMDNIVGVCFVGQDVTGQKVVMDKYVLIQGDYKAIVHSPNPSIPPIFASDENTCCLEWNTALEKLTGWSRGEVVGKMLVGEVFGSCCRLKGPDALTKFMIALHNAIGGIDTDKLTFSFFDRNEKNVQTLLTANKRVNMKGDIIGAFCFLQIASPELQPSLKVQKQQEKKSFARMKELAYICQEIKNPLSGIHFTNSLLENTDLTEDQQQFLETSAACEKQILKIIRDIDLESIENGSLELEKAEFLLGSVINAVVSQAMLLLRERNLQLLRDIPEEIKTLAVYGDQARIQQVLADFLLNMVRYAPSSAGWVEIHVCPTLKQISDGHTLVHTEFRYLERVLQTRMLGLQHPPRSFLNCKLTLVKLHREGMVPKIQFQGLSVCQGRLIWLSFPENTTVALYPLTIWFLLLHRHQSRSITHT

SEQ ID NO: 2856 - protein, 679 aa, Oryza sativa
MDRTWSRSFRNPKPFFPSKTLSLSSRIEIAKPQAKPPEEGAIASTRHHVPGGGGGGVVDFEVLVGAAEAGNRRATSASSSFPPDASLPGDANGRGLLLARQLSRGGCGEQRLWARGYAAKEVAFGVGARAALLQGVNDLADAVKVTMGPKGRNVIIERSHRAPKVTKDGVTVAKSIEFEDSAKNVGANLVKQVAEATNKVAGDGTTCATVLTQAILTEGCKAVAAGVNVMDLRNGINKAISSITTHLKSKAWIINSSEEINQVATISANGEKEIGDLISKAMEKVGKDGVITITDGKTLDNELEAVQGMKLSRGYISPYFVTDQKTQKCEMENPLILIHDKKISTMNSLLPVLEMSIKNRRPLLIIAEDVEGEALSMLVLNKHRAGLKLKCKLLTFFKLELWIVDILICAVKAPGFGENRRANLDDVAVLTGGEVVSEDQGLDLGKVELQMLGTAKKVTVSLDDTIILDGGGDKQQIEERCQQLRESMDKSTAVFDKEKAQERLSKLSGGVAVLKIGGASEVEVGEKKDRVTDALHAARAAVEEGIVPGGGVALLYATKELDKIITANEDEKIGVQIIKNALKAPLMTIAANAGIDGGVVIGKLIEQDNLNMGYDAARGEYVDMIKAGIIDPVKVIRTALQDASSVSLLMTTTEAAVAEPPAAKARMASRMPQMSGMDF

SEQ ID NO: 2857 - protein, 536 aa, Methanosarcina barkeri str. fusaro
MASKQIMFDENARKALLNGVDKVANTVKITLGPKGRYVVLDKSTKPVVTNDGVTIAKEIELHDKFENMGAKLVKEVASKTQDNTGDGTTTATLLAQSMIREGLKNISAGANPIDVKKGIEMATENVVGYLKSKSSEVKGKEKIVQVATVSANNDEEIGNLIADAMERVGYNGVITVEDSKTMETNLDVVEGMQFDRGFVSPYMATDSEKMVCEFEDPYILITDKKINSMKQIVPVLEKVASEGRSLLIIAEDVDGDAQAALILNIIRGALRVCAVKAPGFGNERKEMLEDIAVLTGGQVISEDKGMKLEEFDDYMLGSARKVTIDNNKTIIVEGKGDKAKIKERVSLIEAQINIADVEYKKTELKKRQAKLGGGVAVIKVGAATETELKEKKMRIDDALNATKAAVEEGVVIGGGISLFRAAAILDSLKLEGDREIGVKIVQRAIEEPVRQIAENAGKEGAEVVATIRAEPRELFGYNAKKDVFEDLFEAGVIDPTKVVRSGLQNAASIAGMVLTTEALVTDFNDEKDEKAATIII

SEQ ID NO: 2858 - protein, 404 aa, Photobacterium profundum SS9
MHNIGMSSKLNNVCYDIRGPVLKHAKRMEEEGHKILKLNIGNPAPFGFDAPDEILVDVIRNLPTSQGYCDSKGIYPARKAIVQHYQKRGLLDLDVEDVYIGNGVSELIVMAMQALLDNNDEILVPSPDYPLWTAAVSLSGGNPVHYICDEESDWYPDLDDIKKKITPNTRGIVLINPNNPTGAVYSRDFLLEIVEIARKHKLIIFADEIYDKILYEGAQHTSIAPLAPDVFCITFNGLSKSYRVCGFRAGWMVLSGPKHEAKGYIEGLEMLSSMRLCANVPMQHAIQTAIGGYQSINELILPGGRLLEQRDKAYDLITQIPGVSCVKPKGALYLFPKLDQKKFNIVDDQRMALDFLQQEKVLIVHGTGFNWEKPDHFRIVTLPRVDDLEMAIGRLERFLHNYRQ

SEQ ID NO: 2859 - protein, 508 aa, Xylella fastidiosa 9a5c
MSVASRIIRHCSVVPGAVFFPECCMRVVGLSLAISVVLLSFSLSAKNPSGVVMSPPVEEMEMPESNDANVPLDEIRRFVSVYNAIKQAYVDPVNDRKLMHSAVRGLLSDLDPHSTYFDKEDADAFDEQTNGVYDGIGVELQEQSDNTLKVIAPIDDTPAARAGLRPGDLIVAINGKPLANVDAMKPLRGAPGSQVTLTIVRDKNGKPFDMTIKRETIHIASVRSRMLEPGYGYIRISVFQADTGNDFHKHLGQLKQQAGGKLRGLLLDLRSNPGGLLTAAVQVADALLDKGNIVSTRGRISASDTRFDATPGDLLDGLPLVVLVDAGSASASEVLVGALSDNHRARVIGSCTFGKGSVQTLLPLDNGDSVKLTTARYYTPSGRSIQARGIVPDLLLKPDGVGAADLSGSGIDRSEAGLPGHLRGTDEGVPGCTSSDPLPGDTPIMTALLELKQPGSAVQAKKAIPVKVVSDVKSATKSPLSVFGKGRAVKRVPVVSPTSEQVDGQPSK

SEQ ID NO: 2860 - protein, 741 aa, Malus x domestica
  misc_feature (699)..(699): Xaa can be any naturally occurring amino acid
  misc_feature (702)..(702): Xaa can be any naturally occurring amino acid
  misc_feature (728)..(728): Xaa can be any naturally occurring amino acid
  misc_feature (738)..(738): Xaa can be any naturally occurring amino acid
MEACNCIEPQWPADELLMKYQYISDFFIALAYFSIPLELIYFVKKSAVFPYRWVLVQFGAFIVLCGATHLINLWTFNMHSRTVAIVMTTAKVLTAVVSCATALMLVHIIPDLLSVKTRELFLKNKAAELDREMGLIRTQEETGRHVRMLTHEIRSTLDRHTILKTTLVELGRTLALEECALWMPTRTGLELQLSYTLRQQNPVGYTVPIHLPVVNQVFSSNCAVKISPNSPVARLRQLAGKHIPGEVVAVRVPLLHLSNFQINDWPELSTKRYALMVLMLPSDSARQWHVHELELVEVVADQVAVALSHAAILEESMRARDLLMEQNIALDLARREAETAIRARNDFLAVMNHEMRTPMHAIIALSSLLQETELTPEQRLMVETILKSSNLLATLINDVLDLSRLEDGSLQLDIATFNLHSIFREVHNLIKPVASVKKLSVALNIATDLPVYAIGDEKRLMQIILNVVGNAVKFSKEGSISITAYVAKSESLRDFRAPDFFPVQSDNHFYLRVQVKDSGLGINPQDIPNLFTKFAQTQTSASQNSGGSGLGLAICKRFVNLMEGHIWIESEGLGKGCTATFIVKLGFPERSNEFKQPFAPKLQANHVQTNFPGLKVLVMDDNGVSRSVTKGLLVHLGCDVTTVSNLDEFLHVISQEHKVVFVDVCMPGIDGYELAVRIHEKFAKRHERPVLVALTGSIXKMXKENCMRVGMDGVILKPVSVDKMRSVXSELLEHRVLXEAM

SEQ ID NO: 2861 - protein, 630 aa, Shigella dysenteriae
MCGLAGFLESNLNDNNSAKVLHSMGESIYRRGPDGTGIWFENIENKINVGFVHTRLAIIDLSDAGQQPMHSHCGRYVIAFNGEIYNHLELRYLLESNNHISWRGHSDTETLLACFGIWGIDKTLQACVGMFAIALWDKKEHRLTLARDRVGEKPLYWGWQDDALLFGSELKALKTHPAFSAEINRDALCLLLRHNYIPAPHTIYRGIQKLQPGHYLSVELSNDERKETLHQYWSYEKVVQEGLVNPFMGSPIQAVEHLESLIAQSINGQLISDVPLGAFLSGGIDSSLIVSIMQSLSSSPVKTFSIGFDDKKYDEAIFAVEVARHLGTDHTEMYVNDKDIQDVIPLLPEVYCEPFADSSQLPTFLVSKMAQQHVTVALSGDAGDELFGGYTPYSFTPKYWNYARNIPLQIRKFASRYIDKLPVNPKFKKLIECMAVQNPQLFYRNIISHWLNPEELVKNSSEPSTAFSSSTTFPVNGGYVDWMMSVDAQVYMTDDILVKVDRAAMYNSLETRVPLLDHRIIEFAWQLPVSLKINNGVGKWPLREILYKRVPKSMIERPKKGFSVPLSSWLRGPLRDWAEELIAYKRLADEGYFNVAAVRSCWNLHIQGQADYSRKLWSILMFQSWLENQK

SEQ ID NO: 2862 - protein, 492 aa, Arabidopsis thaliana
MDPYKYRPASSYNSPFFTTNSGAPVWNNNSSMTVGPRGPILLEDYHLVEKLANFDRERIPERVVHARGASAKGFFEVTHDISNLTCADFLRAPGVQTPVIVRFSTVIHERGSPETLRDPRGFAVKFYTREGNFDLVGNNFPVFFIRDGMKFPDMVHALKPNPKSHIQENWRILDFFSHHPESLNMFTFLFDDIGIPQDYRHMDGSGVNTYMLINKAGKAHYVKFHWKPTCGVKSLLEEDAILVGGTNHSHATQDLYDSIAAGNYPEWKLFIQIIDPADEDKFDFDPLDVTKTWPEDILPLQPVGRMVLNKNIDNFFAENEQLAFCPAIIVPGIHYSDDKLLQTRVFSYADTQRHRLGPNYLQLPVNAPKCAHHNNHHEGFMNFMHRDEEVNYFPSRYDQVRHAEKYPTPPAVCSGKRERCIIEKENNFKEPGERYRTFTPERQERFIQRWIDALSDPRITHEIRSIWISYWSQADKSLGQKLASRLNVRPSI

SEQ ID NO: 2863 - protein, 106 aa, Glycine max
TRFSAEVREQIYKVASVNLCSNISGQILASLVMSPPKVGDESYESFNAEKENILESLARRAKTLEDAFNKLEGVTCNKAEGAMDLFPQIRLSQKAIKAARDANTAP

SEQ ID NO: 2864 - protein, 1146 aa, Populus tremula
MASQSQRQSNQPAHNQAQSSGTSNMRQHHHPTESVSKAIAQYTVDAQLHAVFEQSGGTGKSFDYSKSVRTPNQSVPEEQITAYLSKIQRGGHIQPFGCMIAANEQSFRVIAYSENAKDMLGLTPQSVPSLEKQEILFVGADVRILFRPSSAVLLEKAFGAREITLLNPIWIHSKNSGKPFYAILHRIDVGIVIDLEPARTEDPALSIAGAVQSQKLAVRAISQLQSLPGGDIKLLCDTVVDSVRELTGYDRVMVYKFHEDEHGEVVAENKRVDLEPYIGLHYPSTDIPQAPRFLFKQNRVRMIVDCHAIPVSVIQDEGLMQPLCLVGSTLRAPHGCHAHYMENMGSIASLAMAVIIYGNDEEAIGGRNSMRLWGLVVCHHTSARCIPFPLRYACEFLMQAFGLQLNMELQLASQLLEKHVLRTQTLLCDMLLRDSPTGIVTQSPSIMDLVKCDGAALYYQGQYYPLGVTPTEAQIKDIVEWLLTLHGDPTGLSTDSLADAGYPGAAFLGDAVCGMAVAYIAERDFLFWFRSHTAKEVKWGGAKHHPEDKDDGQRMHPRSSFKAFLEVVKSRSLPWENAEMDAIHSLQLILRDSFRDAEATNSKAVVHNQLKDMELQGMDELSSVAREMVRLIETATAPIFAVDVDGRINGWNAKVAELTGLSVEEAMGKSLVHDLVYKEYEEIVDKLIHRAVKGEEDKNVEIKLRTFCSEHQKKAVFVVVNACSSKDYMDNIVGVCFVGQDVTGQKVVMDKYVLIQGDYKAIVHSPNPSIPPIFASDENTCCLEWNTALEKLTGWSRGEVVGKMLVGEVFGSCCKLKGPNSLTKFMIALHNAIGGIDTDKLPFSFFDRNEKNVQTLLTANKRVNMKGDIIGAFCFLQIASPELQPSLKVQKQQEKKSFARMKELAYICQEIKNPLSGIHFTNSLLENTDLTEDQQQFLETSAACEKQILKIIRDIDLESIENGSLELEKAEFLLGSVINAVVSQAMLLLRERNLQLLRDIPEEIKTLAVYGDQARIQQVLADFLLNMVRYAPSSAGWVEIHVCPTLKQISDGHTLVHTEFRYLERVLQTRMLGLQHPPRSFLNCKLTLVMLHREGMVPKIQFQGLSVCQGRLIWLSFPENTTVALYPLTIWFLLLHRHQSRSITHT

SEQ ID NO: 2865 - protein, 246 aa, Arabidopsis thaliana
MEGGASNEVAESSKKIGRGKIEIKRIENTTNRQVTFCKRRNGLLKKAYELSVLCDAEVALVIFSTRGRLYEYANNSVRGTIERYKKACSDAVNPPTITEANTQYYQQEASKLRRQIRDIQNLNRHILGESLGSLNFKELKNLESRLEKGISRVRSKKHEMLVAEIEYMQKREIELQNDNMYLRSKITERTGLQQQESSVIHQGTAYESGVTSSHQSGQYNRNYIAVNLLEPNQNSSNQDQPPLQLV

SEQ ID NO: 2866 - protein, 344 aa, Saccharomyces cerevisiae
MSSSVASTENIVENMLHPKTTEIYFSLNNGVRIPALGLGTANPHEKLAETKQAVKAAIKAGYRHIDTAWAYETEPFVGEAIKELLEDGSIKREDLFITTKVWPVLWDEVDRSLNESLKALGLEYVDLLLQHWPLCFEKIKDPKGISGLVKTPVDDSGKTMYAADGDYLETYKQLEKIYLDPNDHRVRAIGVSNFSIEYLERLIKECRVKPTVNQVETHPHLPQMELRKFCFMHDILLTAYSPLGSHGAPNLKIPLVKKLAEKYNVTGNDLLISYHIRQGTIVIPRSLNPVRISSSIEFASLTKDELQELNDFGEKYPVRFIDEPFAAILPEFTGNGPNLDNLKY

SEQ ID NO: 2867 - protein, 1144 aa, Populus tremula
MASQSQRQSNQPAHNQAQSSGTSNMRQHHHPTESVSKAIAQYTVDAQLHAVFEQSGGTGKSFDYSKSVRTPNQSVPEEQITAYLSKIQRGGHIQPFGCMIAADEQSFRVIAYSENAKDMLGLTPQSVPSLEKQEILFVGADVRILFRPSSAVLLEKAFGAREITLLNPIWIHSKNSGKPFYAILHRIDVGIVIDLEPARTEDPALSIAGAVQSQKLAVRAISQLQSLPGGDIKLLCDTVVDSVRELTGYDRVMVYKFHEDEHGEVVAENKRVDLEPYIGLHYPSTDIPQASRFLFKHNRVRMIVDCHAIPVSVIQDEGLMQPLCLVGSTLRAPHGCHAQYMENMGSIASLAMAVIIYGNDEEAIGGRNSMRLWGLVVCHHTSARCIPFPLRYACEFLMQAFGLQLNMELQLASQLLEKHVLRTQTLLCDMLLRDSPTGIVTQSPSIMDLVKCDGAALYYQGQYYPLGVTPTEAQIKDIVEWLLTLHGDPTGLSTDSLADAGYPGAAFLGDAVCGMAVAYIAERDFLFWFRSHTAKEVKWGGAKHHPEDKDDGQRMHPRSSFKAFLEVVKSRSLPWENAEMDAIHSLQLILRDSFRDAEATNSKAVVHNQLKDMELQGMDELSSVAREMVRLIETATAPIFAVDVDGRINGWNAKVAELTGLSVEEAMGKSLVHDLVYKEYEEIVDKLIHRAVKGEEDKNVEIKLRTFCSEHQKKAVFVVVNACSSKDYMDNIVGVCFVGQDVTGQKVVMDKYVLIQGDYKAIVHSPNPSIPPIFASDENTCCLEWNTALEKLTGWSRGEVVGKMLVGEVFGSCCKLKGPDALTKFMIALHNAIGGIDTDKLPFSFFDRNEKNVQTLLTANKRVNMNIIGAFCFLQIASPELQPSLKVQKQQEKKSFARMKELAYICQEIKNPLSGIHFTNSLLENTDLTEDQQQFLETSAACEKQILKIIRDIDLESIENGSLELEKAEFLLGSVINAVVSQAMLLLRERNLQLLRDIPEEIKTLAVYGDQARIQQVLADFLLNMVRYAPSSAGWVEIHVCPTLKQISDGHTLVHTEFRYLERVLQTRMLGLQHPPRSFLNCKLTLVMLHREGMVPKIQFQGLSVCQGRLIWLSFPENTTVALYPLTIWFLLLHRHQSRSITHT

SEQ ID NO: 2868 - protein, 521 aa, Triticum aestivum
MGNQNGTPGNDYYNRFPREHPASRPTAAGILRQGLDPTSISVLGRKTADLREHYILGRKLGQGQFGTTYLCTEISTGCDFACKTILKRKLITKVDVEDVRREIQIMHHLSGHKNVVSIKDVYEDAQAVHIVMELLPGGELFDRIQGNGRYSEMKAAEITRIVVSIVAMCHSLGVMHRDLKPENFLLLDKDDDLSIKAIDFGLSIYFKPGQVFSELVGSPFYVAPEVLHKRYGPESDVWSAGVILYVLVSGVPPFWADTQKGIFDAVLKGHLDLESDPWPKISDSAKDLIRKMLCNCPSERLKAHEVLRHPWICQNGMATDGVLDPSVISRLKRFSAMNNLQKLALRVIAERLSEEEIAGLRELFKTVDIKNRGVITFGELRKGLTRYGNELVDTEICDIMEAADTDTDVTINYEEFIAATMPLNKIEREEHLKAAFTYFDKDGSGYITVDKLQRACAEYNMEGTLLEEIILEADQNNDGQIDYAEFVAMMQGNANGGNIGLGRPTMETSLNVTLRDAAQVH

SEQ ID NO: 2869 - protein, 233 aa, Arabidopsis lyrata subsp. petraea
  misc_feature (96)..(96): Xaa can be any naturally occurring amino acid
  misc_feature (144)..(145): Xaa can be any naturally occurring amino acid
MEGGASNEVAESSKKIGRGKIEIKRIENTTNRQVTFCKRRNGLLKKAYELSVLCDAEVALVIFSTRGRLYEYANNSVRGTIERYKKACSDAVNPPXVTEANTQYYQQEASKLRRQIRDIQNLNRHILGESLGSLNFKELKNLEXXLEKGIGRVRSKKHEMLVAEIEYMQKREIELQNDNMYLRSKITERTGLQQQESSVIHQGTVYESGVTSSHQSEQYNRNYIPVNLLEPNQ

SEQ ID NO: 2870 - protein, 379 aa, Arabidopsis thaliana
YSDSRGLPGVRKEVAEFIQRRDGYPSDPELIFLTDGASKGVMQILNCVIRGNGDGILVPVPQYPLYSATISLLGGTLVPYYLDESENWGLDVANLRQSVAQARSQGITVRAMVIINPGNPTGQCLSEANIREILKFCYNEKLVLLGDEVYQQNIYQDERPFISSKKVLMEMGSPFSKEVQLVSFHTVSKGYWGECGQRGGYFEMTNLPPRVVEEIYKVASIALSPNVSAQIFMGLMVNPPKPGDISYDQFARESKGILESLRRRARLMTDGFNSCKNVVCNFTEGAMYSFPQIRLPTGALQAAKQAGKVPDVFYCLKLLEATGISTVPGSGFGQKEGVFHLRTTILPAEDEMPEIMDSFKKFNDEFMTQYDNNFGYSKM

SEQ ID NO: 2871 - protein, 1146 aa, Populus tremula
MASQSQRQSNQPAHNQAQSSGTSNMRQHHHPTESVSKAIAQYTVDAQLHAVFEQSGGTGKSFDYSKSVKTPNQSVPEEQITAYLSKIQRGGHIQPFGCMIAANEQSFRGIAYSENAKNMLGLTPQSVPSLEKQEILFVGGDVRIFFRPSSAVLLEKTFGAREITLLNPIWIHSKNSGKPFYAILHRIDVGIVIDLEPARTEDPALSIAGAVQSQKLAVRAISQLQSLPGGDIKLLCDTVVDSVRELTGYDRVMVYKFHEDEHGEVVAENKRVDLEPYIGLHYPSTDIPQASRFLFKQNRVRMIVDCHAIPVSVIQDEGLMQPLCLVGSTLRAPHGCHAQYMENMGSIASLAMAVIIYGNDEEAIGGRNSMRLWGLVVCHHTSARCIPFPLRYACEFLMQAFGLQLNMELQLASQLLEKHVLRTQTLLCDMLLRDSPTGIVTQSPSIMDLVKCDGAALYYQGQYYPLGVTPTEAQIKDIVEWLLTLHGDPTGLSTDSLADAGYPGAAFLGDAVCGMAVAYIAERDFLFWFRSHTAKEVKWGGAKHHPEDKDDGQRMHPRSSFKAFLEVVKSRSLPWENAEMDAIHSLQLILRDSFRDAEATNSKAVVHNQLKDMELQGMDELSSVAREMVRLIETATAPIFAVDVDGRINGWNAKVAELTGLSVEEAMGKSLVHDLVYKEYEEIVDKLIHRAVKGEEDKNVEIKLRTFCSEHQKKAVFVVVNACSSKDYMDNIVGVCFVGQDVTGQKVVMDKYVLIQGDYKAIVHSPNPSIPPIFASDENTCCLEWNTALEKLTGWSRGEVVGKMLVGEVFGSCCRLKGPDALTKFMIALHNAIGGIDTDKLPFSFFDRNEKNVQTLLTANKRVNIKGDIIGAFCFLQIASPELQQSLKVQKQQEKKSFARMKELAYICQEIKNPLSGIHFTNSLLENTDLTEDQQQFLETSAACEKQILKIIRDIDLESIENGSLELEKAEFLLGSVINAVVSQAMLLLRERNLQLLRDIPEEIKTLAVYGDQARIQQVLADFLLNMVIYTQSSAGWVEIHVCPTLKQISDGHTLVHTEFRYLERVLQTRMLGLQHPPRSFLNCKLTLIKLHREGMVPKIQFQGLSVCQGRLIWLSFPENTTVALYPLTIWFLLLHRHQSRSITHT

SEQ ID NO: 2872 - protein, 384 aa, Thermococcus kodakarensis KOD1
MFPERGASEEEVLRELEEKTREDLTFDSGKILGSMCTYPHPFAVKVVMKYIDRNLGDPGLHIGSQKIEKEAVDMLANLLGLEKGYGHIVSGGTEANILAVRAMRNLAGIEKPELILPESAHFSFIKAAEMLGVKLVWAELNDDYTVNVKDVEKKITDRTIGIVGIAGTTGLGVVDDIPALSDLALDYGLPLHVDAAFGGFVIPFAKALGYEIPDFDFRLKGVKSITIDPHKMGMVPIPAGGIIFREKKFLDSISVLAPYLAGGKIWQATITGTRPGANALAVWAMIKHLGFDGYKEVVKEKMELARWFASELKKIPGIYLIREPVLNIVSFGSEKLEELEKELKARGWGVSAHRGYIRIVVMPHVKREHLEEFLRDLREIAKRL

SEQ ID NO: 2873 - protein, 1146 aa, Populus tremula
MASQSQRQSNQPAHNQVQSSGTSNMRQHHHPTESVSKAIAQYTVDAQLHAVFEQSGGTGKSFDYSKSVRTPNQSVPEEQITAYLSKIQRGGHIQPFGCMIAADEQSFRVIAYSENAKDMLGLTPQSVPSLEKQEILFVGADVRILFRPSSAVLLEKAFGAREITLLNPIWIHSKNSGKPFYAILHRIDVGIVIDLEPARTEDPALSIAGAVQSQKLAVRAISQLQSLPGGDIKLLCDTVVDSVRELTGYDRVMVYKFHEDEHGEVVAENKRVDLEPYIGLHYPSTDIPQAPRFLFKQNRVRMIVDCHAIPVSVIQDEGLMQPLCLVGSTLRAPHGCHAQYMENMGSIASLAMAVIIYGNDEEAIGGRNSMRLWGLVVCHHTSARCIPFPLRYACEFLMQAFGLQLNMELQLASQLLEKHVLRTQTLLCDMLLRDSPTGIVTQSPSIMDLVKCDGAALYYQGQYYPLGVTPTEAQIKDIVEWLLTLHGDPTGLSTDSLADAGYPGAAFLGDAVCGMAVAYIAERDFLFWFRSHTAKEVKWGGAKHHPEDKDDGQRMHPRSSFKAFLEVVKSRSLPWENAEMDAIHSLQLILRDSFRDAEATNSKAVVHTQLKDMELQGMDELSSVAREMVRLIETATAPIFAVDVDGRINGWNAKVAELTGLSVEEAMGKSLVHDLVYKEYEEIVDKLIHRAVKGEEDKNVEIKLRTFCSEHQKKAVFVVVNACSSKDYMDNIVGVCFVGQDVTGQKVVMDKYVLIQGDYKAIVHSPNPSIPPIFASDENTCCLEWNTALEKLTGWSRGEVVGKMLVGEVFGSCCRLKGPDALTKFMIALHNAIGGIDTDKLPFSFFDRNEKNVQTLLTANKRVNIKGDIIGPFCFLQIASPELQQSLKVQKQQEKKSFARMKELAYICQEIKNPLSGIHFTNSLLENTDLTEDQQQFLETSAACEKQILKIIRDIDLESIENGSLELEKAEFLLGSVINAVVSQAMLLLRERNLQLLRDIPEEIKTLAVYGDQARIQQVLADFLLNMVRYAPSSAGWVEIHVCPTLKQISDGHTLVHTEFRYLERVLQTRMLGLQHPPRSFLNCKLTLVMLHREGMVPKIQFQGLSVCQGRLIWLSFPENTTVALYPLTIWFLLLHRHQSRSITHT

SEQ ID NO: 2874 - protein, 1144 aa, Populus tremula
MASQSQRQSNQPAHNQAQSSGTSNMRQHHHPTESVSKAIAQYTVDAQLHAVFEQSGGTGKSFDYSKSVRTPNQSVPEEQITAYLSKIQRGGHIQPFGCMIAADEQSFRGIAYNENAKNMRGLTPQSVPSLEKQEILFVGGDVRILFRPSSAVLLEKTFGAREITLLNPIWIHSKNSGKPFYAILHRIDVGIVIDLEPARTEDPALSIAGAVQSQKLAVRAISQLQSLPGGDIKLLCDTVVDSVRELTGYDRVMVYKFHEDEHGEVVAENKRVDLEPYIGLHYPSTDIPQASRFLFKQNRVRMIVDCHAIPVSVIQDEGLMQPLCLVGSTLRAPHGCHAQYMENMGSIASLAMAVIIYGNDEEAIGGRNSMRLWGLVVCHHTSARCIPFPLRYACEFLMQAFGLQLNMELQLASQLLEKHVLRTQTLLCDMLLRDSPTGIVTQSPSIMDLVKCDGAALYYQGQYYPLGVTPTEAQIKDIVEWLLTLHGDPTGLSTDSLADAGYPGAAFLGDAVCGMAVAYIAERDFLFWFRSHTAKEVKWGGAKHHPEDKDDGQRMHPRSSFKAFLEVVKSRSLPWENAEMDAIHSLQLILRDSFRDAEATNSKAVVHNQLKDMELQGMDELSSVAREMVRLIETATAPIFAVDVDGCINGWNAKVAELTGLSVEEAMGKSLVHDLVYKEYEEIVDKLIHRAVKGEEDKNVEIKLRTFCSEHQKKAVFVVVNACSSKDYMDNIVGVCFVGQDVTGQKVVMDKYVLIQGDYKAIVHSPNPSIPPIFASDENTCCLEWNTALEKLTGWSRGEVVGKMLVGEVFGSCCRLKGPDALTKFMIALHNAIGGIDTDKLPFSFFDRNEKNVQTLLTANKRVNINIIGAFCFLQIASPELQPSLKVQKQQEKKSFARMKELAYICQEIKNPLSGIHFTNSLLENTDLTEDQQQFLETSAACEKQILKIIRDIDLESIENGSLELEKAEFLLGSVINAVVSQAMLLLRERNLQLLRDIPEEIKTLAVYGDQARIQQVLADFLLNMVRYAPSSAGWVEIHVCPTLKQISDGHTLVHTEFRYLERVLQTRMLGLQHPLRSFLNCKLTLVMLHREGMVPKIQFQGLSVCQGRLIWLSFPENTTVALYPLTIWFLLLHRHQSRSITHT

SEQ ID NO: 2875 - protein, 132 aa, Brassica napus
MCGILAVLGCVDNSQATRSRIIKLSRRLRHRGPDWSGLHCYEDCYLAHERLAIIDPISGDQPLYSEDKTVVVTVNGEIYNHKALRESESLKSHKYHTGSDCEVLAHLYEEHGEEFINMLDGMFAFVLLDTKD

SEQ ID NO: 2876 - protein, 681 aa, Arabidopsis thaliana
MSGSVSGCGSGGCSIVWFRRDLRVEDNPALAAAVRAGPVIALFVWAPEEEGHYHPGRVSRWWLKNSLAQLDSSLRSLGTCLITKRSTDSVASLLDVVKSTGASQIFFNHLYDPLSLVRDHRAKDVLTAQGIAVRSFNADLLYQPWEVTDELGRPFSMFAAFWERCLSMPYDPESPLLPPKKIISGDVSKCVADPLVFEDDSEKGSNALLARAWSPGWSNGDKALTTFINGPLLEYSKNRRKADSATTSFLSPHLHFGEVSVRKVFHLVRIKQVAWANEGNEAGEESVNLFLKSIGLREYSRYISFNHPYSHERPLLGHLKFFPWAVDENYFKAWRQGRTGYPLVDAGMRELWATGWLHDRIRVVVSSFFVKVLQLPWRWGMKYFWDTLLDADLESDALGWQYITGTLPDSREFDRIDNPQFEGYKFDPNGEYVRRWLPELSRLPTDWIHHPWNAPESVLQAAGIELGSNYPLPIVGLDEAKARLHEALSQMWQLEAASRAAIENGSEEGLGDSAEVEEAPIEFPRDITMEETEPTRLNPNRRYEDQMVPSITSSLIRPEEDEESSLNLRNSVGDSRAEVPRNMVNTNQAQQRRAEPASNQVTAMIPEFNIRIVAESTEDSTAESSSSGRRERSGGIVPEWSPGYSEQFPSEENRIGGGSTTSSYLQNHHEILNWRRLSQTG

SEQ ID NO: 2877 - protein, 514 aa, Brassica napus
MKFPLLGLLLLVTLVGSPTRAEEGPVCPKTETLSRASFPEGFMFGTATASYQVEGAVNEGCRGPSLWDIYTKKFPHRVKNHNADVAVDFYHRFREDIKLMKKLNTDALRLSIAWPRIFPHGRMEKGNSKEGVQFYHDLIDELLKNDLTPLVTIFHWDMPADLEDEYGGFLSERVVPDFVEYANFTFHEYGDKVKNWITFNEPWVFSRSAYDVGKKAPGRCSPYIKDFGHLCQDGRSGFEAYVVSHNLLVSHAEAVDAFRKCEKCKGDKIGIAHSPAWFEPEDVEGGQRTVDRVLDFIMGWHLDPTTYGDYPQSMKDAVGARLPKFTKAQKAKLKGSADFVGINYYSSFYAKASEKPDYRQPSWATDSLVEFEPKTVDGSVKIGSQPSTAKMAVYAAGLRKLVKYIKDRYGNPEIIITENGYGEDLGEKDTDHSVALNDHNRKYYHQRHLLSLHQAICEDKVNVTSYFVWSLMDNFEWLDGYTARFGLYYIDFQNNLTRMEKESATCSLNSSNRA

SEQ ID NO: 2878 - protein, 664 aa, Piromyces sp. E2
MKTLSIFTTLLAVSAAKKCVVRNPTDSAKTNDVKAPVTDDIPSDNETPVNVDENTPLDKEEDSGIENSDIENSEDKPKGKLPADFKWGAATAAYQVEGAWNEGGRGESVWDHFTHLYPKNVESGDRSNPNSTNGNVACDSYHKLGEDIKMMKIMKGNHYRFSMSWSRLFPDGQAKKVKGKWNVNKEGVEYYDMVIDTLLENNITPMATLYHWDFHTLSMKSMVVGRLPFTRRFAKYAEFCFEHFGDRVKNWITTNEPWVNCVSGYRLGPGKAPYRCTGEAPRKLANDTAGLDLLGGCSYEIGPSQYTKNHEALTANRPPQRLEDVWCSHNILIAHAKAVNVYRKKFQKKQKGLIGITIDGEAQIPWQDDKTTPEELENNKKYANLAAEFRIGWYSDPPMIGDYPESVKQRMSKDMPVFTDEEKALLKGSSSDFLGWNTYTAHWAEQVKNEDGTYVQPPTDEEANFENSKRDMWDDNCRGRGEGWTCIPPTLGSQAGSSWNTKYGPTIRVGLNWFADRHKGLIKIGIVITENGCAQPNYKVSRANDEVTKKYFESIGQPEYADVYDESIIEDEKNIEGSILHDEYRIDWYKQYLENLRLAYVEDKVDVRGYMAWSLVDNFEWENGYETRFGMTYIDFYNDKNLTRVPKDSLTFLGQWYLENVEQA

SEQ ID NO: 2879 - protein, 146 aa, Legionella pneumophila str. Paris
MKYLHTMVRVSNLEQSLDFYCNKLGLIEVKRTENAKGRFTLVFLAAPADIEQVQTSYGPMLELTYNWDPEDYTEGRNFGHLAYHVDDIYKICQHLQECGVVINRPPRDGHMAFIRSPDNISIELLQKGGPLPKQEPWLSAPNIGHW

SEQ ID NO: 2880 - protein, 659 aa, Aspergillus nidulans FGSC A4
MLPSSHTAVEPGRPIPGVQDHHSNYFVAEHAQTSILRLSHSLLENAVDVKLYPIYFSTYSSGFSCALMPKRIARGGNGLNAELPSCRGRPISQDSIPLDSHTASCAMSSHRADFDSIPIVDLSTLNSPHIQNARNSQSPSGRPALRLGSSTSSPLYGEKPSNPELEKPAEGALSEAFDIGYELAGDIRKGPGDPPPQDEYGLYGDNQWPDERLLPGFRKIYLEYFSQTLELSRKLIKMNALALGQEEHLFDSAVEYPGVLSRMLHYPPQPVEGQEIPGQAAHTDHVPALQVRNNQGHWVAAPPIPGTLVVNIGDCLATWSNNRFKSTIHRVVNLTGEERLGGHRLRRQLPFQRAIHGGRIGNRAPQGQGRNPCSDTPAYEVIPVSTPNRTGKGNNYAYLVTDEPTKQSVIIDPANPPEVVPELEAQTKAGKINLTAIVNTHHHWDHAGGNNEVLKTFKVPVIGGKDCQSVTKTPAHGEVFKIGDRISVTALHTPCHTQDSICYFMQDGEQKAVFTGDTLFIGGMTEWINAESSAAAGCGRFFEGTAPEMHKALNETLASLPEDTKVYPGHEYTKGNVKFCLAVSQSEPVKKLQAFAEANQQTQGMFTIGDEKLHNVFMRVTASHPTTTSRPKAYGSRTPRFRRKQARPIPSRSWLLCAR

SEQ ID NO: 2881 - protein, 216 aa, Glycine max
  misc_feature (204)..(204): Xaa can be any naturally occurring amino acid
SYVGPPPPHELSVLCDAEVALIIFSNRGKLYEFSSTQSMPKTLEKYQKCSFAGPETALQNRENEQLKSSRNEYLKLKARVDNLQRTQRNLLGEDLESLGIKELEHLEKQLDSSLKHIRSTRTQHMVDQLTELQKKEQMFCEANKCLRRRLEESNQVIWQHAWEQSERHSEVQPQQLNGNNFFHPLDGAGEPTLQIGYPSEALTXSCMTTFLPPWLP

SEQ ID NO: 2882 - protein, 488 aa, Zea mays
  misc_feature (185)..(185): Xaa can be any naturally occurring amino acid
MARGREGEVRNLVLGKYELGRMLGQGSFAKVYYGRDLRDGQSVAIKVIDKARLRQTDGMVEQLRREISIMRMVRHPNVVGIREVLASRQRVFVVMEYARGGELFAKVARGRLTEDAARKYFQQLVAAVAFCHSRGVAHRDLKPENLLLDEEGRLKVTDFGLAALPEQLRHDGLLHTQCGTPAYVXAPEVLRKRGYDGARADLWSCGVVLYVLLCGFLPFQHDNYVKLYQKIFKADYQVPPWVSGDARRLIARLLVVDPAKRASIAEIMCTPWFRKGFVPPVLSPPVTPKKQQLDEGGALFDNDDDDNSNSNHSGATSPRSGNAFQLISSMSSGFDLSGLFESEQKTATVFTARAPAATVVEKRESVARPLGFEVTRGKGWKVRMEAKAEGTNGRLAATAEVLEVAVDGAVVEFVHDAGDALDFNKFCAVDVPPGLTEIVWGGQGDSPPPPVGPGGTSVLGGPRLGRGSGSNFGWELNTAARPPPFCTR

SEQ ID NO: 2883 - protein, 240 aa, Zea mays
MGRGKIVIRRIDNSTSRQVTFSKRRNGIFKKAKELAILCDAEVGLVIFSSTGRLYEYSSTSMKSVIDRYGKAKEEQQDVANPNSELKFWQREAASLRQQLHNLQENYRQLTGDDLSGLNVKELQSLENQLETSLRGVRAKKDHLLIDEIHDLNRKASLFHQENTDLYNKINLIRQENDELHKKIYETEGPSGVNRESPTPFNFAVVETRDVPVQLELSTLPQQNNIEPSTAPKLGLQLIP

SEQ ID NO: 2884 - protein, 672 aa, Shigella flexneri 2a str. 301
MSYPSLFAPLDLGFTTLKNRVLMGSMHTGLEEYPDGAERLAAFYAERARHGVALIVSGGIAPDLTGVGMEGGAMLNDASQIPHHRTITEAVHQEGGKIALQILHTGRYSYQPHLVAPSALQAPINRFVPHELTHEEILQLIDDFARCAQLAREAGYDGVEVMGSEGYLINEFLTLRTNQRSDQWGGDYRNRMRFAVEVVRTVRERVGNDFIIIYRLSMLDLVEGGGTFAETVELAQAIEAAGATIINTGIGWHEARIPTIATPVPRGAFSWVTRKLKGHVSLPLVTTNRINDPQVADDILSRGDADIVSMARPFLADAELLSKAQSGRADEINTCIGCNQGCLDQIFVGKVTSCLVNPRACHETKMPILPAVQKKNLAVVGAGPAGLAFAINAAARGHQVTLFDAHSEIGGQFNIAKQIPGKEEFYETLRYYRRMIEVTGVTLKLNHTVTADQLQAFDETILASGIVPRVPPIDGIDHPKVLSYLDVLRDKAPVGNKVAIIGCGGIGFDTAMYLSQPGESTSQNIARFCNEWGIDSSLQQAGGLSPQGMQIPRSPRQIVMLQRKASKPGQGLGKTTGWIHRTTLLSRGVKMIPGVSYQKIDDDGLHVVINGETQVLAVDNVVICAGQEPNRALAQPLIDSGKTVHLIGGCDVAMELDARRAIAQGTRLALEI

SEQ ID NO: 2885 - protein, 446 aa, Rhodopseudomonas palustris CGA009
MRKIVVRSLAVLGVVAVPVVSALALQREQTAPADLDLIGGVIQLVQRAYVHPIPSDELTKDALKGLLNRLDPHSDYMDEKEFKDMQTDMSGQFGGLGMQITAQGGIPRIVSPIDGTPAARAKLEPGDLIIKVGTATTQGMSLRNVVDMLRGAPGTKVTITVLRGKDEPFDVTLTREIIRVASVKSEIKPDGVGYIRISQFGADTADGFTAALTKLKSDAKDGGLKGLVIDLRNDPGGLLNAAVSVAGDLLDGGTVVSIRGRQADDQRVFSAPSKGDKLPGVPIVVLINGASASASEIVAGALQDRKRATVMGTTSFGKGSVQTVIPIKGHGAVRLTTALYYTPAGRSIQDEGIVPDVIEEAPKDQQISGGPLIRESALHGAIANPGQLGKSDASATKATPKTGEPTDDKTKSATSAPIKADLIGKPEDAQLNAALALVLKKDAAPK

SEQ ID NO: 2886 - protein, 441 aa, Oryza sativa (japonica cultivar-group)
MEGGRGGKRWRFATPNLAVAAAGERSIQRYLLQLHACLDENGPRPVIPLSHGDPSSSACFRTAPEAEEAVAAAVRSGDYNGYSSPATSLPARRAIAEYLSCDLPYKLCTDDIFLTSGGTQAIEIVMSVFGQPGANILLPKPGYPKHEAHAVFHRMEVRLYDLVPERGWEINVEAVEALADENTVAIVITNPNNPCGNVYTYEHLSKIADTASKFGLLVIADEVYGHLVYGSTPFVPMGVFGETVPVLTLGAISKRWVVPGWRFGWIAICDPKGILKETKVVDSLRSFRNLTTGPATFIQGAIPHIMKNTNDEFFRKTLELLKETAEICFGEIKEIKCITCPHKPEGSFFMMVKLDISQLSDICDDIDFCSKLVKEESVVLLPGRALGMENWLRITFALDPPRLKQGLERVKSFCRRHQSHANMLNISASAKVEPHFGMSKS

SEQ ID NO: 2887 - protein, 407 aa, Rheum australe
MDGVAQISDTDMAEAAPPPSDPSQPQPAAPDPSQHQPLPQQPQQINIPATLSHGGRFIQYNIFGNIFEVTAKYKPPIMPIGKGAYGIVCSALNSETSEHVAIKKIANAFDNKVDAKRTLREIKLLRHMDHENVVAIRDIIPPPLRDSFNDVYIAYELMDTDLHQIIRSNQGLSEEHCQYFLYQILRGLKYIHSANVLHRDLKPSNLLLNANCDLKICDFGLARVTSETDFMTEYVVTRWYRAPELLLNSSDYTTAIDVWSVGCIFMELMDRKPLFPGRDHVHQLRLLMELIGTPSEAELGFLNENAKRYIRQLPQYTRQSIPGKFPHVHPLAIDLVEKMLTFDPRQRITVEDALAHPYLNSLHDISDEPVCMTPFSFDFEQHALSEEQMRELIYREALAFNPEYQQG

SEQ ID NO: 2888 - protein, 469 aa, Bacillus subtilis subsp. subtilis str. 168
MSSNEKRFPEGFLWGGAVAANQVEGAYNEGGKGLSTADVSPNGIMSPFDESMTSLNLYHNGIDFYHRYKEDIALFAEMGFKAFRTSIAWTRIFPNGDEEEPNEEGLRFYDDLFDELLKHHIEPVVTISHYEMPLGLVKNYGGWKNRKVIEFYERYAKTVFKRYQHKVKYWMTFNEINVVLHAPFTGGGLVFEEGENKLNAMYQAAHHQFVASALAVKAGHDIIPDSKIGCMIAATTTYPMTSKPEDVFAAMENERKTLFFSDVQARGAYPGYMKRYLAENNIEIEMAEGDEELLKEHTVDYIGFSYYMSMAASTDPEELAKSGGNLLGGVKNPYLKSSEWGWQIDPKGLRITLNTLYDRYQKPLFIVENGLGAVDKVEEDGTIQDDYRINYLRDHLIEAREAIADGVELIGYTSWGPIDLVSASTAEMKKRYGFIYVDRDNEGNGTFNRIKKKSFNWYQQVIATNGESL

SEQ ID NO: 2889 - protein, 1144 aa, Populus tremula
MASQSQRQSNQPAHNQAQSSGTSNMRQHHHPTESVSKAIAQYTVDAQLHAVFEQSGGTGKSFDYSKSVRTPNQSVPEEQITAYLSKIQRGGHIQPFGCMIAADEQSFRGIAYNENAKNMRGLTPQSVPSLEKQEILFVGGDVRILFRPSSAVLLEKTFGAREITLLNPIWIHSKNSGKPFYAILHRIDVGIVIDLEPARTEDPALSIAGAVQSQKLAVRAISQLQSLPGGDIKLLCDTVVDSVRELTGYDRVMVYKFHEDEHGEVVAENKRVDLEPYIGLHYPSTDIPQASRFLFKQNRVRMIVDCHAIPVSVIQDEGLMQPLCLVGSTLRAPHGCHAQYMENMGSIASLAMAVIIYGNDEEAIGGRNSMRLWGLVVCHHTSARCIPFPLRYACEFLMQAFGLQLNMELQLASQLLEKHVLRTQTLLCDMLLRDSPTGIVTQSPSIMDLVKCDGAALYYQGQYYPLGVTPTEAQIKDIVEWLLTLHGDPTGLSTDSLADAGYPGAAFLGDAVCGMAVAYIAERDFLFWFRSHTAKEVKWGGAKHHPEDKDDGQRMHPRSSFKAFLEVVKSRSLPWENAEMDAIHSLQLILRDSFRDAEATNSKAVVHNQLKDMELQGMDELSSVAREMVRLIETATAPIFAVDVDGCINGWNAKVAELTGLSVEEAMGKSLVHDLVYKEYEEIVDKLIHRAVKGEEDKNVEIKLRTFCSEHQKKAVFVVVNACSSKDYMDNIVGVCFVGQDVTGQKVVMDKYVLIQGDYKAIVHSPNPSIPPIFASDENTCCLEWNTAMEKLTGWSRGEVVGKMLVGEVFGSCCKLKGPDALTKFMIALHNAIGGIDTDKLPFSFFDRNEKNVQTLLTANKRVNINIIGAFCFLQIASPELQPSLKVQKQQEKKSFARMKELAYICQEIKNPLSGIHFTNSLLENTDLTEDQQQFLETSAACEKQILKIIRDIDLESIENGSLELEKAEFLLGSVINAVVSQAMLLLRERNLQLLRDIPEEIKTLAVYGDQARIQQVLADFLLNMVRYAPSSAGWVEIHVCPTLKQISDGHTLVHTEFRYLERVLQTRMLGLQHPLRSFLNCKLTLVMLHREGMVPKIQFQGLSVCQGRLIWLSFPENTTVALYPLTIWFLLLHRHQSRSITHT

SEQ ID NO: 2890 - protein, 154 aa, Thermus thermophilus HB27
MTLVRRDARPMELTPFRTWSPFTLVDEVNRLFEEAFSDLVRPAAAYVAPADLYETDEALILEMAVPGMTPEDLEVSLEGNKLTIRGQVKPVADERVRRYYLQEMAHGSFVRTFTLPVEVDASGVKAEFRNGILRLTLPKVAEARARRIPIEVVQ

SEQ ID NO: 2891 - protein, 220 aa, Arabidopsis thaliana
MGQQSLIYSFVARGTVILAEYTEFKGNFTSVAAQCLQKLPSSNNKFTYNCDGHTFNYLADNGFTYCVVVIESAGRQIPMAFLERVKEDFNKRYGGGKASTAKANSLNKEFGSKLKEHMQYCADHPEEISKLSKVKAQVTEVKGVMMENIEKVLDRGEKIELLVDKTENLRSQAQDFRTQGTKMKRKLWFENMKIKLIVFGIIVALILIIILSVCHGFKCT

SEQ ID NO: 2892 - protein, 387 aa, Glycine max
MDSEGEGVRTPKMGVEAEGALNSKMKGAGNVSSKDMIFRADKIDLKSLDAQLEKHLSRVWSRSIETKRPREEWEIDLAKLDLRYVVAHGAYGTVYRGTYDTQDVAVKVLDWGEDGVATAAETAALRASFRQEVAVWQKLDHPNVTKFVGASMGTSNLKIPPKNPMNADEESLPSRACCVIVEFVSGGTLKQYLFKSRRRKLAYKIVIQLALDLARGLNYLHSKKIVHRDVKTENMLLDTSRNLKIADFGVARVEAMNPSDMTGETGTLGYMAPEVLDGKPYNRRCDVYSFGICLWEIYCCDMPYPDLSFADVSSAVVRQNLRPDIPRCCPSALANIMRKCWDANPNKRPEMEEVVRMLEALDTSKGGGMIPEDQSSGCFCFAPTRGP

SEQ ID NO: 2893 - protein, 315 aa, Oryza sativa (japonica cultivar-group)
MEGGRGGKRWRFATPNLAVAAAGERSIQRYLLQLHACLDENGPRPVIPLSHGDPSSSACFRTAPEAEEAVAAAVRSGDYNGYSSPATSLPARRAIAEYLSCDLPYKLCTDDIFLTSGGTQAIEIVMSVFGQPGANILLPKPGYPKHEAHAVFHRMEVRLYDLVPERGWEINVEAVEALADENTVAIVITNPNNPCGNVYTYEHLSKIADTASKFGLLVIADEVYGHLVYGSTPFVPMGVFGETVPVLTLGAISKRWVVPGWRFGWIAICDPKGILKETKVVDSLRSFRNLTTGPATFIQVILWTHKSHIKLSVPW

SEQ ID NO: 2894 - protein, 131 aa, Brassica napus
  misc_feature (117)..(117): Xaa can be any naturally occurring amino acid
  misc_feature (122)..(122): Xaa can be any naturally occurring amino acid
  misc_feature (128)..(128): Xaa can be any naturally occurring amino acid
MFVAVHGVPVLVESSWRLPLSDVVVVRKKSAFLERSWNSKDVRKLVRVVGVHLLILLAPFHFNWSAFKLCLWLSVIIGICITLSYHRNLSHRSFNLPKWLEYLFAYGGVLAFQGAPXEWVSXHRYHHXHCD

SEQ ID NO: 2895 - protein, 98 aa, Brassica napus
YEQRLSDGSVIPVNTFSYDKCRRRFDLGDADYLRYHGLQEFDRAMQHLEEKYGFMTSEHQFISRTDERDIVIVFERCDLVFVFNFHWTSSYFDYRIGC

SEQ ID NO: 2896 - protein, 150 aa, Agrostis stolonifera var. palustris
MSIVRWSNVFDPFSLDLWADPFDAFRSILPAASGNHDTAAFVNARMDWKETPEAHVFKADLPGVKKEEVKVEVEGGNVLVVSGERKGEGGQERQVATLERSSGKFVRRFRLPENAKVEEVKAGLENGVLTVTVPKAEVKKPEVKAIEISG

SEQ ID NO: 2897 - protein, 374 aa, Glycine max
  misc_feature (226)..(226): Xaa can be any naturally occurring amino acid
  misc_feature (353)..(353): Xaa can be any naturally occurring amino acid
MSQPKIKRRVGKYEVGRTIGEGTFAKVKFARNSETGDPVALKILDKEKVLKHKMAEQIRREVATMKLIKHPNVVRLCEVMGSKTKIYIVLEFVTGGELFDKIVNHGRMSENEARRYFQQLINAVDYCHSRGVYHRDLKPENLLLDAYGNLKVSDFGLSALSQQVRDDGLLHTTCGTPNYVAPEVLNDRGYDGVTADLWSCGVILFVLVAGYLPFDDPNLMNLYKKXRKLITRILDPDPTTRITIPEILDDEWFKKDYKPPVFEENGETNLDDVEAVFKDSEEHHVTEKKEEQPTAMNAFELISMSKGLNLENLFDTEQGFKRETRFTSKSPADEIINKIEEAAKPLGFDVQKXNYKMRLANVKAGRKGNLNVAT

SEQ ID NO: 2898 - protein, 336 aa, Triticum aestivum
  misc_feature (257)..(257): Xaa can be any naturally occurring amino acid
MRMFSKACSLVVSSLPRCSSSAPAIRGQPSLIPRVSRKWLGKPLMYGIGTLLVMPLRTIHGVGRMFGAARYLCNMTSVSSSLQIELVPCLQDNYAYILHDVDTGTVGVVDPSEAVPIINALEKRNQNLTYILNTHHHYDHTGGNLELKAKYGAKVIGSEKDKDRIPGIDITLSEGDTWMFAGHQVLVMETPGHTSGHVSFYFPGSGAIFTGDTLFSLSCGKLFEGTPEQMHSSLQKIVALPDVTKVYCGHEYTLSNXSRFALSIEPGNEELQEYAASTADLRHKNTPTVPTTIAREKPGNPFWGPSGPELKKGGPIPIHLNNPGFFKFSAGGGIIF

SEQ ID NO: 2899 - protein, 295 aa, Candida albicans SC5314
MPAQLQVNTDYFTLNNGNKIPAVGLGTWQATNEDEAYRAVLAALKNGYKHIDTAAIYGNEEQVGKAIKDSGVPREELFVTTKLWNADHKNIEEALETSLKKLGLNYVDLYLIHWPASIDKSTNKPYTDFDYVDTYRGLQKVYKNSKKIRAIGVSNFTKKKLERLLSSEGVDVVPAVNQIEAHPLLTQPELYDYLKEKGIVLEAYSPLGSTNSPLFKNETIVKIAEKNGVEPAQVLVSWAIQRKTVVLPKSVTESRVISNLKTFTLPSEDFETLNKLSEKDGVVRTCNPAFNNFDD

SEQ ID NO: 2900 - protein, 564 aa, Xanthomonas campestris pv. campestris str. ATCC 33913
MCSIFGIFGLQPGDDLQALRRQALECSQRQRHRGPDWSGVYVDAGAILVHERLAIVDPAGGSQPLLSEDGSLALAVNGEIYNHRELKAELLQPYAFQTGSDCEVINALYREDAPASYLNRLNGIFAFALWDKAAGRVIIARDPIGVVPLYWGHDREGRLRVASELKSLVDDCADAAQFPPGHWYDSATGALSRYYERSWREYSEVENVQVPLQELREAFERAVHRQLMTDVPYGVLLSGGLDSSLVAAVAARYARHRIEENDTTEAWWPRLHSFAIGLTGSPDLAAAEVAAAALGTVHHGFEYSFEEGLDALPEVIRHIETYDVTTIRASTPMFLLARRIKAMGVKMVLSGEGSDEIFGGYLYFHKAPNAREFHEELVRKLDALNNYDCLRANKSMMAWGVEPRVPFLDREFLDVAMRMDARFKMIDKTSTGATRIEKGILREAFAGYLPESILWRQKEQFSDGVGYGWIDGLKAHAAAHVSDRELAAADRRFPVNPPQTKEAYFYRSLFEQFFPSQAAAETVPGGKSIACSSPTAIAWDASFAAMADPSGRAIAGVHAQALAS

SEQ ID NO: 2901 - protein, 289 aa, Candida albicans SC5314
MSAQLKTNNDRIALNNGNKIPVIGLGTWESNKDAFLTALKLGYRHIDTATIYKNEEQVGQAIKESGIPREELFITTKVWNNDHKNVEQALETSLKKLGLDYVDLYLVHWPVSIDKTTKEPYPDYDYVDTYKELQKIYKTTTKIKSIGVSNFTKSQLERLLSADGVDVVPAVNQVEAHPLLPQPELYEYLKEKGITLEAYSPLGTSSSPLIKNKTIVEIADKNGVDPAQVLISWAVQRKTVVLPKSVTESRLVSNLKTFELSAEDFDTLNKLSEKEGITRIINPFKNFQD

SEQ ID NO: 2902 - protein, 207 aa, Thermus thermophilus HB27
MRVFPVTLGPLQENAYLVETGEGPVLIDPGDEPEKLLALFQTTGLTPRAILLTHAHFDHVGAVAPLVEALDLPVYLHPLDLPLYEGADLAARAWGLAIPKPPLPVRPLEEGMGLFGFQVLHLPGHSPGHVAFYDPEGAQVFSGDLLFRGSIGRYDLPGADPKALFASLKRLLSLPPETRVHPGHGPGTTLGLEARTNPFLTGLEWEA

SEQ ID NO: 2903 - protein, 335 aa, Mannheimia succiniciproducens MBEL55E
MKTLDEFIVDRQAEYPNAKGALTGILSSIRLVAKVIHRDINRAGLTNNILGFSGIDNVQGEHQMKLDLFAHNMMKQALMAREEVAGFASEEEENFVAFDTERGRNARYVILTDPLDGSSNIDVNVSVGTIFSIYRRVSPIGSPVTLEDFMQPGNRQVAAGYVVYGSSTMLVYTTGNGVNGFTYDPSLGTFCLSHENMQIPATGKIYSINEGQYLKFPMGVKKYIKYCQEEDAATNRPYTSRYIGSLVADFHRNLLKGGIYIYPHATNYPQGKLRLLYEGNPIAFLAEQAGGIASDGYNRVLDIQPSQLHQRVPLFVGSKQMVEKAQDFMHQFKED

SEQ ID NO: 2904 - protein, 330 aa, Shewanella sp. ANA-3
MQTLAQHLTSKAVNESLSQLILTLADTSKAISHAVRHGALAGVLGATEQENVQGETQKKLDIITNDMLKDALKADGTVRGLASEEEDHVVEVCANGQYLVCFDPLDGSSNIDINSLVGTIFSVLPAPQGELTETSFLQSGRNQLAAGYVLYGPSTMLALTTGQGVQLFTLHPETNEFLLTNAAMSISPDTQEFAINMSNQRFWEAPMQTYIADLLLGKIGPREKSFNMRWIAAMVGDVHRVLSRGGIFTYPTDNKDPKKPYKLRLMYEANPMALLVEQAGGKASTGYETILDIQPTQIHQRVAVILGSANEVDACLSYHGLDYSEEPSLD

SEQ ID NO: 2905 - protein, 202 aa, Carica papaya
FGGVYRGVYDAQDVAVKVLDWGEDGFATAAEAAALRTSFRQEVAVWHKLDHPNVTKFIGASMGTSNLKIPPKDATSDGHNPLPSRACCVVVEYLPGGTLKKFLIRNRRKKLAIKVVIQLALDLSRGLSYLHSKKIVHRDVKTENMLLDTHRTLKIADFGVARVEAQNPRDMTGETGTLGYMAPEVLDGKPYNRKCDVYSYGV

SEQ ID NO: 2906 - protein, 408 aa, Novosphingobium aromaticivorans DSM 12444
MAAKSGRVHLNSSWGPLNPVAKRNRALSSRGVAEVIKEPPSMHEPLFQPVRLGAIEAPNRIIMAPLTRGRANPQAVPTPIMGEYYRQRASAGLIISEATAISPEGAGWPSAPGIWTDEQTEAWKPIVDEVHAAGGRIVLQLWHMGRVVHPYFLGGEPPVSASATRAPGHAHTPEGTKDYETARPLRLDEIPRLIDDYGRAAENARKAGFDGVQLHAANGYLIDQFLRDGTNLRDDDYGGSPENRVRLMREVMERLISIWGKERVSIRLSPNGDSQGVDDSNPEATFGEAARVLEELGVGFVELRQPGPEGTFGNTDVPKQDGLIRSIYTGPLVLNSDYTPEEAAADVASGRADAISFGRPFISNPDLVERIRVGAHLNPNKGVPATWYFPGEAGYTDYPTLAEETAIA

SEQ ID NO: 2907 - protein, 931 aa, Vibrio fischeri ES114
MKKYGLRARVITLTLAPTLIIGLLLSGFFTMNRYNDLENQLISSGTSIIEPLAISSEYGMTGKNREAVRRLISYAHRKHSNIVRSIAVFDEHHELFVTSNFHPNFESLTFPKDKPIPLLLDISFQEESLILRTPILPEGKFSANFDSSHINEPLGYIAIELDLSSLRLQQYQEIFSALLVLALGLGLSGIFAYRLMQDVTQPISHMVSVVDRIRRGHLDVRIENKLHGELDTLKNGINAMAISLSEYHVEMQQSIDQATSDLRETLEQLEIQNVELDIAKKRAQEAARVKSEFLANMSHELRTPLNGVIGFTRQMLKTSLSENQQDYLQTIERSANNLLTIINDILDFSKLEAGKLLLENLPFDFQDSLDEVVSLLAPSAHEKGLEITLKIDQRVPSGLIGDPLRIQQVLNNLVGNAIKFTEKGNIDISVELKHLTDDYVDLQFVVRDTGIGISERQQAQLFQAFSQADASISRRYGGTGLGLVITQKLISQMGGEIGLSSRLHQGSTFWFTIRMNPTDLPMLNEHDITQLERKKLLLIEPNMQSASILQQQFISHGVFVTYRSTLPEIIEPHDYALISLSSNSKPSIETIQEMTSQLSANCSTIIVGLPSTELALTDELNQFSHITCLSKPFAKKKLLDALLVEKDLQPVPELPDLMAHASEEQKLPIKVMAVDDNPANLKLISALLSEQVETVITCDNGLDAVQQATEQHFDIILMDIQMPKMDGVMACKEIRKTALNAQTPVVAVTAHAMEGERERLISEGMDDYLTKPIEEHVLQQVIIHWSPLTDNSDVEKITILADAIPELHVEEANDKVMGSIDWEAALKQSAGKEDLAQEMLQMLVDFIPEVNEWIDKALESDISEEELCHYIHKLHGSSSYCGVPRLKQLCNLIETSLRQHQTISDIEPELFELQDEMEKVTKDANLLLSNT

SEQ ID NO: 2908 - protein, 820 aa, Oryza sativa (japonica cultivar-group)
MLCLTSSSSSAPAPLLPSLADRPSPGIAGGGGNVRLSVVSSPRRSWPGKVKTNFSVPATARKNKTMVTVVEEVDHLPIYDLDPKLEEFKDHFNYRIKRYLDQKCLIEKHEGGLEEFSKGYLKFGINTVDGATIYREWAPAAQEAQLIGEFNNWNGAKHKMEKDKFGIWSIKISHVNGKPAIPHNSKVKFRFRHGGGAWVDRIPAWIRYATFDASKFGAPYDGVHWDPPACERYVFKHPRPPKPDAPRIYEAHVGMSGEEPEVSTYREFADNVLPRIRANNYNTVQLMAIMEHSYYASFGYHVTNFFAVSSRSGTPEDLKYLVDKAHSLGLRVLMDVVHSHASNNVTDGLNGYDVGQNTHESYFHTGDRGYHKLWDSRLFNYANWEVLRFLLSNLRYWMDEFMFDGFRFDGVTSMLYHHHGINKGFTGNYKEYFSLDTDVDAIVYMMLANHLMHKLLPEATIVAEDVSGMPVLCRPVDEGGVGFDFRLAMAIPDRWIDYLKNKEDRKWSMSEIVQTLTNRRYTEKCIAYAESHDQSIVGDKTIAFLLMDKEMYTGMSDLQPASPTINRGIALQKMIHFITMALGGDGYLNFMGNEFGHPEWIDFPREGNNWSYDKCRRQWSLVDTDHLRYKYMNAFDQAMNALEEEFSFLSSSKQIVSDMNEKDKVIVFERGDLVFVFNFHPNKTYKGYKVGCDLPGKYRVALDSDALVFGGHGRVGHDVDHFTSPEGMPGVPETNFNNRPNSFKVLSPPRTCVAYYRVDEDREELRRGGAVASGKIVTEYIDVEATSGETISGGWKGSEKDDCGKKGMKFVFRSSDEDCK

SEQ ID NO: 2909 - protein, 477 aa, Oryza sativa
MSYNHSPSITAETINQKVRIFTYEPCGEIVRHARIIYCNLGNPQALGQRPINFFREVLSLCDNPSLIDRDEARALFSPCALKRARKIIESLPGRDSGSYTSSQGVRGLREAVADGIAARDGFPSKPDNIFLTDGASSAINMMMQILIRSHEDGILCPLPEYPLYSASIILHGGTMVPYNLTEDSIWGLEIFEVKRCLEDARASGLTIRAMVVINPGNPTGQVLSITNQEEIVEFCRKEGLVILADEVYQENVYTENKRFNSFKKVARSLGYDHHDLSIVSFHSVSMGYYGECGRRGGYMEICGFGDDVIDEMYKLASLTICPNIAGQILISLVMDPPKLGDEAFEIFMVEKEETYSSLLKRAKALQKAFNGLEGVSCNKFEGAMYLFPRLRLPQAAIKAAQLEGVSPDVFYAHRLLDATGIAVVPGSGFHPDLVSSCKKVSGTSHIRCTILPGEETITAMVPSLQAFHEAFMDEFRG

SEQ ID NO: 2910 - protein, 130 aa, Zea mays
MAAAGLRKGNARLPPEVNRVLYVRNLPFNISSEEMYDIFGKYGAIRQIRLGNAKDTRGTAYVVYEDIYDAKNAVDHLSGFNVANRYLIVLYYQPAKMSKKSDVKKKEDEITRLQEKYGIGSKTPGPGSTD

SEQ ID NO: 2911 - protein, 755 aa, Oryza sativa (japonica cultivar-group)
MVTVVEEVDHLPIYDLDPKLEEFKDHFNYRIKRYLDQKCLIEKHEGGLEEFSKGYLKFGINTVDGATIYREWAPAAQEAQLIGEFNNWNGAKHKMEKDKFGIWSIKISHVNGKPAIPHNSKVKFRFRHGGGAWVDRIPAWIRYATFDASKFGAPYDGVHWDPPACERYVFKHPRPPKPDAPRIYEAHVGMSGEEPEVSTYREFADNVLPRIRANNYNTVQLMAIMEHSYYASFGYHVTNFFAVSSRSGTPEDLKYLVDKAHSLGLRVLMDVVHSHASNNVTDGLNGYDVGQNTHESYFHTGDRGYHKLWDSRLFNYANWEVLRFLLSNLRYWMDEFMFDGFRFDGVTSMLYHHHGINKGFTGNYKEYFSLDTDVDAIVYMMLANHLMHKLLPEATIVAEDVSGMPVLCRPVDEGGVGFDFRLAMAIPDRWIDYLKNKEDRKWSMSEIVQTLTNRRYTEKCIAYAESHDQSIVGDKTIAFLLMDKEMYTGMSDLQPASPTINRGIALQKMIHFITMALGGDGYLNFMGNEFGHPEWIDFPREGNNWSYDKCRRQWSLVDTDHLRYKYMNAFDQAMNALEEEFSFLSSSKQIVSDMNEKDKVIVFERGDLVFVFNFHPNKTYKGYKVGCDLPGKYRVALDSDALVFGGHGRVGHDVDHFTSPEGMPGVPETNFNNRPNSFKVLSPPRTCVAYYRVDEDREELRRGGAVASGKIVTEYIDVEATSGETISGGWKGSEKDDCGKKGMKFVFRSSDEDCK

SEQ ID NO: 2912 - protein, 358 aa, Zymomonas mobilis subsp. mobilis ZM4
MPSLFDPIRFGAFTAKNRIWMAPLTRGRATRDHVPTEIMAEYYAQRASAGLIISEATGISQEGLGWPYAPGIWSDAQVEAWLPITQAVHDAGGLIFAQLWHMGRMVPSNVSGMQPVAPSASQAPGLGHTYDGKKPYDVARALRLDEIPRLLDDYEKAARHALKAGFDGVQIHAANGYLIDEFIRDSTNHRHDEYGGAVENRIRLLKDVTERVIATIGKERTAVRLSPNGEIQGTVDSHPEQVFIPAAKMLSDLDIAFLGMREGAVDGTFGKTDQPKLSPEIRKVFKPPLVLNQDYTFETAQAALDSGVADAISFGRPFIGNPDLPRRFFEKAPLTKDVIETWYTQTPKGYTDYPLLGD

SEQ ID NO: 2913 - protein, 422 aa, Arabidopsis thaliana
MATLKCIDWQFSGSEAAKDAAAASLGSYTSALYALCDPHGKPILPPRNEILETSNTAEKAVVKAVLYGSGNAYAPSLGLAAAKSAVAEYLNQGLPKKLTADDVFMTLGCKQAIELAVDILAKPKANVLLPSPGFPWDLVRSIYKNLEVRHYNFLPEKNFEIDFDSVRALVDENTFAIFIINPHNPNGNTYSEAHLKQLAELAKELKIMVVSDEVFRWTLFGSNPFVPMGKFSSIVPVVTLGSISKGWKVPGWRTGWLTLHDLDGVFRNTKVLQAAQDFLQINNNPPTVIQAAIPDILEKTPQEFFDKRQSFLKDKVEFGYSKLKYIPSLTCYMKPEACTFLWTELDLSSFVDIEDDQDFCNKLAKEENLVVLPGIAFSQKNWLRHSIDMETPVLEDALERLKSFCDRHSNKKAPLKDVNGVK

SEQ ID NO: 2914 - protein, 255 aa, Rhodopseudomonas palustris CGA009
MPADIRIVPCLTDNFGYLVHDPATGATASIDAPEAAPLIAALDKEGWKLTDILVTHHHGDHVGGIAELKKKYQCRVHAPHDANAKIADADVRLQEGDVVRVGDLTARVLETPGHTLDHLSYVFDDDRALFAADTLFSIGCGRVFEGTYPMMWESLLKLRALPDDFKLYCGHEYTASNVKFALGIEPDNAALQARAKQVESLRAEGKPTIPVTLGEEKQANVFLRADVPSVAAAVGMPGAPAAEVFGEIRERKNNG

SEQ ID NO: 2915 - protein, 354 aa, Bordetella bronchiseptica RB50
MTSLWDPIQIGRMNLAHRLAMSPLTRSRAQDDGTPGELAAEYYAQRASLGLLISEGTQPSADGQGFLNSPGIYSEAHVAGWRKVADAVHAAGGHLYIQVMHAGRMSHPANTPHGRQAVAPSAIAPEAQIHTPTGMQQVPAPRALSPDEIQATVRDYRHAAARAIEAGADGVEIHGANGYLIQQFLSPNANHRDDAYGGPVAHRTRFALEVAAAVAEEIGADRTGIRLSPGSRLGGIDEGPHYGDMYRHLVAGLAQLKLSYLHIAHNGDEALLKDLRQLWRGPLLVNRVNRPIELIGQDVETGLADIAPVGRWALANPDFVARLRAGQPLNPPDQATFYGGGARGYTDYPRLAMR

SEQ ID NO: 2916 - protein, 351 aa, Colwellia psychrerythraea 34H
MTANLLKPYALNNTINLSNRILMAPLTRCMADDNLVPTQLMAEYYARRAEAGLIISEAVIIRPDGQGFPNTPGLFSPAQIEGWKIVTAAVHKNGGKIFAQLWHTGRVAHPYFYGNGDADASVLAPSAIGVEGTVPRMRELTYKIPKAVTVEEMKTLVADYGQAAENAIKAGFDGVEIHGANGYLIDQFLHHDSNRRNDEYGGSSENMVRFPLEVIDEIISKIGADRTGLRVSPGAYFNMTGDSKDRAVFDLLLPELEQRNLAFLHIGIFDDSMEFDYLGGRASSYVRENYSKTLVGVGSYSAEAASSAINDDKFDLIAIGRPFIANPDYVAKIRNNEPLTSYSDEMLTSLI

SEQ ID NO: 2917 - protein, 289 aa, Bifidobacterium longum NCC2705
MTNGHINPANVPDIALKDGHSIPQVGLGVLRIDDEGVVPVVESALEAGYRHIDGAAGYNNEAGVGRALAASGYNKGAKRETLWVTTKLRDSQQGYDSALKAFDNSLKLLQLDYVDMYMIHWPTPFDWRSTDTWKAFVKLRDEGMARTLGVCNFMPADLKRLHEETGAWPAVNQIELHPTWQQREVVAFCKEHGIAVEAYSPMARGADLNAGDGTIEKIAAAHEVSPAQVILRWHIENGTIIIPKSVHADRQKENLNLFGFALTADEHAAIDALDGPTRAGHDPLTFTYA

SEQ ID NO: 2918 - protein, 450 aa, Glycine max
MGKTPFSFRRSASRRRPKKTAAPPPPPSPPQHPYAAGFAASPDDNNRLIAAAAGSSALTKAKKKTGNVRLWMRFDRSGRSELVELEKNAIVRHAAIPARDLRILGPVFSHSSNILAREKAMVVNLEFIKAIVTAEEVLLLDPLRQEVLPFVEQLRQQLPGKSQPKLLGGTEEQEGEMHVSNGRQWLPTPEAADGLQSELPFEFQVLEIALEAVCTYLDSNVADLERGAYPVLDELARNVSTKNLEHVRSLKSNLTRLLARVQKVRDEIEHLLDDNEDMAQLYLTRKWLQNQQFEEAHLGATTSNNFPNTSRSVRQLGSIRSESLVTSHYEDDNNVEDLEMLLDAYFMQLDGTRNKILSVREYIDDTEDYVNIQLDNHRNELIQLQLTLTIASFAIAIETLIAGAFGMNIPCNLYNIDGVFWPFVWTTSAACVLLFLLILAYARWKKLLGS

SEQ ID NO: 2919 - protein, 772 aa, Deinococcus radiodurans R1
MADFHFALLKGRWLMAPKRTLSTPLSLDDAQKQVDDLSKAQDLSANTTDPGTTLTDNMGHVVSDDQNSLRAGERGPTLMEDFLFREKITHFDHERIPERVVHARGAGAHGYFQLDKSLEKYTHAKVLTEVGVKTPVFARFSTVAGSRGSADTARDVRGFAVKMYTKEGNWDIVGNNIPVFFIQDAIKFPDLIHSVKPEPHNEIPQAASAHDTFYDFIAETPEAMHMLMWIHSDRAIPRAYNMMEGFGVHTFRLVNAQGKAHLVKFHWKPVLGVKSLVWDEAQKIAGKDADFHRRSMWETIDQGGTLEWDFGVQVFTEEEAMKWDFDVLDATKIVPEDLVPVQRVGKMVLDRNVDNFFAETEQVAFMTQNVVPGIDFTNDPLLQGRNFSYLDTQLSRLGSPNWQELPINRPIIRVSNNQRDGHMRHTINKGRVAYFPNQMAANKPAQAGAAGFVTYPDKVEGTKLRVRAESFSDHYGQARLFWNSMSPVEKEHIAKSLRFELSKCETRDVRVRMLGHLAKINEVLAAQVAKGLGEKLPSTSDAKPGGQQDSASETALLAAAISPTTASGGLQKAKGLSQEEGQPKSAKGRKVAVLVADGVDAAGVKALQDALKKADVKYDIVAPHLGEIASGVMATATLSNTDPVVYDGVVVAGGAAAVRELAQHPESFNFVVGSYRHAKPIGSLGEGAEIVTGSGIGNVLRRVAADSPAKDGATAPVQNLSEVAGVRLAAGEGGAKLAALGVIVGQDKGASAAADSFVQALAEHRFWGRPQL

SEQ ID NO: 2920 - protein, 632 aa, Bacillus cereus G9241
MCGYVGCLYNTAKRYSETEKIQFENMTNLLYHRGPDDQGYFRDEHVQFGFRRLSIIDLDAGHQPLAYENERYILMFNGEIYNYIELREMLIKQGACFSTQSDTEVIVALYAQVKEECVNYLRGMYTFVIWDRQEKKLFGARDHFGIKPLYIAQQNDITFFASEKKSILHVMQDKGVNPTALQHYFTYQYGPEPETLTNDINKIEPGHYFIKEIGKELEVYRYWKPYFNASDKTKEDHIRAIRDVLYDSVKVHMRSDVPVGAFLSGGIDSSIIASIAKEINPNLLTFSVGFEHRGFSEIDVAKETAEKLGVKNYSVLVTPQEFMNEFPKIMWHMDDPLADPAAVPLYFVAKEARKHVTVVLSGEGSDELFGGYNIYREPNSLKMFSYIPTSGKTVLKALSGVLKEGFKGKSFLERGCTPIEERYYGNAKIFREEEKIKLIKSYNESVNYKDVTKPLYNEIKNYDDVSKMQYIDMYTWLRGDILLKADKMSTAHSLELRVPFLDKEVFDVASKIPTELKIANRTTKVILREAVRGIVPDHVLDRKKLGFPVPIRHWLKDEMYDWALNIIKESKTEHLIDKQYVLNLLEAHCADKGDYSRKIWTVIAFMVWHQIYIEHKYDTNLFSEECRVYNLV

SEQ ID NO: 2921 - protein, 249 aa, Caulobacter crescentus CB15
MALTVHQFRCLSDNYGFLVRDEASGKVATIDTPDAGAILAELAKLGWSLDLILNTHWHPDHAGGNETLKTATGATIVGPAEVTRIAPLDRVVRDGEEVMLGDTRLTVIDTGGHTLGHVSYYDAEDAIAFVGDTLFALGCGRLFEGTAEQMWDSLGRLIALPDETTVYCAHEYTASNARFALSVDSSAALAARAEAVFAARARDEATVPTTIGVEKATNPFLRAPLLRPDAPSPAQAFAEIRAAKDSFKG

SEQ ID NO: 2922 - protein, 492 aa, Arabidopsis thaliana
MDPYKYRPSSAYNAPFYTTNGGAPVSNNISSLTIGERGPVLLEDYHLIEKVANFTRERIPERVVHARGISAKGFFEVTHDISNLTCADFLRAPGVQTPVIVRFSTVVHGRASPETMRDIRGFAVKFYTREGNFDLVGNNTPVFFIRDGIQFPDVVHALKPNRKTNIQEYWRILDYMSHLPESLLTWCWMFDDVGIPQDYRHMEGFGVHTYTLIAKSGKVLFVKFHWKPTCGIKNLTDEEAKVVGGANHSHATKDLHDAIASGNYPEWKLFIQTMDPADEDKFDFDPLDVTKIWPEDILPLQPVGRLVLNRTIDNFFNETEQLAFNPGLVVPGIYYSDDKLLQCRIFAYGDTQRHRLGPNYLQLPVNAPKCAHHNNHHEGFMNFMHRDEEINYYPSKFDPVRCAEKVPTPTNSYTGIRTKCVIKKENNFKQAGDRYRSWAPDRQDRFVKRWVEILSEPRLTHEIRGIWTSYWLKADRSLGQKLASRLNVRPSI

SEQ ID NO: 2923 - protein, 933 aa, Erwinia carotovora subsp. atroseptica SCRI1043
MTKYSLRARMLILILAPTLMIGLLLSSFFVIHRYNQLQAQLADSGTSIIEPLATISAYAITHRQMDTIPALINTLHRRHSAIIRTISVFDARNQLLATTNVRNSVTLQPISSDALSYNRLHLHHTNDALILHMPIVNDSEFMPGGATPVLPGTATPLGYLVIELDTSTIRLQQYQEIFIAALLLLLSLGAAVLFAYRLMRDVTTPIRNMVDTVDRIRRGQLDSRVEGYMLGELDMLKNGINSMAMSLTAYHEEMQQNIDQATYDLRETLEQMEIQNVELDLAKKRAQEAARIKSEFLANMSHELRTPLNGVIGFTRQTLKTPLNTTQTDYLLTIERSANNLLNIINDVLDFSKLEAGKLVLEDIPFSLHSTLDDVVMLLAHTAHEKGLELTLSIQNDVPEQFVGDPLRIQQIITNLLGNAIKFTEQGNIDIRVEKRRQEHHQVQLEVQIRDTGIGIAELQQSQLFQAFRQADTSISRRHGGTGLGLVITQRLVKEMGGDISFQSQLNKGSTFWFHITLPLNPHAMPTEPAYTMLQGKHLAYVEYHPIAAQATLDILSQTPLMVSYSPTFEQLPEGDFDILLLGIPVQYRNMLLDYTPRLRDICRRAPCVILALPSLAQMDAEQLKTFGVHACLSKPLAASRLLPLLQDSTLFQLSFLPDATTSHQSVVRHPARLPLSVMAVDDNPANLKLIGTLLEEQVDTIILCESGTDAISQAKMHQIDIILMDIQMPGMDGICASELIRQIPHHATTPIIAVTAQTMTGEREHLLRSGMDDYLAKPIDEQMLKSVLTRHARKDPLKRDRGNIAGLLNEHDDSQLSLDWALAQQQAANKPELARDLLQMLLDFLPEVRQKIENVLNGQTDDNIIELVHKLHGSCSYSGVPRLKRICRYLEQQLRNGVHASDLEPEWLELLDEIDNVNKAAQPHIKPLHSSL

SEQ ID NO: 2924 - protein, 627 aa, Pseudomonas aeruginosa
MCGIAGFWNITGTLLGDNARVARQMAAAIHHRGPDESGIWYEAPRAPILVHARLAVLELSPAGSQPMHSDCGRYVLIYNGEIYNHLALRARLSEAGVTHSWRGGSDTETLLACFAQWGVESTLKLTVGMFALALWDRQEKTITLARDRMGEKPLYWGWQNGVLFFASELKALKEHPLFRGDIDRDALALFLRYGYVPAPYSIYKGIGKLRAGSYLVLSERSLNETCEPAAYWSANAAIEEALSNPFQGTDAEAVDLLESQLRTSISDQMVSDVPLGAFLSGGVDSSTVVALMQQQSSRPIRTFSIGFDEPGYDEAVYAKAVAEHIGTDHTELYVNSKDALDVIPSLPKIYCEPFGDSSQIPTLIVSGLARQQVTVALSGDGGDELFGGYNPYQFTPRVWRMLERFPHSMRRFASAFAQDLPLPEKLGKLRDVFASRTAEELFYRLNSHWRNHEYPVIGAQGHTALLDTPERWPRVDSFQHWMMAMDVQGYMPDDILVKVDRAAMANSLETRVPLIDHRVFELAWRMPLHMKIRNGKGKWLLREVLYRHVSRELIERPKKGFSVPVSDWLRGPLKEWAESLLDERRLQQEGYLDSRLIRRIWNDHLAGRRDHSRRLWSVLMFQAWLES

SEQ ID NO: 2925 - protein, 539 aa, Oryza sativa (japonica cultivar-group)
MGNSLGCSASGERLVSAARDGDAVEARMLLELSPALARYSTFGGLNSPLHFAAAKGHLDIVTLLLEKGADVNVRNYCGQTALMHACRHGHWEVVQMLLLFRCNVTRADYLSGRTALHFAAHDGLVRCVRLLLADFVPSAPLEDGASSTVDGGECQTNSGSSPCSSLGLKFNESARLRYINKPADGGVTALHMAALNGHFDCMQLLIDLGANVSAVTFPYGTTANLIGAGSTPLHYAAGGGNAECCQLLLSKGASKLTLNCNGWLPIDVARMFGRRFLEPLLSPNSNSSIPAYQPSNYLALPFMSILNIARPDYVLCRIAIISETVKLGREFGLLHTVASVDDSDLCAVCLERSCSVAAEGCCHEFCIKCALYLCSTSNTRVEFTGPPGSIPCPLCRNGIMSFTKLPSTPTEGLKSSSALTFCNPCMLNTRSVDSPATISKAEIRRNRVAAVSSELVCPLTCSPFPSSALPTCRCSDDDPCDAIETQDGSEVQSPQPSHCASMEMDKREQQDLDRTSCSGMFWSRRSCHREEQCNAEINA

SEQ ID NO: 2926 - protein, 207 aa, Kluyveromyces lactis NRRL Y-1140
MSRKKNILKVIILGDSGVGKTSLMHRYVNDKYSQQYKATIGADFLTKEVIVNDDKVATMQVWDTAGQERFQSLGVAFYRGADCCVLVYDVTNGKSFDNVKSWRDEFLVHANVSSPETFPFVILANKVDVEESKKVVSSRSAQEQAKSLGNVPLFFTSAKDSINVQDAFEEIARSALQQSQSDADAYEDDLSEAINIQLDGEPSSCNC

SEQ ID NO: 2927 - protein, 345 aa, Bacillus cereus ATCC 14579
MNSKLFSPYTIKNVTLKNRIVMSPMCMYSSGNEDGRVTNFHLIHYGTRAAGQVGLVMVEATAVLAEGRISNNDLGIWDDNLIEGLHKTTTFIHDNGAKAAIQLAHAGRKAELDTNAFAPSAIPFNDKMKIPVEMNIQQIKETILAFQRAALRSKQAGFDVIELHGAHGYLINEFLSPLTNKRTDKYGGSPENRYRFLREIIDSVNEVWDGPIFVRISANDYHPDGLTVQDYVQYTKWMKEQGIDLIDCSSGAVVPAHIDVYPGYQVQYAKHIKEHTNIATGAVGLITTGSQAEQILNNNEADLIFIGRELLRNPYFPRIAANELGFELQEPHQYKRAPGKIHTNK

SEQ ID NO: 2928 - protein, 142 aa, Bacteroides fragilis NCTC 9343
MMPVRRSQNWLPSIFNDFFDNELMAKANATAPAINVIETDKAYKLELAAPGMTKEDFSVRIDEENNLVISMEKKAENKEEKKDGRYLRREFSYSKFQQTMILPENVDKDHISAQVENGVLNIELPKLSEEEVKKPDRTIEVK

SEQ ID NO: 2929 - protein, 435 aa, Dendrobium crumenatum
MSKEFGIEAPLSKIAVSKAHGEDSPYFAGWKAYEENPYDAVDNPNGVIQMGLAENQLSFDLLEEYLEQHPEASSWGSGMSSFRENALFQDYHGLQTFRKAMASFMEKIRGGRSKFDPDRIVLTAGATAANELLTFILADPGDALLVPTPYYPGFLRDLQWRTGVTIFPVHCHSSNGFQLTLASLESAYADAKASNFNVKGLLITNPCNPLGTVASLSLLQDIILFISDKNIHLISDEIYFGCVFSSTNLFSISDLITNAVSYQIHIVYSLSKDLGLPGFRVGALFSYNDRVVKTARRMSSFSLVSSQTQKLLAFMLSDEEFTVNYIKKNRERLRERYELVVGGLKEAGIECLKGEAGLFCWVNMEELMEDKTEEGELRLWKVMVDELKLNISPGSSCCCSEPGWFRVCFANTSRETLEVALRRLKDFARKKTKNI

SEQ ID NO: 2930 - protein, 380 aa, Yarrowia lipolytica
MLPPPRARCRHKSFRHPHPSHRHRHTPTHSRITRPTRTATMEDSDVLMRDINDDGLKPMDAMGAGGEGTFTELTPTTRGQLDAWIARLTECQPLSEDDVNELCNMAKGVLQKEENVQPVHAPVTICGDVHGQFHDLMELFKIGGPCPDTNYLFMGDYVDRGYYSVETVSYLVAMKVRYPNRLTILRGNHESRQITQVYGFYDECLRKYGNANVWRAFTSLFDYFPVTALVENQIFCLHGGLSPMIESIDNIRELNRFQEVPHDGPMCDLLWSDPDDRGGWGMSPRGAGFTFGADISEQFNHTNNLSLISRAHQLVMEGFSWAHEQQVVTIFSAPNYCYRCGNQAAIMEVDENLSNSFLQYDPCPRPGEPSVSRRTPDYFL

SEQ ID NO: 2931 - protein, 492 aa, Cicer arietinum
LHQVIKANDDLSREHHQFFLYQMLRALKYMHSANVYHRDLKPKNILANSNCKLKVCDFGLARVAFNDAPTSIFWTDYVATRWYRAPELCGSFSSKYTPAIDIWSIGCIFAEVLLGKPLFPGKSVVHQLDLITDLLGTPLPETITGVRNDNARKYLAGMRKKLPVPFEQKFPNADPLALRLLQRLLAFDSKNRPTAEEALADPYFKGLAKVEREPSCKPISKLEFEFERRRITKDDVRELIYREILEYHPQLFKDYMNGTEGANFLYPSAIDQLRKQFAYLEENDGKSGSVLPPERKHVSLPRSTVYSGSILPSNQRTPALYEKKKMVEETSKSWGAAGENSRNQLRGVQPPPRVPAKPGRVVGPVLHYEDERITKSSNDPRIVIQNTTQAVSSRDAFQTHPPNTKTTSGIHKEQGKNEFPSLQSNLHATATTDLNNNPYRRRVINNNLNDPVTTIDAKMLQAQSHLGVVGAAAVAVATHSHRYSRGIQYGLF

SEQ ID NO: 2932 - protein, 384 aa, Legionella pneumophila subsp. pneumophila str. Philadelphia 1
MMFGFLNMTLWGYLLAGFVLTHITTTAVTIYLHRYQTHRALTLHPLVSHFFRFWLWLTTGMTTAEWVAIHRKHHANTDMEGDPHSPQVFTLKKVFWQVPELYREASKDKDMIKKYSSGTPNDWIERKLYSPHANKGIFLMLTLNLFLFGIPGLTLWAIQMMWIPLVAGVVNGIGHYWGYRNHESSDSSTNVFPWGLLIAGEELHNNHHTFASSAKFSIKWWEFDLGWFYIRCLSFLKLAKVKKLPPKLIIDKNKSHIDVDSVKAILGNRFQVISDYYKLVIFPTLRDMQYRIKNRDLKNARHLFKKPNEQLSHADQLRLKTLLKQHDNLQAVHNYRELLQQIWLKTSLSNKDLLNLIQKWCSQAEESGLHVLRQFASQLKSYSL

SEQ ID NO: 2933 - protein, 616 aa, Candida albicans
ARASADQQQHQHNHHHHHHHHHHNENQSQQQVPIDPAANPANRIGRYQILKTLGEGSFGKVKLAQHLGTGQKVALKIINRKTLAKSDMQGRVEREISYLRLLRHPHIIKLYDVIKSKDEIIMVIEFAGKELFDYIVQRGKMPEDEARRFFQQIIAAVEYCHRHKIVHRDLKPENLLLDDQLNVKIADFGLSNIMTDGNFLKTSCGSPNYMPAPEVISGKLYSSVQKLMIWSAGVILGMSCCVVDYHSMTSSIPALFKKISNGVYTLPNYLSAGAKHLLTRMLVVNPLNRITIHEIMEDDWFKQDMPDYLLPPDLSKNKNSKIDVDEDVIRALSVTMGYDRDCKIVNVIEKANKQVAAGNSSSQQSKSSNEILDAYLLMKENHRLVKDLKKSKSENIESFLSQSPPPSPFPNAGSTSSAPGVQQSLTYQTLATVPDLSTLPNSTIAILPTSLPSIHRAYMAETKQNGDPSQQHAPPPTKKSKTRWHFGIRLRSYPLDVMGEIYRALKNLGAEWAKPTEEELWTIRVRWKYDTSAQFECGSAPNLMKMQIQLFQLEPNNYLVSFKFSGWESAHGNAGTDSPQSHRQQDLDEVGSFSAYPFLHLATRLIMELAVNSQSG

SEQ ID NO: 2934 - protein, 244 aa, Zea mays
  misc_feature (72)..(72): Xaa can be any naturally occurring amino acid
  misc_feature (186)..(186): Xaa can be any naturally occurring amino acid
  misc_feature (208)..(208): Xaa can be any naturally occurring amino acid
  misc_feature (211)..(211): Xaa can be any naturally occurring amino acid
MGRGRVELKRIENKINRQVTFAKRRNGLLKKAYELSVLCDAEVALIVFSNRGKLYEFCSGPSITRTLERYEXNSYAGPDTAVQNKENELVQNSRNEYLKLKAKVDNLQRTQRNLLGEDLGSLGVKELDQLEKQIDSSLSHIRSTRTQHMLDQLADLQRREQMMCEANKCLRRKLEETSNQVHGQVXEHGANLLLGYERHSSPQQAPAXLEXGLFFHPLEAAAEPTLQIGFAPEHMNNFMPAWLP

SEQ ID NO: 2935 - protein, 235 aa, Capsicum annuum
MACTTVTCSSTSPLVSNVGVGGTCKVTAPCSVFFPSMRRPASTLVARATGDTKTHQWTCTCQNGQGGNTKALLFEHVLGGLALDVSPFGLLDPMSPMRTMRQMMDTMDRLFEDTMTFPGRNRASGSGEIRAPWDIHDGENEIKMRFDMPGLSKEDVKVSIENDVLVIKGEHKKEEGGNDEHSWGRNISSYDTRLSLPDNIEKDKIKAELKDGVLFISIPKTKVEKKVIDRACQLN

SEQ ID NO: 2936 - protein, 568 aa, Gibberella zeae PH-1
MSLAQHSESASPVPIIETDDQGNPIKSSNGYFPSKGKSSTLVDNMAHLSVVGGAHRGDDSDAASVRSTSSRASRRPEMKLASYQDEYTTSVYGSRFAGMDLPRHHMPENEMPRDIAYRMIKDDLSLDNNPMLNLASFVTTYMEDEAEKLMAESFSKNFIDYEEYPQSADIQNRCVNMIGDLFHAPPGSSVGTSTVGSSEAIMLGVLAMKRRWKNRRIAEGKSTEHPNIVMSSAVQVCWEKATRYFEIDEKLVYCTPDRFVMDPEQAVDLCDENTIGMCAILGTTYTGEYEDIKAINDLLVERNLDVPIHVDAASGGFVAPFVVPDLEWDFRCEKVVSINVSGHKYGLVYPGVGWVIWRSPEFLPQELVFNINYLGADQSSFTLNFSKGASQVIGQYYQLIRLGKHGYRAIMSNLTRTADYLTETLENMGFVIMSERSGAGLPLVAFRFKTVDEGGDPERHYDEFALAHHLRSRGWVVPAYTMAPNSGVKMLRVVVREDFTKSRCDQLICDVKLCHGLLKETDQESIKKREEYIKNHIVTMGRGKHSHPVYKDEQHSLQGKHGKTHAIC

SEQ ID NO: 2937 - protein, 278 aa, Leptospira interrogans serovar Copenhageni str. Fiocruz L1-130
MNNKENPLKQTIMLNNGISMPILGLGVWKTKSGKECKEAVLNALEAGYRHIDTARIYDNEVDVGQAIRESGIPRKEIFITTKLWNADQGSDKTRKALENSLDRLGIDFVDLYLIHFPVTSKRMDSWKELEKLYHDKLCKAIGVSNYTIIHLTELLKNSQITPAVNQVEFHPFLNQIHLLEYCKKHKIQLEAYSPLAHGQKIEDPTIAKIAQKYDKTPAQILIRWAIEQKIVVIPKSIKKERIIENSKVFDFAISEEDMKILNSLDEDFRTCWDPSEVV

SEQ ID NO: 2938 - protein, 368 aa, Pseudomonas putida KT2440
MSLLLEPYTLRQLTLPNRIAVSPMCQYSAIDGLANDWHLVHLGCRAVGGAGLVISEAVAVTADGRITAEDLGLWNDDQIVPLQRITRFITAQGAVPGIQLAHAGRKASTYRPWLGKQGSVKLEDGGWQPVGPSKIAFDPQHTPPRELSKDEIQDVIDAFVASTERALKAGFKVVEIHAAHGYLLHQFLSPLSNQRRDEYGSCFENRIRLTLQVVEAVRKVWPAELPLFVRVSATDWVEDGWNPDETVELARRLRVLGVDLIDVSSGGTSVNAEIPTGPGYQTRFAERVRKEAEIATGTVGMITEPAQAEHILRTGQADVIFLARELLRDPYWPLHADDDLGGNKATWPAQYQRATSRANPIHESDLRD

SEQ ID NO: 2939 - protein, 481 aa, Bacillus subtilis
MSSNKLTTSWGAPVGDNQNSMTAGDRGPALIQDVHLLEKLAHFNRERVPERVVHAKGAGAHGYFEVTNDVTKYTKAAFLSEVGKRTPLFIRFSTVAGELGSSDTVRDPRGFAVKFYTEEGNYDIVGNNTPVFFIRDAIKFPDFIHTQKRDPRTHLKNPTAVWDFWSLSPESLHQVTILMSDRGIPATLRHMHGFGSHTFKWTNDKGEGVWIKYHFKTEQGVKNLDVNTAAKIAGENPDYHTEDLFNAIENGDFPAWKLYVQIMPLEDANTYRFDPFDVTKVWSQKDYPLIEVGRMVLNRNPENYFAEVEQATFSPGTLVPGVDVSPDKMLQGRLFAYHDAHRYRVGANHQALPINRSRNEVKNYQRDGQMRFDDNGGRSVYYEPNSFGGPKESPEDKQAAYPVSGFADSVSYNHHDHYTQAGDLYRLMSEEERARLVANIVSAMKPVEKEEIKLRQIGHFYKADPEYGRRVAEGLGLPSPK

SEQ ID NO: 2940 - protein, 250 aa, Oryza sativa
MRVAATTRPASSSAAAPLPLFLLLAVAAAAAALFLVGSASLAMAGHVLGGAHDAPSAANSVETDALARFAVDEHNKRENALLEFVRVVEAKEQVVAGTLHHLTLEALEAGRKKVYEAKVWVKPWLDFKELQEFRNTGDATTFTNADLGAKKGGHEPGWRDVPVHDPVVKDAADHAVKSIQQRSNSLFPYELLEIVRAKAEVVEDFAKFDILMKLKRGNKEEKFKAEVHKNLEGAFVLNQMQQEHDESSSQ

SEQ ID NO: 2941 - protein, 608 aa, Oryza sativa
  misc_feature (298)..(298): Xaa can be any naturally occurring amino acid
MAGSERTVVWFRRDLRIDDNPALASAARDGAVLPVFIWCPADEGQFYPGRCSRWWLKQSLPHLSQSLESLGCPLVLIRAESTLEALLRCIDSVGATRLVYNHLYDPVSLVRDDKIKKELSALGISIQSFNGDLLYEPWEIYDDSGLAFTTFNMYWEKCMELPIDASPSLAPWKLVPVPGLESVRSCSVDDLGLESSKDEESSNALLMRAWSPGWRNAEKMLEEFVSHGLLEYSKHGMKVEGATTSLLSPYLHFGEVSVRKVYQLVRMQQIKWENEGTSEAEESIHFFMRSIGLREYSXDEERFKSWRQGMTGYPLVDAGMRELWATGWTHNRIRVIISSFAVKFLLIPWTWGMKYFWDVLLDADLESDILGWQYISGSLPDGHELSRLDNPEVQGQKYDPDGVYVRTWIPELARMPTEWIHHPWDAPSCILEVAGVELGFNYPKPIVDLHIARECLDDSISTMWQLDTAEKLAELDGEVVEDNLSNIKTFDIPKVVLRETSPCALPIDQRVPHASSKDHNLKSKVLKASNRSSICVDMIRSSKMEATSSVANSPVSRKRSFCETAFHVPSYSSSAEVHSHIQDHGGSLVGPSRYLLQEAGRNYVDEPT

SEQ ID NO: 2942 - protein, 135 aa, Brassica napus
MDARMFGLETPRVAALHHLLDVPDGDKAGGGATRTYVRDARAMAATPADVKELAGAYAFVVDMPGLSTGDIRVQVEDERVLVISGERRREEREDAKYLRMERRMGKFMRKFVLPDDADVAKAPPLGGDRVLTVTV

SEQ ID NO: 2943 - protein, 372 aa, Triticum aestivum
MSKQGGIGSTVPLLTPYKMGAFDLSHRVVLAPLTRTRSYGNVPQPHAILYYQQRTTKGGLLIAEATGVSDTAQGYKDTPGIWTKEQVEAWKPIVDGVHAKGGIFFCQIWHVGRVSNHTYQPNGQAPISSTDKPLKPMVIDKHIVADFATPRPLETDEIPMVINDFRVAARNAIEAGFDGVEIHGAHGYLIDQFFKDQVNGRTDKYGGSLENRCRFGLEVVQAVVDEIGAGKVGMRLSPFANYWESSDSNPGALGLYMAHALNKIGILYCHTVEPRMITFVDKVETPNSLRAMRDAFKGTFIVAGGYGREDGNAAVSSGYADLVAYGRLFLSNPDLPQRFEIDAPLNKYNRDTFYISDPVVGYTDYPFHLSDV

SEQ ID NO: 2944 - protein, 465 aa, Symbiobacterium thermophilum IAM 14863
MVARLWRSFAASLLALFLTAALWTGPAYAASDPAHWGDASAELWMVYHVVQRYHVNGADLDAFLEGAVRGGLDALGDPYTEYLGPQDYQSFLDSVDGNLTGIGVYLEKVGDYITIVRPIRSSPAEAAGLRAGDRIVAADGVSLVGESIEKTQQLVRGEPGTKVVLTIERPDEGRRFDVTITRAFIHVPQVDYRMLEDGIGYLELSGFGQQAAEEFFAAVAELKEAGATRLVLDLRYNSGGWVASALEIAEAYVPAGEPIMFEITRDERRVYRSEGSPLGLPTAVLVSEYTASAAEILAGAVQDYGTGVLIGTQTFGKGTVQELVDLPGGGAVKVTTAEYLTGRQRRVHQVGLTPDLVVEPYQPPVHLQTPLVADRVMTTGHVGLDVLGLQERLALLGYRTDRDGYFKGQTTLAVLQFARDHGLNEVPMVDKAFVEALNAAVAAKLAAAEWPDTQLEAAIRYLKEK

SEQ ID NO: 2945 - protein, 543 aa, Gluconobacter oxydans
MAAKDVKFGADARERMLRGVDILANAVKVTLGPKGRNVVLDKSFGAPRITKDGVSVAKEIELADKFENMGAQMVREVASKTNDIAGDGTTTATVLAQAIIREGAKAVAAGMNPMDLKRGIDKAVGVVVDQLKSNTKKITSPEEIAQVGTISANGETEIGEMIASAMQKVGSEGVITVEEAKGLHTELDVVEGMQFDRGYISPYFVTNPEKMTADLDSPYILIHEKKLSSLQPMLPLLESVVQSGRPLVIIAEDVDGEALATLVVNKLRGGLKIAAVKAPGFGDRRKAMLEDIAILTGGQVISEDIGIKLESVTLEMLGRAKKIHIEKENTTIVEGAGNSDDIKGRCNQIRAQIEETTSDYDREKLQERLAKLAGGVAVIRVGGSTEVEVKERKDRVDDALHATRAAVEEGIVPGGGTALARASSALKGLTFDNDDQRVGGEIVRKALQAPLRQIAFNAGEDGAVIAGKVLENEGYVFGFDAQKGEYKDLVAAGIIDPTKVVRTALQDAASVGGLLITTEAMVAERPEKKAPAAAPGGMGDMDF

SEQ ID NO: 2946 - protein, 404 aa, Yersinia pseudotuberculosis IP 32953
MSPIEKSSKLDNVCYDIRGPVLKEAKRLEEEGNKVLKLNIGNPAPFGFDAPDEILVDVIRNLPTAQGYCDSKGLFSARKAIMQHYQARDIRDLTVEDIYIGNGVSELIVQSMQALLNLGDEMLVPAPDYPLWTAAVSLSSGKAVHYMCDEESGWFPDLDDIRSKITPRTRGIVIINPNNPTGAVYSKELLLEIVEIARQNDLIIFADEIYDKILYDDAQHHSIAALAPDLLTVTFNGLSKTYRVAGFRQGWMVLNGPKKHAKGYIEGLEMLASMRLCANVPMQHAIQTALGGYQSISEFIQPGGRLYEQRDRAWELINQIPGVSCVKPQGALYMFPRIDQKRFNLKDDQKLVLDLLLQEKVLLVQGSAFNWPYPDHVRIVTLPRVDELEMAVRKLGRFLETYHQ

SEQ ID NO: 2947 - protein, 334 aa, Pisum sativum
MDGREAMAFSGGPGSYYLHRGGVEAAGSGSGGFQVPPGFRALPNNGIIAQPNVRAQGGNGDTSSMFSLEPQSHADFNHDISVGASSGAPSSEPVKKKRGRPRKYGPDGSVSLKLSPMSAPANSTQDSGTPSEKRGRGRPRGSGRKQQLAALGDWMTSSAGLAFSPHVITIAAGEDIAAKLLLLSQQRPRALCILSGTGIASKVTLRQPASTNAGVTYEGKFQILSLSGSYLVSEDGGPTNRTGGISVSLSSRDGHVIGGSVAMLIAGSPIQLVVCSFVYGGGSKVKTKQGMITNGESSEPHNDNLGSPASAPPDQNYISSPTGMWPGSQPSDMK

SEQ ID NO: 2948 - protein, 347 aa, Pisum sativum
MDGREAMAFSGGPGSYYLHRGGVEAAGSGSGGFQVPPGFRALPNNGIIAQPNVRAQGGNGDTSSMFSLEPQSHADFNHDISVGASSGAPSSEPVKKKRGRPRKYGPDGSVSLKLTPMSAPANSTQDSGTPSEKRGRGRPRGSGRKQQLAALGDWMTSSAGLAFSPHVITIAAGEDIAAKLLLLSQQRPRALCILSGTGIASKVTLRQPASTNAGVTYEGKFQILSLSGSYLVSEDGGPTNRTGGISVSLSSRDGHVIGGSVAMLIAGSPIQLVVCSFVYGGGSKVKTKQGMITNGESSEPHNDNLGSPASAPPDQNYISSPTGMWPGSQPSDMKSAPAHTGIDLTRG

SEQ ID NO: 2949 - protein, 479 aa, Oryza sativa
MLRAAARALTVSSLNPKVLALADHHLGGLVARRAQLVTVTVNILIVERKKILQADTSMQQELDANPASHPFSEVLALCNHPHLLDRSEASFMFSSDAITRAREIVGFIPGKTTGGYSHCQANSIVSEFRANADKYGNELSSNLTIFDRVHMMMHLLIRGKKDGILCPIPSHSLYTDSMVLRGATLVPYYLDESRGWSVNISDLKKQLDGARAKGIDVRGLVVVNPGNPTGQVLVEENQCEIVELCKNECLVLLADEVYQENIYTDQKKFNSFKKVARSIGYGEGDISLVSFHSVSNGYYGECGRRGGYMEVTGFSSEVRGEVYKVASLSACSNISGQILMSLVMNPPKVGDESYPSYRAERDSILSSLSCCAEAMVSTFNSMEGMTCNKAEGGISVFPSVRLPPRAIEAAEAMNTEPDVFYALRLLESTGIVVVPGSVFGQVPGTWHFRCTILPQEEKTRQIISRFNVFHEAFMEEFRS

SEQ ID NO: 2950 - protein, 740 aa, Thiobacillus denitrificans ATCC 25259
MRKLVEATQAGSEASVALAPSAPIQRLQAGLHHDPFEVLGVHVQPDGSKLVRAFLPAAEAVEVAGVRMTRVPGTDCFERLLPPGTALEAHPLLTWQDKRSGAWQRLRSPYSFAPQLGEMDLYLFGEGRHFEIWKVLGARVKTVDGVTGCLFAVWAPAVLRVSVVGDFNDWDGRRHPMRCRGVSGVWELFIPGLEAGHAYKYEILGRHGERVTKTDPYARQMFLRPETTSRVPDERPYAWGDAEWLAARTRFDWQHRPMSVYEVHPGSWRRRADGSFYSWRELTAELIPYVRDLGYTHIELLPVAEHPFDASWGYQVSGYYAATARFGSPDDLRAFVDACHQAGLGVLLDWVPGHFPKDDFALARFTGEPLYEHADPRRGEHQDWGTLVFDFGRNEVRNFLVANALYWLEEFHIDGLRVDAVASMLYLDYSRRHGEWLPNQHGGRENLEAIHFLHEVNAEVHARFPGAITIAEESTAWPAVSRPIELGGLGFSMKWNMGWMNDTLDYIEKEPVYRKYQHNQLTFSQMYAWSENFVLPLSHDEVVHLKKSLLDKMPGDRWQRFANLRLLYAWQYAHPGKKLLFMGGEFGQWNEWREAGQLDWVLLGFPEHDGIRALLRDLNRLYRDEAALHFWDFDPRGFRWIDCHDADQSVLSLVREGPDGAPPIVVLLNFTPVPRHGYRIGVPRAGAWCEVLNSDSMYYGGSNLGNGKPLYPAAVPWMGFGQSIEVTLPPLGAIFLKPCP

SEQ ID NO: 2951 - protein, 558 aa, Bacteroides fragilis NCTC 9343
MCGIAGIFNIKIQSRELRNKALRMARKIRHRGPDWSGMYCGGSAILAHERLSIVDPQSGGQPLYSSDRKQVLAVNGEIYNHRDIRAQYAGRYEFRTGSDCEVILALYRDKGIHFLEELNGIFAFALYDEEKDEYLIARDPIGVIPLYIGKDAEGHVYFGSELKALEGFCDEYEPFLPGHYYHSKEGTMKRWYTRDWMEYKEENDKQADSRSPTRQIQDALENAVHRQLMSDVPYGVLLSGGLDSSVISAIAKKYAAKRIETDGASDAWWPQLHSFAIGLKGAPDLIKAREVAEYIGTVHHEINYTLQEGLDAIRDVIYFIETYDVTTVRASTPMYLLARVIKSMGIKMVLSGEGADEIFGGYLYFHKAPDARAFHEETVRKLSKLHLYDCLRANKSLAAWGVEGRVPFLDKEFLDVAMQLDPEIKMAPGKVIEKKVLREAFADMLPSGIAWRQKEQFSDGVGYSWIDTLKEITATAVSDEQMAHAAERFPIHTPMNKEEYYYRSIFEEHFPSESAARSVPSIPSVACSTAEALAWDTAFKNLNDPSGRAVKGVHEEAY

SEQ ID NO: 2952 - protein, 746 aa, Bradyrhizobium sp. BTAi1
MMGASFRIRLRLRRFTRRHHTLFTILRSAMIFMAGFGGAYGFIKASLSETSGYNPHAFAIGASFLFALACVGLATLSMRLRFMRKKMHKLALHNEVLADRNWELQEAEQRARSLFEQQGDLIVMRESDGTIIFVNDAYCRMAGLDRENLLGSQFSFDLLEQGDSALEPSGTRVHDQRIDSAIGPRWIAWREALVRSDAGHPAVQQCVGRDVTDRTETERALAEARDQANAANRAKSRFLAMASHEIRTPLNGILGMSGLLLETQLTPEQTTYAKAVRSSGEALMSLINELLDYSKIEAGKLALEAQPFALTALIEEITELLAPRAQGKQLEIAAYLDERLPTWVTGDAARLRQVLLNLAGNAIKFTSKGGVALIAEPGIWPNEISFQVRDTGIGIAADAQERIFREFEQADDSVARSFGGTGLGLAISDRIVKRMGGRIALQSQPGAGSTFEVSVPLPPALERGEQNSFRGPDLTGQSIMLIAPAGLQAELIERRLQNWGAQTCLVAETEIAAALLPERAWHAVLIDDAIGSEAARRLGEAAHHHTTRLIVLVTPTSRHELAPAAPFNGYLVKPLRAASLAARVSFDLDAGAAFAEHPIPTIAPSIAARAGTGLAILVAEDNDINALLMRSLLTKLGHHADIAVHGEAALDSWLAARAAGTPYDLILMDVQMPRLDGIAATRRIRAHEASEPGRRTPILALTANALVEDRYACFEAGMDGFLVKPIDRDKLDEALANLAAARQVAA

SEQ ID NO: 2953 - protein, 526 aa, Arabidopsis thaliana
MNDHIHRVPALTEEEIDSVAIKTFERYALPSSSSVKRKGKGVTILWFRNDLRVLDNDALYKAWSSSDTILPVYCLDPRLFHTTHFFNFPKTGALRGGFLMECLVDLRKNLMKRGLNLLIRSGKPEEILPSLAKDFGARTVFAHKETCSEEVDVERLVNQGLKRVGNSTKLELIWGSTMYHKDDLPFDVFDLPDVYTQFRKSVEAKCSIRSSTRIPLSLGPTPSVDDWGDVPTLEKLGVEPQEVTRGMRFVGGESAGVGRVFEYFWKKDLLKVYKETRNGMLGPDYSTKFSPWLAFGCISPRFIYEEVQRYEKERVANNSTYWVLFELIWRDYFRFLSIKCGNSLFHLGGPRNVQGKWSQDQKLFESWRDAKTGYPLIDANMKELSTTGFMSNRGRQIVCSFLVRDMGLDWRMGAEWFETCLLDYDPCSNYGNWTYGAGVGNDPREDRYFSIPKQAQNYDPEGEYVAFWLQQLRRLPKEKRHWPGRLMYMDTVVPLKHGNGPMAGGSKSGGGFRGSHSGRRSRHNGP

SEQ ID NO: 2954 - protein, 368 aa, Streptococcus pyogenes MGAS10394
MHYLHRRKGSVMVSVMWFRRDLRIDVQKALAHAIASQSPTLCVFQFNKEQLNLLHSRNQSSFITSVLAFRKLLKCEGIDLYLMYGDLMTCFEQLLTQLKDWTDVYFNYDESGYGRLRDQKAAQFFKKNGIAVHTYQDHYLHGSQEIINQSGQPYKVFTPYYRIWQNYPKETPIKVELSQGRWLNLETPDDVLRTVESIKDEKYQDVATFDEASKQLNRFIQDQLAAYHANRDFPAQLGTSRLSPFLRIGAIGIRTVYHAVRQAPNSLGQATFLKELAWRDFYNMVYVAYPDQKTQPIQKAFSQIEWVNNPDWFQLWKEGKTGYPIVDAAMLQLQKTGWMHNRLRMIVASFLTKDLLCDWRLGEQYFQQ

SEQ ID NO: 2955 - protein, 276 aa, Streptomyces coelicolor A3(2)
MISIPAYTLNDGTSLPALGLGTWPMKDEEAERAVRAALETGYRLIDTATNYRNETGVGRGVASAGLPREEIVVTTKLPGRHHGYEETLASFEESRARLGLEYVDLYLIHWPLPRVDKYVDSWKAMVKLREDGLVRSVGVSNFTAEHIERLERETGVLPSVNQIELHPLLPQDELRAYHERKGIRTESWSPLGRGSDLLDDPAVAAVAAAHGVTPAQAVLRWHTQLGAVPIPKSADPARQRANLDVFGFELDAEQLRAVADRVHRRIGGDPEVHEEF

SEQ ID NO: 2956 - protein, 353 aa, Burkholderia sp. 383
MPTLFDPVTLGDLTLPNRIVMAPLTRSRAGATRVPNALMARYYAERATAGLIITEATSVTPQGVGYADTPGIWSDEQVEGWKQVTQAVHAAGGRIVLQLWHVGRISDPVFLNGDLPVAPSAIAAGGHVSLVRPQRPYVTPRALELDEIPGIVAAYRKGAENAKAAGFDGVEIHGANGYLLDQFLQDSTNRRTDAYGGPVENRARLLLEVVDAAIDVWGAGRVGVHLAPRGDAHTMGDSDPAATFGYVARELGRRKIAFIFTRESYSGDHLSPRLKEAFGGPLIANEQFTLDTAQATLASGNADAIAWGKLFIANPDLPRRLELGAALNKPVPETFYAEGETGYTDYPALSDAA

SEQ ID NO: 2957 - protein, 324 aa, Magnaporthe grisea
MASPTMKLNNGLDMPQVGFGLWKVENSVCADVVYNAIKAGYRLFDGACDYGNEVECGQGVKRAIDEGLVKREELFIVSKLWNTFHDGERVEPIVKKQLADWGIEYFDLYLIHFPVALEYVDPSVRYPPGWHYDDAGTEIRPSKASIQETWTAMEKLVDAGLSKAIGVSNFQAQLLYDMLRYARIRPATLQIEHHPYLVQQRLIEACKTEGIVVTAYSSFGPASFKEFNMEHAEALTPLLEEPTIVKLAEKYGKDPGQVLLRWATQRGLAVIPKSSREKTMKSNFEAVGWDMEDSDIKTISALDKGIRFNQPANYFSTDKLWIFG

SEQ ID NO: 2958 - protein, 508 aa, Vibrio vulnificus YJ016
MHMSKSFLLISMGLASISVHAQTLTRDNGAPVGDNQNSITAGENGSVLLQDVHLIQKLQRFARERIPERVVHARGTGAHGEFVASGDFSDLTLSSPFAQSGKVTPVFVRFSTVIHSKGSPETLRDPRGFATKFYTDQGNWDLVGNNLPVFFIRDSIKFPDMVHSLKPSPVTNLQDPNRFFDFFSSQPSATNMLTWVYTNLGTPASYRTMDGFGVHAYKWINQKGEVNYVKFHWKSQQGVKSLRPAEVTKVQGEDFNHLTNDLYTQINAGNFPKWDLYVKVLSPKALSKLDYNGLDATKVWLDVPEKKVGTMTLNRVPDNFFLETEQSAFAPSNIIPGIEPSEDRLLQGRLFAYADTQLYRLGANLFQLPVNSPKSPVANHNQDGPSNNSTGLGNVDSLDVNYEPSRLVNLTVDKQARAVETPLSGHVQQQAIRNPRDFFQAGVLYRSLSEQDKADLIHNLSGDLNKVNDAEVKAIMVSYFYRADKEYGTRLAKATDVNLKQVTKLASM

SEQ ID NO: 2959 - protein, 335 aa, Arabidopsis thaliana
MKFGETFTEYLHGEEEWFLEKCRFVEYKKLKKVLKKCKTCNSTKSDDGQIIPSATSSSLSDSCECKACPWCDQMFFEELMKEATDIAGFFRSRVRHLLHLHVATGMQRYMIRLRRCFTDEKQALVQEGQILIQYITMNAIAIRKILKKYDKVHSSENGKNFKLKMRAERIELLHSPWLIELGAFYLNSGLDNVGNFKNSFGRVACENLNEDQPVLKLMLPNSIELEYDLTCAICLETVFNPYALKCGHIFCNSCACSAASVLIFQGIKAAPRHSKCPICREAGVYAEAVHMIELHLLLKTRSKEYWKERMMNERSEMVKQSKMFWNEQTKHMIGY

SEQ ID NO: 2960 - protein, 540 aa, Rauvolfia serpentina
MATQSSAVIDSNDATRISRSDFPADFIMGTGSSAYQIEGGARDGGRGPSIWDTFTHRRPDMIRGGTNGDVAVDSYHLYKEDVNILKNLGLDAYRFSISWSRVLPGGRLSGGVNKEGINYYNNLIDGLLANGIKPFVTLFHWDVPQALEDEYGGFLSPRIVDDFCEYAELCFWEFGDRVKHWMTLNEPWTFSVHGYATGLYAPGRGRTSPEHVNHPTVQHRCSTVAPQCICSTGNPGTEPYWVTHHLLLAHAAAVELYKNKFQRGQEGQIGISHATQWMEPWDENSASDVEAAARALDFMLGWFMEPITSGDYPKSMKKFVGSRLPKFSPEQSKMLKGSYDFVGLNYYTASYVTNASTNSSGSNNFSYNTDIHVTYETDRNGVPIGPQSGSDWLLIYPEGIRKILVYTKKTYNVPLIYVTENGVDDVKNTNLTLSEARKDSMRLKYLQDHIFNVRQAMNDGVNVKGYFAWSLLDNFEWGEGYGVRFGIIHIDYNDNFARYPKDSAVWLMNSFHKNISKLPAVKRSIREDDEEQVSSKRLRK

SEQ ID NO: 2961 - protein, 678 aa, Pseudomonas fluorescens Pf-5
MNNDPLLQPYRLKHLTLRNRIITTSHEPAYPEEGMPKKLYRAYHVERAKAGVAMTMTAGSAAISRDSPPVFNNILAYKDEVVGWMKDLTDECHEHGAAVMIQLTHLGRRTRWDKGDWLPVVSPSHNQEPAHRAFPKKLEIWDIERIIRDYADAAERMQAAGLDGIELQAYGHLMDQFWSPLTNELEGAYGGSLHNRLRFTFEVLSAIRQRVGPEFIVGIRYTGDEVLAGGLEKEEGLHISQLLKDSGMVDFLNVIRGNIATDAGLTDIIPIQGMRNAPHLDFAGEIRALTGFPTFHAAKIPDVATARHAIASGLVDMVGMTRAHMTDPHIVRKIIENREDEIRPCVGANYCLDRIYNAGAAYCIHNAATGRETSMPHEVPKAAHPRKVLIIGAGPGGLEAARVAGERGHEVLVLEVADQPGGQVRLTAQSERRKEMISIIDWRMAQCERLGVKFRFNTWADAAMVLDENPDVVIVATGGLPHTEVLHSGNQWLVSSWDIISGDVKPGRNVLVYDDAGDHAGLQAAEFIARSGARTEIMTPDRSFAPEVMGMNLVPYMRSLQQLDTTFTVTYRLKAVERQGEQLLATIGTDYSDLEKTRLVDQIVVNHGTRPLDELYFELQPMATNEGAVEYKDLIAGTAQNLVTNPQGRFQLFRIGDAVSSRNTHAAIYDALRLVKDL

SEQ ID NO: 2962 - protein, 355 aa, Ustilago maydis 521
MPQYPSAAPGQKTFKLNTGAEIPVIGLGTWQSAPGEVAKAVESAIKAGYRHIVSMLTSLLTLTLGYVALHPLYIPFLAKDAAWIYGNENEVGQGIKASGVPRSELFVTTKIWCTYHRQPEACLDESLQRLGLDYVDLLLVHWPVPLVKRGDEKIPLNEDGSRAIDRDWSPEQTWELMEKLPATGKTKAIGVSNWSIAFLDKLLAKAKIVPAANQVELHPFLPQHELVKYCHDKGILPQAYSPLGSSGGPVLQDERVQSIAKAHKADPAQVVISWAAQRGVVALPKSVTPSRIETNGKLIVLSDEEMLELNELHKQEGKAVRLVKPNSDICSPPSETCLAPLNVADEALSYLRNSD

SEQ ID NO: 2963 - protein, 207 aa, Brassica oleracea
MAMLGGVRDLPANENSVEVESLARFAVDEHNKKENALLEFARVVKAKEQVVAGTMHHLTLEIIEAGKKKLYEAKVWVKPWLNFKELQEFKPASDDGAPSTTITPSDLGCKKVSDENASGWREVPGDDPEVQHVADHAVKTIQQRSNSLFPYELQEVVHANAEVTGEAAKYNMVLKLKRGEKEEKFKVEVHKNHEGVLHLNHMEQHHD

SEQ ID NO: 2964 - protein, 222 aa, Brassica napus
MGQGSFIYSFVARGTMVLAEYTEFTGNFPSIAAQCLQKLPSSSNSKFTYNCDHHTFNFLVEDGFAYCVVAKDALSKQISIAFLERVKADFKKRYGGGKASTAIPKSLNKEFGPVMKEHMKYIVDHAEEIEKLIKVKAQVSEVKSIMLENIDKAIDRGENLTVLTDKTENLRSQAQEYKKQGTQVRRKLWYQNMKIKLVVLGILLLLVLIIWLSVCHGFNCTD

SEQ ID NO: 2965 - protein, 241 aa, Oryza sativa
MGRGKIVIRRIDNSTSRQVTFSKRRNGLLKKAKELSILCDAEVGLVVFSSTGRLYEFSSTNMKTVIDRYTNAKEELLGGNATSEIKIWQREAASLRQQLHNLQESHKQLMGEELSGLGVRDLQGLENRLEISLRNIRMRKDNLLKSEIEELHVKGSLIHQENIELSRSLNVMSQQKLELYNKLQACEQRGATDANESSSTPYSFRIIQNANMPPSLELSQSQQREGECSKTAAPELGLHLP

SEQ ID NO: 2966 - protein, 546 aa, Corynebacterium diphtheriae NCTC 13129
MAKIIAFDEEARRGLEKGLNTLADAVKVTLGPKGRNVVLEKSWGAPTITNDGVSIAREIELEDPYEKIGAELVKEVAKKTDDVAGDGTTTATVLAQALVREGLRNVAAGSNPMGIKRGIELATAKVTEALLASAKEVETEEQIAATAGISAADPAIGEQIAKAMYAVGGGKLNKESVITVEESNTFGVDLEVTEGMRFDKGYISGYFATDMERLEAVLEDPYILLVSGKISNIKELLPLLEKVMQTGKPLLIIAEDVEGEALSTLVVNKIRGTFKSVAVKAPGFGDRRKAQLQDMAILTGSQVISEEVGLSLETADLPLLGRARKVVVTKDDTTIVEGAGDSAQIDGRVNQIRTEIENSDSEYDREKLQERLAKLSGGVAVIKVGAATEVELTERKHRIEDAVRNAKAAVEEGIVAGGGVALLQAAHVLANDLDLTGDEATGVKIVREALSAPLKQIALNAGLEAGVVADKVSHLPAGEGLNAATGEYVDLMAAGINDPVKVTRSALQNAASIAALFLTTEAVVADKPEPAAPAMPGADEMGGMGF

SEQ ID NO: 2967 - protein, 410 aa, Campylobacter jejuni
MAKEIIFSDEARNKLYEGVKKLNDAVKVTMGPRGRNVLIQKSFGAPSITKDGVSVAKEVELKDSLENMGASLVREVASKTADQAGDGTTTATVLAHAIFKEGLRNITAGANPIEVKRGMDKACEAIVAELKKLSREVKDKKEIAQVATISANSDEKIGNLIADAMEKVGKDGVITVEEAKSINDELNVVEGMQFDRGYLSPYFITNAEKMTVELSSPYILLFDKKITNLKDLLPVLEQIQKTGKPLLIIAEDIEGEALATLVVNKLRGVLNISAVKAPGFGDRRKAMLEDIAILTGGEVISEELGRTLESATIQDLGQASSVIIDKDNTTIVNGAGEKANIDARVNQIKAQIAETTSDYDREKLQERLAKLSGGVAVIKVGAATETEMKEKKDRVDDALSATKAAVEEGI

SEQ ID NO: 2968 - protein, 155 aa, Triticum aestivum
  misc_feature (132)..(132): Xaa can be any naturally occurring amino acid
  misc_feature (137)..(137): Xaa can be any naturally occurring amino acid
  misc_feature (144)..(144): Xaa can be any naturally occurring amino acid
MSLIRRSNVFDPFSLDLWDPFDGFPFGSDGSGSLVPRTSSDTVAFAGARIDWKETPVAHVFKADVPGLKKEEVKVEVEDGNILQISGERNKEQEEKTDTWHRVERSSGKFLRRFRLPENAKAEQVKASMENXVLTVXVPKEEAXKPEVKSIQISS

SEQ ID NO: 2969 - protein, 647 aa, Xanthomonas campestris pv. campestris str. ATCC 33913
MCGLAGLLLATPRMHGEQLEALVRPMGGALRHRGPDDAGTWCDAQAGVALAHQRLSILDLSPLGHQPMRSADSRYVLAYNGEIYNFAQLRAALAALGHRFRGHSDTEVLLAAVVEWGLDDTLARCNGMFALALWDERDHCLSLARDRVGKKPLYYGWAGDTLVFGSELKALWQHPDFDNGVDRDALTLLLRLGYIPAPACIHERTFKLMPGRVLRLDAQAVAAGAAAHRPDQAQQPFWNAREAMQRALAAPFTGTDAQAEEQLDSLLRDAVALRMVADVPVGVFLSGGTDSSIVTAMMQAQSDQPVHTFSIGFEGSHHDEAPLAREVATHLHTDHTELYVSGADALAVVPTLPDMFDEPFADASQVPTALVARLARGGVTVALSGDGGDELFFGYGRYQRALRNWRMHGLVPAPLRRLMAVAARKSGEASRTGGLAALVAEAGARGIGDIYRNRISRWRDPAAVVLGATEPDSFYSLADPLHGSGTPADAMMLADFAAYLPDDLLCKVDRTTMAVGLEARAPLLDWRVAEFAWSLPLSLKYRDGVSKYLLKRVLCRYLPEPMVYRGKRGFGAPVSAWLRGDLHGWADDLLAHGTLQREGVFAADTVAGLWRDFNGGERKWHTHLWTVLMFQAWQDHWRAQRAAIVRS

SEQ ID NO: 2970 - protein, 480 aa, Pisum sativum
MKLLSTKATCNSHGQDSSYFLGWQEYEKNPYDHVQNPKGIIQMGLAENQLSFDLLESWLAKNQDVGGFKRDGKSIFRELALFQDYHGLPSFKKALVDFMAEIRGNKVTFDPNHIVLTAGATSANETLMFCLAEKGEAFLLPTPYYPGFDRDLKWRTGVEIVPIQCTSSNNFQMTESALQQAHEDAKKKNLKVKGVLVTNPSNPLGTTMSKNELNLLIDFIKDKNMHLISDEIYSGTVFTSPNFVSVMEILNERTDKDFLDANVSERVHIVYSLSKDLGLPGFRVGAIYSDNETVVAAATKMSSFGLVSSQTQYLLSAMLGDKKFTRNYLSENQKRLKKRQKMLVNGLQKAGISCLKTNNAGLFCWVDMRNLLTSDTFEAEMDLWKKILYEVGLNISPGSSCHCTEPGWFRVCFANMSEDTLNLAMKRLKDFVSNSNGEEGSNSDNKRTRSSQSSRSFTRKSISNWVFRLSSRDHHEQEER

SEQ ID NO: 2971 - protein, 405 aa, Enterococcus faecalis V583
MRNFKKSDKLNNVSYDVRGPVLEEAERMQEEGIRILKLNTGNPAPFGFDAPNEIVRDMIVNVRDSEGYSDSKGIFSARKAIEQYCQLKKFPNVTINDIYTGNGVSELITMCMQGLLNNGDEVLVPMPDYPLWTASVSLAGGTPVHYICDEQAEWYPDIDDIKSKITSNTKAIVIINPNNPTGALYPKELLLEIVEVARQNDLIIYSDEIYDRLVMDGLVHVPIATLAPDLFVVTLNGLSKSHRVAGFRCGWMVLSGDKSRVKGYIEGLNMLASMRLCSNVLSQQIIQTALGGYQSVDGLLLPGGRIYEQREFIYNAINDIPGLSAVKPKAAFYIFPKIDTAKFDIYDDEKFVLDFLHKHHILLVHGGGFNWQQPDHFRIVYLPKMEDLKTTADKMREFLSTYKQK

SEQ ID NO: 2972 - protein, 197 aa, Triticum aestivum
  misc_feature (37)..(37): Xaa can be any naturally occurring amino acid
  misc_feature (48)..(48): Xaa can be any naturally occurring amino acid
LVVNRETPHRMASNVLRIASGAAMVEAIAAFSTRRAXGMSVLSGKGRXVPTVTVRQPAGAGAPPVAIRGRFEIVSLSGAFLPAPAPPGSTGLAVYLAGGQGQLLGGSVMGELLASGPVMVIAATFGNATYERLPLDQDAEEGAVLSGSEGAATQLEQQGSPRPPPPPPMYAVPQTPPSDVFGQWGQAAVARPPPTSF

SEQ ID NO: 2973 - protein, 191 aa, Xanthomonas oryzae pv. oryzae KACC10331
MKSARPRLSDAHGRRNCARRGRRPGHQPFWRLAMNIVRYPQFSTHALQNEIKHVFDRFFEHNSDTDESAVVTAQWVPRVDIKEEPKHFVLYADLPGIDPSQIEVQMDKGILSIKGERKSESSTETERFSRIERRYGSFHRRFALPDSADADGITASGHNGVLEIRIPKRPAATPRRIHVGNGQDTSDSTVQ

SEQ ID NO: 2974 - protein, 400 aa, Saccharomyces cerevisiae
MPFVKGFEPISLRDTNLFEPIKIGNTQLAHRAVMPPLTRMRATHPGNIPNKEWAAVYYGQRAQRPGTMIITEGTFISPQAGGYDNAPGIWSDEQVAEWKNIFLAIHDCQSFAWVQLWSLGWASFPDVLARDGLRYDCASDRVYMNATLQEKAKDANNLEHSLTKDDIKQYIKDYIHAAKNSIAAGADGVEIHSANGYLLNQFLDPHSNKRTDEYGGTIENRARFTLEVVDALIETIGPERVGLRLSPYGTFNSMSGGAEPGIIAQYSYVLGELEKRAKAGKRLAFVHLVEPRVTDPSLVEGEGEYSEGTNDFAYSIWKGPIIRAGNYALHPEVVREQVKDPRTLIGYGRFFISNPDLVYRLEEGLPLNKYDRSTFYTMSAEGYTDYPTYEEAVDLGWNKN

SEQ ID NO: 2975 - protein, 276 aa, Chlamydomonas eugametos
MTSHAANPKEEQDQRLPFKSDISGPIAPSQAPAHTVQAHDSQPKPSDDSSDEHLSFYEAKARIVRAFAASRAPQPAAPAAKALEGDASVIVPGKLILSSCEVEESSELLTKLGVTHILQVGEELKPSHPGRFTYLSLPILDMEGQDIVALLPSCFQFLQQAQASGGVCLVHCLAGISRSASVVIAYLMWTQGMPYTEARAMVRRARSKVYPNTGFTLQLQELDRLRESGAIQWGDTPSLASSLEQHRQPWNLIRYLEVKEKQAQEEGWTWGRTLVI

SEQ ID NO: 2976 - protein, 487 aa, Pisum sativum
MGVMNLDQPQLLSKIAMGDGHGEASSYFDGWKAYDKDPFHPSKNPHGVIQMGLAENQLTADMVQNWIMSNPEASICTLEGVHNFKQMANFQDYHGLPEFRNAVAKFMSRTRGNRVTFDPERIVMSGGATGAHEATAFCLADRGEALLVPTPYYPGFDRDLRWRTGVKLVPVICESSNNFKLTKQALEEAYEKAKEDNIRFKGLLITNPSNPLGTVMDRNTLRTVITFINEKRIHLISDEIYAATVFSHPSFISIAEIIEHDTDIECDRNLVHIVYSLSKDMGFPGFRVGIIYSYNDTVVDCTRKMSSFGLVSTQTQYLIAKMLSDDDFVEKFLPESAKRLAQRYRVFTGGLIKVGIKCLQSNGGLFVWMDLRGLLKNATFESEIELWRVIIHEVKINVSPGVSFHCSEPGWFRVCYANMDDRDVQIALQRIRSFVTQNNKEAMGSDKNSKPYWHSNLRLSLKPRRFDDIMMSPHSPIPQSPLVKATT

SEQ ID NO: 2977 - protein, 174 aa, Zea mays
MMPRRALLFAAVLLAASAAAVSGFHLGGDESGLVRGVLAALRERAEAEDAARFAVAHYNKNQGAALEFTRVLKSKRQVVTGTLHDLILEAADAGKKSVYRAKVWVKSWEDFKSVVEFRLVGDSESEPEPSVASDVSSGQAIAKLSLEADIVQEEARLHTIENDGLSGDFTSSSS

SEQ ID NO: 2978 - protein, 328 aa, Magnaporthe grisea
MAKTSIKLNSGYEMPLVGFGIWKVPVDKTAQAVYDAIKLGYRQIDGAYDYTNSKEAGEGVRRAIEEGIVKREDLFITSKLWNNYHKHEHAIEMAKHEVDTWGIGYLDLFLIHFPISLEYISHSKMPYPCFWPDREKSRSTPLQYTPVAETWAALESLVKTDSNPDGILRSIGVANFRAQLLTDLWGSAKIKPAVNQIEHHPYLVQPQLLAFLKDHGIAITAYSSFGPQSFVELDHPRVSKVEPLFTHPTIKAIADKHGRTGAQVLLRWATQRDIVVIPKSNNVDRLKQNLDCVSFDLSDDEVKQISDLDCGVRFNDPADLSPPIYIFD

SEQ ID NO: 2979 - protein, 547 aa, Angiococcus disciformis
MAAKEIFFHQSAREAILRGVRTLADAVAVTLGPKGRNVVIEKSFGSPTITKDGVTVAKEIDLDNKFENMGAQMVKEVASKTSDKAGDGTTTATVLARAIYEEGLKLVAAGHSPMDLKRGIDKAVEVVVEELKKLSKPTADKKAITQVGTISANGDETIGSIIADAMEKVGKEGVITVEEAKGLETNLDVVEGMQFDRGYVSPYFVTNRERMEVVMDDPFILISEKKVSSMQDMIPILEQVARSGKPLLIIADDIEGEALATLVVNKIRGVLNVAAVKAPGFGDRRKEMLKDIATLTGGMVVSEELGHKYENLTLNDLGRSKRITVDKDNTTIVDGAGTKSEIEGRIKLIRSQIDTVTSDYDREKLQERLAKLVGGVAVINVGAATETEMKEKKARVEDALHATRAAVEEGIVPGGGVAFLRCLPALEKLKLGGEQDFGVEIIRRALQEPLRKIASNAGVEGAVVINKVREGQGAFGYNARTEVYEDLEKAGVIDPTKVERTALQNAASVASLLLTTEAMIADRPAKKKGKNGGGAGMPDYGGDDMDY

SEQ ID NO: 2980 - protein, 520 aa, Zea mays
MGNSLGCSASGERLVSAARDGDAIEARMLLELSPALARYSTFGGLNTPLHFAAAKGHLDIVTMLLEKGADVNARNYCGQTALMHACRHGHWEVVQMLLLFRCNVTRADYLSGRTALHFAAHDGFVRCIRLLVADFVPSVALEDIASSVVDGGDCQTNNGSSPNSSSGQKFNESARVRYINKPADGGVTALHMAALNGHLDCMQLLIDLGANVSAVSFPYGTTANLIGAGSTPLHYAAGGGKQECCELLISKGSSRLTLNCNGWLPVDVARIFGRRSLEPLLSPNSHSNVPVFQPSSYLALPLMSILNIAREFGLQHTTPSIDDNDLCSVCLERSCSVAAEGCSHEFCIKCALYLCSTSNIRVEFTGPPGSIPCPLCRNGIMSFTKLPSTPTEGLKSGSALTFCNPCILNTRSMDSPATFSKAEIRRNRVAAVSSELVCPITCSPFPSSALPTCRCSDDDPCGDTDVQDGPEFQSPRPSHSASMELDKRGEGDLDRASCSGMFWSRRSCHREQQCDAEINA

SEQ ID NO: 2981 - protein, 160 aa, Zea mays
  misc_feature (14)..(14): Xaa can be any naturally occurring amino acid
  misc_feature (38)..(38): Xaa can be any naturally occurring amino acid
  misc_feature (101)..(101): Xaa can be any naturally occurring amino acid
LMLVYDLIQGLSSXLVTIREDVLGAPTFALAVHHGGPXVTTRLRMAEADKWIRLLKQSDETWKMGGLAHTLAPRLCAEKCDTYAVMYDHPLAIRLRRIAFXLMAKDTFDFLALDRPSTTTIDRAIALPKMTGPITLCLGGEGCLNFVGRAFVHPEWLLFS

SEQ ID NO: 2982 - protein, 266 aa, Triticum aestivum
  misc_feature (83)..(83): Xaa can be any naturally occurring amino acid
  misc_feature (94)..(94): Xaa can be any naturally occurring amino acid
  misc_feature (155)..(155): Xaa can be any naturally occurring amino acid
  misc_feature (172)..(172): Xaa can be any naturally occurring amino acid
  misc_feature (189)..(189): Xaa can be any naturally occurring amino acid
  misc_feature (191)..(192): Xaa can be any naturally occurring amino acid
  misc_feature (225)..(225): Xaa can be any naturally occurring amino acid
  misc_feature (242)..(242): Xaa can be any naturally occurring amino acid
MSASPSMSGGAGERTRTVVWFRRDLRVEDNPALAAAARTAGEVVPAYVWAPEEDGPYYPGRVSRWWLSQSLKHLDASLRRLGXATRLVTRRSTXDPSPPLLELVRSTGATHLFLNHLYDPLSLARGHRGKQVLGAQGITVQAFNSDLLYEPWEVXDHHGWPFTMFTPFWNTXLCMVDPPAPHAAPKRIXSXXMSRCCSSDELIFEDESERGSNALLAPALSRGGXNATKVLRALFKGPFIDXPGPGRRAEGKKPKGLPPYLHLGEA

SEQ ID NO: 2983 - protein, 423 aa, Burkholderia sp. 383
MVAVPIPDARPLMESVDLTTAFSPLQIGPLTLRNRLIKSATNEGMTPNGVPSRALVRFHERIAEGGAALTTVAYCAISDDGRTFVDQARLDVPTVRQFRALTDAVHRHGAAASAQITHGGCFTFLPSLSTRRPLSASGGLNKVGVMSGRFLKQAMTRDQMSTIADEFAQAARHARDAGFDAVEIHMGHGYLLSQFLSPLYNRRRDAYGGDATRRATFPVEVLRRVLDAVGRDLAVVCKIGVTEGVRGGGTADDACEIARRLEAEGAHLLVLSGGMNVESVWQLFGSPLPGEARANADNAIVRTAMALQKLTEPKMGAFREMYFLEHSKKVRAAVRMPLAYLGGVRSRGNVELAMREGFDAVALARALVFEPDFVNGLRDGRLAQSGCTSCNRCVVSMYTPGGTACVLREPNDPAPNRVPAAGA

SEQ ID NO: 2984 - protein, 360 aa, Corynebacterium diphtheriae NCTC 13129
MTTLFESATAGVLELNNRITMAPLTRSRAGQDGVPTDMHVEYYKQRANNGLIVTEGTFFEDINRAFLGQPGIATADQQEGWRKVAQAVHEQGSNIVMQIMHGGRLTLPSINGFDQGESSSAIAPGVTLHGDGESREEVPTPVALDAEGIKRVIQKFTEGARRAIDAGMDGVEVHGANGYLLHQFLAPSSNDRTDEYGGSPENRARLTIEVIRSIADEIGADRVGLRISPMHNIQGCIEEDEDDVRATYKALLDGIADLNIAYLSILYQDAESDLVAYLRESFGGFTILNTGFGAVTELEDARYIVENGLADAVAVGREIIANPDLSYRWKNNLALNSIDFDTFYTPGPRGYIDYPMVDEG

SEQ ID NO: 2985 - protein, 484 aa, Xanthomonas campestris pv. campestris str. ATCC 33913
MLRGLTCRCRVCMSYAIVWFRRDLRLEDNPALRAALDAGHDPIPLYIDAPHEEGQWAPGAASRAWRHRSLAALDASLRARGSALLIRQGDSAQVLDAVIAQTEAVAVYWNRKYEPATQPRDAQIKRSLRERGLEVQSCNAALLFEPWTLATQQGRPYKVFTPFWRNALTQLRLPDAMPAPRSLPPLPASLDGVHVDALNLLPTPAWDQGFWEHWQPGEAGAHEMLEIFVDGALSGYRENRDRPDRVGTSQLSPHLHFGEIAPWRIASTLEAQRSARNGADIDGYIRQLGWRDFAYHLLHHFPDTTTQNLNPRFAGFDWATVDPVTLDAWQRGRTGIPIVDAGLRQLWHTGWMHNRVRMIVASLLCKHLRVHWLEGARWFWDTLVDADLANNTMGWQWVAGTGADAAPYFRVFNPVTQAEKFDPQATYITRWIPELAALPVKERFAPWLHPLSLARLAPTYPRAPIIGLAEGRDAALAAYAGTRG

SEQ ID NO: 2986 - protein, 612 aa, Arabidopsis thaliana
MKMDKKTIVWFRRDLRIEDNPALAAAAHEGSVFPVFIWCPEEEGQFYPGRASRWWMKQSLAHLSQSLKALGSDLTLIKTHNTISAILDCIRVTGATKVVFNHLYDPVSLVRDHTVKEKLVERGISVQSYNGDLLYEPWEIYCEKGKPFTSFNSYWKKCLDMSIESVMLPPPWRLMPITAAAEAIWACSIEELGLENEAEKPSNALLTRAWSPGWSNADKLLNEFIEKQLIDYAKNSKKVVGNSTSLLSPYLHFGEISVRHVFQCARMKQIIWARDKNSEGEESADLFLRGIGLREYSRYICFNFPFTHEQSLLSHLRFFPWDADVDKFKAWRQGRTGYPLVDAGMRELWATGWMHNRIRVIVSSFAMKFLLLPWKWGMKYFWDTLLDADLECDILGWQYISGSIPDGHELDRLDNPALQGAKYDPEGEYIRQWLPELARLPTEWIHHPWDAPLTVLKASGVELGTNYAKPIVDIDIARELLAKAISRTREAQIMIGAAPDEIVADSFEALGANTIKEPGLCPSVSSNDQQVPSAVRYNGSKRVKPEEEEERDMKKSRGFDERELFSTAESSSSSSVFFVSQSCSLASEGKNLEGIQDSSDQITTSLGKNGCK

SEQ ID NO: 2987 - protein, 360 aa, Zea mays
LEKPLLSHLRFFPWVVDEVHFKVWRQGRTGYPLVDAGMRELWATGWVHDRIRVVVSSFFVKVLQLPWRWGMKYFWDTLLDADLESDALGWQYISGSLPDGRELDRIDNPQFEGYKFDPHGEYVRRWLPELARLPTEWIHHPWDAPESVLQAAGVELGSNYPRPIVELDAANSRLQGALSEMWELEAASCAAIENGMEEGLGDSTDEPPIDFPQELRMEVDRQPAQPAIIHTPVVVCWRREDQRVPSMTSSLIRAETELTADFGNTSEDSRREVPSNIHLQARAEREEIVDGATGNTVRVNGNQQQQNLQNNMHRVLGIAPSISEASSSWTGREGGLVPSTCKQFRFTIHKQSISQSSDRR

SEQ ID NO: 2988 - protein, 250 aa, Buchnera aphidicola str. Sg (Schizaphis graminum)
MILTSISVLKDNYVWILYNDNCSCIIIDPGVSEDIIKKIEKKNWKLIAILLTHNHIDHVGGVEEIIRRYPNVTVFGPEETKTRNVNKIVKQGDVIKLLKSEIHVFLTPGHTLGHVSYYLKPYIFCGDTLFSGGCGRVFKNKFFDMYQSINFIKSLPKKTILCCSHEYTLSNLNFAMSILPFDKKIKKYYKKIKKHISQNKTSLPVSLETEKKINIFLRTNEKTIKKAMGLKKDTSSFEVFILLRKEKDDF

SEQ ID NO: 2989 - protein, 408 aa, Prosthecochloris aestuarii DSM 271
MDAFRGAFEIGLFCQPAAHTLYCSIDQDLPEQAITGYAPCLDDAKEVSLMTMLFSPASLGTLTLQNHIVMAPMTRSRATGNVANALMREYYAARSSAGLIITEGTSPSPDGLGYPRIPGIFSGAQIEGWKSITEAVHQRDGKIFMQLMHCGRIAHPLNMPDGAEIIAPSAVAAQGTMYTDTDGLQPYPVPRAMSEEDIAIAKAGYVDASLHAMEAGFDGVELHGANGYLLEQFFRPNTNLRTDCYGGSVENRARFMLEVLDEVIAAVGDQRVGIRLSPFGVFNDMPLYEAMEEEYRWLAGAIARVAPLYIHLVDHSSMGAPTVPDSIKESFRKSFKATLILSGGYDAARAARDLDARKCDLVAVGRAFIANPDLVERWHAGAPLNTPDPDTFYSAGPKGYIDYPVLEG

SEQ ID NO: 2990 - protein, 337 aa, Yarrowia lipolytica CLIB122
MFRSVYKRGRILSKIPIKQHIQITHKHTMTSLDFTLNNGKTIPAIGLGTWKSTTEEVAGAVECALTEGGYRHIDTAFNYRNEDAVGLGIKRAMEKGVKREDIFVTTKIWVTYHDRVEENLDMSLERLGLDYVDMLLIHWPVPLNPNGNDPVYPLRPDGSRDIDESGSQPKTWKQMEAVLKTGKTKSIGVSNFSIPYLEELLKEAEVVPAVNQVELHPLLPQLELMEFCKKNNIVMTAFSPFGSVGGPLLKNELVVSLADKYNTSPGGILTSYHIGNGTVVIPKSVTNSRIVENGKSAVTLSQEDLKALNDLHKTEGIHRTSKPKWGVDLGFPDFDFC

SEQ ID NO: 2991 - protein, 329 aa, Escherichia coli CFT073
  misc_feature (271)..(271): Xaa can be any naturally occurring amino acid
  misc_feature (277)..(277): Xaa can be any naturally occurring amino acid
  misc_feature (296)..(296): Xaa can be any naturally occurring amino acid
  misc_feature (302)..(302): Xaa can be any naturally occurring amino acid
  misc_feature (308)..(308): Xaa can be any naturally occurring amino acid
  misc_feature (315)..(315): Xaa can be any naturally occurring amino acid
  misc_feature (318)..(318): Xaa can be any naturally occurring amino acid
  misc_feature (325)..(325): Xaa can be any naturally occurring amino acid
  misc_feature (327)..(327): Xaa can be any naturally occurring amino acid
MTNKHPSLFSPFMLTEKIKLRNRIVMAPMTTWSANPDGTISEQELEFYKRRSQNVGLVITGCTYVTPSGIGFTHEFAAYDDRFINSLEKLAAAAKSGGAPAILQIFHAGNKAIPELVPNNDVISASASSVKSGDFMKRVVQSREMTENEIQETIRAFGDVTKRAIKAGFDGVELHGAHGFLLQNFFSPLFNQRNDRWGGDLEGRMRFPLAVLQEVKNVVYEYATKPFAIGYRISPEESVTGGLRIEDTYKLLDRLISSGISYIHTSLVSIXIATLLXLPNGPRTIELILNHIAGRXTGNRRXKIHTPXQAQEAIXRWXATCCDPXKXWR

SEQ ID NO: 2992 - protein, 392 aa, Pseudomonas aeruginosa PAO1
MWFNGFLDLSPWQLVAVTLVLTHITIVSVTVYLHRYSAHRALDLHPALQHFFRFWLWLTTGMNTREWTAIHRKHHAKCETVEDPHSPVHKGLFTVLRAGAELYKAEAKNQDTLRIYGKNCPDDWIERNLYSRFPIGGVVLMALIDLALFGALGLTVWAVQMVWIPFWAAGVVNGLGHAVGYRNFECRDAATNLVPWGILIGGEELHNNHHTYPNSAKLSVKKWEFDLGWAWIKLFSFLRLARVARVAPIAHRVEGKHSLDMDTAMAILNNRFQIMAQYRKLVIAPLVKQEVAKADESVRHLFRRAKRLLSRETSLLQDRHHVRIDSMLAHSQALKVIYEKRLALQQIWAKTSANGHDMLAAIKDWVHEAEASGIQSLKEFAAQLKTYSLRPA

SEQ ID NO: 2993 - protein, 233 aa, Arabidopsis thaliana
WSPAIRESIAKFLEKRDGHPAEPKDIYLSAGASSGVNTLLHIISDKPTAGVLVPIPQYPLYTATLSVLGSKCVPYYLDESKGWGTDIDAIKGAYKIAEEKGIDVRAIVIINPGNPTGASLSIEDIQAVITFAAENRLVILADEVYQTNVFKGKFYSFKRILRDLQKSNPDKYKYIELASLHSVSKGMVGECGHRGGYFELVGFDPEVQQQIYKFVSITLCAPVIAQCLVELMV

SEQ ID NO: 2994 - protein, 496 aa, Yarrowia lipolytica CLIB122
MLRQGIKRAVVHARAVQAVCKRTNMTITKKDLNPQVVNAQYAVRGKLAVRADEIKEQMRTNPSLFPFDKVINANIGNPQQLDQKPVTFYRQVLAMLQYPELMDRAADVGIPNDAVQRARKLLDDIGSVGAYSSSQGVTTVRNSVANFIQKRDGYAASASDIYLTTGASNAVTFLLTTLARGDGSDGFMIPIPQYPLYTATLTLQNSNPVPYYLDEAKEWGTNMAALNDAVESSKHKLKAVVVINPGNPTGACLGVKEIKDILLLAQKEGIAVIADEVYQANIFASGQFHSFKKVWSILKEENPDFNVPLASLHSTSKGKIGECGQRGGYMELVGFHEDVIEQIYKLCSISLCPVVTGQALIECMVNPPVEGDESYPLFNKETNHIMDTLTQRANRLYEAFKEMPKVSCEPPQGAMYLFPSIELPAGAIAEAERHNEQPDEFYCMKLLEQTGICVIPGSGFGQKDGTYHFRTTFLAPGDDYGEKIVNFHKKFLAQYE

SEQ ID NO: 2995 - protein, 162 aa, Dehalococcoides sp. CBDB1
MTLERWQPGWSLRPWRPFREVLSPGLWNMLTNERDWLPATEMVELKDKYLIKAEMPGINEEDIEVSVSDNVLSIKGEKKCDCEISEENYYFSERSYGSFSRSMTLPNNTDPQNIAATLDNGILEITIPKSSEAKPKKVSVIKAAKPKKTDLNTQSIKPKAQS

SEQ ID NO: 2996 - protein, 819 aa, Aegilops tauschii
MATFAVSGATLGVARAGVGVARAGSERRGGADLPSLLLRKKDSSRAVLSRAASPGKVLVPDGESDDLASPAQPEELQIPEDIEEQTAEVNMTGGTAEKLQSSEPTQGIVETITDGVTKGVKELVVGEKPRVVPKPGDGQKIYEIDPTLKDFRSHLDYRYSEYKRIRAAIDQHEGGLEAFSRGYEKLGFTRSAEGITYREWAPGAHSAALVGDFNNWNPNADTMTRDDYGVWEIFLPNNADGSSAIPHGSRVKIRMDTPSGVKDSISAWIKFSVQAPGEIPFNGIYYDPPEEEKYVFQHPQRKRPESLRIYESHIGMSSPEPKINSYANFRDEVLPRIKRLGYNAVQIMAIQEHSYYASFGYHVTNFFAPSSRFGTPEDLKSLIDRAHELGLLVLMDIVHSHSSNNTLDGLNGFDGTDTHYFHGGPRGHHWMWDSRLFNYGSWEVLRFLLSNARWWLEEYKFDGFRFDGVTSMMYTHHGLQMTFTGNYGEYFGFATDVDAVVYLMLVNDLIHGLYPDAVSIGEDVSGMPTFCIPVPDGGVGFDYRLHMAVADKWIELLKQSDESWKMGDIVHTLTNRRWLEKCVTYAESHDQALVGDKTIAFWLMDKDMYDFMALDRPSTLRIDRGIALHKMIRLVTMGLGGEGYLNFMGNEFGHPEWIDFPRGPQTLPTGKVLPGNNNSYDKCRRRFDLGDADFLRYRGMQEFDQAMQHLEEKYGFMTSEHQYVSRKHEEDKVIILKRGDLVFVFNFHWSNSFFDYRVGCSKPGKYKVALDSDDALFGGFSRLDHDVDYFTTEHPHDNRPRSFSVYTPSRTAVVYALTE

SEQ ID NO: 2997 - protein, 549 aa, Saccharomyces cerevisiae
MRRSPSRSNNNFAVPNCSTNSNSSQQQLTTPSDDLNSNEPNDPDDSRSLPTIKKFNNKHSINNYNTLASAGKNNNNKRASNDNLLIPGENAHKQKIYTKDENLKSLYLDIDVSVAKALSSSATAPKLINTARTSSTTTATTSNNILTSPSYRESNYSSPSSYSFSSYYSSATSASSSTSSFLKSSGLSSRVKSPSSSVKAGSFGAPSSPTSGIPNPKSSKKPIFLRRYSHDTSSNEGLDIDVAIEKLLQVGESREITKTSKKKNFPFHSWEIQLICYHAREIFLNQPTLLRLQAPIKVVGDVHGQFNDLLRILKLSGVPSDTNYLFLGDYVDRGKNSLETILLLLCYKIKYKDNFFMLRGNHESANVTKMYGFYDECKRRLSSKVWKMFVDVFNTLPLAAIIQDKIFCVHGGISPDLHDMKQIEKVARPTDIPESGLVTDLLWSDPDPQVTDWSENDRGVSYTFSKRNVLDFCAKFKFDLILRGHMVVEDGYEFFARKKFVTIFSAPNYCGEFHNWGAVMSVTTGMMCSFELLKPRALKNKKKLYKTKV

SEQ ID NO: 2998 - protein, 84 aa, Pisum sativum
MCGILAVLGCSDDSQAKRVRILELSRRLKHRGPDWSGLHQHGDNYLAHQRLAIVDPASGDQPLFNEDKSIIVTVNGEIYNHEEL

SEQ ID NO: 2999 - protein, 444 aa, Mesorhizobium sp. BNC1
MIRKLSLLFAGALMGASAMSLVYGTNGTAAIAADTDTYRQLAIFGDIFERVRAQYVTPPDDKKLIENAINGMLTSLDPHSSYLNAEAAQDMRVQTKGEFGGLGIEVTMENELVKVVAPIDDTPASRAGILSGDLIEKIDGEEVRGMTLNDAVDKMRGLVNTPIELTVLREGQSKPLTFKIIRDTIKVKAVKSRVEGDDIGYLKITSFTEKTTDDLRAAIEDIRKQVPEDKLKGYVLDLRLNPGGLLDQAVNVSDAFLERGEVVSTRGRESGDIARFSSQAGDLTGGKPLVVLINGGSASASEIVAGALKDHRRATLVGTRSFGKGSVQTIIPLGENGALRLTTALYYTPSGESIQGKGITPDIKVEQPLPEDLQDVDLSRGESDLRGHIRGAEEDEEGSGSIAYVPQDPKEDVQLSYALDLIRGVKTDPAYPASPDKAVMNQQQ

SEQ ID NO: 3000 - protein, 84 aa, Pisum sativum
MCGILAVLGCSDPSRAKRVRVLELSRRLKHRGPDWSGLHQHGDCFLAHQRLAIVDPASGDQPLFNEDNPSIVTVNGELYNHEDL

SEQ ID NO: 3001 - protein, 927 aa, Vibrio cholerae O1 biovar eltor str. N16961
MTQRYGLRARVMTLTLAPTLIIGLLLSALFSFNRYHDLETQVINSGASIIEPLAIASEDALRMQSRESVRRIISYAHRKNSKLVRSIAVFDANHELFVTSNFHPNFEKLMYPKDKPIPFLSSSVIDENTLILRTPIISERTVLDNGDANPATPVMGYIAIELDLSSLRLQQYQEIFSAGLVLVIGILLSGVFASRLMYDVTRPITHMKNMVDRIRRGHLDVRIEGKMHGELDTLKKGINAMAVSLSEYHVEMQHSIDQATSDLRETLEQLEIQNVELDIAKKRAQEAARVKSEFLANMSHELRTPLNGVIGFTRQMLKTQLTNSQADYLQTIEKSANNLLTIINDILDFSKLEAGKLALENIPFEFQEVLEEVVNLQATSAHEKGLEITLKIDPKIPRGVVGDPLRIQQVLTNLVGNSIKFTERGNIDVSVEMRALRDDVIDLQFMVRDTGIGISERQQAQLFQAFSQADASISRRYGGTGLGLVITQKLVSHMGGEISLTSRLHQGSTFWFTLRLHTTELPLNDGYNADSLNHRHLLLIEPNMQAAAIVQQTLVQSGLEVTYRSAIPEEQHVYDYVLLNLAPSKETNPTLVELWVQRALAMTHNVIVGVPSTELALADQLMQRYPVKCISKPLSRKKLLQTLAAQQPQLANTSLPKPQADKLPLCVMAVDDNPANLKLITALLQERVEYVVSCTSGQEAIEQAQSRQFDIILMDIQMPHMDGVTACKAIKQLKGYRDTPVIAVTAHAMAGERDRLLKAGMDDYLTKPIEEHILQQVLVHWSPHTRSKQVAKVTPPDGAAVISNALPSSPPAEEAIIDWPVALRQSANKEDLAKEMLGMLVDYLREVETVVNTALEDEEYPASDLLHHIHKLHGSCSYSGVPRLRKICASLEQALRNGASIDELEPELFELQDEMAKVLEASRDYLN

SEQ ID NO: 3002 - protein, 587 aa, Brassica napus
MYRLISSIASKARVARNCTSQIGSRLSSTRNYAAKDIRFGVEGRALMLRGVEELADAVKVTIPPKGRNVIIEQSWGAPKVTKDGVTVAKSIEFKDRVKNVGASLVKQVANRPTQLNRCLGDGTTCATVLTRAIFTEGCKSVAAGMNAMDLRRGIKLAVDTVVTKLKSRARMISTSEEIAQVGTISANGDRELVTDCKAMESVGKEGVITIQDGKTLFNELEVVEGMKIDRGYISPYFITNQKNQKCELEDPLILIHEKKISNLNSMVKVLELALKSQRSLLIVAADLESDALAVLILNKLRAGIKVCAVKAPGFGENRKANMHDLATLTGAQVITEELGMNLEKIDLSMLGNCKKITVSKDDTVFLGWGAGDKKAIGERCEQIRSMVEASESDYDKEKLQERLAKLSGGVAVLKIGGASESEVGEKKDRVTDALNATKAAVEEGIVPGGGVALLYASKELDKLSTANFDQKIGVQIIQNALKTPVYTIASNAGVEGAVIVGKLLESDNPDLGYDAAKGEYVDMVKSGIIDPVKVIRTALVDAASVSSLLTTTEAVVTEIPTKEDASPAMGGGGGGMGGMGGMGGMGF

SEQ ID NO: 3003 - protein, 364 aa, Arabidopsis thaliana
MVIMQVLASKTKINMVMELVTGGELFDRIVSNGKLTETDGRKMFQQLIDGISYCHSKGVFHRDLKLENVLLDAKGHIKITDFGLSALPQHFRDDGLLHTTCGSPNYVAPEVLANRGYDGAASDIWSCGVILYVILTGCLPFDDRNLAVLYQKICKGDPPIPRWLSPGARTMIKRMLDPNPVTRITVVGIKASEWFKLEYIPSIPDDDDEEEVDTDDDAFSIQELGSEEGKGSDSPTIINAFQLIGMSSFLDLSGFFEQENVSERRIRFTSNSSAKDLLEKIETAVTEMGFSVQKKHAKLRVKQEERNQKGQVGLSVTAEVFEIKPSLNVVELRKSYGDSCLYRQLYERLLKDVGTSSPEQEIVT

SEQ ID NO: 3004 - protein, 612 aa, Arabidopsis thaliana
MKMDKKTIVWFRRDLRIEDNPALAAAAHEGSVFPVFIWCPEEEGQFYPGRASRWWMKQSLAHLSQSLKALGSDLTLIKTHNTISAILDCIRVTGATKVVFNHLYDPVSLVRDHTVKEKLVERGISVSSYNGDLLYEPWEIYCEKGKPFTSFNSYWKKCLDMSIESVMLPPPWRLMPITAAAEAIWACLIEELGLENEAEKPSNALLTRAWSPGWSNADKLLNEFIEKQLIDYAKNSKKVVGNSTSLLSPYLHFGEISVRHVFQCARMKQIIWARDKNSEGEESADLFLRGIGLREYSRYICFNFPFTHEQSLLSHLRFFPWDADVDKFKAWRQGRTGYPLVDAGMRELWATGWMHNRIRVIVSSFAVKFLLLPWKWGMKYFWDTLLDADLECDILGWQYISGSIPDGHELDRLDNPALQGAKYDPEGEYIRQWLPELARLPTEWIHHPWDAPLTVLKASGVELGTNYAKPIVDIDTARELLAKAISRTREAQIMIGAAPDEIVADSFEALGANTIKEPGLCPSVSSNDQQVPSAVRYNGSKRVKPEEEEERDMKKSRGFDERELFSTAESSSSSSVFFVSQSCSLASEGKNLEGIQDSSDQITTSLGKNGCK

SEQ ID NO: 3005 - protein, 773 aa, Pseudomonas fluorescens Pf-5
MDIKFTNRLSYKQARLTVLVGFILGTALSLLQIGIDYASEDASINREIQSLLEISHNPASRIAYNIDAELAQELTLGLLRSPAIIRAQLIDNNNTLLANVERPPQQSRYRAISDFLFGADRQFEDRLYLSHLPEESLGTLHLDVDTYAFGSRFLRRAEVTLINGFARSLILTGILLALFYVMLTKPLVRVIRELSSRDPRSPKQAKLDFPHGHENDEVGVLVKVANQQFDIMATEIQQRRNAENRLTEYLGQLENIVSARTTELKASNARLSQSNEELEIARRTALDMAQARAAFLANMSHEIRTPLNGLLGMIALSLDSPLNPEQRQQLSIAHDSGKVLVELLNDILDMSKFDAGQLELERIPFDLGVLVEDTANLLSQNAAASVELACLIAPDFPALVLGDPTRVRQIVSNLLSNALKFTRFGRVDVRLSTLGDGVRIEICDTGIGIAQEAQVRIFQPYTQAGAGITRQYGGTGLGLALTYNLCEAMDGRLSISSEVGFGSQFCADLPLPCHTPAAPPPALAGKIIAITEAGSGLAELLASLLPSWGLSYQRCDIEDSLAGLDPDLLITDCPECLFGLRPAIRAPILLVTAYGSFLPSEEANALAPLQQQARPLARNALYQTLRRSLLGETITLNDAQLEMPVQRRRADILLVEDNPVNQLVAKGMLSKLGCAVTVAAHGAEALNQLELHRFDLVLMDCNMPVMDGYEASRQIRRSGRWPDLPIIALTANAMPEERERCRAAGMSDYLAKPFRREELIALLDLWVPTTTKL

SEQ ID NO: 3006 - protein, 154 aa, Yarrowia lipolytica CLIB122
MPKDGEDGRCRWCIEATRTGINTEYGAAFTAGGIFFIFLGIMTFFDSALMAFGNILFLIGITLLIGPQKTLAFFARRQKLRGSIAFGLGIFLILIKRPFIGFAIELVGILALFGDFFAVIVAFLRSMPVIGPILRHPAVAPVIDRLAGVRILPV

SEQ ID NO: 3007 - protein, 957 aa, Cryptococcus neoformans var. neoformans JEC21
MSVQSPLIAVPRKTTTDVDWATPIRHVIAASYGEDPNSYAEECAVLQRCRQDAVRGAGNDQTARDLLYKYFGQLELLELRFAEIKVSFPWNDAFTDKLTTQTSLAFEKASIIHLISSILSSLAQSASRSDPEGLKRAYYNTRATAGMLTYINENFLHAPSTDLSREVVHLLIGIMMAQAAEIFTEKLVEEKKSASLVARSANQTASMYTSVVDEMKEFQGKGVFDRNWLYVLQIKAKLFGSLAQYYKATSDSAAGKHGTALVRLKIANSLIQDAQKQASSFIYTFVAASTPSLPHDAANALNEIVKAHATVCGEAKEQAVKDNDLIYHEVLPSEASLPAIEKLPPAAPITIQDVYGNQEVTKLIGPDIFLRLVPLAVHESASVYSEEKAKLVRAEVDKVELAEGEIQAGLDHLNLPEEIDRWRQFLEGDTNDDVPLSQQLKSLVDSVGDVRQVENDLGRLDGERAACERELRELNGALDAESRECERMRAKYTPNFTQSPSGPQTANLRSNLSANLSALSSASTSDAHLQSLWQSIQPSISLLSSGPSNLERAARDITEGNPQKIDKTVSLLDLDDEEVDRKALGQEEKDALRKAVDDGREKLDRLKKIRAERDEVLRDLKEKIQTDDVSNLLLLNRRSQNVEPQLFASELEKFRPYQTRLAAAVSASRSILQELDMLVAQVHKGTGFREILRKEKDRQRIIRDWEKRLIEAGESYAEIRAGLGKGLSYYDSLRRVIEDLRMEVQRFTNSREQERRNMVSDIETRQRLGGTSPSTGGVVANRGLEERLAALKMEAPPQPPRLGTTSTPNLPPPPGRGSSNVTSSYLPPPPPPKPQSNPYDFSTLAGFGSFATPSVSSPQHVYPSQPQQAYNQQSYIPPQQNPYYPPPPSRPTYASPPFAPQQPPMQSGHSPYAPPPGHAPQPQQPQYPSSQNQQQRQGYKYPGYGQQGGYGGGYGQY

SEQ ID NO: 3008 - protein, 403 aa, Pseudomonas fluorescens Pf-5
MQVSKSNKLANVCYDIRGPVLKHAKRLEEEGHRILKLNIGNPAPFGFEAPDEILQDVIRNLPTAQGYSDSKGLFSARKAVMQYYQQKQVEGIGIEDIYLGNGVSELIVMAMQALLNNGDEVLVPAPDYPLWTAAVSLAGGNPVHYLCDEQANWWPDLADIKAKITPNTKALVIINPNNPTGAVYPREVLLGMLELARQHNLVVFSDEIYDKILYDDAVHICTASLAPDLLCLTFNGLSKSYRVAGFRSGWVAISGPKQHAQSYIEGIDMLANMRLCANVPSQHAIQTALGGYQSINDLVLPPGRLLEQRNRTWELLNDIPGVSCVKPMGALYAFPRIDPKICPIHNDEKFVLDLLLSEKLLVVQGTAFNWPWPDHFRVVTLPRVDDLEQAIGRIGSFLKSYRQ

SEQ ID NO: 3009 - protein, 400 aa, Candida glabrata CBS138
MPFSKDFEPVAFKDTNMFKPMKVGNTTILHRAALPPLTRMRAHHPGHIPNREWAVEYYKQRSQRPGTMLVTEGVFPSAQSGGYDNAPGIWSEEQMVEWRKIFNAVHDNKSFAWVQLWVLGRQGFPDSLARDGLRYDSASDGIYMSAEQEELAKKSNNPQHGITKDEIKQYIKDYVQGAKNAIAAGADGIEIHSANSYLLNQFIDPKSNKRTDEYGGSIENRARFTLEVVDAIVDAIGPERTAIRLSPYGTYGDMSGGAEPLIVAQYAYIIGELERRAKEGKRLAYLHLVEPRVLDPFAPEGEDVYNEGTTDFAYSIWKGPIMRAGNYAIHPEVAMEVLKDDRTIVGYGRYFIANPDLVDRLEKGLPLNKYDRSTFYAMSAEGYIDYPTYEEAIKMGWDKQ

SEQ ID NO: 3010 - protein, 542 aa, Oryza sativa
MRRSGNGGAAKKKKKRSASAASERRPRADGGMRIVVPLQGVVQGRGGLVLGSLIPCALFYFFQLYIKRNRASPPPPPGSPTAASAAAVSPIHRSLSRGLLAPRAALPAISARGASVRDDDSLYYAGLRRCAADPYHPVTNPSGIIQLGLAENYLSLDLVGRWMEEHAAEAASMAGGEDEDERELSIRGLAAYQPYDGILALKMALAGFMRQIMQGSVSFEPSQVVITSGATPAMEILSFCLADPGNAFLVPSPYYPGWDRDIKWRTGIELIPVPCRSTDNFNISITALEIAYNQAKKRGIKVRGVLISNPNNPTGSFVPKQTLHDLLEFAAEKNIHLISDEVFAGSTYGSGKFVSVAEVVDDLEDFDKGRVHIIYGLSKDLSLAGFRVGVIYSYNESIVTAAAKIARFSSVSTPTQRLLVAMLSDQKFISDYLKVNRERLRKMYHLFVDALDQVGIECYKSSGGFYCWADMSKFIRSYSEKGERKLWDRLLEEAKVNVTPGSSCHCIEPGWFRCCFTTLSEHDIPVLVQRLRTITDSHKPNH

SEQ ID NO: 3011 - protein, 283 aa, Escherichia coli CFT073
MQKVKLNNGIEMPLLGFGVFQMTDAAECERAVIDAINSGYRLIDTAASYQNEIQVGNALKQSGIARNELFVTTKLWLQDTSYEGAKAQFERSLNRLQLDYVDLYLIHQPYGDVHGAWRAMEELQQAGKIRAIGVSNFHPDRLADLIAFNNVVPAVNQVEVNPFNQQLQAVPWMQSRGIQPEAWAPFAEGKNGLFQHPVLTAIGEKYGKSVGQVVLRWIYQRGIVSLAKSVRKERMEENINILDFELSPEDMLQITALDTATSAFFSHRDPAMVEWLTGRKLDV

SEQ ID NO: 3012 - protein, 282 aa, Mycobacterium avium subsp. paratuberculosis K-10
MSKVPTIELNDGARIPQLGFGVYQIKPDETAAAVRAALDIGYRHIDTAEMYGNEREVAQGIRDAGLDRSEVFVTSKLNNGFHEPDAARRAFDATLNALGSDYVDLFLIHWPLPTLYGGDFVSTWRVLEEFARDGRARSIGVSNFQVAHLERLAAETDTVPAVNQVEVHPYFTNEKVRGYAREHGLAIEAWSPIAQGGVLGDAVINRIADGLGRTAAQVVLRWHIQRGDIVFPKTVNPDRMKSNFELFDFELDERAMEAISALDRGESGRRGPNPDTFDYIPR

SEQ ID NO: 3013 - protein, 294 aa, Escherichia coli CFT073
MEGLTVEFSVLSNNLKMPMMGFGVFQVTDKDVCKQSVLNAIRTGYRLIDTAAVYGNEDAVGEAVREAISEGLCTREELFITSKLWVQDMLNQDIAAAGIEASLKKSGLECFDLYLLHQAMRDYFSAWRALEDAYEEGKLKAIGVSNFYPHVLANFCETVRVKPMVNQVELHPYFAQPEALATMKYYNVQPEAWAPLGGGRHKPFENNLLQSIADAHQKSISQVILRWNIQRGVVVIPKSTHQQRIEENFAIWDFSLTEKEMAQISSLDLGYVGESVKHFNPEFVRGCLAVKIHD

SEQ ID NO: 3014 - protein, 507 aa, Campylobacter jejuni
MKKLTNDFGNIIADNQNSLSAGTKGPLLMQDYLLLEKLAHQNRERIPERTVHAKGSGAYGEIKITADLSAYTKAKIFQKGEITPLFLRFSTVAGEAGAADAERDVRGFAIKFYTKEGNWDLVGNNTPTFFIRDAYKFPDFIHTQKRDPRTHLRSNNAAWDFWSLCPESLHQVTILMRDRGIPASYRHMHGFGSHTYSFINDKNERFWVKFHFKTQQGIKNLTNQEAAELIAKDRESHQRDLYNAIENKDFPKWKVQVQILAEKDIEKLGFNPFDLTKIWPHSLVPLMDIGEMILNKNPQNYFNEVEQAAFSPSNIVPGIGFSPDKMLQARIFSYPDAQRYRIGTNYHLLPVNRAKSEVNTYNVAGAMNFDSYKNDAAYYEPNSYDNSPKEDKSYLEPDLVLEGVAQRYAPLDNDFYTQPRALFNLMNDDQKTQLFHNIATSMEGVDEKIITRALEHFEKISPDYAKGIKKAFPIVSRIRAWRNHGHRCFLCEIVIRSQFHTTYEPEA

SEQ ID NO: 3015 - protein, 350 aa, Arabidopsis thaliana
MAEEIRFFELNTGAKIPSVGLGTWQADPGLVGNAVDAAVKIGYRHIDCAQIYGNEKEIGLVLKKLFDGGVVKREEMFITSKLWCTYHDPQEVPEALNRTLQDLQLDYVDLYLIHWPVSLKKGSTGFKPENILPTDIPSTWKAMESLFDSGKARAIGVSNFSSKKLADLLVVARVPPAVNQVECHPSWQQNVLRDFCKSKGVHLSGYSPLGSPGTTWLTSDVLKNPILGGVAEKLGKTPAQVALRWGLQMGQSVLPKSTHEDRIKQNFDVFNWSIPEDMLSKFSEIGQASDFPHIVVHIGQRAFFVLLTHLGYRILKTCVSMLQGRLVRGMSFVHETSPYKSLEELWDGEI

SEQ ID NO: 3016 - protein, 246 aa, Lycopersicon esculentum
MGRGRVELKRIENKINRQVTFAKRRNGLLKKAYELSVLCDAEVALIIFSNRGKLYEFCSTSSMVKTIEKYQRCSYATLEANQSVTDTQNNYHEYLRLKARVELLQRSQRNFLGEDLGTLSSKDLEQLENQLESSLKQIRSRKTQFMLDQLADLQQKEQMLAESNRLLRRKLEESVAGFPLRLCWEDGGDHQLMHQQNRLPNTEGFFQPLGLHSSSPHFGYNPVNTDEVNAAATAHNMNGFIHGWML

SEQ ID NO: 3017 - protein, 343 aa, Oryza sativa (japonica cultivar-group)
MFNCAAREKAMVINLEFIRAIVTADEILLLDPLTIDVIPFVEQLTHHLPLKNLVCGNGQPGGDDHGEKHDDSHGDQVPRLNEATGAEHELPFEFQVLELALETVCSSFDVNVSGLERRATPVLEELTKNVSTRNLDRVRTLKSDLTRLLAHVQKVRDEIEHLLDDNEDMAHLYLTRKQLQNQQVEALISSAASNSIVPGGTSLSRLNNSFRRSVSIATSMHLDNDVEDLEMLLEAYFMQLDGIRNRILSVREYIDDTEDYVNIQLDNQRNELIQLQLTLTIASFGIAVNTFIAGAFAMNIQSKLYSIDDGSFFWPFVGGTSSGCFMICIVLLWYARWKKLLGP

SEQ ID NO: 3018 - protein, 1123 aa, Orobanche minor
MASSQPGRSSTNSAQSRQSARIIAQTSIDAKLDADFEESGSSFDYSTSVRVTNYPAGLSEPRSDKVTTAYLHQIQKGKLIQQFGCLLALDEKTFRVIAYSENAPEMLTMVSHAVPSVGDHPLLGIGSDIRTIFTAPSAAALQKALGFGEVSLLNPILVHCKTSGKPFYAIIHRVTGSLIIDFEPVKPHEVPMTAAGALQSYKLAAKAIACLQALPGGSIERLCDTMVQQVFELTGYDRVMIYKFHEDDHGEVFTEITKPGLEPYVGLHYPATDIPQAARFLFMKNKVRMICDCRANHVKVVQDDNLPFDLTLCGSTLRAPHGCHSQYMENMNSIASLVMSVVVNEGDEDGPDSSSGPYKRKRLWGLVVCHNTCPRFIPFPLRYACEFLVQVFSIHVNKELELENQMLEKNILRTQTLLCDLLLRDVPLGIVSQSPNVMDLVKCDGAILLHKRTKYRLGLTPTDFQIRDIVSWLDEYHQDSTGLSTDSLYDAGFPGALALGNALCGMAAVKITDEDWLFWFRSHTAAEIRWGGAKHELEAKDDGRKMHPRSSFRAFLEVVKTRSLPWKDYEMDGIHSLQLILRNAYKESEEKDLESREIHARLNELQIDGVKEIEAVTSEMVRLIETATVPIFSVGVDGLVNGWNTKISDLTGLSVVEAIGMHFLALVEDSSADTVSKMLGLALQGKEEHDVQFEIKTHGQRSESGPISLIVNACASKDVKENVVGVCFIAQDITTQKSMMDKFTRIEGDYRSIIQNPNPLIPPIFGTDEFGWCSEWNAAMIKLSGWGREAVIDKMLLGEVFGLNKACCRLKNQEAYVNLGVVLNNTVTGQESGKVSFGFFSRSGKYVACLLCVSKKVDSEGSVTGLFCFLQLASPELQQALHIQRISEQTASKRLRVLAYIRREIRSPLSGIIFSRKLMEGTDLNDEQKNIVRTSLHCQSQMNKILEDTDLDHIIEGYLDLEMVEFKLHEVLIASISQVISKSNGKGIKIVDNLAPNLSNETLYGDSLRLQQVLAAFLLIAVDSTPSGGQLGVAATLAKDSIGEFVQLGRLECRITHGGGVPQEILNQMFGDEPTDASEDGISLFISRKLVKLMKGDIQYLREAGRSTFIISVEIAISNKPNL

SEQ ID NO: 3019 - protein, 205 aa, Magnaporthe grisea 70-15
MSSRKKVLLKVIILGDSGVGKTSLMNQYVNKKFSASYKATIGADFLTREVLVDDRQVTMQLWDTAGQERFQSLGVAFYRGADCCVLVFDVNNSKSFDALDSWRDEFLIQASPRDPDNFPFVVLGNKIDVEESKRVISTKRAMTFCQSKGGIPYFETSAKEAINVEQAFEVIARNALAQEESEEFSGDFQDPINIHIDNDRDGCAC

SEQ ID NO: 3020 - protein, 656 aa, Clostridium acetobutylicum ATCC 824
MYKKLFEKGKIGELELKNRIVMVALAVGAAKSDQTIGDDMMEYYLERARGGVGLIIAENTRVNDENGVAARRQVSVARDEHIAPLKKLVDALHSENTKFFVQLHHPGRETYSNLNGDKPVVAPSAIPCGVCKQETRALETSEVEGIIQDFINGAKRAKKAGVDGVELHAAHGYLISQFLSPYTNKRTDKYGGSFEKRFNFVKEVVLGIKNACGQDYPISVRLTVDELLNLNGVKQEYLDLNMGIKICRELEKIGVDVINVSNGIYETFNSLSEPMTYDQGCRTERIKAVKEAVEIPVIAVNMIKEPWFAEKMLEDKLVDFIGLGRALVADSDWPKKALEGRDEDINRCISCTFCFETLLDQVIPNVGPIKCAVNPRAAHEFKYKEFNKNGADKVVAVVGAGVAGLEAARVLKIRGFKPVVLEQSADVGGQINVADKPPRKEKIDWIVEYEKTQLNKMGVEIKLNTKVTLEYLKKMKPYAVFIATGSVPLVPKSIKGIDRENVYTIDDVLTGKVKIIDKKVALIGSGSSGLETAEFLCINKNDVSIIEMQDAIGKGVYVQHYLDAMDKLSKFKVNYMPSNKLLEVTNKGVKLENIVERRIVDYDTDYVVLSLGVKANNDLEALCKAEFENVRVIGDAAAVGRIESSVRSGFEAAFWL

SEQ ID NO: 3021 - protein, 184 aa, Triticum aestivum
  misc_feature (166)..(166): Xaa can be any naturally occurring amino acid
  misc_feature (173)..(173): Xaa can be any naturally occurring amino acid
NKFVQKSRLLPVRNSRDIVDPRVRLDGMLSFVLLDTRDKSFIAARDALGICPLYMGWGLDGSVWFSSEMKALSDDCERFISFPPGHLYSSKTGGLRRWYNPPWFSESIPSAPYDPLLIRESFEKAVIKRLMTDVPFGVLLSGGLDSSLVASVVSRHLAETKSCQAXGNKLHTXFCIGLEGSPDL

SEQ ID NO: 3022 - protein, 664 aa, Listeria innocua Clip11262
MTDYPSIFEPLTVKRMTIKNRVIMPPMGTNLAGLNGEFLEEHMNYYEQRAKGGTGLITIENACVDFPYGTNGTTQLRIDNDQYIPGFYKLTERLHKHGTCVSIQINHAGASAYPARLNGLQPVSASDIPSKKGGTVPRPLTVEEIYEIVNKYGDAARRAQQAGFDAVEIHGGHSYLLCQFLSPLYNKRTDEFGGTPENRARIVKLILEKVREEVGPFFPIVLRFSADEFTEGGNHLEDILELLDYCQEEADILNVSAAINDNLYLQIDQMNLEDGWRSYLAKAVKDKFNKPTITSGNIRSPKAAEKILSEGYADLLAMGRGLIAEPNWVNKVATGQEDMLRKCISCNIGCADHRISKSKPIRCTVNPDIIHEDKYKETKVTRPTNVVVIGGGTAGLEAACTAAEVGCNTTLIEANEQTGGLARAIANLPDKSRIADFPNYLANRAEKLTNLKVITGTKADTALIDTFNPDVVVNATGSKPLLPPIKGLLDVIDKEGSKVHSIFGLISNIDDFTEFSNKKVAVIGGGAVGLDVVEYFSERGSDVTIVEMMPILGKDLDMITRLSMMDIIEKNHVDVQTETALTEVAADHFKVKHDGVDAEIPFDYGFVCLGMRPERPLMEELAAYGKEKQIEIVNIGDSAATRKILEGVREGRNILTTLEKIGSL

SEQ ID NO: 3023 - protein, 255 aa, Glycine max
  misc_feature (198)..(198): Xaa can be any naturally occurring amino acid
MGRGKIVIRRIDNSTSRQVTFSKRRNGLLKKAKELAILCDAEVGVMIFSSTGKLYDFASSSMKSVMDRYSKSKEEPCQLGSSASEIKFWQREAAMLRQQLHNLQESHRRKMMGEELSGLTVKELQNLENQLEISLHGVRMKKDQLLMGEIQELNRKGNLIHQENVELYKKVYGTQDDNETNRDSVLTNGLGIGEDLQXACESPAKPATATATTLQGIFRNYKIGIAIALIHIQDVCVSQLLSRKMDSDLNLDVFV

SEQ ID NO: 3024 - protein, 365 aa, Geobacter sulfurreducens PCA
MSHLFEPLTIRSLTLPNRIAVSPMCMYSSEDGFANDWHLVHLGSRAAGGAGLVLTEATAVTPQGRISPRDLGIWRDEHIEFLARIVHFITQRGSTAGIQLAHAGRKASTPAPWEQRTATLSGAEGGWPIVAPSPIPFDEGCIVPQELSTGEIDAITAAFVDAARRSLLAGFQIAEIHAAHGYLLHQFLSPLSNQRTDQYGGSFENRTRLLRTVVTAVREVWPEHLPLWVRISATDWVDGGWDIEQSVELVRRLLPLGVDLIDCSSGGSAPHARIPLGAGYQTQFAERIRRETGGRTGSVGQITAPAQADHIIRSGQADLVLLARELLRDPYWPLRAARELGHQSPWPAQYVRAAPHNTPAYLPKD

SEQ ID NO: 3025 - protein, 415 aa, Anabaena sp.
MSYYIAPRFLDKLAVHITKNFLNLPGVRVPLILGIHGRKGEGKTFQCELAFEKMGVEVTLISGGELESPDAGDPARLIRLRYRETAELIKVRGKMCVLMINDLDAGAGRFDEGTQYTVNTQLVNATLMNIADNPTDVQLPGSYDSTPLRRVPIIVTGNDFSTLYAPLIRDGRMEKFYWEPHRDEKVGIVGGIFAEDGLSQRDVEKLVDSFPNQSIDFFSALRSRIYDEQIRDFIHQVGYENVSLRVVNSLEGPPAFKKPDFTLSHLIESANFMVAEQKRIETSQLVDEYNRLNRGRSYQPASPVAEIATSQPSPNGVNQPQSASPHISLETQEQIRQILAQGHKITFEHVDNRRFRTGSWQSCGTIHVDAESDAISTLESCLAEYRGEYVRLVGIDPKAKRRVVETIIQRPNGTN

SEQ ID NO: 3026 - protein, 484 aa, Pasteurella multocida subsp. multocida str. Pm70
MSKCPFDHGSKTLTNAAGAPIVENDNTMSAGPKGPLLLQDVWFQEKLAHFARERIPERVVHAKGSAAYGTFTVTHDISKYTKADLFNGIGKQTQVLLRFSTVAGERGAADAERDVRGFALKFYTEQGNWDLVGNNTPVFFIRDPLKFPDFIHTQKRNPQTNLRDANAAWDFWSRHPESLHQIMILFSDRGIPTDLRHMNGYGSHTYSFINAQNERFWVKFHFKTQQGHKFYTNEEAAKVVGENRESSQQDLYEAIERGEFPRWNVQVQIMPEADAHKHNYAFDLTKVWPHKDYPMIEVGVLELNQNPINYFAEVEQAAFAPSNIVPGIGFSPDRMLQGRLFSYQDAQRYRLGVNHHQIPVNAPKCPYHTTHRDGAMRVDNNGGTHPNYAPNRFDTYVPTHQQEPALELERSAAHFNFREYDEDYYTQPAALYNLFDVDQKARVAANFAAGLAGVTEPAIVERQLAHFDKVSKELADAIRANLAK

SEQ ID NO: 3027 - protein, 99 aa, Rumex obtusifolius
MATIGGIKQVEGSANSLEVESLAKFAVEDHNKKQNAMLEFSKVVNTKEQVVAGTMYYITLEATDGGKKKVYEAKVWVKPWMNFKQVQEFKLLGDQGSTS

SEQ ID NO: 3028 - protein, 241 aa, Lycopersicon esculentum
MGRGRVELKRIENKINRQVTFAKRRNGLLKKAYELSVLCDAEVALIIFSNRGKLYEFCSSSSMLKTLERYQKCNYGAPEPNISTREALEISSQQEYLKLKGRYEALQRSQRNLLGEDLGPLNSKELESLERQLDMSLKQIRSTRTQLMLDQLTDYQRKEHALNEANRTLKQRLMEGSQLNLQWQPNAQDVGYGRQTTQTQGDGFFHPLDCEPTLQIGYQNDPITVGGAGPSVNNYMAGWLP

SEQ ID NO: 3029 - protein, 381 aa, Manihot esculenta
MCGGAIISDFIPATAAGRSSRRLTADFLWPDLKKPIGKIVGDLDDDFEADFQEFKDESDVDEEDDVLFDVKPFSFSATASPPPRNRSPSRGSTAVKSVEFNGLAEKSAKRKRKNQYRGIRQRPWGKWAAEIRDPRKGVRVWLGTFNTAEEAARAYDAEARRIRGKKAKVNFPDEAPRASPKRTMKANPQKPLPKRNATESMSYLNNPDQDYFNTLGSVDEKPLVSQFDLMDSFPANGDATVKSIPPCDNVPTFFNSDQGSNSFECSDFGWGEQASKTPEISSVLSATPEIDESLFMDDANPKKKMKSDSENAVPIEESNGKSLSEELLAFDNQMNFQMPYLEGSWEASLDGFLNGDVTQDGGNPMDLWSFDDLPNMVGGVY

SEQ ID NO: 3030 - protein, 488 aa, Bacillus anthracis str. A2012
  misc_feature (149)..(149): Xaa can be any naturally occurring amino acid
  misc_feature (194)..(194): Xaa can be any naturally occurring amino acid
MNPNNRLTTNQGAPVGDNQNSRTAGRRGPVLLEDYHLVEKLAHFDRERIPERVVHARGAGAHGVFVTKNSMKKYTKAAFLQNEGTETPVFVRFSTVIHGQGSPETARDPRGFAVKFYTEEGNYDIVGNHLPVFFIRDAIKFPDMVHSLXPAPDTNIQTPDRYWDFMTLSPESTHMMTWVFSDYGTPASYREMEXFGVHSFKWINAEGKIVYIKYHWKPQQGVRNLSAKEVQEVQGKDFNHATRDLFDAIEKGNYPKWDLHVQVMQLEETDSLDFDPLDPTKVWPEDRFPLMEVGTMTLNRNPKNFFAEVEQVAFSPSATVNGIEPSEDKLLQGRLFSYPDTQRYRLGANYLQIPVNCPYAAVHNQQRDGAMQINQNPSTINYEPSRHAENPVEDPAYRDSTMKVEGYVSREKIDKPNDFKQAGERYRSFSKEEQDNLIANLTSDLKDVNERTKLLAVCNFFRADQEYGMRLAQALNVDITQYVGNAPK

SEQ ID NO: 3031 - protein, 333 aa, Chlorobium tepidum TLS
MNKLTTIESHFLQLQKRYPEINSEVTDLLNDVAFAAKLVRREVVRAGLADILGLAGSTNVQGEEVKKLDLFANERLINAIGQHGRFAIMGSEENEEIIKPPKFESGEYVLLFDPLDGSSNIDVNVSVGTIFSIYRLKSGEPSQASLEDCLQKGADQIAAGYVIYGSSVMMVYTTGHGVHGFTYDQTVGEFLLSHENITTPEHGKYYSVNEGSWQEFNDGTKRFLDYLKEEDKATGRPYSTRYIGSFVADFHRNLLTGGVFVYPATKKHKNGKLRLMYEANPMAFICEQAGGRATDGYRRILDIEPKELHQRTPLYIGSKNDVLIAEEFEQGKR

SEQ ID NO: 3032 - protein, 416 aa, Zea mays
MINKDKVMKVGLMEQIKREISIMRLVKHPNILQLYEVMASKSKIYFVLEYAKGGELFNKIAKGGKLSEDAARKYFQQLVSAVDFCHSRGVYHRDLKPENLLLDENENLKVSDFGLSALAESKRQDGLLHTTCGTPAYVAPEVLSRKGYDGAKSDVWSCGVILFVLVAGYLPFHDTNLIEMYRKISRAEFRCPRFFSTELKDLLHKILVPDPSTRISISRIKRSAWYRKPVEAHAKKNEAETSENTCTGEGFNLSGFFEDKYGRREERFTTRQPVTTVFTKLKELAKRLKLRVKKKENGTLKLAAPKEGKKDRSTLAVHVLQRNVSPGDIQRHPDMSPSKKQLTNNNDSLYWSNEKYDYSCSWLDDRAMISALLDVVIEEDSARALSPLPLVAVEAELHPVSVGHKSMDAEMKQPLE

SEQ ID NO: 3033 - protein, 252 aa, Petunia x hybrida
MRVNRNATVFIALNLILFLVFVFTAFALSGQENTGGFCGEEEEKGNNYIEMALLGGIRDSHPESQNSDEIHSLAKFAVDEHNKKENAMFELARVVKAKEQVVAGTLHHLTLEVVDAGKKKLYEAKVWVKPWLNFKELQEFTHVEDAPAITSSDLGVKKEEQCSGFKSVPVHDPVVQEAAEHAIKTIQQRSNSLLPYELQEIVHANAEMIEDSTKLHMLIKTSRGGKEEKFKVQVHHSNEGAFHLNHMEPDRS

SEQ ID NO: 3034 - protein, 427 aa, Oryza sativa
  misc_feature (76)..(76): Xaa can be any naturally occurring amino acid
RTSGSPGLQEFGTSARKRSAVSVAPPPPSPPRAPLPLRPDQLSLSLSLSLSLCPLRSSPPLAAPPPPAPTIDDSPXPPPPPPPTHAGKMKFGAIYEEYLREQQDKYLTKCSHVEYKRLKKVLKKCRVGRSLQEDCPNGDQQEGNNESPDICKCNSCTLCDQMFFTELTKEASEIAGCFSSRVQRLLNLHVPSGFLRYIWRVRQCFIDDQQIMVQEGRMLLNYVTMNAIAIRKILKKYDKIHGSVSGRDFKSKMQTDHIELLQSPWLIELGAFHLNCNSSDIDETVGFLKNEFFKNFSCDLTEARPLMTMAISETMKYEYSLTCPICLDTLFNPYALSCGHLFCKGCACGAASVYIFQGVKSAPPEAKCPVCRSDGVFAHAVHMTELDLLIKTRSKDYWRQRLREERNEMVKQSKEYWDSQAMLSMGI

SEQ ID NO: 3035 - protein, 462 aa, Oryza sativa
  misc_feature (145)..(145): Xaa can be any naturally occurring amino acid
KMINKDKVMKVGLMEQIKREISIMRLVKHPNVLQLFEVMASKSKIYFVLEYAKGGELFNKIAKEGKLSEDSARRYFHQLINAVDYCHSRGVYHRDLKPENLLLDENENLKVSDFGLSALAESKRQDGLLHTTCGTPAYVAPEVLXRKGYDGAKADVWSCGVILFVLVAGYLPFHDPNLIEMYRKICRADFRCPRYFSAELKDLIHKILDSDPSTRISIPRIKRSTWYRKPVEINAKNSEAATTNSISSGVATTSGSAECSTSEENQGSLSLPNLNAFDIISLSTGFNLSGFFEDTHGHQEERFTTRQPVTTVLGKLKELAKRLKLKVKKKDNGVLRLAAPKEGKKGFLELDAEIFEVTPSFLLVELKKTNGDTMEYRKLVKEDIRPALKDIVWVWQGDEHLNSQSILQGEQQQSPLPPELPQDQLQPSLPQQEKQDMPEPPLLPQVPQEEVQTSIPAEQTKN

SEQ ID NO: 3036 - protein, 135 aa, Zea mays
MRKHRIVSLVAALLVLLALAAVSSTRSTQKESVADNAGMLAGGIKDVPANENDLQLQELARFAVNEHNQKANALLGFEKLVKAKTQVVAGTMYYLTIEVKDGEVKKLYEAKVWEKPWENFKQLQEFKPVEEGASA

SEQ ID NO: 3037 - protein, 539 aa, Oryza sativa (japonica cultivar-group)
MELAMDFALRLRDAANHHLSRYEPLVLLAAPLLALLAARTLHAAAAAVADRGLRTVLLALAMTAIKLLPGVSAYINAEKRKVVDQLQSGGTSTKSTLRTELPTVGLSNQVINDLETLKARDVNWQGKCSGTVYIAGSESEGHFALINKAYSMFSHTNPLHQDVFKSVAQLEAEVVAMTAALLGIKEKSSGGQICGNMTSGGTESILLAVKTSRDYMRTKKGITKPEMIIAESAHSAYDKAAQYFNIKVRRVPVNKEFLADVKGFKRCINGNTIMMVGSAPGFPHGLIDPIEELGELASRYDICLHVDLCLGGFVLPFARKLGYPIPPFDFCVKGVTSISTDVHKYGLAPKGTSIVLYKNHEIRKHQFVAVTEWTGGLYVSPTIAGSRPGGLIAGAWAAMTSLGLNGYMENTGHIMEVSKKIQRGIEDIPGLFVIGKPDMTVVAFGSDSVDIFEVNDIMSSKGWHLNALQRPNSLHICVTLQHTVIYEEFLKDLKDSVDTVKANPGPISGGRAPIYGAAGKMPDRGMVRELLVEFMDASC

SEQ ID NO: 3038 - protein, 1364 aa, Xanthomonas axonopodis pv. citri str. 306
MPKGRWDLRRTYGRRAFFGALLILSAGLVAAIVTGVWLQRQNELERQQRFDYVVRTLARNIGERMSTFEHGLRGARGAVIGAGSDIISRERFTLYSRSRDYPREFPGVLGYGYIHRVAPADEAAFLQAARADGAPDIHRRPLAPWDGERYMVLYFEPESSGNRPLGIDIASEPRRRAAALQAARSGEPVMTSPISLSGYRIPNESGFLVLLAVYREGMPLQTPQQRMLATSGWVYAPFSVEQMVRSALGERDDVALDLSDRNEPTHNFYRSGTPASDSALRPPVVRLLPIYGRTWVITAHPTAGFVASLNQSSPWLIGGLVMAASVLFAALLVLYFSNGLRREEVLRKQMELAALVSHSSEAIVAQTPDGRITHWNPAAEAMFGYTADEAIDQDLTTLLSPQPYAMSEVDHADAALAGNASAAQTMRHRDGHQVHVLASKAPIIESEGTLSGHSHFFRDISDRVRSHQRIIDLNASLEHQVAERTSELVKFSVLQRAILAHAGYAIIATDSGGFVTLFNPAAEKLLGYSAAEVIGRRKASQFVEQEELQERAHMLAEQTGTQVAHTLEAIAALTSLGRSDTSEWTYVSHDGRRLPVLLTLSTLRDDHDQVIGYLGVAVDLTEQKLHEKQLRLAMDAAKSANQSKSDFLANMSHEIRTPMNAILGMLYLLQRSELPGAAQDMVAKIDRSARTLLEIINDILDFSKIEAGRIDLECAPFDLNQLFDNIADLMRSSLSAKPVEMIVEPLPRDSRWLLGDALRINQVLVNLVGNAIKFTEQGEVVLSVRRFPSGDPNKFKLLFSVRDTGIGISKEKQSVIFSPFLQADTSTSRRYGGSGLGLTISRRLVELMGGELEVESVPGRGSEFYFVVTLEKSAPLQAQRELPVLPPEAMPRVLIADDHDAALNNLVRIATELGWRVDAVASGQAALQAIEHAAEPYDIFLLDWRMPDIDGVAIAREIRARATPGPHPVIVMVTAYERRLLEQHPEQQDLDAVMTKPVTGAALHRLVEQLLEERPGARPATPTFVARRLEGAHLLLVDDSDINCEVAQRILEGEGAMVTVAHDGEQAVSTLKRAPNLFHLVLMDVQMPVVDGYEATRRLRQIPALASLPVIALTAGAFRPQQEKALEAGMNGFIAKPFNVEELVTAIRHFLQPGTRRIPSLPHEAQAHAGPEWKYSDPELLDAARARSLWREREPYARYLIKLLRDNPDPGEIAAEHLRRNELPAIGAMAHKLRGAAGSLALPALAGAAGDLETRIEEGHDITGSLIALKDVMQRTAEAIRAFLQHGDSDVAADEDGAALDADSVQILTSAFASDDADRIDHALLICAPRLPHALQEALQRAVEDFDFRRAETTLREWQTTHPH

SEQ ID NO: 3039 - protein, 516 aa, Pisum sativum
MAVVAAPKKNNSFNKKDNPNLLLGRFELGKLLGHGTFAKVHLAKNIKTGEAVAIKIISKDKILKSGLVSHIKREISILRRVRHPNIVQLFEVMATKTKIYFVMEYVRGGELFNKVAKGRLKEEVARKYFQQLICAVEFCHARGVFHRDIKPENLLLDENGNLKVSDFGLSAVSDEIKQDGLFHTFCGTPAYVAPEVLSRKGYDGGKVDIWSCGVVLFVLMAGYLPFHDPNNVMVMYKKIYKGDFRCPRWFSPELVNLLTRLLDTKPQTRISIPEIMENRWFKIGFKRIKFYVEDDVVCNLDSLGLDGNNGNDGNDDKKVLNIDEHRDEALESVSESEWDSEVVNRRKNRQLGSLPRPASLNAFDIISFSQGFDLSGLFEEKGDEARFVSGASVSKIMTKLEEVAQLVSFKVRKKDCRVSFEGSREGVKGPLSIAAEVFELTPSLVVVEVKKKGGDKVEYDRFLNTELKSALHSLTMEESAGSSCQNTPDETLQQRAFSDSAIDKHSDSIESLNLDT

SEQ ID NO: 3040 - protein, 569 aa, Glycine max
  misc_feature (228)..(228): Xaa can be any naturally occurring amino acid
MCGILAVLGCVDNSQTKRARIIELSRRLRHRGPDWSGIHCYEDCYLAHQRLAIVDPTSGDQPLYNEDKTVIVTVNGEIYNHKQLRQKLSSHQFRTGSDCEVIAHLYEEHGEEFVNMLDGMFAFILLDTRDKSFIAARDAIGITPLYLGWGHDGSTWFASEMKALSDDCERFISFPPGHIYSSKQGGLRRWYNPPWFSEDIPSTPYDPTLLRETFERAVVKRMMTDVGXPPLLSGGLDSSLVAAVVNRYLAESESARQWGSQLHTFCIGLKGSPDLKAAKEVADYLGTRHHELYFTVQEGIDALEEVIYHIETYDVTTIRASTAMFLMSRKIKALGVKMVLSGEGSDEIFGGYLYFHKAPNKKEFHEETCRKIKALHLYDCLRANKSTAAWGVEARVPFLDKEFINVAMSIDPEWKMIRPDLGRIEKWVLRNAFDDDKNPYLPKHILYRQKEQFSDGVGYSWIDGLKDHANKQVTDATMMAANFIYPENTPTTKEGYLYRTIFEKFFPKNAAKATVPGGPSVACSTAKAVEWDAAWSKNLDPSGRAALGIHDAAYDAVDTKIDEPKNGTL

SEQ ID NO: 3041 - protein, 208 aa, Oryza sativa (indica cultivar-group)
MASYHQQQGGSTFMAIPTINFQMYSEIAGDDEWWEYIPCPFCYIEVEVPFLCDHLQEEHCFDMKNAVCPICADNLDKDTDEHFRVQHSHLLKRRKSSSFSCKPSSAAADKGSYEEDSYFEAPSHCMGRPAPDSSPDPLLSQFICCSLAPPVDSPRRSEADAEGHGSSSSDDQKRREQGVMDDASKEELEERLQRIEFVKQMLMTTIAY

SEQ ID NO: 3042 - protein, 270 aa, Medicago sativa
HEGQGKSFQAELVFAKMGINPIMMSAGELESGNAGEPAKLIRQRYREASDIIRKGKMCCLFINDLDAGAGRMGGTTQYTVNNQMVNATLMNIADNPTNVQLPGMYNKEDNARVPIIVTGNDFSTLYAPLIRDGRMEKFYWAPTREDRIGVCIGIFRHDNIAKDDIVKIVDTFPGQSIDFFGALRARVYDDEVRKWVSGVGIETIGKKLVNSKEGPPVFEQPKMTLEKLLEYGNMLVSEQENVKRVQLADKYLEGAALGDANQDAIKEGKF

SEQ ID NO: 3043 - protein, 270 aa, Manihot esculenta
KFHWKPTLGVKCLMDDEAQKIGGVNHSHATQDLYDSIAAGNYPEWKLFIQTMDPADEDKFDFDPLDMTKIWPEDMFPLQQLGRLVLNRNIDNWFAENEMLAFDPGHVVPGIHYSNDKLFQLRTFAYADTQRHRLGPNYKMLPVNAPKCNYHNNHYDGFMNFMHRDEEVDYFPSRYDPVRHAERTPLPHAIISGRREKCVIEKENNFKQPGDRYRSWTPDRQERFLCRLVNALSDPRITHEIRSIWVSYWSQCDKSLGQKLASRLNVRPNF

SEQ ID NO: 3044 - protein, 672 aa, Escherichia coli CFT073
MSYPSLFAPLDLGFTTLKNRVLMGSMHTGLEEYPDGAERLAAFYAERARHGVALIVSGGIAPDLTGVGMEGGAMLNDASQIPHHRTITEAVHQEGGKIALQILHTGRYSYQPHLVAPSALQAPINRFVPHELTHEEILQLIDDFAHCAQLAREAGYDGVEVMGSEGYLINEFLTLRTNQRSDQWGGDYRNRMRFAVEVVRAVRERVGNDFIIIYRLSMLDLVEGGGTFAEMVELAQAIEAAGATIINTGIGWHEARIPTIATPVPRGAFSWVTRKLKGHVSLPLVTTNRINDPQVADDILSRGDADMVSMARPFLADAELLSKAQSGRADEINTCIGCNQACLDQIFVGKVTSCLVNPRACHETKMPILPAVQKKNLAVVGAGPAGLAFAINAAARGHQVTLFDAHSEIGGQFNIAKQIPGKEEFYETQRYYRRMIEVTGVTLKLNHTVTADQLQAFDETILASGIVPRVPPIDGIDHPNVLSYLDVLRDKAPVGNKVAIIGCGGIGFDTAMYLSQPGESTSQNIAGFCNEWGIDSSLQQAGGLSPQGMQIPRSPRQIVMLQRKASKPGQGLGKTTGWIHRTTLLSRGVKMIPGVSYQKIDDDGLHVVINGETQVLAVDNVVICAGQEPNRALAQPLIDSGKTVHLIGGCDVAMELDARRAIAQGTRLALEI

SEQ ID NO: 3045 - protein, 167 aa, Thiobacillus denitrificans ATCC 25259
MLHTLKQAGKNIGRELNRAWESLAEGWRELLSSSGNALTHFARDKDKDEAEQGGPLDFPHWALLAGEVEETEKDVLVRLEVPGMKKEECTITIEGNTLRLSGEKHFAREAHDSTYHVMERAYGVFHRSVPLPRNVDSDKAEASYSNGVLTVRLPKLPGEQARSVPIS

SEQ ID NO: 3046 - protein, 544 aa, Chlamydia trachomatis
MVAKNIKYNEEARKKIQKGVKTLAEAVKVTLGPKGRHVVIDKSFGSPQVTKDGVTVAKEVELADKHENMGAQMVKEVASKTADKAGDGTTTATVLAEAIYTEGLRNVTAGANPMDLKRGIDKAVKVVVDQIRKISKPVQHHKEIAQVATISANNDAEIGNLIAEAMEKVGKNGSITVEEAKGFETVLDVVEGMNFNRGYLSSYFATNPETQECVLEDALVLIYDKKISGIKDFLPVLQQVAESGRPLLIIAEDIEGEALATLVVNRIRGGFRVCAVKAPGFGDRRKAMLEDIAILTGGQLISEELGMKLENANLAMLGKAKKVIVSKEDTTIVEGMGEKEALEARCESIKKQIEDSSSDYDKEKLQERLAKLSGGVAVIRVGAATEIEMKEKKDRVDDAQHATIAAVEEGILPGGGTALIRCIPTLEAFLPMLTNEDEQIGARIVLKALSAPLKQIAANAGKEGAIIFQQVMSRSANEGYDALRDAYTDMLEAGILDPAKVTRSALESAASVAGLLLTTEALIAEIPEEKPAAAPAMPGAGMDY

SEQ ID NO: 3047 - protein, 373 aa, Zea mays
MNINRKWGSQRRYLGRCRCLGQERINVVIAAVNDSQLSYGGPKPANCRSVARYLSRDLPYELSPDDVYLTNGGAQAIEIVCSALARPGANILLPRPGYKLYEARAVFSGMEARYFDLVPGEGWEVDTDSVRALADKNTVAVVIINPGNPCGNVYSYEHLAKASARYFWLALGLVAETARKLGVFVVADEAYAHLTFGERRFVPMGVFGAVAPVITLGSISKRWLVASSIKTYHYICSDPTTFVQGAVPNLLENTSEEFFRRNIRTLKESADMCWEKLKGVNGIACPSRPMGSMFVMVKLDLSCLQGIEDDMDFCCRLAKEESVVVLPGRVVGCEDWLRITFAIDPSSLEDGLDRLRSFCSRHSKPAAQGSAAS

SEQ ID NO: 3048 - protein, 309 aa, Yarrowia lipolytica CLIB122
MTSIDFTMNNGKTIPAIGLGTWKSTTEEVAGAVECALTEGGYRHIDTAFNYRNEDAVGLGIKRAMEKGVKREDIFVTTKIWVTYHDRVEENLDLSLERLGLDYVDMLLIHWPVPLNPNGNDPVYPLRPDGSRDIDESGSQPKTWKQMEAVLKTGKTKSIGVSNFSIPYLEELLKEAEVVPAVNQVELHPLLPQLELMEFCKKNNIIMTAFSPFGSVGGPLLKNELVLKLADKYETSPGGILTSYHIGNGTVVIPKSVTNSRIIENGKSAVNLSKEDLQALNDLHKTEGIHRTSKPKWGVDLGFPDFDFC

SEQ ID NO: 3049 - protein, 602 aa, Deinococcus radiodurans
MTQTQPVTPTPPASFQTQHDPRTRLGATPLPGGAGTRFRLWTSTARTVAVRVNGTEHVMTSLGGGIYELELPVGPGARYLFVLDGVPTPDPYARFLPDGVHGEAEVVDFGTFDWTDADWHGIKLADCVFYEVHVGTFTPEGTYRAAAEKLPYLKELGVTAIQVMPLAAFDGQRGWGYDGAAFYAPYAPYGRPEDLMALVDAAHRLGLGVFLDVVYNHFGPSGNYLSSYAPSYFTDRFSSAWGMGLDYAEPHMRRYVTGNARMWLRDYHFDGLRLDATPYMTDDSETHILTELAQEIHELGGTHLLLAEDHRNLPDLVTVNHLDGIWTDDFHHETRVTLTGEQEGYYAGYRGGAEALAYTIRRGWRYEGQFWAVKGEEHERGHPSDALEAPNFVYCIQNHDQIGNRPLGERLHQSDGVTLHEYRGAAALLLTLPMTPLLFQGQEWAASTPFQFFSDHAGELGQAVSEGRKKEFGGFSGFSGEDVPDPQAEQTFLNSKLNWAEREGGEHARTLRLYRDLLRLRREDPVLHNRQRENLTTGHDGDVLWVRTVTGAGERVLLWNLGQDTRAVAEVKLPFTVPRRLLLHTEGREDLTLGAGEAVLVG

SEQ ID NO: 3050 - protein, 293 aa, Synechococcus elongatus PCC 7942
MSSEPSDGHDLRRSFRDRQELIDYLQQQFPEAAAVDAQVSPIPGGYQAAIAQLEAINPLRYGKSRNFLDGAVTRLSPYIRHGVLSLATVRDRVLAQIRQRSDGEKLITELAWRDYWQRIYWEWGDRIWRDREPYKTGWDSQQYSEALPPDLQAAETGLACMDRFSRELKETGYLHNHARMWMAAYLVHWRRIRWQAGARWFLQHLLDGDPASNNLSWQWVASTFSTKPYWFNRENLQRYNGDRDCQDCPSRDRCPFDGSYDELADQLFPKAEFRDQPRQGGRWHRDRSNSRQR

SEQ ID NO: 3051 - protein, 492 aa, Secale cereale
MDPCKFRPSSSFDTKTTTTNPGQPVWNDNEALTVGPRGPILLEDYHLLEKIAHFARDIPEPFVHAGRASAKGFFECTHDVTGLTCADFLPSPGAGTPVIVRFSTVIHERGSPETIRDPRGFAVKFYTREGNWDLLGNNFPVFFIRDGIKFPDVIHAFKPNPKSHVQEYWRVFDFLPHHPESLHTFFFLFDDVGIPTDYRHMDGFGVNTYTFVTRAGKSHYIKFHWRPTCGVSCLMDDEATLVGGKNHSHATQDLYDSIDAGNFPEWKLFVQVIDPEQQDRFDFDPLDDTKTWPEDLVPLQPVGRLVLDRNVDNFFNENEQLAFGPGLVVPGIYYSDDKMLQCRVFAYADTQRYRLGPNYLMLPVNAPKCGFKKNHYDGAMNFMHRDEEVDYYPSRHAPLRHAEPASFPVPTRPVVGKREKTRIKKENDFVQPGERYRSWAPDRQDRFVALRRRLAHPKVSHELRVIWIDFLSKCDKSCGMKVANRLNVKPSM

SEQ ID NO: 3052 - protein, 371 aa, Mesorhizobium loti MAFF303099
MTTLFDPLRAGDLTLANRIVMAPLTRNRSPNAVPGDLSVTYYSQRATAGLIVTEATAISHQGQGYANVPGLYGADQLAGWRRVTDAVHRGGGKIVVQLWHVGRISHNTLQPGGGKPVAPSAIRANSKTFLVKPDGSGEFAETSEPRALDAAELPGIVDDFRRAAKAAIEVAGFDGVEIHGANGYLIDQFLRSGTNHRNDAYGGSIENRTRFLFEVVDAVTGAVGAGRTGIRLSPVTPANDASDSDPQPLFNHVVAGLGGRGLAYIHIVEGATGGARDFSQGDRPFDYEELKATYRKAGGAGAWLVNNGYDKELAEKAVGDGYAELVAFGKLFIANPDLVSRLKRNAELNAPDKATFYGGDARGYTDYPTAA

SEQ ID NO: 3053 - protein, 753 aa, Magnaporthe grisea 70-15
MSTPPPKRTDVTYRLRNTPTKTAPESSARGILGGEGWTIQLAQYCDHSCWDALGATSFCFCGDIGGRQPYGKGLVYKMAASLLLLLLCFGRYPWHVGNYQINAYLRVLKSRNMVQYVFTPWKDRGELLQVRRQFFPQQVAQHAPTVASGNGAVAAAGTAASSSFSSSSIVSSSSSSRADKKSAVSRVSMWMQRGGCPHMVESTALLIAAMIADEESMLLPTGKSATDSNSSYAVRASYSAAFSRFVTGLLDSHQDKAHKMSMYSVAKTIGLPATFVELRHQATHEQLPSLTRLRAGAQAGLVWIWDYYWKQLSAAEEDEDQVPVVAGRSAAAPHVEEVPQVVASACRDALRRYLDVGKEDLPTIARFVRRWGSSRVLSVLDAIGDEAGSAQPMDNRLVLGTLKLARQVTEMEQARDNDGSVDFVGDGGAPRSDLGQVPIEVQGVTSDAMVTESQDSKQAGGGWTRLRGSWRQKPIGFSFTPRRTMQVKSIPMFVADFLNRTGYIGVGSSDNYAYLVIDDKTKDAVIIDPANPEEAAPPIKKAIESGEINLKAIVNTHHHWDHSGGNKKFRDALELPDLPIIGGKNCEAVTTTPANGEGFPFGSIQVKGLYTPCHTQDSICWFMQDGDDKVVFTGDTLFHGGCGRFFEGTPEEMNTALNKTLAALPDDTRVFPGHEYTKSNVKFGISVLQSEPVQKLQEFAESNKETQGQFTIGDEKKHNVFMRMDDPVIQKATGETDPVKVMGKLREMKNNFK

SEQ ID NO: 3054 - protein, 363 aa, Rosa hybrid cultivar 'Kardinal'
MGLAENQLSFDVIEEWIKKNPKASICTPEGVAEFKNVANFQDYHGFPDFRKAIANFMSKARGGRVKFDPDRVVMAGGATGANETVMFCLADPGDAFLVPSPYYPAFYRDLGWRTGVKIVPVDCDSSNNFQVTRAALEAAYEKARNNNINIKGLIITNPSNPLGTTVDRDTLTSLVKFINDKNIHLVCDEIYAGTVFSCPKFTCVTEVLQDVKNCNRDLIHIVYSLSKDMGVPGLRIGIVYSYNDAVVNCARKMSSFGLVSSQTQHMLSAMLLDDEFVSNFLETSSKRLARRHRFFTTGLEEVGINCLKGNAGLYCWMDLRKLLKDQTFEAEMVLWRMIINEVKLNVSPGSSFRCVEPGWFRVC

SEQ ID NO: 3055 - protein, 218 aa, Ipomoea batatas
MGRGKVEIRRIEKSTNRRVTFWKRRNGLLKKAMEMGILCDAEVGLMIFSSTGKLHEFATTSIRSVIERYNKTQGDSLQSPLDPTLELKFWQIEVAILRQQLHNMQEDHRKVMGEVYGLSVKDLQNLENQLEMSLSGIRMKKEQILIEQIQELTHKQGSFVHQENFELFNKFQAYGTSDPNAVNGDTISPYDFTISEESQGHIHFQLPQNFSDLARALY

SEQ ID NO: 3056 - protein, 366 aa, Pseudomonas fluorescens PfO-1
MTKQTLFSPYTLGSLTLSNRVVLAPLTRNRAGQGFVPSEFAAVYYSQRASAGLLISEATQISQQGQGYQDTPGIYTQAQIDGWRTVTDAVHAKGGKIFLQLWHVGRVSHVDLQENGAAPVAPSALRAATKVFVNNRFEDVSEPRALETSELPGIVSDFRQAAANAVAAGFDGVEIHGANGYLLDQFLRDNANLRTDAYGGSIENRARLLLEVTAAVINEIGADRTGVRLSPVSPANGVSSSDPQAQFNYIVEQLDALGVVYLHMVEGATGGPRDVAPFDFGALRQRFKNTYIANNGYDLDLAAARLAEDQADLIAFGRPFIANPDLVERLKQGAPLSAFNPATLYGGGAAGYIDYPTLAESSVSAS

SEQ ID NO: 3057 - protein, 414 aa, Anabaena variabilis ATCC 29413
MQKQFFRLGFSLLVALSLAVGVVVQPATALTEEQKLVSEVWRIVNRSYLDETFNHQNWANVRQKALEKPLTDHKAAYGAIQNMLKTLGDPFTRFLDPEQYRSLQVSTSGELTGVGLQIALNPQSGKLEVVSPIAGSPADQAGIKPRDRIVKIEGISTTDLTLDEAATRMRGPIGSLVTLVIERDGEGEKEIRIVRDRIALNPVVAELRSSPEGKSFGYLRLTQFNANASMELAHAISSLEKKGAAAYILDLRNNPGGLLQAGIEIARQWLDSGTIVYTVNRQGIQGSFEAFGPALTDDPLIILVNQGTASASEILAGALQDNGRAQLVGETTFGKGLIQSLFELSDGSGLAVTIAKYETPNHRDINKLGIKPDTVVTQQILTRDEIATETDLQYQAALDLLSKNSVVAGIGNKG

SEQ ID NO: 3058 - protein, 433 aa, Arabidopsis thaliana
MSLKIKFLLLLVLYHHVDSASIVKFLPGFEGPLPFELETGYIGIGEDENVQFFYYFIKSENNPKEDPLLIWLNGGPGCSCLGGIIFENGPVGLKFEVFNGSAPSLFSTTYSWTKMANIIFLDQPVGSGFSYSKTPIDKTGDISEVKRTHEFLQKWLSRHPQYFSNPLYVVGDSYSGMIVPALVQEISQGNYICCEPPINLQGYMLGNPVTYMDFEQNFRIPYAYGMGLISDEIYEPMKRICNGNYYNVDPSNTQCLKLTEEYHKCTAKINIHHILTPDCDVTNVTSPDCYYYPYHLIECWANDESVREALHIEKGSKGKWARCNRTIPYNHDIVSSIPYHMNNSISGYRSLIYSGDHDIAVPFLATQAWIRSLNYSPIHNWRPWMINNQIAGYTRAYSNKMTFATIKGGGHTAEYRPNETFIMFQRWISGQPL

SEQ ID NO: 3059 - protein, 313 aa, Ceratopteris richardii
MAMPCSDIDLLDSDNDNVDDQHISLELRQVHEDTDDGSHDEPRELSLLNHESNLCKIVNSKGKGAEAGNSLLPSTGTSRGKIQIRRIENTTSRQVTFSKRRNGLLKKAHELSVLCDAEIALIIFSSTGKLFEYSSSRGIKKILERYKRCSGILQDVGGTVIRDVEYWKQEAERLKERLTYMEEIQRNMLGESLGSLQIKDLQNLEAKLDSGLYKIRGAKTQLMARQVQELQKKEQILLQQNEALRAKLAELSCLQAPVSGLTTATTSQDVQESSSGRGSRQRETSLSAAETTLQLASHNEQTFLLRAVPHMRL

SEQ ID NO: 3060 - protein, 236 aa, Ceratopteris richardii
TQKASELGNIHRKSAVSLLSDMSLDKSDTNINASGVTHSPLETESDTRSNLQSSNQPPYRSPRIAIRRVDNATNRQVTFSKRRNGLLKKASELSILCDAEIAAIVFSSTGRLSEFASSSMDKIIRRYEDLQSQSASRALLHQREYWKNQALHLRRQVGCMNDIQSCIMGENAAALSLDELQNTEARLQIALDKIRTRRNELLAMQTQNIISKGNGLWIENTLLRKRSTSAYDGEMP

SEQ ID NO: 3061 - protein, 745 aa, Shewanella sp. MR-4
MMTQAQTYFYDGSDVALLNGQYTDVFSLLGMHSINEGKALVVRCFLRNAQKVDVISLKDGRKVASLERVNEAGLFAGTLGRRVKPFLYALRVVYPLCELDIIDPYQFGSLLDSQDLYLFGEGSSEQAYRFLGANWRQVDSVEGVHFCVWAPNAKRVSVVGDFNHWDDTRHVMRQHMANGLWEIFLPDVAEGTHYKFDLVYQNGERHAKSDPMATQMECAPHNASIVPKKHQHPWADTQWMHKRATTAWHRAAMSIYEVQLGSWRRKGEFGEQYFDYQDLIEQLIPYVKEQGFTHIELMPVSEYPFDGSWGYQPVGLYAPTHRFGDANGLKAFIDACHQAEIGVLLDWVAAHFPKDPHGLVRFDGTCLYEHEDPRKGTHPDWDTLIYNYDRGEVRSFLLSNACYWLREFHLDGLRLDAVSSMLYLDYSREPGQWLPNAYGGRENLEAIHFLQMLNQRLYQAFPGICMIAEESTAFAGVTKPTDSGGLGFGFKWNMGWMNDSLSYLGRDPIYRQYHHNQLTFSLMYAYSEQFMLSISHDEVVHGKGSLLHKIPGDDWQKFATLKAYYGFMWGHPGKKLLFMGSEFAQRDEWNHNHSLDWHLLAFEPHQGVQRWLRDLNQLYRQFPALSVLDYESQGFRWLDCDNGRDSIFSFVRYGEGSDVPLVFVVNMTPTLHQGFRIGLPQGGDFCEYLNSDSHLYGGSNQGNAGKVIAEDLPWQGMASSALITVPPLGCLILGPATDAPRDTSL

SEQ ID NO: 3062 - protein, 281 aa, Picea mariana
AAGSGYWKATGADKPITAKGGKKRVGVKKALVFYVGKAPNGSKTNWLMHEYRVTNVSRPVKKKNSLILDDWVLCRIYNRRISAEKLALQQKESFNDVPMETIDEKEMENQLTSTSIEHSGIEQSNPSFDHLSKLGSSPTCYNSAPLCVSPMNSNICLQNLDFFQNSTTPFSDSTLKAPVQNTTFNPISSSINHQWTNCNSTDLMSGLHNDSSCSKPSSFSEPISEKEEVQSSFRLENFSQEQQQSLFNFGLEGLQNTFTHLDQITLPGAYQDWFYPNEPFH

SEQ ID NO: 3063 - protein, 469 aa, Rickettsia conorii str. Malish 7
MTLCLKNTHIWSIMLLRLIITLFFIINSICAFAEGEKETENKISNQEAYKQFQDVFERIEKAYVQVPDRQKMIDEAINGMLNSLDPHSSYYTDEDLEDIVTFTKGEFGGIGVEIMYDSGAIKIISPIDDLPAFKAGLKGGDYIVGVNDELVSTLGPNKAIKEMRGTPGTKVKLLIIKEEEAKPQELELTREIVKIKPIKAHLEKNNIAYIRITTFNESTISELKAAVKKLKTESKDDLKGIILDLRNNAGGILDQAIAVSDYFIDSGVIVTTKGRTTSSNSEIKANEFSLKAPKVPMIVLINGNSASASEIVAGALQDHKRAIILGTKSFGKGSVQALTQINSRAAVKLTISKYYTPSGRSIQAEGIEPDILIEPAKVEYPEVKKIDKRFSESSLKNYLKNDNEKNKDNASKNKDSQKETKAKNNKQEENELSELYKKDYQFARAYDVITGLIINKKLETKERVKQEDK

SEQ ID NO: 3064 - protein, 404 aa, Pasteurella multocida subsp. multocida str. Pm70
MAHFPKSDKLEHVCYDIRGPVHKEALRLEEEGHKILKLNIGNPAPFGFEAPDEILVDVIRNLPTAQGYCDSKGLYSARKAIVQYYQSKGIHGATVNDVYIGNGVSELITMSLQALLNDGDEVLIPMPDYPLWTAAATLAGGKPVHYLCDEEANWFPDVNDIKSKITKRTKAIVVINPNNPTGAVYSQDLLLEIIEVARQHKLIIFADEIYDKILYDDAVHHHIAALAPDILTVTFNGLSKAYRVAGFRQGWMILNGPKKAAAGYIEGLDMLASMRLCANVPMQHAIQTALGGYQSINEFILPGGRLLEQRNKAYELINQIPGVSCIKPQGAMYMFPKIDIKKFNIYDDEKMVFDLLAQEKVLLVHGRGFNWHSPDHFRIVTLPHVHQIEEALTKLARFLAHYHQ

SEQ ID NO: 3065 - protein, 602 aa, Deinococcus radiodurans
  misc_feature (1)..(1): Xaa can be any naturally occurring amino acid
  misc_feature (59)..(59): Xaa can be any naturally occurring amino acid
  misc_feature (164)..(164): Xaa can be any naturally occurring amino acid
  misc_feature (196)..(196): Xaa can be any naturally occurring amino acid
  misc_feature (243)..(243): Xaa can be any naturally occurring amino acid
  misc_feature (252)..(252): Xaa can be any naturally occurring amino acid
  misc_feature (262)..(262): Xaa can be any naturally occurring amino acid
  misc_feature (280)..(280): Xaa can be any naturally occurring amino acid
  misc_feature (434)..(434): Xaa can be any naturally occurring amino acid
XTQTQPVTPTPPASFQTQHDPRTRLGATPLPGGAGTRFRLWTSTARTVAVRVNGTEHVXTSLGGGIYELELPVGPGARYLFVLDGVPTPDPYARFLPDGVHGEAEVVDFGTFDWTDADWHGIKLADCVFYEVHVGTFTPEGTYRAAAEKLPYLKELGVTAIQVXPLAAFDGQRGWGYDGAAFYAPYAPYGRPEDLXALVDAAHRLGLGVFLDVVYNHFGPSGNYLSSYAPSYFTDRFSSAWGXGLDYAEPHXRRYVTGNARXWLRDYHFDGLRLDATPYXTDDSETHILTELAQEIHELGGTHLLLAEDHRNLPDLVTVNHLDGIWTDDFHHETRVTLTGEQEGYYAGYRGGAEALAYTIRRGWRYEGQFWAVKGEEHERGHPSDALEAPNFVYCIQNHDQIGNRPLGERLHQSDGVTLHEYRGAAALLLTLPXTPLLFQGQEWAASTPFQFFSDHAGELGQAVSEGRKKEFGGFSGFSGEDVPDPQAEQTFLNSKLNWAEREGGEHARTLRLYRDLLRLRREDPVLHNRQRENLTTGHDGDVLWVRTVTGAGERVLLWNLGQDTRAVAEVKLPFTVPRRLLLHTEGREDLTLGAGEAVLVG

SEQ ID NO: 3066 - protein, 542 aa, Oryza sativa
MGNQCQNGTLGSDYHNRFPREHAVGYVQGDSYLDLKKFDDTWPEVNNFKPTAASILRRGLDPTSINVLGRKTADLREHYIIGRKLGQGQFGTTYLCTEINTGCEYACKTIPKRKLITKEDVEDVRREIQIMHHLSGHKNVVAIKDVYEDGQAVHIVMELCAGGELFDRIQEKGHYSERKAAELIRIIVSIVAMCHSLGVMHRDLKPENFLLLDKDDDLSIKAIDFGLSVFFKPGQVFTELVGSPYYVAPEVLHKRYGPESDVWSAGVILYVLLSGVPPFWAETQQGIFDAVLKGHIDFQSDPWPKISDSAKDLIRKMLSHCPSERLKAHEVLRHPWICENGVATDQALDPSVISRLKQFSAMNKLKKLALRVIAERLSEEEIAGLREMFKAVDTKNRGVITFGELREGLRRFGAEFKDTEIGDIMEAAHNDNNVTIHYEEFIAATLPLNKIEREEHLLAAFTYFDKDGSGYITVDKLQRACGEHNMEDSLLEEIISEVDQNNDGQIDYAEFVAMMQGSNVGLGWQTMESSLNVALRDAPQVH

SEQ ID NO: 3067 - protein, 362 aa, Erwinia carotovora subsp. atroseptica SCRI1043
MSALFQPFKLKDITLRNRIAVPPMCTYSANDGLINEWHEVHYASLARGGAGLVIVEATAVAPEGRISPRCTGIWNDEQAQAFAKVAKSIKDAGSVPGIQIGHAGRKASANIPWEGDDHIPAGDSRGWQTIAPSAAPFGANLPKQPQEMTLEDIARVRDDFVAAARRALEAGFEWLELHFAHGYLAQSFFSAHSNKRNDQYGGSFENRSRFLLETLAAVRDVWPQHLPLTARFGVIEFDGRDEETLQESIELTRRFKAAGLDMLSVSIGFSTPEANIPWAPAFMGPIAQQVREQADLPVSSAWGFGTPELAEQAVASDQLDLVMVGKAHLANPHWSYQAARELGIDRASWTLPTPYAHWLERY

SEQ ID NO: 3068 - protein, 243 aa, Zea mays
ASRYDICLHVDLCLGGFVLPFAHKLGYPIPPFDFSVKGVTSISSDVHKYGLAPKGTSIVLYRNHEIRKHQFVAVTEWTGGLYVSPTIAGSRPGGLIAGAWAAMMSLGLNGYLDSTSRIMDVSKKIQRGIGEIPGLFVIGKPDMTVVAFGSDVVDIFEVNDIMSSKGWHLNALQRPNSLHICVTLQHTTVYDQFLKDLQDSVNTVKANPGPISGGKAPIYGAAGKMPDRGTVRELLVEFMDSSC

SEQ ID NO: 3069 - protein, 403 aa, Citrus sinensis
MAFALSNQEQLLSKIAAGNGHGEDSPYFDGWKAFESDPYHPTKNPNGVIQMGLAENLLCHELVEDWLMNNPKASICSAEGLNEFKGIANFQDYHGLPEFRNAVAKFMGKVRGNRVTFDPDRIVMSGGATGAHETVAFCLADPGDAFLVPTPYYPGFDRDLRWRTGVQLVPVVCDSSNDFKVTMEALEAAYEKAQESNIRIKGVLITNPSNPLGTFLDRETLKDIVSFINEKNIHLVCDEIYAATVFTKESSFVSIAEIIDQDIACNRNLIHIVYSLSKDMGFPGFRVGIIYSYNDQVVSCARKMSSFGLVSSQTQHLIATMLSDDQFVEKFIAESAKRIAERHKAFTWGLSQVGIGCLKSNAGLFLWMDLHHLLKEQTYEAEMALWQVIINEVKLNVKKKKKK

SEQ ID NO: 3070 - protein, 616 aa, Rhodospirillum rubrum
MCGLVAILERRGPADEAAVSKALARLARRGPDGEGRAAFWDGRLLLGHRRLAIFGKGADGAQPMVDPETGSVLVFNGALYNYVELRQALQALGQRFAGESDTEVALLAWRQWGEAAFARFNGMWAMVLLDAPGDRLVVSRDRLGVKPLYLCDTGGRVTFASTIAATLAASGIAPRVDDDAVFDFLVGGLTDHRGGSFFAGIVEVPAGALWSVDRSGGIDRRRFHDWRKEGSGEAAPPSAEALRATLSDAVRLRLRADVPAVALLSGGLDSSIVTRLATAPDMPRGALAGLLTYGYRDATEADETREAGRFAATLDSALPHDILRVAPLPAAPDLDALLAAQEQPFNTPSLVAAFRLYRLIAARGVKVAITGEGADELFAGYTNRYGALLAREHLRLGRLRPLGALLGSAHCPPRLVANRLAWDLPLAIVRPLMAGRVHGRVIARSFWQDSAERFEALAAYHHQPLASRLRDDALRALLPYSLRFADRSGMASGVEVRSPFLDYRVVEAALALPVAAKIDDRGGKRILRQAFRHDLPAEIIGAGKTHGLGMAEQFQVGHLDWAALAEAPPTLAARYLDLGRLKTALAAHPSDPRLWWPLCLLRWLAWVEGGMADAPR

SEQ ID NO: 3071 - protein, 90 aa, Oryza
MARIRARGSSRVDLARFAVTEHNKKANSLLEFEKLVSVKQQVVAGTLYYFTIEVKEGDAKKLYEAKVWEKPWMDFKELQEFKPVDASANA

SEQ ID NO: 3072 - protein, 404 aa, Neisseria meningitidis Z2491
MDKFPKSAKLDHVCYDIRGPVHKKALQLEEEGNKILKLNIGNPAPFGFEAPDEILVDVIRNLPTSQGYCDSKGLYSARKAIVHYYQTKGLRDITVDDVYIGNGVSELITMSMQALLDDGDEILIPAPDYPLWTAAATLAGGTVRHYLCDEENGWFPNLADMEAKITPKTKAIVVINPNNPTGAVYSREILLEIAELARKHGLIIFADEIYDKILYDGAVHHHIAALAPDLLTVTFNGLSKSYRVAGFRQGWMVLNGPKHHAKGYIEGLDMLSSMRLCANTPMQHAIQTALGGYQSINEFILPGGRLLEQRNRAWELVSQIPGVSCVKPMGAMYMFPKIDTEMYRIRDDMKFVYDLLVREKVLLVQGTGFNWIKPDHFRIVTLPYVHQIEEAMGRLARFLQTYRQ

SEQ ID NO: 3073 - protein, 389 aa, Zea mays
  misc_feature (57)..(57): Xaa can be any naturally occurring amino acid
  misc_feature (305)..(305): Xaa can be any naturally occurring amino acid
MEGAGGGAGGGGAGAGGCLGMGHGGEAQIKGTHTHGGRYVQYNVYGNLLEVSAKYVXPIRPVGRGACGIICAAVNAQTREEVAIKKIGNAFDNQIDAKRTLREIKLLRHMNHENVISIKDIIRPPRRENFNDVYIVYELMDTDLHHLLRSNQQLTDDHCQYFVYQLLRGLKYVHSANVLHRDLRPSNMLLNAKCDLKIGDFGLARTTTETDFMMEYVVTRWYRAPELLLNCSEYTQAIDMWSVGCIFGEMVTREPLFPGKDYVHQLRLITELVGSPDDTSLGFLRSDHARRYVRSLPQHPKQQFXVRFPTMSSGAMDLLERMLVFDPSKRITVDEALCHPYLASLHEVNDEPICPAPFSFDFEQPSLTEEAIKELIWKESLKFNPDPIH

SEQ ID NO: 3074 - protein, 371 aa, Lactobacillus plantarum WCFS1
MQAKYKKLFEPYTLNNDVVLKNRLVVAPLTIYDSGPDGELTPAAHNFWRNRFRGFGTWIVPFTNVHPSGIGFESPNAFHEENLPTLKAYATISHEQGAKAIIQLAHAGIHADPAMTKGYDLMGPSNLPYMGVRAMTDSEVREMVNAFAYATELAISAGLDGVEIHGANGWLIQQFVSETYNQRTDHWGGSVEKRFNFPLAIIDAIEAVRHKYHRPDFIVGYRFSPEEPGEVGLTMTETLALVDRLLDKPLQYIHISLWNFYKKIRRGGDVKKTRMEAVHDRINGRLPFIGVGDLFAEEQGLKAFNTGWADLLAVGGSVELNPNLIELIKTGQEDQIQSEFDWNEMDSYRFTPAMLYGTLAGNAMFPKVKQN

SEQ ID NO: 3075 - protein, 543 aa, Mesorhizobium loti MAFF303099
MSAKEIKFATDARDRMLRGVEILTNAVKVTLGPKGRNVIIDKAYGAPRITKDGVTVAKEIELADKFENMGAQMVREVASKTNDLAGDGTTTATVLAASILREGAKLVAAGMNPMDLKRGIDQAVAAVVVEIKAKAKKVKSSAEIAQVGTIAANGDATVGAMIAKAMDKVGNDGVITVEEAKTAETELDVVEGMQFDRGYLSPYFVTNADKMRVELEEPYVLIHEKKLGNLQAMLPILEAVVQSGRPLLIISEDVEGEALATLVVNKLRGGLKVAAVKAPGFGDRRKAMLEDIAVLTAGQMISEDLGIKLENVTIEMLGRAKRVLIEKDTTTIIDGAGTKATIQARVAQIKGQIEETTSDYDKEKLQERLAKLSGGVAVIRVGGVTESEVKEKKDRIDDALNATRAAVEEGIVPGGGVALLRARSALSGLNGANADVTAGISIVLRALEAPIRQIAENSGVEGSIVVGKLADSKDHNLGFDAQNETYVDMIKAGIVDPAKVVRTALQDAGSIAALLITAEAMITDIPAKDAAPAGGGGGGMGGY

SEQ ID NO: 3076 - protein, 343 aa, Kineococcus radiotolerans SRS30216
MSDEHAPVDPALVPRRELRGGATVPAIGIGTFGSDRYSPAEVAAAVAGAVAAGYRLVDCAAVYGNEAQVGEALAGAVAGGVDRDELFVVSKVWNDAHAPADAVASVHRSLRDLRLDHLDAVFVHWPFPNHHPPMADTDARDPRARPYDHDAYLALWGALEGLVDSGLVRHLGTSNTTVAKLDLLLRDARIPPALNEMELHPCFQQPELFAHCVRHGIQPVGYSPLGSPSRPERDRTPGDVVDTEDPVVVRIAREHGVHPALVCLKWAVARGQVPIPFSVKPAQYTANLRAVVEDPLTAQEVADLAAADRGERLIKGQVFLWPGAESWRDLWDEDGTIVGWTER

SEQ ID NO: 3077 - protein, 357 aa, Magnetococcus sp. MC-1
MNHLFKPLRIGDLELPNRLLMAPLTRCRADAQHVPTAMMVDYYAQRASAGLLITEATMVMQGYSAFWREPGIYSDAQIEGWKKITQAVHAKGGRIFMQIWHGGRACHPLLNDGREAVAPSPLAIAHDEVHTPQGKQPYTLPRALRDDELPAIVNGFARAARHARAAGFDGVEVHGANGYLLDQFLRDGSNHRSGAYGGSVENRARLLLEVIEAVSLAWGSERVGLRISPLNSFNDMIDSDPMGLAEWLAKRLNAYPLAYLHLMRRDFLGQQQGDVVPLVRQHYKGTLIGNMGYGGEEAEAAIAAGQLDGVAFGSAYLANPDLPERLRCGAPLNTPDPTTFYTQGAEGYTDYPTLAQG

SEQ ID NO: 3078 - protein, 923 aa, Pseudomonas putida KT2440
MRRLRIASALIVSLLTLLCMFPAAAEHDGGWTVLLDEQANLQLSDVRSERYRNQFSPLPLADLDAAPAGQALWLHYRLAPGDQEQLLRVFAPDLSGLDLYALEGEQLLRQLHHGRQAGNASPTLRGSDHVLPLPNSRQPLDIYLRLVSEHQLRPAISLEPAAEAASDQRQPLLFGMLFGGLIMLIMHNLIRFLYTRSSTTLILALYHGLMLLSGLILLNLSGPWWHVWHSAQTPAAYLTLVLAGLSGLYFTQHFFSPCNSPRLNRLLQGEMLIVGLSGLVLLFVDTLPLNLMTYALMALGSVSMLLVSSYHWYKGYAPGRLFSLAMVVFNLGGLVLLPALLGLTRTSTPWLLCILLGLTVVSGLLLNLAVSERLRRISEERFSASRALAASDAEINAKAEFLAKISHEIRTPMNGVLGMTELLLGTPLSVKQRDYVQTIHSAGNELLTLINEILDISKLESRQIELDDVQFDLNALIEDCLNIFRAKAEQQNIELISFTQPQVPRVISGDPTRLRQALSSLLENALKNTDQGEILLVVALDQRGEVPRLRIAVQDSGEPLPAADREALLQAELHSHHFLSSNKLGGHLGLVIAKQLIGLMQGEFGIKSSTGMGNTLWLTLPLDPSRLEQPPADLDSPLRDARVLVVDDNDTCRKVLVQQCSAWGMNVSAVPSGKEALALLRTKAHLRDYFDAVLLDQNMPGMTGMQLAAKIKEDPSLNHDILVVMLTGISNAPSKVIARNAGVKRILAKPVAGYTLKTTLAEELAQRGREQAMPASLPGIPQALDLPGDFRVLVAEDNSISTKVIRSMLGKLNLKPDTACNGEEALQAMKAQHYDLVLMDCEMPILDGFSATQQLRAWEAENQRQRTPVVALTAHILAEHKERARLAGMDGHMAKPVELSQLRELIQYWANHREAKVDPAHTS

SEQ ID NO: 3079 - protein, 151 aa, Coxiella burnetii RSA 493
MAKAVQKYPHSMLSHLQQDINRLFEPFGWATGGELWDAFSSEWSPHIDIKDEGQNYLICADIPGVDPKKIQVSMENNILTIKGERETEAKEKSEGYLRIERTKGAFLRQFTLPESVDAESIKAKSKHGVLEITIPKAQPPRTKKIEIEEQE

SEQ ID NO: 3080 - protein, 371 aa, Berberidopsis corallina
AAGALKSYKLAAKAISRLQSLPSGTISLLCDVLVQEVSDLTGYDRVMVYKFHDDEHGEVVAECRRPELEPYLGLHYPATDIPQASRFLFMKNKVRMICDCLAPPVKVIQDKRLAQPLSLCGSTLRSPHACHAQYMANMGSIASLVMSVTINEEDDEMESDQQKGRKLWGLVVCHHTSPRFVPFPLRYACEFLIQVFGVQVNKEVELAAQLREKHILRTQTVLCDMLLRDAPVGIVTQSPNVMDLVKCDGAALYYRNKFWLLGVIPTEAQIRDIAEWLLEYHGGSRGLSTDSLMEAGYPGALVLGDAVCGMAAIRITSKDFLFWFRSHTAKEIKWGGAKHDPDDKDDGRKMHPRSSFKAFLEVVKRRSLPWE

SEQ ID NO: 3081 - protein, 391 aa, Carallia brachiata
DLEPVNPADVPVTAAGALKSYKLAAKAISRLQSLPSRNMSLLCEVLVKEVRDLTGYDRVMVYRFHDDEHGEVVAESCRTDLEPYLGLHFPATDIPQASRFLFMKNKVRMICDCLAPPVKVVQDRRLAQPLSLCGSTLRAPHGCHAQYMANMGSIASLVMSVTINEDDAEMDSGQQNGRKLWGLVVCHHTSPRFVPFPLRYACEFLIQVFGVQINKEVELATQMREKHILQTQTVLCDMLLRDAPVAIVTQSPNVMDLVKCDGAVLYYRKKTWLLGITPTEAQISDIAEWLLECHSGTTGLSTDSLMEAGYPGASDLGDAVCGMAAVKITAKDFLFWFRSHTAKEIKWGGAKHDPHNKDDGKMMHPRSSFKAFLEVVKWRSLPWEDMEMDAI

SEQ ID NO: 3082 - protein, 1364 aa, Cochliobolus heterostrophus
MTEDIAGNEGDYFAMESRSRPESPSSIRSDPMSMHLTAPSATIASLTALQYLPIPVLVLSSQKTVILANEALGRLFNIDFESIHHLSITEALQGKTMGELGVDIIQNGSPILITWEAFLDCVVNDAVADNMDTDGDSYMTSGHTTPTADNTGHQQNKQQSQSLPPLSSTNLARTTVHDVSVDVVVVPLAIGSDDTLQKCDRKGSYSDAVQASCIVSIWSIEDTQYYTLTFTSATQAQDSKKAQPSTRMVNRTNTGVRLDKSRSSGSSTSSSRRSNNSSNTTSKIVTPTLQQPEFPPRGPPSKNKSDIANSASVFQKATQLKDAILNSITMPAYAMWKDESFGIPNKALLRLVPKDTSYLSGDQRDFLAQFSCWTEDFQRRLPIEEFPIIEVCRHKKRVEKHRLGIRHPVTGSGMVYEVNGEPVFHEETGEFLGGIVVFKDVTEYTQKIAEQIEQNEKQFEYITNFMPVMVWTTTPDGMHDWFSKRWYDYTGLTVDKSLGEGWRLPFHPDDMHATAERWFHSLKTGDEYNTEYRCQRFDGQWRWMLGRAVPFYDDAGRIVKWFGTCTDIHDLVLARQEARQTREQLQQVIQHAKIVLWVIDRNNRVKVLEGDIDANEHLSKDQLLGKDVYDVFEFTDNNRERWRGPIQEILQGKQSDEIVNGGYMSENRYYRTRLVPLMSTSRTAGIESQAFVDGVIGVSMDITELREREEQLKEQEKENSRLLANEAAAKEASRMKSQFLANMSHEIRTPIAGVIGMSELLFDMDLNEEQKECAENIHRSANSLLTVINDILDFSKVESGRLDVEEVQFSLSVVLRDVNKMMAFAANRKGLEYQSLIQDEVQSDLRVIGDPGRLRQILTNVLTNSIKFTSVGTVQLSVSISHETKETVTVNFSIVDTGIGIEEEVRKRLFQPFSQADSSTARRFGGTGLGLTISKNLVELMKGQIWLDSKLGQGTTATFWIPFTRAPSQDGESPLVHLESIPDRLQSDMSVSCGSSEGHTPPLTPQISNGTSAYPMFKSAIPDQFMSLSESERQNVHVLVVEDNHINQQIALKTIKKLQFSVNAVWNGQEALEYLAKEFGPLHPRPDIILMDVQMPIRDGYSATHAIRTEAPWRNMPEVQGVPIVAMTASAIQGDKEKCVSCGMDDYLAKPVKGKILEKMLVKWALEGRRKAARETPCTNDKDRRSKTVPNPGNNFSASDHPRTAGMSLESETTAQALTAELDRLHYQSDAAFARSSENESERAMRRIHAEERDRKLRDEKLFSLVGPQLLHHEASEGPHSEPSMPLTVENIEKLVHEQDADGSVTRKSPSPDEMGSSATNHVPHIMSEDNNNNNNNHLDVSRPGLQQVRNRESEQTIVEQVAR

SEQ ID NO: 3083 - protein, 807 aa, Cryptococcus neoformans var. neoformans B-3501A
MTSPSAQPMIPRSQPPRPSHTQSSPAINSTGIKPNGSPSVIRRAPSVPVNPSTAAASGSLSSLLKSENTAQAVSRSSPPTEPNDLPRPIEPTPMLPITGLPNSSSSSSNARHGSSSSISRGPSVTGTLTPATTALGAPIEPTPPQTGASKMAAAAKRGLDGSAGNNVKVYEEGHPLNEETLKQRGYQTLNILNHPFHLPDRWKLLRPLGQGAYGLVIQVQDAETEIPIAVKCVTRVFDKVILARRALREITLLRHFGEHDNLTGLVDMDNVWDGYNEIYLYMEPMEADLHQIIRSGQPLGNAHIQFFIYQLLRGMKYIHSANVIHRDLKPGNLLVNSGCELKICDFGLARGFNPVRGEEPQGEEGKLTEYVATRWYRAPEIMLSNRRYTTAIDVWSIGCILAELLGLKPVFKGKDYIEQMTLILETLGTPDEETMARVASEKALTFLKTLPTYEKKDLGSIFPDADPLAVDLTDKLLEFDPTRRIDVPSALTHAYVERYHDPEDEPSCDKIFDKWEEVESLSTIEELKEAITREIQGFREEVRMAAEEDDEDEEWAEGEYLDDENVFHDSPGPALASTLEKFTYPDHIAPSSSILPSAARLAPIIHQSPKGSKSPHVKSAHLPSVPSSANSSKPSSTAGSAPRTREHSPTTTFITPAEDYFTAQHGFGGPNGRASRRSSSHSTSGRRPASFLFSPFGAGMTQIVPTPNAYPRSHAQASPELTTAEKTPRDRRSSGLWRTRSRAQSQSGNLVLERLSSLEINDHKDGEKNRIDALHAVVGLGGDGEVPPMTVSPSDAPPSEVPKSFGY

SEQ ID NO: 3084 - protein, 472 aa, Coxiella burnetii RSA 493
MTTIFWFRQDLRLSDNPALVEAAKSADHLIPLYILDDQLKMLGDAQRWWLHHSLSSLQTALSKKGTSLILKKGDTKRVLLELIKKYKVEKIYWNRSYEPPYREIDTYLENRLPPLSVEIYHSTLLTEPQKIKNKSGGYYKIFTPFWKHINASLQPRKTLAAPKKFSQHRAIKSDNLETWNLLPKHPDWSQGFDQWKPGEKNAQIVLKKFIKENLKNYPAHRDRPDISSTSHLSPYLHFGEISIRQVWTAITQATIQDKNLQKAADVFLRQLIWREFAYYLLWHFPQMGRSNFRNQFDNFKWKKNKNWLRAWQKGLTGYPIVDAGMRELWCTGYMHNRVRMIVASFLVKDLMIDWREGEKWFWNTLLDADLANNALGWQWIAGCGPDAAPYFRIFNPILQSKKFDPDGTYIKRWIPELAKVPSKYIHYPADMPDNISESSKVNLGVDYPFPIVNHHKAKELALKAYKDSTYRL

SEQ ID NO: 3085 - protein, 391 aa, Celastrus scandens
  misc_feature (303)..(303): Xaa can be any naturally occurring amino acid
  misc_feature (389)..(389): Xaa can be any naturally occurring amino acid
DLEPVNPADVPITAAGALKSYKLAAKAISRLQSLPSSNMSLLCDVLVKEVSELTGYDRVMVYKFHDDDHGEVVAECCIPDLEPYLGLHYPATDIPQASRFLFMKNKVRMICDCLAPPVKVLQDKRLAQPLSLCGSTLRSPHGCHAQYMANMGSIASLVMSLTINEDDDETNSDQQKRRKLWGLVVCHHTTPRFVPFPLRYACEFLIQVFGGQINKEVELATQLKEKHILRTQTLLCDMLLRDSPVGILTQSPNVMDLVKCDGAALYYRNKFWLLGVTPTEIQIKDIAEWLLDYHSESTGLSTXSLMEAGYPDASILGEAVCGMAAVKITSKDFLFWFRSHTAKEMKWGGAKHDPADKDDGRRMHPRSSFKAFLEVVKRRSLPWEDVEMXAI

SEQ ID NO: 3086 - protein, 392 aa, Cissus sicyoides
DLEPVNPADVPITAAGALKSYKLAAKAISRLQSLPSGNISLLCDVLVKEVTELTGYDRVMVYKFHEDEHGEVIAECLRADLEPYIGLHYPATDIPQASRFLFMKNKVRMICDCLAPPVKIVQDKRLAQPLSLCGSTLRSPHGCHAQYMSNMGSVASLVMSATVNEEDEDDTESEQQKGRKLWGLVVCHNTSPRFVPFPLRYACEFLIQVFGVQINKEMELAAQMKEKHILQTQTVLCDMLLRDAPVGIVTQSPNVMDLVRCDGAALYYQKKFWLLGVTPTEAQIRDIVDWLLECHSGSTGLSTDSLMEAGYPAAPALGDAVCGIAAIKITSNDFLLWFRSHTAKEIKWSGAKHDPDDKDDGRKMHPRSSFKAFLEVVKRRSLPWQDIEMDAI

SEQ ID NO: 3087 - protein, 241 aa, Populus trichocarpa
MGRGRVQLKRIENKINRQVTFSKRRTGLLKKAHEISVLCDAEVALIVFSHKGKLFEYSTNACMEKILERHERYSYAERQLVATDLDSQGNWTLEYNRLKAKVELLQRNHRHYLGEDLDSVSLKELQNLEQQIDTALKLIRERKNHLMYQSISELQIKEKAIKEQNNMLVKQIKEKEKALAQPALWDQQDHGPNASSFLLPQPPLPCLNISYQEEDPEARRNYELDLTLEPIYSCHLGCFGT

SEQ ID NO: 3088 - protein, 1130 aa, Monotropastrum globosum
MSSSRPTQSSGSSGRSKHSARIIAQTTVDAKLHADFEESGGSFDYSTSVRFTGTVGGDIQPRSDKVTTAYLHQIQRGKLIQPFGCLLAVDEKTFKVIAYSENAPEMLTMVSHAVPSVGDHPLLGIGTDVRTIFTNPSAAALQKAMGYGEVSLLNPILVHCKTSGKPFYAIVHRVTGSLIIDFEPVKPYEVPMTAAGALQSYKLAAKAITRLQSLPSGNMRILCDAMVQEVFELTGYDRVMVYKFHDDDHGEVFSELTKPGLEPYLGLHYPATDIPQAARFLFMKNKIRMICDCHAKQVKVIQDDKLPIDLTLCGSTLRAPHSCHLQYMENMNSIASLVMSVVVNEGDEEGDGGGSSVSSNQQQKIKRLWGLLVCHNTTPRFVPFPLRYACEFLAQVFTIHVNKELELENQIHEKNILRTQTLLCDMLMRDAPLGIVSQSPNVMDLVKCDGAVLLYKDKTYRMGTTPTDFQLRDIVYWLSEYHTDSTGLSTDSLYDAGYPGALAFGDGVCGMAAVKITSNDMLFWFKAQTAAEIQWGGAKHESGERDDGRKMHPRSSFKAFLEVVKTRSLPWKDYEMDAIHSLQLILRNAFKDTKAMDATTDVIHTRLHDLKIEGMEELEAVTSEMVRLIETATVPILAVDVDGLVNGWNLKIAELTGLPVDKAIGRDLLSLVEDSSTGIVKKMLDLALQGKEEQNIQFELKTDESRRDSGPISLVVNACASRDHHENVVGVCFVAQDITGHKTVMDKFTRIEGDYKAIVQNPNPLIPPILGTDEFGWCSEWNLAMEKISGWNREDVINKMLLGEVFGTHVVCCRLKNQEAFVNLGIVLNNAVTGRESEKISFGFFARNGKYVECILCASKKIDGEGAVTGVFCLLQLASPELQQALHVQRLTEQTALKRFKELAYIRRQTRASLSGIMYSWRLMEGTDLRERQKQLLHTSAQCQHQLTKILDDTDLDCIIDGYLDLEMVEFTLYEVLSASISQVTLKSNGKGIHIANPLQEEKMPATLYGDNLRLQQVIADFLSISVNFTPNGGQIVASASLTKDRLGQSVQLVHVEIRITHMGGGVPEGLLNQMFGGDTDTSEEGISLLVSRKLVKLMNGDVQYLREAGKSTFIISVELAAAANKSTCE

SEQ ID NO: 3089 - protein, 532 aa, Ostreococcus tauri
IDGLPGRGAEKVTSAGDLLLCVSRDQQELVGYRFKGMSACVKRDERGVVVGGEGARRAARSFWSYFDEAWTTRLSDGEDAIVKDFMLEMHDGDFIVMASATPLDGASVAAGGAVRETEEGAPIGTRAGGGRRGTETQETSSGIQGAPSMQRITFHLVRTATGEKLDAFSFRDDFMHLPRNGAVSMRGDTLAVLSMKHQRVVFLKVHAEGRFEEVSSIGEYITEGDKEAVREQESVERAWAASHEESTKIIERANALPRSGRSMLTGLTQRLVTFLYHEARESSNVDALRLLHRNFERYVSLVMLRVRILDANLLLIKFGTPEYALARRGDNVIGPTMYAVFDITKGAFTQTAMSMNASNSVVEEDLNAPPRGETLWARFAGSQGEALAQCNTCTSSIEEEDEDGLNTVAARLFRAQDYPPQFRSLSPYFDKRLFSYDERTITAIDRLQPHVDFGVKFVSQRRGSRRRISFKLMVNDTVANSGRSKRRVQYVFHPVYPFAMSISIAYMQPTLVNFHVRSAPGDEMHEEIVQNP

SEQ ID NO: 3090 - protein, 586 aa, Gluconobacter oxydans 621H
MCGIAGLSCLPGHHPDQDALERMSQAIFHRGPDGEGRLDLGGAALRHRRLSIVDIAGGAQPFRLGAAALIANGEIYNDPAIRRRFPKTCFQTHSDCEPPLHLWLHDGAGYTHELRGMYAIAIVENEHGRHEMVLSRDPFGIKPLYIAAYEGGIAFASEPQALLAGGFGRRSVRDGARNELMQLQFTTGQDIIFDGIRRLLPGETLRIVDGRIVESRRRHVLHEARDTVPARLSDEQALARLDTALLDSVSAHLRADVPLGLFLSGGIDSSVILAAAHRLGLPHPRTWTARFDAGKADESADAAALAASVGAEHHVLTVTEDMVWRDLPSIVACMDDPAADYAVIPTWFLAREARKDVTVILSGEGGDELFAGYGRYRRVMKPWWKGGRAPYRSGTFGKRFAEHGRQWRRGIAMTELALGVSGLEGAQALDIAEWLPNDLLLKLDRCLMAHSVEGRTPLLDPVVAKAIWPLPEHFKVRDGYGKWLLRRWLQDALPQARPFAPKQGFTVPVGPWIEKQAHRLGPLVARQPCIRAMMPAADVERLFARASQRGVARQAWTLLFFALWHRHHIEGVPVDGDTFETLARAS

SEQ ID NO: 3091 - protein, 334 aa, Oryza sativa
MSFCERDMNKESMYQERDDMAGIRFATPPLPQQQQQQQLVECFSDEVDSRGSGGEMKDAVGSGSGQLVVVGGGDGASIEVAKKRRGRPPGSKNKPKPPVVITREAEPAAAMRPHVIEIPGGRDVAEALARFSSRRNLGICVLAGTGAVANVSLRHPSPGVPGSAPAAIVFHGRYEILSLSATFLPPAMSSVAPQAAVAAAGLSISLAGPHGQIVGGAVAGPLYAATTVVVVAAAFTNPTFHRLPADDDASVSVSVSLSGSGDADEHRGHQHKPEPQEPRQLRRPPPHLSAAAAVSAAQPVEPCGAPMYACHPQPQEVMWPPPARTPHPPPPPPY

SEQ ID NO: 3092 - protein, 374 aa, Arabidopsis thaliana
MEMVNAEAKQSVPLLTPYKMGRFNLSHRVVLAPLTRQKSYGSVPQPHAILYYSQRTSPGGFLIAEATGVSDTAQGYPDTPGIWTKEHVEAWKPIVDAVHAKGGIFFCQIWHVGRVSNRGFQPRRQAPISCTGKPIMPQMRANGIDEARFTPPRRLSIEEIPGIVNDFRLAARNAMEAGFDGVEIHGAHGYLIDQFMKDKVNDRTDEYGGSLQNRCKFALEVVDAVAKEIGPDRVGIRLSPFADYMESGDTNPEALGLYMVESLNKYGILYCHMIEPRMKTVGEIAACSHTLMPMREAFKGTFISAGGFTREDGNEAVAKGRTDLVAYGRWFLANPDLPKRFQLDAPLNKYNRSTFYTSDPVVGYTDYPSLESTA

SEQ ID NO: 3093 - protein, 242 aa, Glycine max
MALEALNSPTTTAPSFPFDDPTIPWAKRKRSKRSRDHPSEEEYLALCLIMLARGGTTTVNNRHVSPPPPQPQPQPQPTPDPSTKLSYKCSVCDKSFPSYQALGGHKASHRKLAAAAEDQPPTTTTSSATATSSASGGKAHECSICHKSFPTGQALGGHKRCHYEGNGNGNNNNSNSVVTVASEGVGSTHTVSHGHHRDFDLNIPAFPDFSTKVGEDEVESPHPVMKKPRLFVIPKIEIPQFQ

SEQ ID NO: 3094 - protein, 480 aa, Streptococcus pyogenes MGAS10394
MLAFPKEFWWGGATSGPQSEGRFAKQHRNLFDYWYEEEPDLFYDYVGPDTASDAYHQIESDLALLASLGHNSYRTSIQWTRLIDDFEQVTINPDGLAYYNRVIDACLANGIRPVINLHHFDLPIALYQAYGGWESKHVVDLFVAFSKVCFQEFGDRVKAWFVHNEPMVVVEGSYLMQFHYPAIVDGKKAVQVAYNLALATAKVIQAYRRGPAKLSNGRIGTILNLTPAYPASQSETDMAAAHFAELWNNDLFMEAAVHGKFPEELVAVLKKDGVLWQSTPEELALIAENRVDYLGLNFYHPKRVKAPDAIPVISPSWSPEWYYDAYLMPGRRMNVDKGWEIYPEAVYDIAIKMRDHYDNIPWFLSENGVGISGEDRYRDETGQIQDDYRIQFLKEHLTYLHKGIEAGSNCFGYHVWTPIDGWSWLNAYKNRYGLVENNIHTQVRRPKASAYWFKKVATHNRLISLEVMEEFGGSASHLSD

SEQ ID NO: 3095 - protein, 368 aa, Corylopsis glabrescens f. gotoana
ALKSYKLAAKAISRLQSLQSGNISLLCDVLVKEVSDLTGYDRVMVYKFHEDEHGEVVAECRREDLEPYLGLHYPATDIPQASRFLFMKNKVRMICDCLAPAVKVNHDKRLAQPLSLCGSTLRSPHGCHAQYMANMGSIASLVMSVTINEQDDEIESEQQQGRKLWGLVVCHHTSPRFVPFPLRYACEFLIQVFGVQISKEVELAAQLREKHILRTQTMLCDMLLRDAPVGIITQSPNVMDLVKCDGAALYYRKKFWLLGVTPTEMQIRDIVQWLLEYHSGSTGLSTDSLVEAGYPDALILGDAVCGMAAIRITSKDFLFWFRSHTAKEIKWGGAKHDPDDKDDGRKMHPRSSFKAFLEVVKRRSLPWE

SEQ ID NO: 3096 - protein, 189 aa, Zea mays
FLDKEFINVAMGMDPEWKMYDKNLGRIEKWVMRKAFDDYEHPYLPKHILYRQKEQFSDGVGYNWIDGLKSFTEQQVTDEMMNNVAQMFPYNTPSTKEAYYYRMIFERLFPQDSARETVPWGPSIACSTPAAIEWVEQWKASNDPSGRFISSHDSAATDHTAVSRRWPTAAARPANGTVNGKDVPVPIAV

SEQ ID NO: 3097 - protein, 240 aa, Arabidopsis thaliana
  misc_feature (216)..(217): Xaa can be any naturally occurring amino acid
MDPYKYRPSSAYNAPFYTTNGGAPVSNNISSPPVLLEDYHLIEKVANFTRERSPERVVHARGISAKGFFEVTHDISNLTCADFLRAPGVQTPVIVRFSTVVHERASPETMRDIRGFAVKFYTREGNFDLVGNNTPVFFIRDGIQFPDVVHALKPNPKTNIQEYWRILDYMSHLPESLLTWCWMFDDVGIPQDYRHMEGFGVHTYTLIAKSGKVLFXXGSTGKPTFWGSKKLKGAKFFGQL

SEQ ID NO: 3098 - protein, 155 aa, Lycopersicon peruvianum
MDLRLMGIDNTPLFHTLHHMMEAVGEDSVNAPSKKYVRDAKAMAATPVDVKEYPDSYVFVVDMPGLKSGDIKVQVEEDNVLLISGERKREEEKEGVKFIRMERRVGNFMRKFSLPENANTDAISAVCQDGVLTVTVQKLPPPEPKKPKTIQVKVA

SEQ ID NO: 3099 - protein, 739 aa, Silicibacter pomeroyi DSS-3
MSLVNKLAEERRARLAAERLLELKQAELSAANRKLGRHALALTKQIGEKQAEVATVRDENEKVKSDLTVANAKIEVAERRLWHSIQTIQDGFAFFDSDSKLIGANTAYLNVFDGLDEVAPGISYMRILQLMTEEGIIDTGELAAEEWRQMMHERWISPTPEPVVIRMWNDQYVKMIDQRGHGGDVVSLALNITSTVRYEAELRAAREKAEAANRAKSAFLANMSHEIRTPMNGVVGMAELLCDTALDEEQQLYASTIKNSGEALLVIINDVLDYSKIEAEKMMLHPEPFDLERCIHEVAMLMQPIVRDKGLTLLVDYDLFLPTLFVGDPGRVRQVLTNLLGNAVKFTTKGHILIRVTGVPDPATGRCAIHVAIEDTGIGIPREKLAHIFGEFNQVENERNRQFDGTGLGLAISQRLIQMMGGTVWVESEEGRGSCFGFRVTLPMSEEAQPVLPNLPGRLQHVLIVDDLAVNRAILEKQLAQLGVRVTCCASGAQALEKMSDCVDLVLSDHNMPEMDGLELAEALRGAGWSDLPIFLLSSNPGMAHADPAKRHVQGILQKPIPRAELFARLSDMRTEITSVQDPAAVSAPVTKPAQDAPGEPTERRQMRVLAAEDNRTNQLVFRKMVKTLDIDLRFANNGLEAVEIWQDFQPDLIFMDISMPKMDGKQATGEIRRLEAGTGRHVPIVALTAHAMAGDAEGILAAGLDQYLTKPLRKALIHQHIAEACPAGALPVEPESGE

SEQ ID NO: 3100 - protein, 1190 aa, Xylella fastidiosa Temecula1
MRCLKRVRGGLLTALLVFVSLLTATAAVPEMPRFRVLDATSGLPSNVVRAMLQDAAGYLWLATSDGLARYDGTAFKVWRHDPNDPGSLPGDSVLALYIDVQDRIWVLSENAGLAVLDAQRRRFIQIPVGSVAKTDALHTLTGHGDAIWLSDLHASVIRIDSAGALTRYALADVSPTLKDTPVVALTFDANGRLWVGTPDGLLYFEAGRLHLAPPPLDKTSIHSIAAVGSRLWVGSTDGVYLQDAEGRWRAPNWGPMFAFGNLLLSVADAGDGEFWLGSERGLWRTRQERPPVQIPLSDMHHGVSTVSSLWRDTSGGLWVPVYGRGLGYLRQDWKRMAVVRPSDGGESAYCNVAPAAYSGGLWQLNRIGELMHLNTSTGELVHTGWQRHELRGVNITATLEDSRGRLWLANMQNGLSRLDLKNGQWREWAAHGDDAVPLYGPISWIVEMPDSSLWLEALGVLQQRDLESGRVLNQIVPGSHGLDGSRVEQIGLGPDGRLWLAAGSGVYAWESQRRMFVPIPDLTGTRAYSFVPVGGNEVWVHRLRGLEQWRHSSHGWKRVALVGPQHGLPAMESLGMQHDAQGRIWLSTRRGLWRIDNTDELQVRNFGLRDGLGTQEFAEACLWMAPDGVLVGGTTDGYLMLFDTAMPDPAPFVPQLRMETVSVIRAGHRIDLPVDQPFELLPNDRQLIVGARLLSFGDPLSNRYSYWLKGFDTGWIDQGSSGTREFSSLPPADYTLLIQGTDPMGNLSRIHLVTFRVLPPWWRSAWGMSVLTGSGLLLLWGVAWNYHRRLRRRARLQLEQHQREVAERASLAKTQFLATLGHEVRTPMTGVLGMSELLLETPLDTRQHGYATSIQAAGKHLLRLVNDALDLAKIEAGKLSLERRDFDFHALLEQVVAMIRPMVERKGLRFVYRLDPEVPQYVHGDADRLQQILLNLLINATKFTEHGEVVLQVAPGQEQACLGVRIDVADTGPGLSEEQCQRLFRRFEQVNGASTAARYGGSGLGLAICRELATVMEGEIHVDSELGKGTCFRVLLPLPWVLAVQPAVAVMDMEPSPCSNPLHLLLIEDDPTVAEVIVELLRARGHRVTHALHGLEALVEVTLTRFDACLCDLDLPGLDGAGLIVQLRAQGQSFPIVVVTARTDADAQRQAFHVGCDAFLRKPVTGEMLEQVLTQVLSAPRQDADVDTPT

SEQ ID NO: 3101 - protein, 368 aa, Daphniphyllum macropodum
ALKSYKLAAKAISRLQSLPSGNISLLCDVLVKEVSDLTGYDRIMVYKFHEDEHGEVIAECRRPNLEPYLGLHYPATDIPQASRFLFMKNKVRMICDCLALPVKVKQDKRLPQPLSLCGSTLRSPHGCHAQYMANMGSIASLVISVTINEEDEEMESDQLKGRKLWGLVVCHHTSPRFVPFPLRYACEFLIQVFGVQISKEVELGTQMREKHILQTQTVLCDMLLRDAPVGIVTQSPNVMDLVKCDGAALYYRKKFWLLGVTPTEAQIRDIAQWLFEYHSGSTGLSTDSLVEAGYPSALILGDAVCGMAAIKITSKDFLFWFRSHTAKEIKWGGAKHDPDDKDDGRRMHPRSSFKAFLEVVKRRSLPWE

SEQ ID NO: 3102 - protein, 391 aa, Euonymus alatus
DLEPVNPADVPITAAGALKSYKLAAKAISRLQSLPSSNMSLLCDVLAKEVSELTGYDRVMVYKFHDDDHGEVVSECCRPDLEPYLGLHYPATDIPQASRFLFMKNKVRMICDCLAPPVKVLQDKRLSQPLSLGGSTLRSPHGCHTQYMTNMGSIASLVMSVTINEDDDETNSDQKIGRKLWGLVVCHHTTPRFVPFPLRYACEFLIQVFGVQINKEVELAKQLKEKHILRTQTLLCDMLLRDAPVGILTQSPNVMDLVKCHGAVLYYRNKFWLLGVTPTETQIKDIAEWLLDYHSESTGLSTDSLVEAGFPDASILGEAVCGMAAVKITSKDFLFWFRSHTAKEMKWGGAKHDPGDKDDGKRMHPRSSFKAFLEVVKQRSLPWEDVEMDAI

SEQ ID NO: 3103 - protein, 370 aa, Gunnera monoica
  misc_feature (180)..(180): Xaa can be any naturally occurring amino acid
  misc_feature (366)..(366): Xaa can be any naturally occurring amino acid
ALKSYKLAPKPISRLQSLPSGNISLLCDVLAKEVSDLTGYDRVMVYKFHEDEHGEVVAECRRPDLEPYLGLHYPATDIPQASRFLFMKNKVRMICDCMALPVRVIQDNKLPQPLSLCGSALRSPHGCHMQYMANMGSIASLVMSVTINEDEEEEEEESNRQTRRKLWGLVVCHHTSPRFXPYPLRYACEFLIQVFGVQINKEVELAAQMREKHVLRTQTVLCDMLLRDAPIGIMTQSPNVMDLMKCDGAALYYKNKIWLLGVTPTELQLRDIAQWLLENHNSSTGLSTDSLLEAGYPNATILGDLVCGMAAVKITSKDFLFWFRSHTAKEIKWGGAKHDPGEKDDGRKMNPRSSFKAFLEVVKRRXVPWE

SEQ ID NO: 3104 - protein, 391 aa, Ixonanthes chinensis
DLEPVNPADVPVTAAGALKSYKLAAKAISRLQSLPSRNLSLLCDVLVKEVSDLTGYDRVMVYKFHEDGHGEVVAECCRPDLEPYLGLHYPATDIPQASRFLFMKNKVRMICDCRTSSVKVVQDQKLTQPISLCGSTLRAPHGCHAQYMANMGSIASLVMSVTINEEDDEIESDHQKARKLWGLVVCHHTCPRFLPFPLRYACEFLMQVFGVQVNKEVELAVQMREKHTLRTQTVLCDMLLRDAPVAIVTQSPNVMDLVRCDGAALYYRKKFWLLGVTPTEPQIRDIVEWLLEYHSGSTGLSTDSLMEAGYPGASILGDAVCGMAAIRITSKDFLFWFRSHTAKEIKWGGAKHDPGDKDDGRKMHPRSSFKAFLEVVKRRSLPWEDVEMDAI

SEQ ID NO: 3105 - protein, 222 aa, Picea abies
MGRGKIEIKRIENTTNRQVTFCKRRNGLLKKAYELSVLCDAEVALIVFSSRGRLYEFANHSVKRTIERYKKTCVDNNHGGVISESNSQYWQQEAGKLRQQIEILQNANRHLMGDGLTALNIKELKQLEVRLEKGIGRVRSKKNEMLLEEIDIMQRREHILIQENEILRSKIAECQNSHNTNMLSAPEYDALPAFDSRNFLHANLIDAAHHYAHQEQTTLQLG

SEQ ID NO: 3106 - protein, 741 aa, Pseudomonas syringae pv. phaseolicola 1448A
MNAPHKTGTGRRAIPAAVDIDALIRAEHRDPFSILGPHGDGGSGQYVRAYLPAALSVRLLAKDDGRELGEMEMSEVPGFFVGHLEQPQPYLLKVQWAGGEQITEDPYSFGPLLGEMDLYLFAEGNHRDLSSCLGAQVTKVDGVDGVRFAVWAPNARRVSVVGSFNSWDGRRHPMRLRHPTGVWEIFVPRLQPGEVYKYEILGAHGILPLKSDPMALATTLPPDTASKVSAPLQFEWNDQEWLRSRTGRHDVAAPLSIYELHAGSWQMEQHEDGQWRQYNWRELADRLIPYVKELGFTHIELMPIMEHPFGGSWGYQLLAQFAPTARYGSPEDFAAFVDACHRAEIGVILDWVPAHFPTDTHGLAQFDGTALYEYADPKEGFHQDWNTLIYNLGRTEVHGFMLASALHWLKHYHIDGLRVDAVASMLYRDYSRNAGEWVPNRFGGRENIETIDFLRHLNDVVALEAPGTMVIAEESTAWPGVSEPTQQGGLGFNYKWNMGWMHDSLQYMMRDPLHRRHHHSTLTFGLVYAWSERFVLPISHDEVVHGKHSLIDKMPGDRWQKFANLRAYLSFMWTHPGKKLLFMGCEFGQWREWNHDEQLDWYLMQYADHVGVKNLVGDLNRLYRQEKALHQRDADPAGFQWLIGDDQANSVFAYLRWSNDGEPLLVVANMTPVPRLAYRVGAPVSGAWTELLNSDAETYAGSNMGNGGEVNTEDEPAHGMEASLKLNLPPLAVLILKPKKD

SEQ ID NO: 3107 - protein, 223 aa, Synechococcus elongatus PCC 6301
MLAALQAEGLTLTAILNTHHHGDHVGGNRRLLRQFPEAAVSASAVDRDRIPGQTVLLEAGDRLQICGQTAEVLFVPGHTRGHIAYYFPEVAEGNPRGALFCGDTLFAGGCGRLFEGTPAQMLDSLQQLRSLPDDTAIYCAHEYTLNNLRFALTVEPDNFDLQQRYQAVAIARQQGQATIPSRLDIEKATNPFLRWDQAALQAAVSSQDPVQTLARLRSRKDQF

SEQ ID NO: 3108 - protein, 796 aa, Pseudomonas syringae pv. syringae B728a
MLGRHRAPEVAVLMDISLKNRLSFKQARLAVSIGFVLGTLLSLFQIAIDYASEDASINREIKSLLEIIQNPASRIAYNIDSELAQELTLGLLRSPAVVSARLTDNNDAVLSSVERPMATGRYRVFSDWLFGESRQFQEKLHLNHLPNETIGTLYLTVDTFAFGSHFLQRAEITLLNGFVRSLALAGILTILFYATLTKPLVRVIRELSSRDPRNPDQGKITCPPYHAQDEIGVLVETFNRQFETMSSEFSRRRAAEDRLTDHLNELENIVSARTNELKASNLRLRESNEELQIARSTALDMAHARSAFLAHMSHEIRTPLNGLLGMLALSLDSPLGAEQRQQLMIAHDSGKVLVELLNDILDMSKFDAGHLEIERIPFDLGMLIEDTANLLSQNAAPSVELTCLIAPDFPAMVTGDPTRVRQIVSNLLSNALKFTRFGRVDVRLTHHRDASSGEHRVRIEVRDTGIGIAQDAQTRIFQPFTQAETAITRQYGGTGLGLALTNNLCEAMNGTLSIQSQSGFGSQFCAELPLPVHVPAVTQTPLKGRVTVISSAGSGLVELLGSLLPFWGVDLKRRSIDDRAQAVDLDGSSDLVITDCPECLFTIRPTTPVPILLVTAYGNFMPGEQVAALAPLQQQARPLARNALYHTLRRILGQEETGLKDTQALEHTAPRLARVLLVEDNPVNQLVAKGILGKLGCEVIISSHGGEALEQLEQGHFDLVLMDCNMPVMDGYEASRQIRSSGRWPNLPIVALTANAMPDERERCKAAGMNDYLAKPFRRAELVSILDQWIPITGID

SEQ ID NO: 3109 - protein, 601 aa, Piromyces sp. E2
MLSLRQETSKIVCQNILKNGISSRIGSASRSVLSRRNYAAKDIMFSEDGRAKLAKGVNTLAKAVSVTLGPKGRNVLIDNQYGLPKITKDGVTVAKSVALKDRFENLGARIVQDVAIKTNDYAGDGTTTATVLARAIFAEGLKNVQAGINPMDLRKGVQMAVDEVVKFLKENKREIKTKKEIAQVGTISANNDKHIGNMLAEAMEKVGKDGVITIQEGRTMKDELVVTKGMSFKRQGFISSYFITDIKKQKCEFKNPLILICDQRISAIQDVIPALEIAAENRRPILIVAEDIEGEALAACILNKIRGQVQVCCVRSPSFGDNRRETIKDLGILVKGNVFNNEVENSLDKVEIGMLGTCDTVTVTKDDTVFINGAGSKEEIEKRCNAIREAIATTDSEFEKKNLRERLAKLTGGVALAKVGGVSEVDVNEKIDRFVDALCATQAAVEEGIVPGGGTALLKASKVLEKLHADSFDVQLGIDIVKKAIKVPIQTIVNNAGGEGAVVAETIYNSYKVDGVKDSNVDKYEPFSYGYDAYNNEFCDLIAEGIIDPVKVVRSAIVDASGVASLLTTSECMIVDKPKKKTTPPPAAPGMGGMGGMGGMF

SEQ ID NO: 3110 - protein, 401 aa, Candida glabrata CBS138
MPFVKDFKPIALKDTNMFKPIKIGNTEVAHRVVMPPLTRMRAHHPGNVPNKEWAVEYYKQRSQRPGTMIITEGAFPCAQAGGYDNAPGIWSEEQVAEWTKIFKAIHDNKSFVWVQLWVLGRQAFPDTLARDGLRYDSASDEVYMDKESEEKAKKSNNPQHGITKDEIKQYIKDYVQAAKNSIAAGADGVEIHSANGYLLNQFLDPISNKRTDEYGGSIENRARFTLEVVDAIVDAIGPEKTGIRFSPYGTFGTMSGGAEPLIVAQYAYVLGELEKRAKAGKKLAFVHLVEPRVTNPFFTEGQGEYKDGTNDFAYSIWTGPIIRAGNYALHPEIAKEHVNNDDRTLIGYGRFFIANPDIVDRIEKGLPLNKYDRDTFYAMTTEGYLDYPTYDEAIKMGWDKQ

SEQ ID NO: 3111 - protein, 403 aa, Pseudomonas syringae pv. syringae B728a
MQFNKSNKLANVCYDIRGPVLKHAKRLEEEGHRILKLNIGNPAPFGFEAPDEILQDVIRNLPTAQGYSDSKGLFSARKAVMQYYQQKQVEGVGIEDIYLGNGVSELIVMSMQALLNNGDEVLVPAPDYPLWTAAVALSGGSPVHYLCDEQANWWPDLEDIKAKITPNTKAMVIINPNNPTGAVYSREVLLGMLELARQHNLVVFSDEIYDKILYDDAVHICTASLAPDLLCLTFNGLSKSYRVAGFRSGWIAISGPKHNAQSYIEGIDILANMRLCANVPSQHAIQTALGGYQSINDLILPPGRLLEQRNRTWELLNDIPGVSCVKPMGALYAFPRIDPKVCPILNDEKFVLDLLLSEKLLVVQGTAFNWPYPDHFRVVTLPRVDELEQAIGRIGNFLKGYRQ

SEQ ID NO: 3112 - protein, 445 aa, Zea mays
MMEAEKNGNILMQKYEVGKLLGQGTFAKVYHARNIETSQSVAIKVIDKDKIFKVGLMEQIKREISVMKLVRHPNIVQLYEVMATKSKIYFVLEYVKGGELFNKIAKGKLREDASRKYFQQLVSAVDFCHSRGVYHRDLKPENLLVDENGNLKISDFGLSALAESRRQDGLLHTTCGTPAYVAPEVISRKGYDGAKVDTWSCGVILFVLMAGYLPFQDSNLMEMYRKIGKADFKCPPWFPSDVRKLVSRILDPNPRTRMPITKIVECFWFKKGIDNKLIRKNIEMKGKVSALTDVNVVFSSTGIGSNNNKLVDVEQDVAKITNLNAFDIISLSEGFNLSGLFEESEKRKEARFTSSQSASTIISKLEDAATCSKMTIKKKEGGVLKMEGANEGRKGVLSIDAEIFEVTPAFHLVEIKKNNGDTLEYENLFKQDMKPALKDIVWAWQ

SEQ ID NO: 3113 - protein, 546 aa, Ostreococcus tauri
MGRTRVVIWFRNDLRLLDNACVARAATLASESSDVEVVPVYVFDETYFKPSKRGLARFGAGRGKFTLECVGDLKTSLRALGSDLLVRCGKSRDVIAELTLTGANDRTIILTQTEVTSEETEMDVAVERATRERARGGAASATMERHWGSTLYHIDDVPFDVTSGLSDLPDVFTPFRNKVESKCKVRDVIPAPTANELGHVPASVEGFEWMPKPSDLPFASSEIAMDCDKRIKDCLDERSVLDFKGGESNALARVKYYLWESDRLATYFETRNGMLGGDYSTKLAPWLALGCVSPRHVVSEIRRYESERVENKSTYWVIFELIWRDFFKFFALKHGNKIFHLDGTAGRRASWKRDEKILKAWKTGTTGYPLIDANMRELAATGFMSNRGRQNVASWLALDAGIDWRHGADWFEHHLLDYDTASNWGNWCAAAGMTGGRINRFNIAKQTKDYDPAGEYIKTWVKELAEVPAAYIADPNQAPRELRDRIGLNYPNKLALPRRDFTEMGSPPGPRRGGGGGGRGRGRPGGSTPNRGTKARVASVYDTVYG

SEQ ID NO: 3114 - protein, 205 aa, Helianthus annuus
MEKLQNANAVLRRLPPGFRLHPTDEELVVQYLKRRVHSSPLPASIIPEVDVCKSDPWDLPGDSDQQEERFFFSTREIKYPNGNRSNRATQSGYWKATGLSRQIMGANQVGLVGIKKTLVFYKGKPPTGSRTDWIMHEYRLATTQPTQGLEKWVLCKIFLKKRGNYKDEKKNVPVFYDFLATPKVKTSSSSSSGSSGITEESSTNC

SEQ ID NO: 3115 - protein, 559 aa, Ostreococcus tauri
MSVASTSAAAKGRTLVWFRKALRVHDNPALSRGTLHATACQPVFVLDPWFCQPSRVGANRMRFLLQSLRDLDAQLRARGSSLLVLHGEPRVVLPRACKKWRVDSVTWEHDIEPYAKIRDAAVRGALERAGVECHAASGHTLYDVDEMLEKCKGAPPTTYQGFFKIVDKMGAPNAPIDAMEKMPGSFASSDEETKALVQGVADAYGIPTLEDLGYEPLGDDEGFPGVGGETEGLRRLRLMLARKEWIGQFEKPSTNPTTRFHGLSQSGKTKPKSPFEIAAGRSKDGDASTSGAEALMIPSTTALSPYMKFGCVSPRVFYHELTAVYKELEGKHSKPPTSLMGQLMWREFYYLVAAGTKNFDKMEGNAICRQIPWKKDRELFAAWENAQTGFPWIDAAMTQLRREGWLHHLARHAVACFLTRGDLFIHWEWGRDAFDRDLVDADWALNNGNWMWLSCSAFFYQYFRVYSPIAFAKKYDKDGQYVRHYLPVLKNMPSKYVYEPWLAPLDVQKKAGCVVGVDYPAPIVDHSAASKRCVDDIATAYAAHKDANAVAGKKRKASD

SEQ ID NO: 3116 - protein, 548 aa, Ostreococcus tauri
TRVFASKRYEPENAEADERASVEMAVRGVELVRTRGFLLFEPSEVRIDVAARDGYFGTLMPFVHAAERTCGDPGKPKPAPVDVRMVDLGTESDHEWEQIGLEDLGVAPASDRRVDWSAGIRADWDISEGGAVETWSQFTAVGLDRFEAEHGRADPEAGVTVSRLSPYLRFGMISPRTVYHDLVKKDGKNISKTFWHRLYRRELAYWQLHHWPDLPKTSVRSHYENRAWLSGDEADEALRRWQRGETGFPVVDCGMRRLWRTGWMHQTERMITATFLVDYLGVHWTRGADWFMRTLVDADEAINSMMWQNAGKSGLDQWDFFEGTLAPDGSARAHDPHGDAIARWIPELAALPRGYLRHRPWEASKATLAECDVELGSTYPRRMIVDLDRARQRMLDDVTTIRHAELVRAGGLVKPGSMEDLVVAPRAAVVRGAADLARVSTRKEFKRSLKALKASIAGIDLPSNPSSKPHGKSRANASRPKVSAASRPKSGPRSGRLPAPDRDAVRASRREAKRLDAAFRGRVFHHLPVDDLDDRDAAPPRVGRRPAR

SEQ ID NO: 3117 - protein, 192 aa, Taxodium distichum
DNHGEVISEIRRSDLEPYLGLHYPATDLPQAARFLFMKNKVRMICDCYATPVKVVEDKRFPRELILCGSTLRAPHGCHAEYMSNMGSVASLVIAETINAKEEAEITDGQQQQQKGRRLWGLVVCHHSSPRFVPFPMRYACEFLMQVFAIHVNKEVELADQLREKHILRTQTLLCDMLLRDAPTGIIRQKPNI

SEQ ID NO: 3118 - protein, 203 aa, Bacteroides fragilis NCTC 9343
MFPVNCYVLWDETNEAVVIDPGCFYDEEKQALKNFIVTNNLNIKHLLNTHLHLDHIFGNPFMLREFGLSAEANQADEYWIDEAPKQSRMFGFQLNEAPVPLGKYLHDGDIITFGNTTLEAIHVPGHSPGSLVYYCRADNCMFSGDVLFQGSIGRADLAGGNFDELKEHICSRLFVLPNETIVYPGHGAPTTIGIEKAENPFFR

SEQ ID NO: 3119 - protein, 258 aa, Yarrowia lipolytica CLIB122
MKVRSLEMQPDETQNYCYVLTDDASKKSWVIDPAFPKWVLADVEKLNKSGDIDLAAIVNTHHHWDHSGGNEDFKQSFSKLPIIAGKDSPDVTKTPAHGEQLTLGDNLKITALHTPCHTQDSICYFVEDTKTGERAVFTGDTLFIAGCGRFFEGTPEEMNVALNDILAKLPDDTVVYPGHEYTKSNVKFVKTILPNNEAVNKLDHFCQNNKITTGVFTIGDEKKHNPFMMVNDPAVEEVCGSTDPVKVMEVLRERKNKL

SEQ ID NO: 3120 - protein, 336 aa, Streptomyces avermitilis MA-4680
MTPGSDVIDDVPKANNDSMAASATLGGERKRSLEQITLLLFIIVPFLALLAAVPLAWGWGVSWLDMGLMVFFYYLGCHGITIGFHRYFTHGSFKAKRPLRIALAIAGSMAVEGPLVRWVADHRKHHKFSDAEGDPHSPWRFGETVPALMKGLWWAHIGWMFDEEQTSQEKYAPDLIKDGAIRAISRQFVLWTGLSLALPPLIGGLVTMSWWGAFTGFFWGSLVRVALLHHVTWSINSICHAVGKRPFKSRDRSGNVWWLAVLSCGESWHNLHHADPTSARHGVERGQLDSSARIIRWCERLGWAYDVRWPSRSRIDSRRHTGEEGSRRKRESADAA

SEQ ID NO: 3121 - protein, 181 aa, Thuja plicata
DDHGEVVAEMRRPDLEPYLGLHYPATDIPQASRFLFMKNRVRMICDYRATAVKVRQDKRLGQVLSLSRSTLRAPYGCHAQYMANMGSIASLVMAVTVDNSEVGGRRLWGLVVCHHTTPRFVPYPLRYACEFLTQVFGVQLNKEVELAARLRERHILRSQTVLCDMLLRDAPVGIVTKTPNI

SEQ ID NO: 3122 - protein, 366 aa, Vibrio sp. Ex25
MTDALFQPIQLGSLSLKNRIVMPPMTRSRASQPGNVANDMMATYYAQRAEAGLIVAEGTQISPMGQGYAWTPGIYSPEQIAGWKKVTDAVHEKGGVIFAQLWHVGRVTHPDNIGGEQPISSSALKAENVKVFIDNGTDEPGFVDVVEPREMTKKDIKNVIEEYRQAALNAIKAGFDGVELHAANGYLVNQFIDSEANHRTDEYGGSIENRLRFLGEVVEAMTQAIGAERVGVRLAPFTSLNGTVDSTPVDTYTAAAALLDKLNMVYIHIAEVDWDDAPDTPHDFKTAVREAYKGKLIYAGRYNAEKAQHAIESGLADMIGFGRPFVANPDLPSRIKHGYPLAEHDPTTLFGGGEKGLVDYPAYHAG

SEQ ID NO: 3123 - protein, 491 aa, Zea mays
MDPYKHRPSSAFNAPYWTTNSGAPVWNNDSSLTVGARGPILLEDYHCEKLANFDRERIPERVVHARGASAKGFFEVTHDITHLTCADFLRAPGVQTPVIVRFSTVIHERGSPETLRDPRGFAVKFYTREGNWDLVGNNFPVFFIRDGIKFPDMVHALKPNPRTHIQDNWRILDFFSHHPESLHMFSFLFDDVGIPADYRHMDGSGVHTYTLVSRAGTVTYVKFHWRPTCGVRSLMDDEAVRCGANHSHATKDLTDAIAAGNFPEWTLYIQTMDPEMEDRLDDLDPLDVTKTWPEDRFPLQPVGRLVLNRNIDNFFAENEQLAFCPGLIVPGIYYSDDKLLQTRIFSYSDTQRHRLGPNYLLLPANAPKCAHHNNHYDGSMNFMHRHEEVDYFPSRYDAVRNAPRYPIPTAHIAGRREKTVISKENNFKQPGERYRAMDPARQERFITRWVDALSDPRLTHEIRTIWLSNWSQADRSLGQKLASRLSAKPSM

SEQ ID NO: 3124 - protein, 249 aa, Taihangia rupestris
MGRGRVELKRIENKINRQVTFSKRRTGLLKKAHEISVLCDAQVGLIVFSNKGKLFEYASDSCMENMLERYERYSYAERRLMEPDFESQGDWTFEYARLKVKVELLQRNLSHYLGDDLDSLSVKEIQSLEQQLDTALKQIRSRKNQLMNESISELQRKEKAMQVQNNLLTKKIQEKEKDVAATQEVHIWEPQQYQHQQNNGFHRLPQPLLPCLNMGGTHQNDQFFQMRGNQLDLTLEPSLYSFNLGCFTS

SEQ ID NO: 3125 - protein, 366 aa, Arabidopsis thaliana
QMGFAENQLCGDLMRKWVLKHPEASICTSEGVNQFSDIAIFQDYHGLPEFRQAVAKFMEKTRNNKVKFDPDRIVMSGGATGAHETVAFCLANPGDGFLVPTPYYPGFDRDLRWRTGVNLVPVTCHSSNGFKITVEALEAAYENARKSNIPVKGLLVTNPSNPLGTTLDRECLKSLVNFTNDKGIHLIADEIYAATTFGQSEFISVAEVIEEIEDCNRDLIHIVYSLSKDMGLPGLRVGIVYSYNDRVVQIARKMSSFGLVSSQTQHLIAKMLSDEEFVDEFIRESKLRLAARHAEITTGLDGLGIGWLKAKAGLFLWMDLRNLLKTATFDSETELWRVIVHQVKLNVSPGGSFHCHEPGWFRVCFA

SEQ ID NO: 3126 - protein, 217 aa, Pimpinella brachycarpa
MVRGKTQMRRIENATSRQVTFSKRRNGLLKKAFELSVLCDAEVALIIFSPRGKLHEFASSSMHETIERYRKHTKDVQSNNTPVVQNMQHLKHETASLAKKIELLEVSKRKLLGEGLGTCSINELQQIEQQLEKSVCTVRARKMQVFKEQIEQLKEKEKTLAADNAILLAKYDVQPRQESPEDGGNLTSTTENSENSDVETELFIGPPEKRFKRIMEK

SEQ ID NO: 3127 - protein, 514 aa, Lycopersicon esculentum
MDGTAVQGTSSVDSFLRNYKLGKTLGIGSFGKVKIAEHTLTGHKVAVKILNRRKIRNMDMEEKVRREIKILRLFMHPHIIRLYEVIETPSDIYVVMEYVKSGELFDYIVEKGRLQEDEARNFFQQIISGVEYCHRNMVVHRDLKPENLLLDSKWNVKIADFGLSNIMRDGHFLKTSCGSPNYAAPEVISGKLYAGPEVDVWSCGVILYALLCGTLPFDDENIPNLFKKIKGGIYTLPSHLSAGARDLIPRMLIVDPMKRMTIPEIRLHPWFQAHLPRYLAVPPPDTTQQAKKIDEEILQEVVKMGFDRNNLTESLRNRVQNEGTVAYYLLLDNRHRVSTGYLGAEFQESMEYGYNRINSNETAASPVGQRFPGIMDYQQAGARQFPIERKWALGLQSRAHPREIMTEVLKALQELNVCWKKIGQYNMKCRWVPSLPGHHEGMGVNSMHGNQFFGDDSSIIENDGATKLTNVVKFEVQLYKTREEKYLLDLQRLQGPQFLFLDLCAAFLAQLRVL

SEQ ID NO: 3128 - protein, 258 aa, Taihangia rupestris
MGRGKVQLKRIENKISRQVTFSKRRTGLLKKAHEISVLCDAEVALIVFSTKGKLFEYSTNSSMEAILERYEQYSYAERQSMGITDPESQGSWSMEYPKLAARIEILQRKIRNYTGEDLDPLSLRELQSLEQQIDTALKRVRVRKNQVMHDSISEIQKKHRALQEQNNQMSKKLKENEKQSQAVPNNQQSNSTTIVLMAPPPPQAPPPPAPLPALTIGGAFLDRRNAMDEDSDDQQGRAQTRPVSNTGMPLWMVRGLNQ

SEQ ID NO: 3129 - protein, 376 aa, Klainedoxa gabonensis
AAGALKSYKLAAKAISRLQSLPSRNMSLLCDVLVKEVSDLMGYDRVMVYKFHEDEHGEVVAECCRPDLEPYLGLHYPATDIPQASRFLFMKNKVRMICNCQAPSVKVIQDNKLPKPVSLCGSTLRAPHGCHAQYMANMGISASLVMSVTINEDDDNMDNDQAKARKLWGLVVCHHTSPRFVPFPLRYACEFLIQVFGVQINKEVELAAQTREKHILQTQTVLCDMLIRDAPEGIITQSPNVMDLVKCDGATLYYRKKFWLLGVTPTEAQIKDITEWLLEYHSGRTGLSTDSLMEAGYPGASVLGEAVCGMAAIRITSKDFLFWFRSHTAKEIKWGGAKHDPDDKDDGRKMQPRSSFKAFLEVVKWRSLPWEDMEMD

SEQ ID NO: 3130 - protein, 281 aa, Leea guineensis
RFLFMKNKVRMICDCLATPVKVIQDKRLTQPMSLCGSILRSPHGCHTQYMANMGSIASLVMSVTISEEGDETQNEQQKGRKLWGLLVCHNTSPRFVPFPLRYACEFLVQVFGVQINKEVELVTQQRQKHILRTQAVLCNMLLRDAPVGILNQSPNVMDLVKCDGAALYYRKKFWLLGITPTEAQIGDIAEWLNEYHGGSTGLSTDSLIEAGYPGASALGEAVCGMVAVKITSNDFLFWFRSHTAKEIKWGGAIQGPNDTDDLGKMHPRTSFKAFLEAVKLR

SEQ ID NO: 3131 - protein, 232 aa, Taihangia rupestris
MGRGKIEIKRIENTTNRQVTFCKRRNGLLKKAYELSVLCDAEVALIVFSNRGRLYEYSNNSVRETIERYKKACADTSNNGSVSEATTQYYQQEAAKLRNQITALQNNNRNYMAEGLGNMSVKELKNVESKLEKAIGKIRSKKNELLFSEIEYMQKRELDLHNNNQILRAKIAENERHQQSINAIAGGGGAHGSYEIMQSAQSFHEARNYFQVNALQPNHQYSRHDQISLQLV

SEQ ID NO: 3132 - protein, 391 aa, Liquidambar styraciflua
DLEPVNPADVPVTAAGALKSYKLAAKAISRLQSLPSGNISLLCDVLVKEVSDLTGYDRVMVYKFHEDEHGEVLAECRRPDLEPCLGLHYPATDIPQASRFLFMKNKVRMICDCLAPPVKVNQDKRLTRPLSLCGSTLRSPHGCHAQYMANMGSIASLVMSVTINEDDDEMESDQQKGRKLWGLVVCHHTSPRFVPFPLRYACEFLIQVFGVQINKEVELATQLREKHMLRTQTVLCDMLLRDAPVGIVTQSPNVMDLVKCDGAALYYRKKFWLLGVTPAEAQIRDIAQWLLEDHNGSTGLSTDSLVEAGYPDALILGDAACGMAAIRITSKDFLFWFRSHTAKEIKWGGAKHDPDEKDDGRKMHPRSSFKAFLEVVKRRSLPWEDVEMDAI

SEQ ID NO: 3133 - protein, 268 aa, Arabidopsis thaliana
MDDLLNFSVPEEEEDDDEHTQPPRNITRRKTGLRPTDSFGLFNTDDLGVVEEEDLQWISNKNAFPVIETFVGVLPSEHFPITSLLEREATEVKQLSPVSVLETSSHSSTTTTSNSSGGSNGSTAVATTTTTPTIMSCCVGFKAPAKARSKRRRTGRRDLRVLWTGNEQGGIQKKKTMTVAAAALIMGRKCQHCGAEKTPQWRAGPAGPKTLCNACGVRYKSGRLVPEYRPANSPTFTAELHSNSHRKIVEMRKQYQSGDGDGDRKDCG

SEQ ID NO: 3134 - protein, 376 aa, Meliosma squamulata
  misc_feature (222)..(222): Xaa can be any naturally occurring amino acid
  misc_feature (306)..(306): Xaa can be any naturally occurring amino acid
TAAGALKSYKLAAKAISRLQSLPSGNITLLCEVLVREVRDLTGYDRVMVYKFHEDEHGEVIAECRRSDLEPYLGLHYPATDIPQASRFLFMKNKIRMICDCSSQPVKIIQDKRLAQPLSLGGSTLRAPHGCHAQYMANMGSIASLVMSVTINDDDDDDDDTSESDKKKGRKLWGFVVCHHTSPRFVPFPLRYACEFLSQVFGIQLNKEVELAAQLKEKHILXTQTMLCDMLLRDAPMGIITQSPNVMDLVKCNGATLYYNNKFWLLGITPTEEQIRDIIGWLFENHDQSTGLSTDSLVEAGYPGAXFLGDAVCGMAAIKITSKDFLFWFRSHTAKEIKWGGAKHDPIDKDDGRKMHPRSSFRAFLEVVKWRSIPWE

SEQ ID NO: 3135 - protein, 615 aa, Geobacillus kaustophilus HTA426
MCGITGWVHFGRNLRRERTVIDSMTETLAKRGPDDTNTWLDTHVAFGHKRLVVVDPAGGKQPMVRQKNGHRYTIVYNGELYNTEDIRKELLRQGYRFDGHSDTEVLLAAYMEWKEKCVDWLNGIFAFAVWDGERELLFMARDRLGVKPLFYREDGGGLLFGSEVKAILAHPDVKAEVNYEGLAEVFGLGPSRTPGHGVFDGIRELRPAHALTFSRSGLRIWRYWNVESDVHRDSFEETVEKLRFLLTDAVTRQLVSDVPVCTFLSGGVDSSAITGIAANAFAADGKGPLHTYSIDYEGNDQYFKANDFQPNTDAPFIEQVSNKFQTVHHRCVITQEELFRHLHEAVIVRDVPGMADVDSSLLWFCKQIRERFVVSLSGECADEIFGGYPWFHRPDDLSRKGFPWMRSVDARMGLLKDEWRQKLRLDDYVQMRYEQTLAEVPRLEGESAEEAKRRELFYLNMIWFMTTLLDRKDRMSMGASLEVRVPFADHRIVEYVWNIPWDMKMYGGREKGLLRKALEGLLPEEVLYRKKSPYPKTHHPLYTKLVKQWLEQLLHDRSSVLHEFFDREKLLALIETEGKSFQVPWFGQLMTGPQLLAYLGQVHVWFDHYGIRIKE

SEQ ID NO: 3136 - protein, 194 aa, Amborella trichopoda
FSNRGKQYEFCSSSSMLKTLERYQKCNYGTQETTVSTKETQSSQQEYLRLKAHFEALQRSQRNLLGEDLGPLSGKELEQLEQQLDMSLKQIRSIKTQYMIDQLADLQRKEQALSESNNALKRKLEAAGGWDSTGHQMEYNRQPAQAQADNFFHPLECDPTLQIGYPSGYPNPITVAAPGPSVTNFMPWMAGIEG

SEQ ID NO: 3137 - protein, 370 aa, Paeonia sp. Qiu 95-090
AGALKSYKLAAKSISRLQSLPSGNVPLLCDILVKEVSDLSGYDRVMVYKFHEDEHGEVVAECRRPDLGPYLGLHYPATDIPQASRFLFMKNKVRMICDCSAPSVKVTQDKSLPQPLSLAGSTLRSPHGCHAQYMANMGSIASLVISITINDGDDEMESGQQKGKRLWGLVVCHHTSPRFVPFPLRYACEFLIQVFSVQINKEVELAVQLREKHILRTQTVLCDMLLRDAPVGIITQSPNVMDLVKCDGAALYYRKKFWLLGVTPTEAQIKDIAEWLLEYHSESTGLSTDSLMEAGYPGASILGDVVCGMASIRIASKDFLFWFRSHTAKEIKWGGAKHDPDDKDDVRKMHPRSSFKAFLEVVKRRSLHWE

SEQ ID NO: 3138 - protein, 1039 aa, Pseudomonas fluorescens Pf-5
MGGALFWGGQRIIRQEQERIAVDFQLLTRYMSEQQALLQRLAGEKRLQYKDADQDPAQLFHLMEQQEAVGATLFQGNPSSVETPFTLVCQDLAQCPHQSAAAAGLGRYLADLYSSFWVRSSFPASALLVVDAGAGSSFTVPTIGSRWPRLTTPLVLAGLHAVRASATSSDSDAIRWIRLKDFPQHMIAFTALHNLAPGSGLQSSGTYAACLTYRDRINVFTTPQRRHFYDKFWLQGRLDGLLLGDEPAPLALHEGANVRSDGLLFRINDASGHWSGYYLLSYRALFLGHSWSLAAIFLLLLLSPLAARVYARWYQRRVIAPAQQAHAELVENHQFSRTLLETTPVALCVLSREDRRIVFANNLALKWFTTQVGQSLDASGLDPALLERIARAREPGEIENFQSFDGRSFYIAFAPTRYRNQDVLICAFADLSARAQMEQQLTQAKQAADKANGAKSVFLATMSHEIRTPLYGVLGSLELMGLTDLDREQRQLLERIQVSSGLLLQIISDILDITRIESGQLSLGDQLFDPRALVQRCTASFVDSARNKGLLLFSWVDPELPPALLGDPGRISQILTNLISNAVKFTHSGQVIVRARAEPGSQGRVLLSLQVADTGIGIGKEEQQQLFIPFYQIDAHSHTVHGAGLGLSICAKLAALMGSQIHLTSELGLGSSFSMQLELPVASDPNAERQPDLGGARIYVQSPHHELTDNLCQWLQKWHAQATPVDATAPPPQGQGVLLRLFDDRPEASEALPPGLLRIDLGGQQRTPGAGLAEAGDYYAIGRLLERTLGGAPDAPAEPELPARDIATLAPLGLNVLVAEDNPINQATLSHQLQQLGCRNTLAADGAEALDLWRIGDYDLLLTDVNMPRMNGYELTCILRAAGDDRPIIGITANAMCDEEARCQACGMDAWLVKPVPLQTLRASLARLTSLAPEPPAEPAAAPGNAPVDGLPPNLRELFARTMGQDVEHLRQALDEEDYERIFQLLHRVRGSLAVAGQEALILQVHDLGQSLRQSGLTATTRTHSLMLLHALQDISQLE

SEQ ID NO: 3139 - protein, 243 aa, Amborella trichopoda
MGRGRVELKRIENKINRQVTFAKRRNGLLKKAYELSVLCDAEVALIIFSNRGKLYEFCSTSSMVKTLERYQKCNYGALETNVPTRETQSSYQEYLKLKARVESLQRSQRNLLGEDLGPLSSKELEQLEQQLEMSLKQIRSTKTQCMFDQLADLRRRELALQETNKALKRKLEGASASNPPQLAWENNGQNIHYNRQPAHTEGFFHPLECDSTLQIGYHPSCPDQMPVAAPVQNVNAFLPGWLV

SEQ ID NO: 3140 - protein, 540 aa, Clostridium difficile
MAKEIKFSEETRRALEAGVNKLADTVKVTLGPKGRNVILDKKFGSPLITNDGVTIAKEIELEDRFENMGAQLVKEVATKTNDVAGDGTTTATVLAQAIIREGLKNVTAGANPILLRKGIQKAVTVAVEELKNQSRIVETQEAISQVASISAGDEEVGKLIAEAMEIVGKDGVITVEESQTMNTELDAVEGMQFDRGFVSAYMVTDVDKMEAVLKDPYILITDKKISNIQELLPVVEQIVQQGKKLLIIAEDVEGEALSTLVVNKLRGTFDVVAVKAPGFGDRRKEMLQDIAILTGAQVISEELGYDLKEADLSMLGRASSVKVTKENTTIVDGSGDKKSIEDRVTQIKHQVEQTTSDFDREKLMERLAKLAGGVAVVKVGAATEVELKERKLRIEDALNATRAAVEEGIVAGGGTAFVSVIPAIGTLIESLEGEVKLGAQIVKKALEEPLRQIAINAGLEGAVIVQNVVNSEAETGFDALNEKYVNMIEAGIVDPTKVSRSALQNAASIASTFLTTEAAVADLPEKEDAGMPGTGMDGMY

SEQ ID NO: 3141 - protein, 603 aa, Bdellovibrio bacteriovorus HD100
MESRYEALFELSNDMIGVFGEDWRPAKLNHVWSEVLGWSHEELMQIPFNELIHPEDVKNIVSRYEKIRKGDVLRNFLLRYRCKDGHYKFLSWNYQFDPVTNEALCVVKDTTPQKIFTEILGQANAEAPIGTWSMDLTTGKHFWSRALYDIFEVDPDTYDLDRLRGFEMIAEKDRSLMMETHRRLMEQGTDYDVEVTVCSGKGRVFPARVMGTALRQEGRIVQIYGLMYDVAQRRHVEKELRYQQFLLRMFLQSSPAIVYVKDLQGRYLLVSPTFENLVGKRSVELVGKTDAQIFGVEDARRFSDSDNQLIQEQQPRSYEEKLTFHDGSQKYYLSEKFPLRDEDGHLIAIAGVSTDITELHRYQQELERAKEAAEAGTRAKSEFLANMSHEIRTPMNSIMGMSELLLDTELSPDQRQFVTILTRASSSLLNLINDILDLSKIESGLMVIEKVPFSVRESVRRALELLMIRAVEKKLDLKLEIDPQVPEKILGDATRFQQVLINLIGNGLKFTTHGEVRVQLKVNGHQLWVGVKDTGIGMAPEQMQGLFTRFSQGDSSITRRFGGTGLGLSISKQLVEKMGGTIGVTSEIGQGSVFYFTLPLGSK

SEQ ID NO: 3142 - protein, 191 aa, Thuja plicata
DDHGEVISEIRRSDLEPYLGLHYPATDIPQASRFLFMKNKIRMICDCYATPVKVVEDRRLPRELILCGSTLRAPHGCHADYMSSMGSIASLVIAVHHAKEEDGVFDGQQQQQKGRRLWGLVVCHHTSPRFVPFPLRYACEFLMQVFAIQLNKEVELADQLREKHILRTQTLLCDMLLRDAPMGIIREKPNI

SEQ ID NO: 3143 - protein, 634 aa, Zea mays
MDGCDCIEPLWPTDDLLVKYQYISDFFIALAYFSIPLELIYFVKKSSFFPYRWVLIQFGAFIVLCGATHLINLWTFTTHTKTVAMVMTIAKVSTAVVSCATALMLVHIIPDLLSVKTRELFLKNKAEELDREMGLIRTQEETGRHVRMLTHEIRSTLDRHTILKTTLVELGRTLGLEECALWMPSRSGSSLQLSHTLHHQITVGSSVPINLPVINQVFSSNRAIIIPHTSPLARIRPLTGRYVPPEVAAVRVPLLHLSNFQINDWPELSAKSFAIMVLMLPSDSARKWHVHELELVEVVADQVAVALSHAAILEESMRARDLLMEQNVALDLARREAEMAIRARNDFLAVMNHEMRTPMNAIIALSSLLLETELTPEQRLMVETVLKSSNLLATLINDVLDLSKLEDGSLELEIKAFNLHAVFKEVMGFIKPIASIKRLSVSVMLAPDLPLCAIGDEKRLMQTILNISGNAVKFTKEGHITLVASIVKADSLREFRTPEFHPTASDDHFYLKVQVKDTGCGIGPQDLPHVFTKFAHPQSGGNRGFNGSGLGLAICKRFVSLMGGHIWIDSEGTGRGCTATFVVKLGVCDNTNTYQQQLIPLVWPSSADSDLRAPKPLPDGRGSTPLKSRYQRSV

SEQ ID NO: 3144 - protein, 192 aa, Thuja plicata
DDHGEVISEIRKSNLEPYLGLHYPATDIPQASRFLFMKNRVRMICDCCAPPVSVVEDKRLPRDLNLCGSTLRAPHGCHVQYMVNMGSIASLVMAIIINEKEEEEGDSEGQQQQKGRRLWGLVVRHHTSPRFVPFPLRYACEFLMQVFGIQLNKEVELAAQLKEKHILRTQTLLCDMLLRDAPVGIMTQRPNI

SEQ ID NO: 3145 - protein, 375 aa, Staphylococcus aureus subsp. aureus MRSA252
MKSKYEPLFDKVVLPNGVELRNRFVLAPLTHISSNDDGTISDIELPYIEKRSQDVGITSNAASNVSDVGKAFPGQPSIAHDSDIEGLKRLATAMKKNGAKALVQIHHGGAQALPELTPDGDVVAPSPISLKSFGQKQEHSAREMTNEEIEQAIKDFGEATRRAIEAGFDGVEIHGANHYLIHQFVSPYYNRRNDVWANQYKFPIAVIEEVLKSKEVYGNKDFIVGYRLSPEEAESPGITMEITEELVNKISHMPIDYIHVSMMDTHATAREGKYAGQERLPLIHKWINGRMPLIGIGSIFTADDALDAVENVGVDLVAIGRELLLDYQFVEKIKDGREDEIINYFDPEREDNHHLTPNLWHQFNEGFYPLPRKDK

SEQ ID NO: 3146 - protein, 349 aa, Pseudomonas putida KT2440
MTTLFDPIKLGDLQLPNRIIMAPLTRCRADEGRVPNALMAEYYVQRASAGLILSEATSVSPMGVGYPDTPGIWNDEQVRGWNNVTKAVHAAGGRIFLQLWHVGRISHPSYLNGELPVAPSAIQPKGHVSLVRPLSDYPTPRALETEEINDIVEAYRSGAENAKAAGFDGVEIHGANGYLLDQFLQSSTNQRTDRYGGSLENRARLLLEVTDAAIEVWGAQRVGVHLAPRADAHDMGDADRAETFTYVARELGKRGIAFICSREREADDSIGPLIKEAFGGPYIVNERFDKASANAALASGKADAVAFGVPFIANPDLPARLAADAPLNEAHPETFYGKGPVGYIDYPRL

SEQ ID NO: 3147 - protein, 193 aa, Torreya nucifera
DDHGEVISEIRRSDLEPYLGLHYPATDIPQAARYLFMKNRVRMICDCVAPPVKVVEDKRLPRELSLCGSTLRAPHGCHTDYMSNMGSIASLVMAVVINGKEEEEGDTDRQNQQKKGRRLWGLVVCHHTEPRFVPFPLRYACEFLMQVFGIQLNKEVELAAQLREKQILRTQTMLCDMLLRDAPLGIIRQEPNI

SEQ ID NO: 3148 - protein, 228 aa, Taihangia rupestris
MGRKIEIKRIENTTNWQVTFCKRRNGLLKKAYELSVLCDAEVALIVFSTRGRLYEYANNSVRQTIQRYKKTCDSSNSGSVTEANVQFYQQEASKLRRQIREIQNSNRHILGEALSTLNVKELKNLEGRLEKGIGRIRSKKNEMLFAEIEYMQKKEIELQNQNNFLRAKIAETDKARQQQTNMMPGTSSAYDQSMPPPQTYDRSFLPVILESNHNYNRQGQNQTPLQLV

SEQ ID NO: 3149 - protein, 338 aa, Bacillus halodurans C-125
MEHKLFSSYVVKGVTLKNRIVMSPMCMYSSDQKDGKIRPFHISHYESRAAGQVGLIIVEATAVTPQGRISPYDLGIWSDDHISGLTETVERIHAHGAKAAIQLAHAGRKAELDGPIIAPSAISYDKMKTPDAMTEEQISETIEAFKLGALRAKKAGFDIIEIHGAHGYLINEFLSPLTNKRTDAYGGSLENRYRLLREIISEIQTVWDGPLFVRISAAEYAEGGNELSDFITLAKWMKKQGIDLIDCSSGAVVPAPIPVYPGYQVPLAEAIRHEANIATGAVGLITSGIQAEEILQNERADLIFVARELLRNPYWPREAALELGTTISGPSQYDRAWL

SEQ ID NO: 3150 - protein, 504 aa, Zea mays
MVLTHVHDLDEASAASAVVFASRYVQDPLPRYELGEKSVSKDAAYQIIHDELLLDSSPRLNLASFVTTWMEPECDKLILEGINKNYADMDEYPVTTELQNRCVNIIARLFHAPVGASEKAVGVGTVGSSEAIMLAGLAFKRRWQNRRRAAGQPCDRPNIVTGANVQVCWEKFARYFEVELKEVRLREGCYVMDPDEAVRMVDDNTICVAAILGSTLTGEFEDVRRLNDLLAANNRRTGWDTPIHVDAASGGFIAPFLYPDLEWDFRLPLVKSINVSGHKYGLVYAGVGWVVWRSKEDLPDELIFHINYLGADQPTFTLNFSKGSSQIIAQYYQFLRLGFEGYRNVMENCMESARTLREGLERTGRFTIISKEQGVPLVAFTFKAKDETPLAFKLSAELRRFGWIVPAYTMPANLEHMAVLRVVVREDFGRPLAERFLSHVRMALEELDHAAKGGPVPRMRLTIELGPPARGSGEEASARVVNREAVVPVHRSVSLAGGKTKGVC

SEQ ID NO: 3151 - protein, 368 aa, Ranunculus sp. Qiu 95-024
MKSYKLAAKAISKLQAMPSGNIPLSCDMLVQEVRDLTGYDRVMVYKFHEDDHGEVIAEWRVSSLEPYLGLHYPATDIPQASRFLFMKNKIRMICDCSAIPVKVVQDKKLGQPLSLGGSALRAPHGCHAQYMSNMGSVASLVMSVTINEDDEQMETGQQKGRKLWGLVVCHHTSPRFVPFPLRYACEFLIQVFGMQINKEVELANQTREKHILHTQTVLCDMLLRDAPIAIVTQSPNVMDLVMCNGAALYYRDRLCLLGVTPTDDQIRDIAQWLLEYHNESTGLSTDSLMEAGYPSASLLGNAVCGMAAIKITSKDFLFWFRSHTAKEIKWGGAKHNPAEKDDRWKMHPRSSFKAFLEVVKHRSLPWED

SEQ ID NO: 3152 - protein, 241 aa, Eschscholzia californica
MGRGRVELKRIENKINRQVTFAKRRNGLLKKAYELSVLCDAEVALIIFSNRGKLYEFCSSSSMFKTLERYQKSNYGAPETNVSVRESQEHSSHQEYLKLKARVEALQRSQRNLLGEDLGPLSGKELESLERQLDMSLKQIRSTRTQYMLDQLTDLQRREQMLSDANKTLRRRLEEGTVTCHQWEQNMQYGQQQAHAQGEGFFHPIECEPTLQMGYQQDQITVAAAAGPSMTMNSYMPGPGW

SEQ ID NO: 3153 - protein, 371 aa, Reinwardtia indica
GALTSYKIAAKAISRLQSVPSGSINLLSDVLVNELRDLTSYDRVMVYRFHEDEHGEVVAESIAPGLEPYLGLHYPATDIPQASRFLFMKNKVRMICDCLAPSVKVTQDRNLAEPINLSGSTLRAPHGCHAQYMANMGSIASLVMSVTINDNEDGNEMESDQMMGRKLWGLVVCHHTTARFVPFPLRYACEFLIQVFGVQISKEVELEAQRKEKHIIQTQTVLCDMLLRDAPVAIMTQSPNVMDLVKCDGAALLYRKKCWLLGVTPTEEQITDITEWLLEYHNDSTGLTTDSIMEAGYPGASVLASTICGMAAIRITSKDFMFWFRSHTAKEIKWGGAKHDPDDKDGVRKMHPRSSFKAFLEVVKWRGLPWE

SEQ ID NO: 3154 - protein, 1239 aa, Cochliobolus heterostrophus
MAAETYSGVAAIIRNLARQHDPARDPSFSAQVSANGAKTAANAIALPGPESEEKTQLEQELSALCSRIDFLEHKCSHAAAKSGQFPLTPAQESPDDGVLYTPAGAIRNSSAPPGQARRGSNKERAIWVSNWLAAKETNGGPEEPAAALTEEQLNYLRVHLNQQADQIRNQREHIDNLSREVNKQLTTQSMVFEHGIEDIGALKRELGKHQQANLAFQKALREIGAIVTAVAMGDLSKKVLIHAKEMDPEITLFKRTINTMVDQLQEFASQVTFLAREVGTEGRLGGQANLPGVAGIWAELTDSVNMMANNLTEQVREIAVVTTAVAHGDLSRKIERPARGEILQLQQTINTMVDQLQSFATEVTKVARDVGTEGKLGGQAEIAGVKGMWNELTVNVNAMAQNLTTQVRDIAQVTTAVAQGNLTRKVEAQCKGEILELKNTINRMVDQLQQFAHEVTKIAREVGSEGRLGGQATVHGVEGTWKDLTENVNGMAMNLTTQVREIAEVTTAVARGDLSRKVKAEVQGEILSLKITINTMVDRLNTFAQEVSKVAREVGTDGILGGQAQVDNVEGKWKDLTNNVNTMAQNLTLQVRSISEVTQAIAKGDMSRRVHVDAEGEIRLLKDTVNDMVMRLDEWSLAVKRVARDVGVDGKMGGQADVRDIDGRWKEITTDVNTMAQNLTSQVRAFGDITNAAMEGKFTQITVEASGEMDELKRKINQMVSSLRESIQRNTAAREAAELANKTKSEFLANMSHEIRTPMNGIIGMTQLTLDTDLTHAQREMLTIVHNLAGQLLTIIDDILDISKIEANRMVMEEIPFSMRGTIFNALKSLASRANERKLNLAYDVSYTVPDYVVGDSFRLRQIILNLVGNAIKFTEHGEVKVAISMAQEQDCGPDHYVFQFAVSDTGIGIRGDKLNLIFDTFQQADGSTTRKFGGTGLGLSISKRLVTLMGGRMWVESDFGKGSVFYFTCRVRLGKPEITAIQPQLVAYKQHTVLFVDQGNTGFSDQIIEHLKALDLVPMVVNSVEEVPETTKRADMPYDCVIVDNDKTARELRIAERFKYIPLVMLTPHVCISLRSALENGISSYMTTPCLPIDLGNALIPALDGRAAPLVSDHSKSFQILLAEDNAVNQKLAVRILEKYHHRVTVANNGLEAFEHIQKKRYDCVLMDVQMPVMGGFEATAKIREWERENGIPSTPVIALTAHAMVGDREKCLAAQMDDYLSKPLRQNQLIQTILRCA

SEQ ID NO: 3155 - protein, 248 aa, Eschscholzia californica
MGRGRVELKRIENKINRQVTFAKRRNGILKKAFELSVLCDAEVALIIFSSRGKLYEFCSSSSILKTLERYQRCSSNASQASRSIKDNDETYQNYLKLKSRVEVLQQNQRNLLGLDLEPLSLKELDQLESQLEVSLKQVTSTKTQFMLDNLSDLQTKEEVLQEANRSLNRKMEENMAEIPQQLRWEAGDGHNIPYNRHIPITDGFYQPLECNPTFQIGSSSMKSFDHLTDPPPTVQNLLGYFPSWSFET

SEQ ID NO: 3156 - protein, 363 aa, Sabia swinhoei
TAAGALKSYKLAAKAISRLQSLPSGNISLLCDVLVREVSDLTGYDRVMVYKFHEDEHGEVIAECRRSDLEPYLGLHYPATDIPQASRFLFMKNKVRMICDCSARPVKVVQDKRLARPLSLCGSTLRAPHGCHAQYMANMGSIASLVMSVTINEDDDDEMESDQKKGRKLWGFVVCHHTSPRFVPFPLRYACEFLIQVFGIQVNKESELAAQLREKHILQTQTMLCDMLLRDAPVGIVSQSPNVMDLVKCSGAALYYKNKFWLLGVTPTEEQIRDIIGWFVENHDQSTGLSTDSLMEAGYPGASVLGDAVCGMAAIKITSKDFLFWFRSHTAKEIKWGGAKHDPVDKDDGRKMHPRSSFKAFLE

SEQ ID NO: 3157 - protein, 242 aa, Liriodendron tulipifera
MGRGRVELKRIENKINRQVTFAKRRNGLLKKAYELSVLCDAEVALIIFSNRGKLYEFCSTSSMFKTLERYQKCNYGAPEAAVTTREIQSSHQEYLKLKARVEALQRSQRNLLGEDLGPLNGKELDTLERQLDVSLKQIRSTRTQYMLDQLTDLQRREQMLSEANKALKRRLDEGMQANPHQGWNHNPHAMEYVRQQGPPQGDGFFHPLDCEPTLQIGYQTDQITMSTAPGPSLNNYMPGWLA

SEQ ID NO: 3158 - protein, 368 aa, Sapria himalayana
ALTSFRLAAKAISRLQAISSGSISKLCNVLVKEVSHLTCYDRVMVYKFHEDEHGEVIAECIRPDLEPYLGLHYPATDIPQAARFLFMKNKVRMICNCMASPVKVLQAEGLDKPLSLCGSTLRSPHRCHEQYVANMNSIASLVLSVTINEEDGEMESTQSRPARLWGLVVCHHTSPKFVSFSLRYACEFLIQVFGIQINKEVELEAQRKEKHILQTQTLLCDMLVRDSPVGIITKSPNVMDLVKCDGAALFYRNKIWLLGLAPSEMQIRDIAEWLLECHGKSTGLSTDSLMESGYPGASLVGSSVCGMAAIRVTSKDFIFWFRSHIAKEFRWGGAKHGRHDKDDGRKMHPRSSFKAFLEVVKWRSLPWE

SEQ ID NO: 3159 - protein, 191 aa, Nuphar advena
DEFCSTSSMLKTLERYQKCNYGSIEASVPSRETQNSYQEYLKLKSKVEALQHSQRNLLGEDLGPLNSKELEHLEQQLEVSLKHVRSTKTQFMLDQLSDLKGKEQILQDANMALVRKLEGAAGSANHQQLSWENGGQHLQYGRHSGPQKDGFYHPLECDSTLQIGYNPTAQEQITVAAPAHNVNGFIPSWLV

SEQ ID NO: 3160 - protein, 636 aa, Azoarcus sp. EbN1
MDATTTHSRLSEHDIYLFREGSHGRLYDKLGCQLDEAGAHFAVWAPNARAVAVIGSFNAWRDDAAVLRPRDDGSGIWEGFVAGVAAGDVYKYSIVCQDGRVAEKADPFAQYAEVPPATGSRAWRSAHRWADDAWMAGRARANALDAPFSIYELHLGSWRRAQDGALPGYREIAPQLAAYVVEWGFTHVELMPLSEHPFYGSWGYQTTGYFAATARYGTPDDLMFLIDTLHQAGVGVILDWVPSHFPSDAHGLAEFDGTYLYEHADPRQGFHPEWHSCIFNYGRHEVCAFLLSSALFWLERFHIDGLRVDAVASMLYLDYGRQHGEWVPNRYGGRENLDAVAFLRRLNEAVYRDHPGVQTIAEESTAWPMVSRPLYVGGLGFGMKWNMGWMHDSLDYFRHDPLFRKFHHGRITFSIWYAFHENFVLPLSHDEVVYGKGSLIGKMPGDSWQQFAGLRALFGYMWAHPGKKLLFMGGEFGQRREWTHEGELEWWVLDRPEHAGLRHWVGDLNRLYRERAALHELDFDEAGFQWIDSDDSENSVLSFLRKSRNGATVLVICNFTPVTRPNYTLGVPRAGFWREALNSDATLYGGSGAGNLGGVETVPVPAHGHYQSLTLTLPPLAVLFLIPEVDDARPDS

SEQ ID NO: 3161 - protein, 355 aa, Nostoc punctiforme PCC 73102
MAHLFEPFKIREVTFRNRIAVSPMCQYSSTNGYANDWHVIHLASRAVGGAGIVFTEAAAIEPRGRISPQDLGIWSDAHIETLAKTVALIHNFGAVAGIQLAHAGRKASTAKPSKGGKTLDESQEGWRPLVSSSAIAFSQDSPVPEALSLKGIQEVIDAFVQGAKRSLQAGFKLVEIHAAHGYLLHQFLSPLANQRQDDYGGSFENRTRLLREVVQAVREVWPQTNPLWVRISATDWVDGGWDIEQSIALSDKLKSLGVDLIDTSSGGIIPGVKIPIQPGYQTQFAERIRREANIHTGAVGLITAPEDADEIIRTEVADIVLLGRELLRNPYWPHLAAKQLGHDKLWPVQYDRAWL

SEQ ID NO: 3162 - protein, 631 aa, Dianthus caryophyllus
MELCDCIDTQWQDELLVKYQYISDFFIAVAYFSIPLELIYFVQRSAFFPYRWVLMQFGAFIVLCGATHLINLWTFSMHTKNVAIVMTIAKMATAAVSCVTALMLVHIIPDLLSVKTREMFLRHKAEKLDKERGLILTQEETGRHVRMLTHEIRSTLDRHTILKTTLVELGRTLNSEECALWTPSQTGMTMRLSHTLNHSMVVGSTVSMNLSVISEVFNNTGAVRIPHTCPLVRTRPVSDRYRAPDVVAVRVPLLHHSNFQINDWPDNSAKNYAVMVLISPSDGIRKFRDHELELVEVVADQVAVALSHAAILEDSMRARDQLMEQNVALDLARREAEMAIRARNDFLAVMNHEMRTPMHAIISLSSILLETELTPEQRMMLEIILKSSNLLSTLINDVLDLSRLEDGSLELDPTVFNLHAVFTEVIQLIKPIASVKKLSLTLGLAPEVPVYAVGDEKRLMQTILNVVGNAVKFTKEGFISVSASVARPESLTDWRASEFYPDLTDSQFYLRVQVRDSGCGINPQDIPLIFNKFTQFNRNSNGIGLGLAISKRFVNLMGGQIWIESDGHDKGSISTFVVKLGTCKGSSDTLTPATVRTHSEHGNTEFISNKQLFRGDDSINSIFKPYERSFR

SEQ ID NO: 3163 - protein, 237 aa, Acorus americanus
MGRGRVELKRIENNINRQVTFAKRRNGLLKKAYELSVLCDAEVALIIFSNRGRLFEFCSSSSMLKTLDRYQKCSFHAAESSAPSRELQSSYQEYLKLKAKVEALQRSQRNLLGEDLGPLNSKELEQLESQLEMSLKQVRSTKTQYMLDQLCDLKRKEQMLQEANKSLKRKLDEYNSENPLQLSWDNGGSNVPYGRQPTHSEDFFQPLSVDPSLHIGYQVNAAATGQNVNGFIPGWMT

SEQ ID NO: 3164 - protein, 478 aa, Listeria monocytogenes str. 1/2a F6854
MEHQKRSPFPKDFLWGSASAAYQIEGAWDADGKGKSVWDEYVRIPGTTFKGTNGDVAVDHYHRYKEDVKLMADAGLKAYRFSIAWTRIFPNGKGEVNEAGLKFYDNLIDELLKYDIEPLVTLYHWDIPQALFDEYGGWESRQVIEDFTNYSTTLFKRYGDRVKYWVSLNEQNIFVGMGYGQALHPPKVSDPKRMYAVNHIANLANASVIKAFHEIVPDGKIGPSFAYTPHYPIDTDPKNVQAADDAEELNSYFWMDMYAFGRYPKAVWKYLEENDIAPVIEDGDMELLASAKPDFMGVNYYQSATVAYNPLDGVGQNNEMNFTGKKGSTKETGVPGVYKKVVNPFVKTTNWDWTIDPKGLQIALRRINSRYALPILITENGLGEFDKLVDGEVNDDYRIDYLSAHATAIRDAISDGVDMLGYCTWSFTDLLSWLNGYQKRYGFVYVDRDVEDDAPMTRIPKKSYYWYKQVIETNGADL

SEQ ID NO: 3165 - protein, 154 aa, Zea mays
MDARMFGLETPRVAALHHLLDVPDGDKAGGGATRTYVRDARAMAATPADVKELAGAYAFVVDMPGLSTGDIRVQVEDERVLVISGERRREEREDAKYLRMERRMGKFMRKFVLPDNADVDKVAAVCRDGVLTVTVEKLPPPEPKKPKTIEIKVA

SEQ ID NO: 3166 - protein, 440 aa, Myxococcus xanthus
MGATVYAGGTTFRVWAPMASRVFVSGDFNGWGTWIELGNEFNGNFSGDVAGAVKGQKYKFITRNQWGSDAWRADPRSAWQENSTGSSIIYDHGEYWWNAQQYSSPGFNEMIIYEMHVGTFHDSPGFGPGNWNSAIARLDHVRDLGANMIKVMPAYEFAGDFSWGYNAAFPFAPESAYGHPNDMKRFVDEAHMRGIGVIFDVVHNHYGPSDLPMWCFSGDCLGSGGEYFYNDWRKSTPWGDTRPDYGRPEVRAYIRDSMMNLTHSFRGDGLRWDATKYMRTQNGSDTTAIPDAWRVFRSINREINATQPWKISIAEDFGGGDFITNDATSDTSGGAGFDSQWGGDFVHAIRAAVIASNDSGRDMNSVRNAITQRYSGRHTARVIYSESHDEVANGKARVPEEIWPGNAGSWAAKKRSTLAAGVVFTSPGIPMIFQGQEFLE

SEQ ID NO: 3167 - protein, 447 aa, Arabidopsis thaliana
MSGSRRKATPASRTRVGNYEMGRTLGEGSFAKVKYAKNTVTGDQAAIKILDREKVFRHKMVEQLKREISTMKLIKHPNVVEIIEVMASKTKIYIVLELVNGGELFDKIAQQGRLKEDEARRYFQQLINAVDYCHSRGVYHRDLKPENLILDANGVLKVSDFGLSAFSRQVREDGLLHTACGTPNYVAPEVLSDKGYDGAAADVWSCGVILFVLMAGYLPFDEPNLMTLYKRICKAEFSCPPWFSQGAKRVIKRILEPNPITRISIAELLEDEWFKKGYKPPSFDQDDEDITIDDVDAAFSNSKECLVTEKKEKPVSMNAFELISSSSEFSLENLFEKQAQLVKKETRFTSQRSASEIMSKMEETAKPLGFNVRKDNYKIKMKGDKSGRKGQLSVATEVFEVAPSLHVVELRKTGGDTLEFHKFYKNFSSGLKDVVWNTDAAAEEQKQ

SEQ ID NO: 3168 - protein, 192 aa, Torreya nucifera
DDHGEVISEIRKSELEPYLGLHYPATDIPQASRFLFMKNRVRMICNCCSPPVRVVENKRLPRELNMCGSTLRAPHACHAQYMSNMGSIASLVMAVIINEKEEEQGESDGQQQQKGRRLRGLIVCHHTSPRFVPFPLRYACEFLMQVFGIQLNKEVESAAQLREKHILRTQTLLCDMLLRDAPMGIVTQKPNI

SEQ ID NO: 3169 - protein, 483 aa, Streptomyces avermitilis MA-4680
MTQGPLTTEAGAPVADNQNSETAGVGGPVLVQDQLLLEKLAHFNRERIPERVVHARGAAAYGTFTLTRDVSQWTRAAFLSEVGKQTETFLRFSTVAGNLGSADAVRDPRGWALKFYTEEGNYDLVGNNTPVFFIKDAIKFPDFIHTQKRDPYTGSQEADNVWDFWGLSPESTHQVTWLFGDRGIPASYRHMNGYGSHTYQWNNEAGEVFWVKYHFKTDQGIKNLTTEEAVNVSGLDPDSHQRDLRESIERGDFPTWTVQVQIMPAAEAAGYRFNPFDLTKVWPHEDYPPIEIGKLELNRNPENIFAEVEQSIFSPAHFVPGIGPSPDKMLQGRLFAYGDAHRYRVGINADHLPVNRPHATEARTNSRDGFLYDGRHKGTKNYEPNSFGGPFQTDRPLWQPISVTGVTGDTEAPVHTEDNDFVQAGNLYRLMSEDEKTRLVDNLAGFISKVSRDDIAERAINNFRQADGDFGKRLEAAVQALRG

SEQ ID NO: 3170 - protein, 497 aa, Micrococcus luteus
VPHATGSTRENGAPAVSDRESLTVGSEGPIVLHDVHLLETHQHFDRMNIPERRPHAKGSGAFGVFEVTEDVSSYTKALVFEPGVETEVLLRFSTVAGENGSPDTWRDTRGFALRFYTSEGNYDLVGNNTPIFFLRDPMKFTHFIRSQKRLPNSGLRDATMEWDFWTNNPESAHQVTYLMGPRGLPRTWREMDGYGSHTYLWVNAEGAKHWVKYHFISQEGVHNLSNDEATQIAGENADFHRQDLFEVIAKGVFPKWNLYIQAIPYSQGKTYRFNPFDLTKTISQANYPRIKVGVNTLNRNPKNFFAEIESAAFSPSNTVPGIGLSPDRMLLGRAFAYHDAQLYRVGAHVNQLPVNSPDDATHNYAFEGEMWEDHTGNRSTYVPNSDGNSWSNEVGPTNNGWEAVGVLTREAEALRANDNNFGEAGTLTREVFSNEERNNFVQTVAGALKGVRSNVEAEAFVYWKLVNATNGERIQNTVKRKSGNGIPGVEAGGEARM

SEQ ID NO: 3171 - protein, 140 aa, Archaeoglobus fulgidus DSM 4304
MGMLIDPFEELRRMQERFNRLLEEFGRFPEVKEFRVTMPVDVIDEGEQIRVVADLPGFSKEDLEIYFEDGDLVIKAEKKEEFEEKKGEYLRRERRMGKVYRRIALPAGLDIDAVKAKYNNGVLEITIPKLKKDRKAVQIE

SEQ ID NO: 3172 - protein, 195 aa, Torreya nucifera
DEHGEVVAEIRRSDLEPYLGLHYPATDIPQASRFLFMQNRVRMICDCRATPVKVKQAEELKQPLCLVGSTLRAPHGCHAQYMANMGSIASLVMAVIINGNGIDEDGVSGSGSGSGRSSLKLWGLVVCHHTSPRAVPFPLRSACEFLMQTFGLQINMELQLAAQLIENSILRTQTLLCDMLLRDAPIGIVTQSPSI

SEQ ID NO: 3173 - protein, 499 aa, Hordeum vulgare
MIGTRVLAHSRVDPAIRWGVAARGRVVFAAIRWGAAARGRVVFAAVRWGAAARGTKREAGQETSTSETKKTKRKWGRGFCGMASHEVEEPLTSETKKTKRKWGRGFCGMASHEAEEPLTSETKKKRKNVAASSEPDKKRWFKNKIWKKKKAKNEQLATLVKEISLATKLNSAMHVNINLSMNICPTQTYEEHSGTYLRNLAVIAVKQLDKDGLQGNREFLVEVLMLSLLHHPNLVTLLGYCTECDQKILVYEYMPLGSLQDHLLDLTPKSQPLSWHTRMKIAVDAARGLEYLHEVANPPVVYRDLKASNILLDGNFSAKLADFGLAKLGPVGDKTHVTTRVMGTYGYCAPEYAMSGKLTKMSDIYCFGVVLLELITGRRAIDTTKPTREQILVHWAAPLFKDKKKFTKMADPLLDSKYPLKGLYQALAISSMCLQEEAISRPLISDVVTALTFLADPNYDPPDDIEPLPISVPNYDKGISLREAEISLSGFEEKQVEDS

SEQ ID NO: 3174 - protein, 607 aa, Leptospira interrogans serovar Lai str. 56601
MSLKKGSTAFSLLLSTLLAIFILFCEPTSGKSPVKADFTLKDFDNVVSHVSRYYIDKNIDKNRAYREAAIYALLSLPHSIYLYPESYFKERDKYEEKDEIFPGKTFKISTDDSFILFDPDYAEVEKIRDRKLKEDANKSKVSDEEVKKIVEREKIRKNVLASKWERTGFNKKDFDRVLAFIETNLDKYKDSPLKDPFGESEEKSKEPFTMNDVMLAAANGYLSSLDPHSNVFLRSAWEESMAKIQDGSFEGIGAILSGGGNKEVVVENPLEGRPAVNAGIRSGDVILAVDGKSIKGILLDKVVEKIKGKKGSKVALTIQRKGVPGTLHIEVVRDTIEIKNLSSKLIEGHEHIGYIKLTGFVKSEEGPSVDREIIEKYKELDKEAQAKGTRLKALILDLRNNAGGYLDLAIDIADMFIEKGLIVSTKSPNRSPEDAYAKNKDITNLPLAVLINAKSASASEIVASAIKHHGRGILLGERTFGKATVQKLMPLGNDYLIKLTQARYYSPSGNTIQVVGVKPDIDISSEEDGSFPFRFREENMWNHLSELPPEAEEKSSFDVKKLEAWVQKNGKASDFIASHKNDPIKPDYQLIRSLDYIEALLSTQKKK

SEQ ID NO: 3175 - protein, 376 aa, Oryza sativa
LISPAARGGREAKEMDRAALTVGPGMDMPIMHDGDRYELVRDIGSGNFGVARLMRSRADGQLVAVKYIERGDKIDENVQREIINHRSLRHPNIIRFKEVILTPTHLAIVMEYASGGELFERTCNAGRFSEDEARFFFQQLISGVSYCHSMQVCHRDLKLENTLLDGSTAPRLKICDFGYSKSSVLHSQPKSTVGTPAYIAPEVLLKKEYDGKIADVWSCGVTLYVMLVGAYPFEDPDEPKNFRKTIQRILGVQYSIPDYVHISPECRDLIARIFVANPATRISIPEIRNHPWFLKNLPADLMDDSKMSSQYEEPEQPMQSMDEIMQILAEATIPAAGSGGINQFLNDGLDLDDDMEDLDSDPDLDVESSGEIVYAM

SEQ ID NO: 3176 - protein, 106 aa, Brassica napus
MEPIPLLTPYKMGQLNLAHRIVLAPLTRQRSYGNVPQPHAALYYSQRASAGGLLITEATGVSDTAQGYRDTPGVWTAEHVEAWKPIVDAVHAKGALIFCQIWHVGA

SEQ ID NO: 3177 - protein, 218 aa, Glycine max
  misc_feature (176)..(176): Xaa can be any naturally occurring amino acid
MVLRKVGKYEIGRTVGEGTFAKVKFAQNTESGESVAMKVLDRSAIIKHKMVDQIKREISIMKLVRHPYVVRLHEVLASRTKIYIILEFITGGELFDKIVSHGRLSEAESRRYFQQLIDGVDFCHSKGVYHRDLKPENLLLDSQGNIKISDFGLSAFPGQGVSLLRTTCGTPYYVAXGVLSTRGYYGASPDVWSCGVILYVLLAGYLPFDELDLPTFVQ

SEQ ID NO: 3178 - protein, 326 aa, Fusobacterium nucleatum subsp. nucleatum ATCC 25586
MDNSMIFLNACKNGQKGVVEAFIKKGGLDFNKRDSLGNTALFYACMKGSKDIVKLLLSNGADGSLANNNSMIPLHAVSKSGNKEIISLLLDKGSDINTTDKEGRTPLIYTLMENRTEAAKLLLEKGADTQIKDNDGHKAIDYATANGLRDIITLLLKNENNDNKNNSGNTPLHQACYNNQSEVVRELLKQDGIELNIVNDNGNTPLIIAAIESNLLIVQLLLKAGADAKQRLLNGNTALHFAAENGNQYIGKALLEAGAEIDGQNEMGETALLIAAMEGYNDFVKLLVENGANVNIIDNSQNSPLFYASEKGYTEIVEILLLAGAE

SEQ ID NO: 3179 - protein, 551 aa, Buchnera aphidicola
MSKMGAKDVKFGNEARIKMLRGVNVLADAVKVTLGPKGRNVVLDKSFGAPSITKDGVSVAREIELEDKFENMGAQMVKEVASKANDAAGDGTTTATLLAQSIVNEGLKAVAAGMNPMDLKRGIDKAVISAVEELKNLSVPCSDSKAITQVGTISANADEKVGALIAEAMEKVGNDGVITVEEGTGLQNELEVVKGMQFDRGYLSPYFINKPETGIVELENPYILMADKKISNVREMLPILESVAKSGKPLLIISEDLEGEALATLVVNPMRGIVKVAAVKAPGFGDRRKAMLQDISILTGGSVISEELAMDLEKSTLEDLGQAKRVVINKDTTTIIGGSGEKQAIQSRIGQIRQEIQEATSDYDKEKLNERLAKLSGGVAVLKVGAATEVEMKEKKARVEDALHATRAAVEEGVVAGGGVALVRVAGKISNLRGHNEDQNVGIRVALRAMEAPLRQIVSNSGEEPSVVTNNVKDGKGNYGYNAATDEYGDMIDFGILDPTKVTRSALQYAASVAGLMITTECMVTDLPREDKSSDVASSPAGGMGGMGGMM

SEQ ID NO: 3180 - protein, 365 aa, Sapria himalayana
TSFRLAAKAISRLQAISSGSISKLCNVLVKEVSHLTCYDRVMVYKFHEDEHGEVIAECIRPDLEPYLGLHYPATDIPQAARFLFMKNKVRMICNCMASPVKVLQAEGLDKPLSLCGSTLRSPHRCHEQYMANMNSIASLVLSVTINEEDGEMESTQSRPARLWGLVVCHHTSPKFVPFSLRYACEFLIQVFGIQINKEVELEAQRKEKHILQTQTLLCDMLVRDSPVGIITKSPNVMDLVKCDGAALFYRNKIWLLGLAPSEMQIRDIAEWLLECHGKSTGLSTDSLMESGYPGASLVGSSVCGMAAIRVTSKDFIFWFRSHIAKEFKWGGAKHGRHDKDDGRKMHPRSSFKAFLEVVKWRSLPW

SEQ ID NO: 3181 - protein, 237 aa, Persea americana
MGRGRVELKRIENKINRQVTFAKRRNGLLKKAYELSVLCDAEVALIVFSTRGKLYEFCSTASMLKTLERYQKCNYGAPETTVSSRELQSSHQEYMKLKARVEALQRSQRNLLGEDLGPLTGKELDTLEKQLDVSLKHIRSTRTQYMLDQLGDLQRREHMLSEANKSLRRRLEEGMQENPNHAWDPNGYVRQQAPPQSDGFFHPIECEPTLQIGYQSSQITIAAPGPNVNNYMPGWLA

SEQ ID NO: 3182 - protein, 237 aa, Neurospora crassa
MATATESAPRNHLADKPENSMGGRNLSIITPTIQMSAPPGDPMDITSSNSNSSSNSNSSSINNNNATMAAPSNSDSLPPPKSPVEDTLNAQAAPNGRPQLSSANDQLSPDNIIMPAPAAAAPAVHQPKIVQTAFIHKLYNMLEDKSIQHLISWSPTSESFVMQPSQEFSKASSQYFKHTNISSFVRQLNMYGFHKGKESPDVAGYQQSLTWSKSERCLPPWSSRRYHLGVQAWQRQL

SEQ ID NO: 3183 - protein, 207 aa, Tetrastigma dubium
RFLFMKSKVRMICDCLAQPVKVIQDKTLAQPLSLCGSSLRSPHGCHAQYMSNMGSIASLVMSVTINEEDDDTESEQYRSRKLWGLVVCHHASPRFVPFPLRYACEFLVQVFGVQISKEMELAAQMKEKHILQTQTVLCDMLLRDAPVGIVTQSPNVMDLVRCDGAALYYQKKFWLLGVTPTEAQIRDIAEWLLEYHSGSTGLSTDSL

SEQ ID NO: 3184 - protein, 635 aa, Cochliobolus heterostrophus
MLENPSDESVVRWGNDGDSFVVLENEKFTKHILPKHFKHSNFASFVRQLNKYDFHKVRHNNEENGQSPYGPGVRFAHALCGYCPLGAWEFKHPDFKMNNKDALDNIRRKAPAPRKPNQAAAEDFAPSQQMDMVSGQLMATQAQLHQLEGRYNELNIHHSMLLQEVIGLQKTVVNHEHVMQQIMTFLHGVDATQRRNSKLVFNGGEAQNGNMDPPSNNDDDNPASPLQHASKLLSETNADAMLNPRNLEHMNEITMRMNGTLTTPPPDFARAQMRPTSRGPPSATSTNSMRLDNLDNLVYPVGSSNGIDPMYSEHINNIPYAAPPKAVDQNEPKVPEGKKKSAFPDPGWIRPPQILLVEDDPTCRRIGSKFLYAFHCSIDSALDGLEAVNKMNAGSKYDLVLMDIIMPNLDGVSACHLIRQFDTTPIVAMTSNIRSDDISMYFQHGMNDVLPKPFTKEGLLHMLEKHLVHLKKPSAQGDGSMVAPQPVPIARQLVLKEEESPGKSPQAVSNWNSPNQIPGVSPVGTSVPEDFAQAMRGQPVQHPNSYGVNPMQGNMGYNASSHMQIQSQQQQQQQQQQQQQQQQQQQQQQQAQLQGHRRQVSEISGGDDMNNPAKRQQMYPPQMQQQMGGMQPRPH

SEQ ID NO: 3185 - protein, 242 aa, Persea americana
MGRGRVELKRIENKINRQVTFAKRRNGLLKKAYELSVLCDAEVALIIFSNRGKLYEFCSSSSMLKTLERYQKCNYGAPETTVSTRETQSSHQEYLKLKARVEALQRSQRNLLGEDLGPLTSKELDTLEKQLDASLKQIRSTRTQYMLDQLADLQRREQMLSEANKNLKRRLEEGMQANPQVWDPNGHPVTYGRQQAPPQSDGFFHPLDTCEPTLHIGYQPADQITIAAPGPSVNNYMPGWLA

SEQ ID NO: 3186 - protein, 207 aa, Tetrastigma hypoglaucum
RFLFMKNKVRMICDCLAQPVKVIQDKKSAQPLSLCGSTLRSPHGCHAQYMSNMGSIASLVMSVTINEEDDDTESEQYRSRKLWGLVVCHHASPRFVPFPLRYACEFLVQVFGVQISKEMELAAQMKEKHILQTQTVLCDMLLRDAPVGIVTQSPNVMDLVRCDGAALYYQKKFWLLGVTPTEAQIRDIVEWLLEYHSGSTGLSTDSL

SEQ ID NO: 3187 - protein, 426 aa, Thiobacillus denitrificans ATCC 25259
MFCLEFTHWEIAVTADKKPRLRTIQKSTKLDNVCYDIRGPVMARARQMEEEGQRIIKLNIGNPAPFGFEAPEEIVQDVILNLPNASGYSDSKGLFAARKAIMHETQRKGIAGVTIDDIIVGNGVSELIVMAMQALLNNGDEVLVPAPDYPLWTAAVSLGGGKPRHYLCDEGAGWLPDLDDIRAKITPSTRAIVIINPNNPTGALYPTELLREILEIARQHQLIVYADEIYDKVLFDGVVHTSIASLADDLLIVTFNGLSKNYRACGYRSGWLVVSGDKRHAKDYLEGLNMLASMRLCSNVPGQHAIQTALGGYQSINDLVAPSGRLTRQRDLAHELLTLIPGVSCVKPKAAMYLFPRLDPKLYPIHDDQKFILNLLEEERVLVVQGTGFNWPRPDHLRVVFLPHEEDLTEAIGRMSRFLDRQRAHR

SEQ ID NO: 3188 - protein, 359 aa, Vitis sp. Qiu 94-046
AGALKSYKLAAKAISRLQSLPSGNISLLCDVLVKEASELTGYDRVMVYKFHEDEHGEVIAECRRPDLEPYLGLHYPATDIPQASRFLFMKNKVRMICDCLAPPVKVIQNKRLAQPLSLCGSTLRSPHGCHAQYMANMGSVASLVMSVTINEEDDDTESEQQKGRKLWGLVVCHNTSPRFVPFPLRYACEFLVQVFGVQISKEMELAAQMKEKHILQTQTVLCDMLLRDAPVGIVTQSPNVMDLVRCDGAALYYQKKFWLLGVTPTEAQIRDIVEWLLEYHSGSTGLSTDSLMEAGYPAASLLGDAVCGIAAVKINSNDFLFWFRSHTAKEIKWGGAKHDPDDKDDGRKMHPRSSFKAFL

SEQ ID NO: 3189 - protein, 406 aa, Arabidopsis thaliana
MDLVSSRDTLGDPSTSTKALLLGFSRSRSDHCIIMSGESSSGSTEHCIKVVPTHGGRYVQYNVYGQLFEVSRKYVPPIRPIGRGACGIVCAAVNSVTGEKVAIKKIGNAFDNIIDAKRTLREIKLLRHMDHENVITIKDIVRPPQRDIFNDVYIVYELMDTDLQRILRSNQTLTSDQCRFLVYQLLRGLKYVHSANILHRDLRPSNVLLNSKNELKIGDFGLARTTSDTDFMTEYVVTRWYRAPELLLNCSEYTAAIDIWSVGCILGEIMTGQPLFPGKDYVHQLRLITELVGSPDNSSLGFLRSDNARRYVRQLPRYPKQQFAARFPKMPTTAIDLLERMLVFDPNRRISVDEALGHAYLSPHHDVAKEPVCSTPFSFDFEHPSCTEEHIKELIYKESVKFNPDH

SEQ ID NO: 3190 - protein, 571 aa, Ashbya gossypii ATCC 10895
MCGIFACYRKDDIESFKPTALRLSKRVRHRGPDWSGNVIKNDTILVHERLAIVGLDSGAQPINSPDGNYVLCVNGEIYNHIHLREECSDYEFTSLSDCEPIIPLYLKYDVETPQHLDGMFAWCLYDVQRDRIVAARDPIGVTTLYMGKSSSSPRTRYFASELKCLVDECDEITAFPPGHVYDSDTDKLTRYFKPDWIDETRIPSQPVDYKAVRTTLEKAVRKRLMAEVPYGVLLSGGLDSSLIASIAARETERANREAGDVYADGKHLAGMDDRGLLHTGGWSRLHSFAIGLPNAPDLQAARKVAKFIGSIHHEHTFTLQEGLDALDDVIHHLETYDVTTIRASTPMFLLSRKIKAQGVKMVLSGEGSDEIFGGYLYFAQAPSPAEFHTETVKRVNNLHLADCLRANKSTMAWGLEARVPFLDREFLQLCMNIDPAEKMIAPQKGRIEKYILRKAFDTSDEPGVDPYLPEEILWRQKEQFSDGVGYSWIDGLKDAAERAISDEQFANPNPAWGDDIPTTKEAFWYRLKFDALFPQPTAAATVMRWVPKADWGCAEDPSGRYAKIHDQHISS

SEQ ID NO: 3191 - protein, 616 aa, Chromobacterium violaceum ATCC 12472
MCGIAGWVSFERDLSTQRAVAETMTKTMALRGPDDEGLWLDRRAALGHRRLSIIDLEGGRQPMTADEDGRTLACLVYTGEVYNFRELRLELQGLGHAFRTRSDTEVVLRAYLQWGEAMLERLNGMYAFALWDAREQRLLLVRDRMGVKPLYYYPMPDGVLFGSEPKAILAHPEAERRVTAGGLREMLDLVKTPEAAAFAGMHEVRPGQVVTIDRGGLRKRRYWQLEAREHTDDLPTTIRTVRELLDDIVERQIIADVPLCTLLSGGLDSSVVTALAARSMRRQGKGTVRSFSVDFVKHGAAFEADYLRGSPDAPFVRDLAAHAGTEHREILLESRELADPRLRAAVLGAQDLPPAYWGDMLPSLYKLFEAIRAQSTVALSGESADEVFGGYRWFHDAAAVDGDAFPWLAGSSGAFFDGQSLIAPGLLRELDMPGFRRDSYAQALAEVPRLASDSTRERRMREISHMHLTRFVQALLDRKDRMSMAVGLEVRVPFCDHRLVEYVFNAPWSMKNFDGREKSLLRAAGKDVLPESIVRRVKSPYPATQDPAYEQALRQGLARVLDDSRSPALPLLDKAAAWKLLDRPFGKTSTSPERAGLEMALGLDEWLRHHQVSLDL

SEQ ID NO: 3192 - protein, 397 aa, Oryza sativa
MRMEGGGGGGHGHHGGGGGGHGHHGGIGGGEAQIKGTLTHGGRYVQYNVYGNLFEVSSKYVPPIRPVGRGACGIICAVVNAQTRQEVAIKKIGNAFDNQIDAKRTLREIKLLRHMDHDNALVVISIKDIIRPPRRENFNDVYIVYELMDTDLHHLLRSNQPLTDDHCQYFLYQVLRGLKYVHSANVLHRDLRPSNLLLNAKCDLKIGDFGLARTTNETDFMMEYVVTRWYRAPELLLNCSEYTAAIDIWSVGCILGEIVTREPLFPGKDYVHQLRLITELIGSPDDSSLGFLRSDNARRYVRSLPQYPKQQFRARFPTMSSGAMDLLERMLVFDPSKRITVDEALCHPYLASLHEIYDEPVCPAPFSFDFEQPSLTEEDIKEIIWREALKFNPEPIH

SEQ ID NO: 3193 - protein, 553 aa, Azospirillum brasilense
MAWLGHRRLSINDLSPAGNQPLLHAGGGTGDVLALVCNGEIYNAPTLRTELEALGHAFASRSDNEVILHGYRAWGDAVVDRLTGMFAFVLWDDRRRRLLAARDRVGIKPLYWAEPGDGGIAFASEARPLATLPGIGPAVELRALGHALTLGYVPAPLSAWRGIHKLEPGRLLVWEPGQGAALRRYWEAPRSLAAAGDGDAGWAGLFDRAVADHLLSDVPAGLFLSGGLDSAAVATAAVGAGLRPAAYTLCYPGRPDAEAEVAAAVARHLGLEHRLVPAPTDGLADRLAGVAALFDEPQGYSALVTMAGIARAAAAEHKVVLSGDGGDEVLGGYAWYAGLDPDGPPPGAEAGDAHAAFAARSVLHRHAMRLFPRFLPDEVEALFAPAGLRFGEEEMLAPLEAAFEPGLPLRRALQRVDLATFCADSILAKVDRASMAYGLEVRVPFLDHRLVEWGLSRPPAAEEAVHGKPVLRRYLAGRVPERVFGHPKTGFSLKDTGPFDWNAALDRVAAGPLVRHGLLDPGFRRIVEARSPYRQARIWALLALSLWAGSWME

SEQ ID NO: 3194 - protein, 404 aa, Erwinia carotovora subsp. atroseptica SCRI1043
MSPIEKSKKLENVCYDIRGPVLKEAKRLEEEGNKVLKLNIGNPAPFGFEAPDEILVDVIRNLPTAQGYCDSKGLYSARKAIVQHYQARDMRDMTVEDVYIGNGVSELIVQSMQALLNPGDEMLVPAPDYPLWTAAVSLSNGNAVHYLCDESSDWFPDLDDIRKKITSNTRGIVIINPNNPTGAVYSKELLLDIVAIAREHSLIIFADEIYDKILYDDAQHHSIAALAPDLLTVTFNGLSKTYRVAGFRQGWMVLNGPKKHAKGYIEGLEMLASMRLCANVPMQHAIQTALGGYQSISEFIQPGGRLYEQRNRSWELINQIPGVSCVKPRGALYMFPRIDAKRFNIHDDQKLVLDLLLQEKVLLVQGTAFNWPYPDHVRIVTLPRIDELDMAIHKLGRFLGHYHQ

SEQ ID NO: 3195 - protein, 1124 aa, Mougeotia scalaris
MSSSKRSQSSGRSSTQTRIQNRVTQASADAKLSTAFEVSSSSGGDSFDYTKSVTASLNPTEPLAAKSVTAYLQRMQRGSIIQSFGCMMAVEPGTFRIIAYSENVSEMLGVTPQSVPTGDQQNAIGIGTDVRSLLSPSSVSVVEKAVAANDVSMMNPITVYSLATQKPFFAILHMNDVGLVIDLEPISSSSDSAMFSAGAVQSHKLAAKAISRLQSLPGGDICGLCDVVVEEVRELTGYDRVMAYKFHDDEHGEVVAEIRRSDLEPYLGLHYPATDIPQASRFLFIKNRIRMICDCTSPQVKVVQDSRIPQEMSLAGSTMRGVHGCHTQYMMNMGSTASLVMSVTINDTNEIAGGPGMKGRKLWGLIVCHHSTPRHIPFPIRSACEFLMQVFGLQLNMEVELAAQHREKHILRTQTLLCDMLLRDAPMGIVSQSPNVMDLVKCDGAALLFGGRCWLLGISPTQEQVKDIATWLISSHTDTTGLSTDSLVDAGYPKARELGVDVCGMAAARITENDFLFWFRGHAQKEVKWAGAKDGGSEEDGSRMHPRSSFKAFLEVVKQRSLPWEDVEMDAIHSLQLILRGSFQDIEDKEDRKIVHARLKEMHLQGMEELSSVASEMVRLIETATAPILAVDTAGCVNGWNFKISELTGLSIPEVMGKSLVKDLTHPSSKDTVEKLLYMALNGEEEQNVEIRLKTWGMQQGKGPVILMVNACASRDVSEKVVGVCFVAQDVTGEKIVQDKFTRIQGDYTTIVRSHNSLIPPIFGSDESGFCVEWNPAMERLSGVKREEAIGKMLTRELFGGILRLKNVDGLTKFMIVLNAAMSSHDTDKFPFTFYDRSGKIVEVLLTTSKRCNSEGVVTGVFCFLHTASSELQQALTVQKAAERVAEVKAKELAYIRQEIQNPLDGIHFARSFMEHTVLSEDQKQLIETSATCEKQLRRILADMDLASIEKGYLELETGEFSMATVMNSVVSQGMIQSTQKNLQLYCDTPPDFKSLSVFGDQVRLQQVLADFLLNAVQFTPPSGWVEIKVEPVVKKLPGGVSVAKLDFRVSHPGEGLPEDLIDQMFDRADARVKSQEGLGLSICRKLVRLMNGEVQYRREGERNFFLLQLELPLAQRDDQASMK

SEQ ID NO: 3196 - protein, 451 aa, Pichia angusta
MGTKSMTDVTAEELSKDSVAMMLAKDRELKNKYLKQKHISEQPWTWENWHRHINWLNFTLVLAVPLAGLISTKWVPLKLHTFVTAVILYCFGGLSITAGYHRHWAHRAYDCRLPVKIFFALFGASAVEGSIKMWGHQHRVHHRYTDTPRDPYDAKRGFWYSHMGWMLLVPNPRYRARADISDLLDDWVVRVQHRHYLLLMVVMAFFFPAILTHFLFNDFWGGFIYAGLLRAVFIQQATFCVNSLAHWIGEQPFDDRRTPRDHILTALVTFGEGYHNFHHEFPSDYRNALKWYQYDPTKVVIYLLSKVGLAYNLKRFSQNAIDQGILQQQQKKLDRMRAKLNWGPQLSELPVWDKSTFFEKAKEQKGLVIISGIVQDCSNFLTEHPGGQALLKTSFGKDATMAFNGGVYAHSNAAHNLLATMRVAVIRDGGANGDTFDAQLRYLASKENKKE

SEQ ID NO: 3197 - protein, 493 aa, Prochlorococcus marinus str. NATL2A
MTKFQSIFWHRRDLRFGDNIGLFEASKNSKSLIGVYVLDPKLLDLNRTTSEAKNWFLGESLIELQKNWEIRGSRLLILNGDPIELISKLAELVHAECIYWNENIEPYEINRDKQIAEKLSKEKRKVYTFLDQLIVNPSNIKTNNDEPYKVYGPFYRKWIDLINITKSSENNLIQTSETAKQLTGLNERELSSIKNSDLNYCITNKSKSIYELLSLNRFNKTNLCPCKPGESESIKQLNSFIHSGVINSYNKARDIPSLENTSHLSAALSLGTISCRVVWNGAQVSKNATDDEYKINSIDTWIKELAWREFYQNALINFPELEKGPYREKWLDFPWQNRPDWFEAWGDGLTGIPIIDAAMRQLKCSGWMHNRCRMIVASFLVKDLLIDWRLGELFFMKSLVDGDLAANNGGWQWSASSGMDPKPMRIFNPFRQASKFDEDGEYIRKWIPELSHISTPNLLSGEISSAERNSYPKPIISHKNQTSIFKELYSNIK

SEQ ID NO: 3198 - protein, 567 aa, Kluyveromyces lactis NRRL Y-1140
MLHKEKDIEESKRFFHHSTSGMEGNPDGFGLLPDGSKLESVKDTRIDKFAVPKKGLHSEHVYNLVKNELKLDGNPVLNLASFVNTFTDQFAQKLIDENLNKNLADNDEYPQLIHMNERCISMLAKLWQSDTDRDTPLGCATTGSSEAIMLGGLAMKRQWEKKMRAANKSTEKPNIIMSSACQVALEKFARYFDVECRLVPVDTEHGYHLNPNKLWDYVNENTIGIFVILGTTYTGHLENIEQVAEVLEHIEAQHPDWSNKDIPIHVDGASGGFIVPFAFTEAQMESYGLGRWGFNHPRVVSINTSGHKFGLTTPGLGWIVWKNDEYLLPELRFKLKYLGGIEETFNLNFSRPGFQVIHQYYNLLTLGQQGYYEKFNQSIFVARAFAWKLLQDPDMRDVFEVVSCLHENLDNSSIAESLDDYWKNPHDYKPGIPLCAFKLSEKFKSEHPEIPQSIISTLLRQKGWIIPNYPLPESTDGSDKKEVLRVVFRIEMKLDMALLLVQDVFEVVQKLLKSYEYLNIRTENDNHAVFKVLSTLSNADVSELEHELTDSQKEKEQHIKKNYRGTC

SEQ ID NO: 3199 - protein, 477 aa, Listeria monocytogenes str. 4b H7858
MTESKFPKDFLWGGAVAANQCEGAYLEDGKGLSLVDILPTVEDGRWEALFNPSKALATDYGFYPSHESIDFYHRYKEDIKLMAEMGFKCFRMSISWPRIFPNGDETTPNEKGLAFYDAVFDECHKYGIEPVVTINHFDTPLEVFKKYGGWKNRKCIDFYLNFCEAIFTRYKDKVKYWMTFNEINMILHLPYIGGGLDVTKEDNPEEVKYQAAHHQLVASALATKLGHEINPENQIGCMLAAGNTYPMTCNPKDVWKSIEADREGYFFIDVQARGYYPSYTKRFFKEHNINIKMEDGDLDVLRDHTVDYVAFSYYSSRLTSADPEKNKETEGNVFATLKNPYLKASEWGWQIDPLGLRITMNTIYDRYQKPLFIVENGLGAVDTVAEDGSITDDYRIDYMREHVREMGEAIEDGVELLGYTPWGCIDLVSAGSGEMKKRYGFIYVDRDNKGNGTLNRSKKKSFDWYKKVIETNGKDID

SEQ ID NO: 3200 - protein, 180 aa, Triticum aestivum
  misc_feature (17)..(17): Xaa can be any naturally occurring amino acid
QAPSSHRPYYQLIRHGXEGYRNIMENCQENAMVVKEGLEKTGRFNIVSKDEGVPLVAFSLKDHSRHDEFEISDMLRRFGWIVPAYTMPADAQHVTVLRVVIREEFSRTLAERLVLDIDTVMAQLDALPSKLAPPALLPATLPKTVVVANGHVKKTELETQKSVTEAWKKFVLAKKTNGVC

SEQ ID NO: 3201 - protein, 252 aa, Gloeobacter violaceus PCC 7421
MLVHRLNALKDNYVFVLEDEAARTAAVVDPAEARPVLEALVRLGLKLVAIFNTHHHHDHVGGNRELLEAYPGIAVYASRRDRGRIPGQTVELEDGDTVAFGCERARVIFVPGHTHGHIAYHFAGCGHLFCGDTLFAGGCGRLFEGTARQMQHSLGRLRELPGETQVWCAHEYTLGNLRFAHTLEPDNAELAERLRTVEVLRARKIATVPSTMAAERATNPFLRWESRQLQRAAGAIEPEEVFAHLRALKDRF

SEQ ID NO: 3202 - protein, 462 aa, Glycine max
  misc_feature (308)..(308): Xaa can be any naturally occurring amino acid
MESKPHVLMQRYELGRLLGQGTFGKVYYARSTITNQSVAIKVIDKDKVMRTGQAEQIKREISVMRLARHPNIIQLFEVLANKSKIYFVIEYAKGGELFNKVAKGKLKEDVAHKYFKQLISAVDYCHSRGVYHRDIKPENILLDENGNLKVSDFGLSALVDSKRQDGLLHTPCGTPAYVAPEVIKRKGYDGTKADIWSCGIVLFVLLAGYLPFHDPNLIEMYRKISKAELKCPNWFPPEVCELLGMMLNPNPETRIPISTIRENSWFKKGQNIKNKRPVVENNTVSSSSTVLLDQNDCDGLAAEANGEXVVPLSINAFDIISRSVGFDLSRFFDESFKIKEARFSSRLPANVIISKLEDIAKQLRMKIKKKAAGLLKLESLNEGRKGVLSIDAEIFEVIPCFHMVEVKKSNGDTLEYQKILKEDIRPSLHDIVWVWQSDQQLQSQQSEQHQHTDDQQQQQPQS

SEQ ID NO: 3203 - protein, 574 aa, Candida glabrata CBS138
MLRSTTSKSLSKMPHAIPPQCRRSHSSSIFQTKKRLAHLESDRPYLTHLPRSMNSSPNLRFHSSASSSSLRSSFLNTEIHHHSHNNLPFLPAEQATLKDVNECVLNAKYAVRGAIPMRAEELKTQLMENPHSLPFNDIINANIGNPQQLKQKPLSFYRQVLSLLQYPELIPTLENNPQTMIKQDAIDRAKRLLDDIGGSVGAYSSSQGVLGIRKTVADFITNRDDGIIAYPEDIFLTAGASSAVDYLLSIFCRGEETGVLIPIPQYPLYTATLALQNSHALPYYLNEETGWSTDPEELESIILDSIENNIKPSVLVVINPGNPTGAVLSEEAIEQIFTLAAKYGIIVIADEVYQENVFEDVKFHSMKKVLRQLQMKQPGLYDNVQLASLHSTSKGVSGECGQRGGYMELVGFTHDIRQVVLKLASISLCPVVTGQALVDLMVCPPQKGEESYEQDQEERRNIHKELHKRATLLHDAFVKLDGISCQKPQGAMYLFPKLELPYKAIQEALHQDMSPDEFYCKSLLEKTGICTVPGSGFGQEPGTYHLRTTFLAPGTKWIEDWVDFHQEFYNKFKN

SEQ ID NO: 3204 - protein, 203 aa, Arabidopsis thaliana
MGRKKRAMWERKWKRLDIVKAFASLFVHFLCLLAPFNFTWPALRVALIVYTVGGLGITVSYHRNLAHRSFKVPKWLEYFFAYCGLLAIQGDPRQRVRTHRYHHQFTDSDRDPHSPNEGFWFSHLLWLFDTGYLVEKCGRRTYVEDLSRQWYYKFLQRTVRYHIPTFGFLLYYFGGLSFPTWGMGNILYSFPFIFKKFPTKTLK

SEQ ID NO: 3205 - protein, 743 aa, Pseudomonas fluorescens PfO-1
MSFSNREQGHAKERLLPTAKDIDALVRAEHHDPFSILGPHGDGAGGQFIRAYLPGALSVSVVDKNSGEELGPLEATETPGLFVGHFEGSRPYLLRTRWAGGEQVAEDPYSFGQLLGEMDLYLFAEGNHRDLSSCLGAQLKTVDGVDGVRFAVWAPNARRVSVVGDFNVWDGRRHPMRLRHPSGVWELFIPRLQAGELYKYEILGAHGILPLKADPMALATSLPPDTASKVASPLQIDWQDQDWMSGRRERQQHNAPLSIYELHAGSWQCELDDLGEVARQYTWPELAERLIPYVKELGFTHIELMPIMEHPFGGSWGYQLLSQFAPSARYGTPEQFGEFVNACHQAGIGVILDWVPAHFPTDTHGLAQFDGTALYEYGNPLEGFHQDWDTLIYNLGRTEVHGYMLASALHWLKHFHIDGLRVDAVASMLYRDYSRKAGEWVPNRHGGRENLEAIDFLRHLNDVVALEAPGALVIAEESTAWPGVSQSTQQGGLGFAYKWNMGWMHDSLHYIQQDPVYRAHHHNELSFGLVYAWSERFILPISHDEVVHGKHSLIDKMPGDRWQKFANLRAYLSFMWTHPGKKLLFMGCEFGQWREWNHDQQLDWYLLQYSEHKGVQKLVSDLNRLYREEPALHEQDDAPQGFQWLIGDDAINSVYAWLRWSKDGTPVLVVANFTPVPRQSYRVGVPFAGRWKELLNSDADTYAGSNYGNGGGAFTEEVASHGQALSLELNLPPLAVLILKPEV

SEQ ID NO: 3206 - protein, 252 aa, Brassica napus
MAYQMELGGESSPQRKAGRGKIEIKRIENTTNRQVTFCKRRNGLLKKAYELSVLCDAEVALIVFSSRGRLYEYSNNSVKGTIERYKKAISDNSNTGSVAEINAQYYQQESAKLRQQIISIQNSNRQLMGETIGSMSPKELRNLEGRLDRSVNRIRSKKNELLFAEIDYMQKREVDLHNDNQLLRAKIAENERNNPSMSLMPGGSNYEQIMPPPQTQPQPFDSRNYFQVAALQPNNHHYSSAGREDQTALQLV

SEQ ID NO: 3207 - protein, 454 aa, Streptomyces avermitilis MA-4680
MTKRDVAALFGNRFLTEPAPSQTFPEEGMTATDTMRLLDEDLVMEGDPQRNLATFVTTWMEPEAQRIIAENLHRNFIDHAEYPISAEIEQRCVRMLADLFHAPGKTTGCRTQGSSEAIMLGALSLKWKWRERRQAANLPADRPNLVFGGDVHVVWEKFCRYFDVEPRIVPLAEDKYTIGPEDVEPHIDENTIGVVAVVGTTFTGHKDDVVGIDKLLRDVRKERDLDIPIHVDGASGGFVWPFLYPDSKWDFRLEQVRSINVSGHKYGLVYPGIGWLVFREESDLAKDLVFYENYLGKTDATFTLNFSTGASMVLAQYYNFVRLGRQGYTYVMETMQKNAHALADNLRSSGRFEVIGSDLEQLPLVAFRLAGEHAYDESDIAWQLSAERGWMVPAYTLPPNAERVKILRALVKETLSREQIERLTQDIADACATLDHKGGTTEVERAQIKRGTGY

SEQ ID NO: 3208 - protein, 719 aa, Kluyveromyces lactis NRRL Y-1140
MTGDNNDIPENVRGVVEIDSWLTPFAKVLSERRYLADEWRYKIEHSTNSEGRDTTLAQFARDAYKSFGLHADPGSLEIRYKEWAPNAVRAFLIGEFNSWNENANEMQRDEYGIFTTVVPPVVDDSGNKQYGIPHDSKVKVCFQLADGSRIYRLPAWITRATQPDKETAKQWGPSYEARFWNPPVHYSFKNKRPGFMRDTDSLRIYEAHVGISTPEPKVGSYKEFTQNVLPRIKDLGYDAIQLMAIMEHAYYASFGYQVTNFFAASSRFGTPDELKELVDTAHGMGILVLLDVVHSHASKNVTDGLNQFDGSDHQYFHSLASSRGEHPLWDSRLFNYGHFEVQRFLLANLAFYIDVYQFDGFRFDGVTSMLYLHHGVGEGGAFSGDYNEYLSSERSFVDHEALAYLMLANDLVRELLPDNGITIAEDVSGYPTLCMPRHLGGAGFDYRLAMALPDMWIKLLKESRDEDWEMGHIVHTLVNRRHREKVVAYTESHDQALVGDKTLAFWLMDAAMYTDMTILKESTPVVDRGIALHKLIRLITHSLGGEAYLNFEGNEFGHPEWLDFPNVNNGDSYHYARRQFNLVDDPLLRYQYLYQFDKAMQTTEKNYKWLNTPQAYVSLKHEVDKVIAFERNGLLFIFNFHPTESFTDYRIGVNEPGCYRIVLNSDKHEYGGWDRIDESQSKYFTTDLKWNERNNFIQVYIPNRTALVLALDSRVRNGN

SEQ ID NO: 3209 - protein, 782 aa, Gibberella zeae PH-1
MVQYVFTPWRDRYELLLVREQMYTGITTNARDPKQKLGQDASGSSEDMQIRQDIDDKEMRARQHQAVARVSMWMQRGNCPHLIESTALLMAAMLSDREAATRENAASSAYAIRATYSAAFSRFVTGLLDSHQDKQRKQSMYSVADTIGLPATFVELRHQCTHEQLPSLAKLRTAARKALLWIWDYHWKQLDEDSSDPCRMAILRYLKEGDATKLGTILDDFERWPKERLLKTIQEVRGSLPGNQVFLKCAQLTQQLKGAKVDKKATNPGAMDTTMKDHEVDTVIVVEEDDDFGWSQFQGPWKPKPIGIVYNGMYHVPSPASTNVMTAAGTGAMMLRTRGKPAISQTEDWIFINCREGSSNNYAYLVVDDKSKDAVIIDPANPPEVAPILKDAIQAGKINLTAILAELGTPKLDIIGGKDCEGVTKTPGHGETFKLGDITFKGVHTPCHTQDSICFFAQDGNDKAVFTGDTLFIGGCGRFFEGDAKEMHKALNERLAALPDDTVVYPGHEYTKANVQFAASISQREAVQSLHSFAENNKVTTGKFTIGDEKEHNVFMRVEDPEIQKQTGETEPVAVMAKLREMKNNFNPVGNLISPPKRKTPAASGSAAPKTRQSKLAKEHNVTPQEEGEIREAFSLFAEPMDGEKYGVLPIDDVKSALIALGVPPSSYAELKEFVSILDPDNDGYATFEPFFAICALKFHTREHDSDAHRAEVEEAFRLFTNGQDGPITLGHLRRVAAVLKEDVDEELLKDMILEANGGVGVARGVGAEEFDRVMKSAGVWR

SEQ ID NO: 3210 - protein, 801 aa, Streptomyces coelicolor A3(2)
MRSSQGSGADPGARGRVDQRLRRGARPAPTSPHSPAKTNHPLRAAIIGGGPGGLYTAALLKRLAPDREVTVYERNAPDDTFGFGVVLSDETLGGIEHADPTVYEALKAHFVRWDDIDIVHRHTRHTSGGHRFAALGRRRLLEILHDRCRDLGVELRFRTEAPPPDRLARTHDLVVAADGVHSATREAYRDVFRPRLTPHRCRYIWLAADFAFDAFRFEIAETEHGVMQLHGYPFAPDASTVIVEMREEVWRAAGFDELDETESTARCAKIFADALGGRPLRSNKSAWTTFRTVVNERWSHGNIVLLGDAAHTAHFSIGSGTKLAVEDALALAACLAERPTLQEALTAYEEERRPVVASTQRAAKASLEWFEDLDRYLAQPPRQFAFNLLTRSRRVTHENLRLRDAGFTESVEREFGCPPDTPPMFTPFRLRGLTLRNRVVVSPMDMYSATDGVPGDFHLVHLGARALGGAALVMTEMVCVSAEGRITPGCAGLYTGRQGEAWRRITDFVHDGAPGTAIGVQLGHSGRKGSTRLMWEGMDEPLPDGNWPLVAPSPLPYRPGGQVPRELSRAQLADVREQFRAAAERAAGAGFDLLELHCAHGYLLSGFLSPLTNHRTDAYGGSPENRLRFPLEVFDAVREVWPDERPMTVRISATDWAEGGTSAEEAVEIARAFAAHGADAIDVSTGQVVSGERPEFGRSYQTPYADRIRHEAGVPVIAVGAISSWDDVNSLVLAGRTDLCALARPHLYDPHWTLHAAAEQGYDGPGARWPAPYRAGSRPPRTGRTDAPRPRLTLHGPGQDG

SEQ ID NO: 3211 - protein, 178 aa, Zea mays
MATTHDDCVSLCLMALAAAGGGGMTTQSYAPSTAAWTTQECELRFRCSVCGKAFASHQALGGHKASHRKPTHLQTQQASSSSVTTSSAGSGGGQGRHRCSVCHRSFATGQALGGHKRCHYWDGLSVSLTASGSGSTVKGFDLNLMPATRWGEEEEVQSPLPIKKRRLSGPSLDLSLTI

SEQ ID NO: 3212 - protein, 392 aa, Zea mays
  misc_feature (315)..(315): Xaa can be any naturally occurring amino acid
MRMEGAGGGAGGGGAGAGGCLGMGHGGEAQIKGTHTHGGRYVQYNVYGNLLEVSAKYVPPIRPVGRGACGIICAAVNAQTREEVAIKKIGNAFDNQIDAKRTLREIKLLRHMNHENVISIKDIIRPPRRENFNDVYIVYELMDTDLHHLLRSNQQLTDDHCQYFVYQLLRGLKYVHSANVLHRDLRPSNMLLNAKCDLKIGDFGLARTTTETDFMMEYVVTRWYRAPELLLNCSEYTQAIDMWSVGCIFGEMVTREPLFPGKDYVHQLRLITELVGSPDDTSLGFLRSDHARRYVRSLPQHPKQQFRVRFPTMSXSGAMDLLERMLVFDPSKRITVDEALCHPYLASLHEVNDEPICPAPFSFDFEQPSLTEEAIKELIWKESLKFNPDPIH

SEQ ID NO: 3213 - protein, 572 aa, Aspergillus nidulans FGSC A4
MASSVVPVALQNKLLGYGRAPSAQLAVLNLDLVRNIVFALFLFRYVRKTFYSLRGYGFFGSIHNVYLAIRLFLYSIFLRFPGVRGQVDKQVTAAIEGLESKLVANGPGVTRYLTLPKEGWTHEQVRAELAKLGNMEHTRWEDGRVSGAVYHGGKDLLKIQAEAFEQFGVANPIHPDVFPGVRKMEAEVVAMVLAMFHGPSDGAGVTTSGGTESILMACLAARNKARAERGVTEPEMIIPDTAHAAFIKASSYFGIKLHRVPCPAPDHKVDIAKVRRLINSNTVLLVGSAPNFPHGIVDDIPALSRLATHYKIPLHVDCCLGSFVIALLKKAGFPSPYEEEGGFDFRQPGVTSISVDTHKYGFAPKGNSVLLYRNKTYRSHQYFIYPDWSGGVYASPSVAGSRPGALIAGCWASLMSVGESGYIKSCLDIVNAAKKFESAINEDARLSPNLQVVGQPMVSVIAFESKNDAVDIYDIADDLSAKGWHLNALQSPPAMHVAFTIPTAAAVDTLISDLVAVVEKELEKAEERKRQGKSYVVKRGDTSALYGVAGSMPDKSIVSRLAEGFLDTLYKA

SEQ ID NO: 3214 - protein, 411 aa, Arachis hypogaea
MLEGGAKFPGLIDLNKHTTDNYYDFSQGFYHKLGEGTNMSIDSMQTSNGGGSVAMSIDNSSVGSNDSHTRILNHQGLRRRANDNYSVQNSVNRRGRVTHALSDDALAQALMDSSSPTEGLENFDEWTIDLRKLNMGEAFAQGAFGKLYRGTYNGEDVAIKILERPENELSKAQLMEQQFQQEVMMLATLKHPNIVRFIGACRKPMVWCIVTEYAKGGSVRQSLMKRQNRSVPLKLAVKQALDVARGMAYVPWLGLIHRDLKSDNLLIFGAKSIKIADFGVAGIEVQTEGMTPETGTYRWMAPEMIQHRPYTQKVDVYSFGIVLWELIPGMLPFQNMPAVQAAFAVVTKNVRPIIPNDCLPVLRDIMPRCWDPNPDVRPPICRNCRNAETEIMTTVRKARFRCCMTQPMTAD

SEQ ID NO: 3215 - protein, 360 aa, Pseudomonas syringae pv. tomato str. DC3000
MSEKTLFQPYALGNLTLTSRIVMAPLTRNRAGAGLAPTDLAATYYAQRASAGLIITEATQISPQAQGYQDTPGLYTPEQIAAWRVVTDAVHAEGGRIFVQLWHVGRVSHVDLQPGGAAPVAPSAIRAQTKTFVNNAFTDVSEPRALELSELPGIVNDFRQAAANAIEAGFDGVEIHGANGYLLDQFIKDSANVRTDAYGGSVENRARLLLEVVTAVVKEIGAHRTGVRISPVSPANGVASSDPQPQYEYIAEQLSEQGIAFLHVVEGATGGPRDVAPFDYDALRQRFKHTYLANNGYDLDLATARVNANKADLVAFGRPFISNPDLIERLKTGAPLAELNPATLYGGGAEGYTDYPTIAG

SEQ ID NO: 3216 - protein, 461 aa, Helicobacter hepaticus ATCC 51449
MRPKRNMSTEFYITKAVSMMNKSRVVVAGIIVSLLASSALFVGLSADESHKAKPKVQEVNKLESFKKLRRIMAIVEESYVDELSLDEIVNKAIDGLLSNLDAHSNYLNKKKFDDLRANIDGEFGGIGITVGLKDGALTIIAPVDGTPGDKAGLKSGDVIVKVNDKSTIDMSIDDAVNLMRGTPRTKVELTIVRKGEAKPLNFSIVRDIIKMDFVKVRKIQDTDFAYVRVASFDKNVTRNVLSSLKQMGKVKGIVLDLRNNPGGALDQAVDLSRLFIKNGVIVTQKGRNKNDNVEYRATNAPYASVPIVVLVNGGSASASEIVAGALQDHKRAVLIGEQTFGKGSVQTFMQLDQNEGLKLTTAKYYLPSGRTIQAVGVTPDIIVYPGVAPENENSFSIKESDLKRHLQGELEKVNEQNTKTETASDDKKNITQAMIYQDIQLKSAIDVLKAWGVIGALNPNK

SEQ ID NO: 3217 - protein, 331 aa, Arabidopsis thaliana
MPVISKASSTTTNSSIPSCSRIGGQLCVWPGLRQLCLRKSLLYGVMWLLSMPLKTLRGARKTLKITHFCSISNMPSSLKIELVPCSKDNYAYLLHDEDTGTVGVVDPSEAAPVIEALSRKNWNLTYILNTHHHDDHIGGNAELKERYGAKVIGSAVDKDRIPGIDILLKDSDKWMFAGHEVRILDTPGHTQGHISFYFPGSATIFTGDLIYSLSCGTLSEGTPEQMLSSLQKIVSLPDDTNIYCGRENTAGNLKFALSVEPKNETLQSYATRVAHLRSQGLPSIPTTVKVEKACNPFLRISSKDIRKSLSIPDSATEAEALRRIQRARDRF

SEQ ID NO: 3218 - protein, 406 aa, Triticum aestivum
  misc_feature (30)..(30): Xaa can be any naturally occurring amino acid
FLRAPGARTPVIVRFSTVIHERGSPETIRXPRGFAVKFYTREGNWDLLGNNFPVFFIRDGIKFPVVMHAFKPNPKCHVQEYWRVFDFLSHHPESLHTFFFLFDDVGIPTDYRHMDGFGVNTYTFVTRAGKSHYVKFHWRPTCGVSCLMDDEATLVGGKNHSHATQDLYDSIDAGNFPEWKLFVQVIDPDDEDRFDFDPLDDTKTWPEDLVPLQPVGRLVLDRNVDNFFNENEQLAFGPGLVVPGIYYSDDKMLQCRVFAYADTQRYRLGPNYLMLPVNAPKCGFKNNHYDGAMNFMHRDEEVDYYPSRHAPLRQAEPASFPVPTRPVVGRREKTRIKKENDFVQPGERYRSWAPDRQDRFVRRFADALAHPKVSHELRVIWIDFLSKCDKSCGMKVANRLNVKPSM

SEQ ID NO: 3219 - protein, 153 aa, Lilium longiflorum
LKPLKSMDSKFEVDHSLIAKLNQLTEFLANRNQPLRAPFVPDARAMPAAATDIKDMPGAYVFIIDMPGVESEEIKIDVEEGNMLVISGERKREEEEERYLEMQRRMGKMMRKFKLLENANSGAISAVCKNGVLTVTVEKLPSQEPKAIEIKIA

SEQ ID NO: 3220 - protein, 293 aa, Ashbya gossypii ATCC 10895
MCPACCKAHRSSSFMYRQLRKMHVKAIKMRWLTGGVNYSYLVSTQDKKASWLIDPAEALEVLPALSHDEKQSIRAIVNTHHHYDHAGGNLAIRAALKREGVAVPVIAGSTTSPVSTDIPEHLQKYTLGDSVEVLCIRTPCHTQDSICYFMRDTKTGQQALFTGDTLFTAGCGRFFEGTAEEMDAALNSRLLEHVQDHAATKVYPGHEYTKGNVHFIRSAIYMSEGDNPAFDRLESFANANAVTTGQFTLQDETEYNPFMRLDDPTIRRRVGDLHRTWARADVMAKLRSMKNTM

SEQ ID NO: 3221 - protein, 631 aa, Alkalilimnicola ehrlichei MLHE-1
MCGITGIFDLQAQRPIDVPLLEAMNQTQYHRGPDEGGLHHEPGVGLAHRRLSIIDLSSGQQPLFNEDGSVAVTYNGEIYNFPELTRTLQSAGHTFRTHCDTEVIVHAWEEWGEACVERFRGMFAFALWDRNRETLFLARDRLGIKPLYYAALPDGHLLFASELKALMAHPDLPRQLDPCAVEEYFGFGYVPEPRSIFAGVHKLPPGHTLTVRRGQGGVPASRAYWDVPFAPLPAMGEAEAAEELVRRLREAVEIRLVAEVPLGAFLSGGVDSSAVVAMMAGLSPDPVRTCSIGFDDPRYDESEYARMVAERYRTAHRLDQVNPDDFDLLGKLGALYDEPFADSSALPTYRVCEQARRQVVVALSGDGGDENLAGYRRYRHHLGEERLRGLLPLGLRRGLFGSLARVYPKADWAPRVFRAKATFQALARDAVEGYFQGVSILRDDLRRHLFSSGFRSELQGYSAVDVLRRHAAQAPTDHPLSLVQYLDMKTYLPGDILTKVDRASMAHALEVRVPILDHKLVEWMSGLPPEMKLNGSEGKHLLKKAMEPHLPHEVLYRKKRGFAVPVAEWFRGPLRQRVRDQVLGPRIGESGLFDMDFLNRLVDEHTRGARDHSPALWSLLMFDEFLAKARP

SEQ ID NO: 3222 - protein, 463 aa, Listeria monocytogenes str. 1/2a F6854
MSNNFLWGGATASYQCEGAWNVDGKAESMWDYYLHEAGLENGDVASDHYHRYEEDIRMMKEGGQNSYRFSLSWPRIIKNRQGDINLKGIEFYQNLLDTCKKYDIEPFVTLYHWDLPQYWEETGGWLDHDVCAAFEHYAKVCYDHFGDKITNWTTFNEPKWFVANGYKIGNYPPGYQDTQKTMIAAYNVMYASALGVKAFKEGGYPGQIGIVHSYTPVNGVDESIETKIAMRYADNYCNNWILDTAALGEFPVDLVAELAKSHDISFMKTDELQTIKQNTVDFIGLNYYSRTLVKPYTGGETQLQFNHSGKKGESKVLIKNWFEQVKDPANETTEWDTEIYPKGLQDGLIEAYERYQLPLYVTENGIGVREDVSVPQVDDAYRIAFMNDHINAIFNAIDAGCDVRGYYAWSPFDLYSWKNGVEKRYGLVAVDFENNQIRKPKASYYWFKEMIESQGKLIKRREF

SEQ ID NO: 3223 - protein, 687 aa, Ralstonia eutropha JMP134
MRYPHLFKPLQLNQLTLRNRIVSTAHAEVYAEPGGLPGDRYIRYYEEKAKGGVGLAICGGSSPVSIDSPQGWWKSVNLSTDKIIDPLSRLAETMHRHGAKIMIQATHMGRRSAFHGEHWPHLMTPSGVREPVHRGNAKIIEVEEIRRIIADFAAAAKRVKDAGMDGIEISAAHQHLIDQFWSPRTNFRADEWGGSLENRMRFGVEVLQAVREVVGKDFCVGLRMCGDEFHEDGLDHEQLKEIAQAMSESGLVDYIGVVGSGADTHNTLANCMPPMALPPEPFVHLAAGIKSVIKVPLMHAQSIRDAGQAERLLANGMVDLVGMTRAQIADPHMVIKIRDGREDEIKQCVGANYCIDRQYNGLDVLCVQNAATSREATMPHIIEKSRGPKRKVVVVGAGPAGLEAARVARSRGHDVVLFEKNTEVGGQILLAAKAPQREQMQGIVRWFDMETKRLGVDRRLGVEADAKMIMAEKPDIIVLATGGRAFSDQVPGWAVAEGLAVSSWDVLAGRVEAKENVLVYDGVSTHAGAGVADYLASRGAKVEIVTPDVKVADDCGGTTFPIFYRRLYAQGVIHTPNYWLDRVYEEGGKKIAVLRNEYTEELEERAVDQVVIENGSTPNDALYWKLKPESLNRGQVDVHKLFASEPQPSLSETLGNGRFLLFRVGDCISMHNIHGAIYDALRLVKDF

SEQ ID NO: 3224 - protein, 464 aa, Malus sylvestris
FNSHGEDSSYFLGWQEYEKNPYHEVHNTNGIIQMGLAENQLCFDLLESWLAKNPEAAAFKKNGESIFAELALFQDYHGLPAFKKAMVDFMAKIRGNKVTFDPNHLVLTAGATSANETFIFCLADPGEAVLIPTPYYPGFDRDLKWRTGVEIVPIHCTSSNGFQITETALEEAYQEAEKRNLRVKGVLVTNPSNPLGTTMTRNELYLLLSFVEDKGIHLISDEIYSGTAFSSPSFISVMEVLKDRNCDENSEVWQRVHVVYSLSKDLGLPGFRVGAIYSNDDMVVAAATKMSSFGLVSSQTQHLLSAMLSDKKLTKNYIAENHKRLKQRQKKLVSGLQKSGISCLNGNAGLFCWVDMRHLLRSNTFEAEMELWKKIVYEVHLNISPGSSCHCTEPGWFRVCFANLPERTLDLAMQRLKAFVGEYYNVPEVNGGSQSSHLSHSRRQSLTKWVSRLSFDDRGPIPGR

SEQ ID NO: 3225 - protein, 208 aa, Streptomyces avermitilis MA-4680
MTARGTVRVERVVTSGTFSLDGDTFDVDNNVWLIGDDEEVLIVDAAHDARTIHEAVAGRHVTAIVCTHAHDDHIDAAAELSVLTGAPVLLHPGDNELWSLTHPGRKPDGELSDGRVLTVAGIELQVIHSPGHTWGSCSLHAPFLNAVFTGDTLFHGGPGATGRSYSDRPTIEASLRNRILTLPGGTVVHTGHGEDTTIAAERLNVPAV

SEQ ID NO: 3226 - protein, 548 aa, Photorhabdus luminescens subsp. laumondii TTO1
MAAKDVKFGSDARVKMLRGVNILADAVKVTLGPKGRNVVLDKSFGAPAITKDGVSVAREIELEDKFENMGAQMVKEVASKANDAAGDGTTTATVLAQSIVTEGLKAVAAGMNPMDLKRGIDKAVVAAVAELKKLSVPCSDSISIAQVGTISANSDETVGKLIAEAMDKVGKEGVITVEEGTGLEDELDVVEGMQFDRGYLSPYFINKPENGSVELENPYILLVDKKISNIRELLPVLEGVAKASKPLLIVAEDVEGEALATLVVNTMRGIVKVAAVKAPGFGDRRKAMLHDIAVLTNGNVISEEIGLELEKATLEDLGQAKRIVINKDTTTIIDGVGEEDAIKGRVSQINQQIKESTSDYDREKLQERVAKLAGGVAVIKVGAATEVEMKEKRARVDDALHATRAAVEEGVVAGGGVALVRVAAAIVGLKGDNEDQNVGIRVAMRAMEAPLRQIVDNSGEEPSVIANSVKAGEGNYGYNATTEQYGDMIAMGILDPTKVTRSALQFAASIAGLMITTECMITDLPKDDKADLGAAGGMGGMGGMGGMM

SEQ ID NO: 3227 - protein, 600 aa, Pseudomonas fluorescens PfO-1
MPSRTPESWPHGAIMLDAEHTQFALWAPDAFYVSVELDNGQSLPMLPQGDGWFVIKTRCPAGSRYRFNIDGELEVPDPASRAQDGDLDRHSVVVDPHLYSWRNTTWQGRPWNEAVIYELHVGALGGFAEVEQHLSRLAELGITAIELMPIAQFPGDRNWGYDGVLHYAPQASYGTPEQLKHLIDSAHGYGLAVILDVVYNHFGPDGNYLHRYAKGFFREDKHTPWGAAIDFRRREVRDFFVENALMWLLEYRFDGLRLDAVHAIQSPDFLPELARRIRQQIDPSRHVWLTIENELNQSSLLEENYDAQWNDDGHNALHVLLTGETDAYYADYALQPTEQLARCLSQGFVFQGHITRHGELRGEPSEHLPSTAFVLFLQNHDQIGNRAFGERLHQLAEPRAVDAATALLLLSPMIPLMFMGDEYAAQQPFLFFTSHHGELAKLVREGRRNEFAAFSAFSDPHKREQIPDPNAEQTFHASQPRLTGNGTPRQQATLALYRQLLQLRHQYIIPNLSGTQALGAQVLGPGAVSARWRLGDGSELRIDLNLSDTPVVNLPQADSAWLFRQPSDAGLSDEGQLPPYCALVSLTAATPLPPLDGERL

SEQ ID NO: 3228 - protein, 176 aa, Zea mays
MTMPRRALLFAAVLLAASAAAVSGFHLAGDESGLVRGVLTAVRERAEAEAEDAARFAVAYHNRNQGAALEFTRVLKSKRQVVTGTLHDLILEAADAGKKSLYRAKVWVKPWEDFKSVVEFRLAGDSESEPEPSVASDEGSGQGVAKLSLEADIIHEEAHLHTIENDGLSSDFASSA

SEQ ID NO: 3229 - protein, 638 aa, Geobacillus stearothermophilus
IAVGPTDLEIYLFHEGSLYKSYELFGAHVIKKNGMVGTRFCVWAPHAREVRLVGSFNEWNGTNFNLMKVSNQGVWMIFIPENLEGHLYKYEITTNDGNVLLKSDPYAFYSELRPHTASIVYNIKGYQWNDQTWRRKKQRKRIYDQPLFIYELHFGSWKKKEDGSFYTYQEMAEELIPYVLEHGFTHIELLPLVEHPFDRSWGYQGIGYYSATSRYGTPHDLMYFIDRCHQAGIGVILDWVPGHFCKDSHGLYMFDGAPAYEYANMQDRENYVWGTANFDLGKPEVRSFLISNALFWMEYFHVDGFRVDAVANMLYWPNSDVLYKNTYAVEFLQKLNETVFAYDPNILMIAEDSTDWPRVTAPTYDGGLGFNYKWNMGWMNDILTYMETPPEHRKYVHNKVTFSLLYAYSENFILPFSHDEVVHGKKSLLSKMPGTYEEKFAQLRLLYGYLLTHPGKKLLFMGGEFGQFDEWKDLEQLDWMLFDFDMHRNMNMYVKELLKCYKRYKPLYELDHSPDGFEWIDVHNAEQSIFSFIRRGKKEDDLLIVVCNFTNKVYHGYKVGVPLFTRYREVINSDAIQFGGFGNINPKPIAAMEGPFHGKPYHIQMTIPPFGISILRPVKKGSVKSFMKTPHPPSHGAS

SEQ ID NO: 3230 - protein, 606 aa, Delphinium x belladonna
MDSCACIDTQWPADELLVKYQYISDFFIALAYFSIPLELIYFVQKSAFFPYRWVLMQFGAFIVLCGATHLINLWTFSMHSKTVAMVMTIAKISTAVVSCATALMLVHIIPDLLSVKTRELFLKNKAEELDREMGLIRTQEETGRHVRMLTHEIRSTLDKHTILKTTLVELGRTLGLEECALCMPSRTGMNLQLSHTLRHQIPVGSTVSTNLPIVTQVFNSNQAIKIPHTCPLARIGPTAGRYVPPEVVAVRVPLLHLSNFQINDWPELSAKSYAVMVLMLPTDSARKWHDHELDLIEVVADQVAVALSHAAILEESMRARDMLMEQNIALDMARREAEMAIRARNDFLAVMNHEMRTPMKAVIALSSLLLEIELTPEQRVMIETVFKNSNLLAALINDVLELSRLEDGSLELDIRTFNLHGIFREVLNMIKPITAVKKLSLTLMLSPDLPVVAVGDEKRLMQIMLNVVGNAVKFTKEGYVSVIASVAKAESLRDWQAPEIFMVSSDSHFHLCVQVKDSGCGISPQEIPHLFTKFTQLRSGQNRGNDGAGLGLALCKRFLNLMEGHIWVDSDGTDKGCTVTIIVKLGICEGQPEPSNLQVVSRPRLS

SEQ ID NO: 3231 - protein, 596 aa, Delphinium x belladonna
MMGSCDCIDTRWPANDLLVKYQYLSDFFIAVAYFSIPLELIYFVQKSAFFPYRWVLMQFGAFIVLCGATHLISLWTFSMHSKTLAMVMAIAKGATALVSCATALMLVHIIPDLLSVKTRELFLRNKAEALDRDLGLIRTEEETGRHVRMLTHEIRSTLDRHTILKTTLVELGRILDLEECALWMPSRNGMNLQLTHTLHHHIPVGSTVATNLPVVNLVFNSTEAIQIPPTCPLARIKPHTGRYLPPEIVAVRVPLLHLSNFEINDWPELSAKSYAVMVLMLPIDSARKWHDHELDLVEVVADQVAVALSHAAILEESMRARDKLMEQNIALDLARQDAERAIRSRNDFLAVMNHEMRTPMNAGMALSSLLLEIELTPDQRVMIESVLKNSNILETLINDVLELSRLEDGSLELNVKTFNLREAFREVLKLLKPIAAVKKLSLTLKVAPDLPVWAVGDETRIMQIILNVVGNAVKFTKEGHISVAACVAKAESIRGGLTPESHPLSSDSHFYLRIQVKDSGCGISSQDIPHLFTKFAQSRGGQIRNNDGAGIGLALSKRFLHLMGGHVSIESDGTGKGSTVTMVLKLGTSDGPNPQI

SEQ ID NO: 3232 - protein, 170 aa, Triticum aestivum
  misc_feature (155)..(155): Xaa can be any naturally occurring amino acid
MPLLRRIPLNADRAKTSLFSPYLHFSELSVRKVFHQVRMKQLTWSNESNRDGEEGCSLFLRSIGLREYSRYLAFNHPCSHEKPLLAHLRFFPWVVNEVYFKVWRQGRTGYPLVDAGMRELCGTGWLHDRIPVVVSSFFVKVLHLPWRWGIKYFWXPLLDADLENQPRWAG

SEQ ID NO: 3233 - protein, 485 aa, Mycobacterium avium subsp. paratuberculosis K-10
MTENFTTTNAGAPAPSDELSLTLGPDGPVLLQDFYLIEQLAAFNRERVPERQPHAKGTGAFGRFEVTNDLSAYTKAAVFQPGTKTDVFVRLSGNAGERGSADTVRDTRGFSVKFYTTEGNFDLVGLDFPVFVIRDPIKFPQMVRSAKRRANNDCRDHNMQWDFWTLSPESAHQVAMIMSDRGIPKTFRHMHGFGLHTFSFLNAAGEISWVKFHFKSNQGIEWLTQEEGDRLAGTDPDYCIRDLYEAIERGDHPSWSVKVQIMPFEEAKTYRFNPFDVTKVWPHADYPLIDLGTMTLDRNVTDHHTEVEQVTFAPHALVPGIGLSPDKLLLGRSFAYADAHRYRVGANHNQIPVNAPRCPVRSYSKDGQMRFVNSTDPVYAPNSYGGPKADPDRASVVKWAVDGGMMVRAPYTLRPDDDDWGQAGALVRDVMDDAERERLVHNIVHHVTDGVKEPVLSRVVEYWYNIDADIGKRVEDGIRAANLGR

SEQ ID NO: 3234 - protein, 484 aa, Mycobacterium avium subsp. paratuberculosis K-10
MAENHTTTNAGAPAPSDELSLTVGPDGPLLLQDSYLVEQMAAFNRERVPERQPHAKGAGAYGRFEVTADVSEYTKAAFLQPGAVTEVFARFSSGNSGERGSADTARDNRGFSVKFYTTEGNFDLVGSDVPVFAIRDPMKFPNLIRAGGRRADNDLHDHNMVWDFWTSCPETAHLVTLVMGDRGIPRTFRHMNGFGLHAFSWVNSAGEIHWVKYHFKTDQGIQWLPQEEGRRLAGTHPDCCVRDLYEAIARGKYPSWSLQVQLMPFADAKTYRFNPFDVTKVWPHADYPPIEIGTMTLDRNVTDHHAEVEQAAFAPSNLVPGTGLSPDRLLLGRSFAYPDAHRARIGVNHDQLPVNAARCAVRSYAKDGRMRFVNTADPVYAPNSAGGPQADPARAGEVHWAADGQMLRAAYTLRRDDDDWGQAGTLVRRVMDDSQRERLVHNIVGHVSAGVNEPVLSRVFAYWRHVDADIGRKVEEGVRANLNS

SEQ ID NO: 3235 - protein, 475 aa, Cucurbita maxima
MGILSRKATCNSHGQDSSYFLGWEEYDKNPYDEILNPKGIIQMGLAENQLCFDLLERWLKENPDAAGFKRDGKSIFRELALFQDYNGLPAFKKALAEFMSEIRGNRVTFNPDHIVLTAGATSANETLMFCLAEPGDAFLLPTPYYPGFDRDLKWRTGIEIVPIHCSSSNGFRITESALLEAYQSAQSRDLKVKGVLVTNPSNPLGTTITTQELNLLLQFIASKNLHLISDEIYSGTVFRNPGFVSVMDILNQNYKHNHQIRKQVHIVYSLSKDLGLPGFRVGAIYSNDDVVVAAATKMSSFGLVSSQTQYLLSAMLSDKKFTKNYIKENQKRLEKRQKMLVRGLQKAGIKCHKGNAGLFCWVDMRHLLGANTFESEMELWRKIVFEGAVERVARTVVPLLRTRLVPCLFCQHVRGNVGPCNAETKGFWVYSTELHSPTTTTTTNHLPTKRKNMVKWVFRLSFNDRVVDHTNDNLG

SEQ ID NO: 3236 - protein, 439 aa, Oryza sativa
MEGVGGGKRRGDDGAEATPRWRFSRPSSQGGPLAAAGLTSIRAVLNRVNSSVDAAAAGGPRPVLRLGNGDPTASACYRTAPAAEDAVVDALRSGAHNGYSLTVGVLSARRAIAEYLSRDLPYELSANDIYLTSGCVQAIEVMISVLAQPGSNILLPKPGFPLYESRTTFSNLEVRHFDLIPERGWEVDLEGVQAIADENTVAIVVINPSNPCGSVYSYDHLAKIAETARKLGLLIIADEVYDHLAFGNNPFIPIGVFGKTVPVITLGSISKRWLVPGWRLGWIATCDPNGILKEAKVNQSIENYINISTDPATFVQGAIPQIIANTKEDYFNKILDQLRNAADLCYDKIKDIKGITCPHKPEGSMFVMVKLDLSYLDGFHDDMDFCCRLAKEESVIVLPGSALGLKNWVRITFAIDIPSLVDAFERIKSFCQRHGKLET

SEQ ID NO: 3237 - protein, 428 aa, Lycopersicon esculentum
ILSKLATNEEHGENSPYFDGWKAYDSDPFHPLKNPNGVIQMGLAENQLCLDLIEDWIKRNPKGSICSEGIKSFKAIANFQDYHGLPEFRKAIAKFMEKTRGGRVRFDPERVVMAGGATGANETIIFCLADPGDAFLVPSPYYPAFNRDLRWRTGVQLIPIHCESSNNFKITSKAVKEAYENAQKSNIKVKGLILTNPSNPLGTTLDKDTLKSVLSFTNQHNIHLVCDEIYAATVFDTPQFVSIAEILDEQEMTYCNKDLVHIVYSLSKDMGLPGFRVGIIYSFNDDVVNCARKMSSFGLVSTQTQYFLAAMLSDEKFVDNFLRESAMRLGKRHKHFTNGLEVVGIKCLKNNAGLFCWMDLRPLLRESTFDSEMSLWRVIINDVKLNVSPGSSFECQEPGWFRVCFANMDDGTVDIALARIRRFVGVEK

SEQ ID NO: 3238 - protein, 291 aa, Brassica napus
PARYTGTLEPRKKRKGIRERGLFVYIYIEEGRDRRVREKEKNGTTHASGRVELKRIENTINRQVTFAKRRGGVLKKAYELSVLCDAEVALIIFSNRGNLFEFCSNSRSMLKTLERYQKCNYGPPEPNVPSREALAVELSSQQEYLKLKQRYDALQRTQRNLLGEDLGPLSTKELESLERQLDSSLKQIRGLRTQFMLDQLNDLQSKERMLSDTNKTLRLRLADGYQMPFQLNPNQEEVHVDYGHHQPQPQAFFQPLEYEPIFQIGYHQGQQQDHGMGAGPSANNYMLGWLP

SEQ ID NO: 3239 - protein, 716 aa, Pseudomonas syringae pv. syringae B728a
MASKNAPPVTETPKSEMAGTDTLDRGNTNEKLESLEQFRSDATQQALRTNHGVKISDNQNTLKVGSRGPSLLEDFIMREKITHFDHERIPERIVHARGTAAHGYFQTYEDHGALSKAGFLRDPGKKTPVFVRFSTVQGPRGSGDTVRDVRGFAVKLYTDEGNFDLVGNNMPVFFIQDAIKFPDFVHAVKPEPHNEIPTGGSAHDTFWDFVSLVPESAHMVLWTMSDRAIPKSLRTMQGFGIHTFRFINTEGKSSFVKFHWKPKFGVCSLVWDEAQKLAGKDTDFHRRDLWESIEMGDYPEWELGVQIVAEEDEHKFDFDLLDPTKIIPEELVPVTPLGKMVLNRNPDNYFAETEQVAFCPGHIVPGIDFSNDPLLQGRLFSYTDTQISRLGGPNFHEIPINRPIAPNHNGQRDAQHRTTIDKGRASYEPNSIDGGWPKETPAGPVDGGFETYPERVEAHKVRERSESFGDHFSQATLFFQSMSHHEKEHIIAAYSFELGKVEREYIRARQVNEILANIDMDLAKRVAANLGLPAPAAGTVPARQTSVKESPALSQVNLLSGDIVSRKVAILVADGVDGKAVEAMKAALTAEGAHAKVLGPTSAPVKTADGKSLPVDASAEGLPSVAFDAVFVPGGKASIEALKGDGVALHFILEAYKHLKAISFAGEAKELLSLLRLEEDAGLLEVSDSTSFKPFFHAIAQHRVWDREAKAKAVPA

SEQ ID NO: 3240 - protein, 131 aa, Triticum aestivum
MFQKCFGDTLFSLSCGKLFEGTPEQMYSSLQKIVALPDVTKVYCGHEYTLSNSRFALSIEPGNEELQEYAASTADLRNRNTPTVPTTIAREKQCNPFLRTSSPEIKKRLSIPDHFDDARVLEVIRRAKDNF

SEQ ID NO: 3241 - protein, 488 aa, Archaeoglobus fulgidus DSM 4304
MDSSSVDIVLNKGGHNKSFEVKIYRIHTTKIMSFPNGSDAEGVLKRLEDYAKNDFEPHSRRMWGHIYYAGLKDVVELARKAYLMYMDKTMLDFTCFPSLLRMEREVVRMASSLLNGDEEVVGNFTYGGTESIMLALKAAREKFRKEEGGNVVPEIVLPATAHPAFWKSAEYLGMRCLRAKLDDELRADVETVKELVGDKTAMIVGSAPNYPFGVVDDIKALSDIAVDGKLWLHVDACLGGFHLPFFRELGEKIPDFDFSVEGVHSISADFHKYGLSPRGASVILYRNAKLREGQIFVMASWPGYPLVNTAVLSTRSAGTLAAAWAVMSYLGFDGYLKLAKKTLYAKKRLIDGLTELGLELLGSPEGAVLAFTSERHNLFKVSTLMAEKGWYVQSQPGSKKLGFPRSLHFSVIPGHAEVVDEFLEDMREVLPECECSYPEMSSFDVSKLKFGEDGLPEDSELISELIHSMPPEIVESVFKQFINELIFR

SEQ ID NO: 3242 - protein, 456 aa, Triticum aestivum
MGEQKGNILMGKYEMGKMLGQGTFAKVYHARNIETSQSVAIKVTDKEKVLKGGLTDQIKREISVMKLVKHPNIVQMYEVMATKTKIYFVLEHVKGGELFNKVQRGRLKEDAARKYFQQLICAVDFCHSRGVYHRDLKPENLLLDENSNLKVSDFGLSTISECRRLDGLLHTSCGTPAYVAPEVINRKGYDGAKADIWSCGVILFVLLAGYLPFQDKNLMNMYKKIGKAEFKCPSWFSSDIRRLLLRILDPNPSTRISIERIMEHPWFRKGLDAKLLRYNLQAKDAVPAADMTATSDSLSCSNSATEGKEQEAKKLSNLNAFDIISLSTGLDLSGMFEDNDKKRESKFTSTNSASTIVSKIEDIAKCMRLKLVKKDGGMMRMESFKPGRKGVMSIDAEIFEVTPDFHLVELKKTNGDTIEYQKVLNQEMRPALKDIVWAWQGEQQPQPQPQPQQQPC

SEQ ID NO: 3243 - protein, 542 aa, Oryza sativa (japonica cultivar-group)
MGNQCQNGTLGSDYHNRFPREHAVGYVQGDSYLDLKKFDDTWPEVNNFKPTAASILRRGLDPTSINVLGRKTADLREHYIIGRKLGQGQFGTTYLCTEINTGCEYACKTIPKRKLITKEDVEDVRREIQIMHHLSGHKNVVAIKDVYEDGQAVHIVMELCAGGELFDRIQEKGHYSERKAAELIRIIVSIVAMCHSLGVMHRDLKPENFLLLDKDDDLSIKAIDFGLSVFFKPGQVFTELVGSPYYVAPEVLHKRYGPESDVWSAGVILYVLLSGVPPFWAETQQGIFDAVLKGHIDFQSDPWPKISDSAKDLIRKMLSHCPSERLKAHEVLRHPWICENGVATDQALDPSVISRLEQFSAMNKLKKLALRVIAERLSEEEIAGLREMFKAVDTKNRGVITFGELREGLRRFGAEFKDTEIGDIMEAAHNDNNVTIHYEEFIAATLPLNKMEREEHLLAAFTYFDKDGSGYITVDKLRRACGEHNMEDSLLEEIISQVDQNNDGQIDYAEFVAMMPGSNVGLRWQTMESSLNVALRDAPQVH

SEQ ID NO: 3244 - protein, 345 aa, Bacillus cereus ATCC 10987
MNYKLFSPYTIKDVTLKNRIVMSPMCMYSSENGDGQVTNFHLIHYGTRAAGQVGLVMIEATAVLPEGRISNKDLGIWDDSLIEGLHKTTTFIHDNGAKAAIQLAHAGRKAELETDALAPSAIPFNETMKMPIEMSKHQIKDTVLAFQQAAVRSKQAGFDVIEIHGAHGYLINEFLSPLTNKRTDEYGGSPENRYRFLREIIDSINEVWNGPLFVRISANDYHPDGLTVQDYVQYTKWMKEQGVDLIDCSSGAVVPARIDVYPGYQVQYAKHIKEHANIATGAVGLITTGAQAEQILNNNEADLIFIGRELLRNPYFPRIAANELGFELEEPYQYERAPGKISTNK

SEQ ID NO: 3245 - protein, 578 aa, Zea mays
MLHYISSSPLRPRFLLLPSPPSNLRFLTMSASPSSSSSRSVRGAAVSVPSLGADEACAVADEAFRRYTSPSLLRRGGVGVAVVWFRNDLRVLDNEALLRAWAASEAVLPVYCVDPRVFAGSTHYFGFPKTGALRTQFLIECLGDLKQSLRKKGLDLLVRHGKPEEILPSIAKAVSAHTIYAHKETCSEELLVERLVSKGLEQVQIAQGGASVPKRPLNPRLQLIWGATMYHIDDLPFPVSSLPDVCTQFRKAGIVGCSVRNCAKLPTSLGPPPSSSIDEIGGWGTVPTLESLGPSVTKSEKGMHFIGGESAALGRVHEYFWKKDQLKDYKVTRNGMLGPDYSTKFSPWLASGSLSPRYICEEVKRYEKQRVANDSTYWVLFELIWRDYFRFLSAKYGNAIFHLGGPRKVVSKWSQDQALFESWRDGRTGYPLIDANMRELSATGYMSNRGRQIVCSFLVRDMGVDWRMGAEWFETCLLDYDPASNYGNWTYGAGVGNDPREDRYFSIPKQAKSYDPEGEYVAYWLPELRSLAKERRNFPGASYIRQVVPLKFDGGNQRKDQQFNRQRRPNNVYIRQVK

SEQ ID NO: 3246 - protein, 459 aa, Bacillus thuringiensis serovar konkukian str. 97-27
MGENYDKQRQSLLGKDFNENGERNEQAILHSQTVGSRGPVLEQDSVLHEALQEFIHEKILERPVHVKGFGAFGYFQTIYPMSEHTKLSFLQHSNEKVPVMVRFSLAVSTKGTPDTARNVRGFSTKFYTKEGIFDLLCNHIPVFSVRDPMRFPETIQALSPSPKNNLLDPNRFWSFVARAPESIHFVVHLYSDNGTAKSFRRIPGHSVNTYVWRNAEGNRKYVKYHWYPFEGVQSITNEEANKLAAENPDYSGKDLYDAIANGKPVEYGLYVQLMDPKDEAHLSYDPLDDTKAWDEKAYPLIPVGKMVLNKNPENYMEQVEKVAFSPSNLLDGAELSDDKMLQGRANIYSDSQRRRIGPEFRKLAINQQQDWTPANQITSGDGRYVEGKLERTSIPKQDDFTQAGEFYAKLQPIEKEHLAENLASDLKVISDDIRKVVLGYFHNVSADLVKRIESAMQQL

SEQ ID NO: 3247 - protein, 160 aa, Zea mays
  misc_feature (109)..(109): Xaa can be any naturally occurring amino acid
  misc_feature (122)..(122): Xaa can be any naturally occurring amino acid
ADEEGLVQADAARGRRLTRAASPAGAGGVAAAGVEARGGGLRLGWVALPERSDGSGDSRGEARARSLSDDDLEELKECVDLGFGFSYREILELCGTLPALDLCYFMSQXYLDEHHHRSTGHXEEAPPLAPDSWAQPCDTSNWKSYTPGDSPDEEKAKFKY

SEQ ID NO: 3248 - protein, 861 aa, Solanum tuberosum
MEINFKVLSKPIRGSFPSFSPKVSSGASRNKICFPSQHSTGLKFGSQERSWDISSTPKSRVRKDERMKHSSAISAVLTDDNSTMAPLEEDVKTENIGLLNLDPTLEPYLDHFRHRMKRYVDQKMLIEKYEGPLEEFAQGYLKFGFNREDGCIVYREWAPAAQEDEVIGDFNGWNGSNHMMEKDQFGVWSIRIPDVDSKPVIPHNSRVKFRFKHGNGVWVDRIPAWIKYATADATKFAAPYDGVYWDPPPSERYHFKYPRPPKPRAPRIYEAHVGMSSSEPRVNSYREFADDVLPRIKANNYNTVQLMAIMEHSYYGSFGYHVTNFFAVSSRYGNPEDLKYLIDKAHSLGLQVLVDVVHSHASNNVTDGLNGFDIGQGSQESYFHAGERGYHKLWDSRLFNYANWEVLRFLLSNLRWWLEEYNFDGFRFDGITSMLYVHHGINMGFTGNYNEYFSEATDVDAVVYLMLANNLIHKIFPDATVIAEDVSGMPGLGRPVSEGGIGFDYRLAMAIPDKWIDYLKNKNDEDWSMKEVTSSLTNRRYTEKCIAYAESHDQSIVGDKTIAFLLMDKEMYSGMSCLTDASPVVDRGIALHKMIHFFTMALGGEGYLNFMGNEFGHPEWIDFPREGNNWSYDKCRRQWNLADSEHLRYKFMNAFDRAMNSLDEKFSFLASGKQIVSSMDDDNKVVVFERGDLVFVFNFHPKNTYEGYKVGCDLPGKYRVALDSDAWEFGGHGRTGHDVDHFTSPEGIPGVPETNFNGRQIPSKCCLLREHVWLITELMNACQKLKITRQTFVVSYYQQPISRRVTRNLKIRYLQISVTLTNACQKLKFTRQTFLVSYYQQPILRRVTRKLKDSLSTNIST

SEQ ID NO: 3249 - protein, 367 aa, Archaeoglobus fulgidus DSM 4304
MDIIEELRAYREKDIPYSRVLSSMCTVPHPVAVEAHRMFIETNLGDPGIFRGTVELEAKLMRLIGDILHCETPAGYICSGGTEANIQGIRAARNVQKKENPNIVIPKTAHFSFEKIGDILGVKIKRAGVDEEYKVDVGQVEDLMDENTVAIVGIAGTTELGQIDPIVELSKLAEERQVELHVDAAFGGLVIPFMDNPYPFDFQNRGVSSITIDPHKMGMATIPAGGIIFRNESYLRALEVETPYLTSKTQFTLTGTRPGTGVASAYAVLKSLGFEGMREVVKNCLKNTRILVEEMRDLGFEPVIEPVMNVVSFRTDEAERIKEELYRMRWVISTIREPKAIRFVVMPHVTEEVIKNFISDFRKVLRR

SEQ ID NO: 3250 - protein, 230 aa, Spinacia oleracea
GRGKIEIKRIENTTNRQVTFCKRRNGLLKKAYELSVLCDAEIALIVFSSRGRLYEYANQSVKGTIDRYKKACSDQTGAGSVAEANAQYYQQEAAKLRNQIRTATENNRLLSRHMMGEGLSSLSMKELKNLETKLEKGISRIRSKKNELLFAEIEFMQKREIELHNNNQFLRARISENERAQQSMSLMPPGGSDYDLVPSQSFDSRNYFQVNALQPNSQYARQDQTPLQLV

SEQ ID NO: 3251 - protein, 446 aa, Arabidopsis thaliana
MTKKMRRVGKYEVGRTIGEGTFAKVKFARNTDTGDNVAIKIMAKSTILKNRMVDQIKREISIMKIVRHPNIVRLYEVLASPSKIYIVLEFVTGGELFDRIVHKGRLEESESRKYFQQLVDAVAHCHCKGVYHRDLKPENLLLDTNGNLKVSDFGLSALPQEGVELLRTTCGTPNYVAPEVLSGQGYDGSAADIWSCGVILFVILAGYLPFSETDLPGLYRKINAAEFSCPPWFSAEVKFLIHRILDPNPKTRIQIQGIKKDPWFRLNYVPIRAREEEEVNLDDIRAVFDGIEGSYVAENVERNDEGPLMMNAFEMITLSQGLNLSALFDRRQDFVKRQTRFVSRREPSEIIANIEAVANSMGFKSHTRNFKTRLEGLSSIKAGQLAVVIEIYEVAPSLFMVDVRKAAGETLEYHKFYKKLCSKLENIIWRATEGIPKSEILRTITF

SEQ ID NO: 3252 - protein, 92 aa, Bixa orellana
EQDRYMPIANVIRIMRKVLPTHAKISDEAKETIQECVSEFISFITSEANERCQREQRKTITAEDVLFAMSRLGFDDYVDPLSIYLQRYREFE

SEQ ID NO: 3253 - protein, 217 aa, Bartonella quintana str. Toulouse
MTNLRTHIIPVTPFQQNCTLLFDNEQKVGVLVDPGGDWFRIQEVIRKTGIIVEAIWITHGHFDHVGAAMQAKEALNVKIIGSHRDDKPVMASVSESAKNYGITDACTCIPDQWLEDGDSVHFVGHVFHVLHTPGHSPGHVIYFNEKERFALLGDVLFRGSIGRTDFPFCSHKELMKSLREKILPLGDDVRFICGHGPESQLGYERQWNPFLQGLMDE

SEQ ID NO: 3254 - protein, 454 aa, Oryza sativa
MVKGGREALLGGYEMGRTLGEGNFGKVKYARHLATGGHFAVKILDRGRVVSLRAGDQIRREIATLKLLRHPHVVRLHEVAASKTKIYMVLEFVNGGELFERIAVKGKLSEKEGRRLFQQLIDGVSYCHDRGVYHRDLKPENVLVDQKGNIKISDFGLSALPQHLGNDGLLHTTCGSPNYIAPEVLQNKGYDGSLSDIWSCGVILYVMLIGYLPFDDRNIVVLYQKIFKGDTQIPKWLSHSAQNLLRRILEPNPMKRIDMAGIKSHEWFQKDYIPVLPYDDDDEDVQFGARLPAKEQINDEPGDKNSHQINAFQLIGMASSLDLSGLFEDEEVSQRRIRFTSTHPPKDAFDKIESSATELGFQVQRGHSKLKLMRNCKGSKNPESFMVSAEVFELGPSVNVVELRKSNGDPALYRQLCERISSDMGARNTEQIFATASLEDDLQNSNAGTPLFAL

SEQ ID NO: 3255 - protein, 489 aa, Arabidopsis thaliana
MAEKITRETSLPKERSSPQALILGRYEMGKLLGHGTFAKVYLARNVKTNESVAIKVIDKEKVLKGGLIAHIKREISILRRVRHPNIVQLFEVMATKAKIYFVMEYVRGGELFNKVAKGRLKEEVARKYFQQLISAVTFCHARGVYHRDLKPENLLLDENGNLKVSDFGLSAVSDQIRQDGLFHTFCGTPAYVAPEVLARKGYDAAKVDIWSCGVILFVLMAGYLPFHDRNVMAMYKKIYRGEFRCPRWFSTELTRLLSKLLETNPEKRFTFPEIMENSWFKKGFKHIKFYVEDDKLCNVVDDDELESDSVESDRDSAASESEIEYLEPRRRVGGLPRPASLNAFDIISFSQGFDLSGLFDDDGEGSRFVSGAPVSKIISKLEEIAKVVSFTVRKKDCRVSLEGSRQGVKGPLTIAAEIFELTPSLVVVEVKKKGGDKTEYEDFCNNELKPKLQNLTADDVVAEPVAVSAVDETAIPNSPTISFLPSDTE

SEQ ID NO: 3256 - protein, 479 aa, Bacillus cereus E33L
MSKVIFPKGFLWGGAIAANQVEGAYVEDGKGLTTVDLLPTGENRWDIMKGNIHSFTPVEGEFYPSHEAIDFYHRYKEDIALFAEMGFKALRVSIAWTRIFPNGDDEKPNEAGLQFYEDLFDELLKHDIEPVVTMAHFDVPVHLVEKYGSWRSRKLVNFFETYAKTIFNRYKDKVKYWMTFNEINMLLHLPFMGAGLAFKEGDNKKQIQYQAAHHQLVASALAVKACHEIIPDAKIGCMLAAGATYPYTCNPDDVLRAMEQDRESFFFIDVQARGAYPGYAKRFFKDNNVTIEMEKEDEEILKEHTVDYIGFSYYASRATSTDPEVLKSITSGNVFGSVENPYLEKSEWGWTIDPKGFRITANQLYDRYQKPLFVVENGLGAIDELNDADAVNDAYRIDYLEKHIIEMSEAIQDGVDIIGYTSWGPIDLVSASTGEMKKRYGYIYVDKDNEGKGSLKRSKKKSFDWYKEVIKTNGESLES

SEQ ID NO: 3257 - protein, 278 aa, Zea mays
MARHFVLNTGAKIPSVGLGTWQSDPGVVGNAVYAAVKAGYRHIDCARVYGNEKEIGLALKKLFEEGVVKREDMFITSKLWNDHHAPEDVPEALNDSLNDLQLEYLDLYLIHWPFRVKKGTNTSPENFVTPDFPATWGAMEKLYDAGKARAIGQTKLHSFCQSTGVHLTAYSPLGSPGTTWMNGNVLKEPIIISIAEKLGKTSAQVALRWNIQMGHSVLPKSTNEERIKQNLDVYDWSIPDDLLAKFSEIKQARLLRGNFIVNPESVYKTHEELWDGEL

SEQ ID NO: 3258 - protein, 286 aa, Lactobacillus acidophilus NCFM
MVETFKLNDGNNIPAIGFGTFQIPDDGSTYKDVLNALKLGYRHIDTAVAYFNEDEVGKAIRDSGIPRDQIWVTSKLWLQDYAYEDAKKAINLSLKNLGLDYIDLYLIHQPYGKVDEAWKAMVEAKKAGKIRSIGISNVTPKIWHKWEDIFKENKPAVNQVEFNPYFQQKELRKIMAENQITLEAWAPLGQGNHNLFKEPVLNRLAKKYDKNVGQIMLRFEHQEGIIVFPKSVHEARIKSNKDIFDFELTSDEMDAIRALDKGKGMHDPDAPGVEEMLSKYDVHAND

SEQ ID NO: 3259 - protein, 274 aa, Haloarcula marismortui ATCC 43049
MDDIQIQGTSVPALGLGTWQLTGQSCRETVETALGMGYRHIDTAQAYGNERQVGLGMDAAAVDREDVFLTTKLDGSNRDERSVRRSTRESLNKLGTDYLDLLLIHWPNTPWMASLSETLGAMNDVVEEGLVRHIGVSNFSPSLLDRARDISSAPIFTDQVQYHPYWDQRKLLDYCRIHDVLLTAYSPLARGGVLDDPALVQIGNKYGKSPAQVALRWLVQQDGVAAIPKASSREHLEANLAVFDFELTDAEMERIRDPSKVKTGVQFVRSQLPF

SEQ ID NO: 3260 - protein, 289 aa, Lactobacillus acidophilus NCFM
MTDIPKIKLNDGNEIPQLGFGVFQISNHDEAVKAVESAISNGYRLIDTAEAYNNQTAVGEAIKNSDVNRDDIFLTTKLWVSNFTYEKASKAIDEDLKELGTDYIDMMLLHQAYGDVAGAWRALEDAQKAGKTKSIGVSNFWPDQLMNLQLMSNVKPVVNQIEVNPWFQREPEVKWNQKDDVAVEAWAPFAEGKDGIFTNPVLTEIGKKYGKSNGQVILRWLIQRGIIVIPKSVHDARQKENIDIFDFELNNDDMQKIAALDKNVSQFFDHHDPTTIEQIFGSSLNQLRR

SEQ ID NO: 3261 - protein, 277 aa, Bacillus cereus E33L
MSLTSLKDYTTLHNGVKMPWFGLGVFKVEDGSQVIDSVKAAIKNGYRSIDTAAIYQNEEGVGQAIRESGVSREELFITSKVWNSDQGYETTLQAFETTLEKLGLEYLDLYLVHWPVKGKYTESWKALEKLYKDGRVRAIGVSNFHIHHLQDIFEIAEIKPMVNQVEYHPRLAQEELHAFCKEHNIQLEAWSPLMQGQLLDNPTLQDIAKKYNKSTAQIILRWDLQNEVVTIPKSIKEHRIIENANIFDFELSADDTKAIQALNEDRRVGPDPDNFNF

SEQ ID NO: 3262 - protein, 521 aa, Buchnera aphidicola (Uroleucon astronomus)
MAAKDVKFGNEARIKMLRGVNVLADAVKVTLGPKGRNVVLDKSFGAPSITKDGVSVAREIELEDKFENMGAQMVKEVASKANDAAGDGTTTATLLAQSIVNEGLKAVAAGMNPMDLKRGIDKAVISAVEELKNLSVPCSDSKAITQVGTISANADEKVGALIAEAMEKVGNDGVITVEEGTGLQNELEVVKGMQFDRGYLSPYFINKPETGIVELENPYILMADKKISNVREMLPILESVAKSGKPLLIISEDLEGEALATLVVNSMRGIVKVAAVKAPGFGDRRKAMLQDISILTGGSVISEELAMELEKSTLEDLGQAKRVVISKDTTTIIGGIGEKHTIQSRISQIRQEIQEATSDYDKEKLNERLAKLSGGVAVLKVGAATEVEMKEKKARVEDALHATRAAVEEGVVAGGGVALVRVAGKISHLRGQNEDQNVGIRVALRAMEAPLRQIVSNSGEEPSVVTNNVKDGKGNYGYNAASDQYGDMIDFGILDPTKVTRSALQYAASVAGLMITTECMV

SEQ ID NO: 3263 - protein, 285 aa, Lactobacillus acidophilus NCFM
MNFNSLQDTYTLNNGVKIPIIGFGTWQTPDGEVAEESVLAALNCGYRHIDTASAYGNEDSVGRAIQKSGINRHELFITTKLWNSDHGYEKTKKAIDQSLLDLKLDYLDMYLIHWPNPSSMRDHWAEINAESWRAMEEAVRAGKIRAIGVSNFRKHHLDALMETAEIKPVVNQIFLNPSDLQSEVVTENKKLDLLSEAYSPLGTGGLLGNEVVKEVAANYGKSTAQVLIRWSLQHGFLPLPKSVHPEYIKANADVFDFEISPEDMAKLDNLHGVAGVANDPDKVDF

SEQ ID NO: 3264 - protein, 523 aa, Buchnera aphidicola (Uroleucon caligatum)
  misc_feature (439)..(440): Xaa can be any naturally occurring amino acid
  misc_feature (519)..(521): Xaa can be any naturally occurring amino acid
MAAKDVKFGNEARIKMLRGVNVLADAVKVTLGPKGRNVVLDKSFGAPSITKDGVSVAREIELEDKFENMGAQMVKEVASKANDAAGDGTTTATLLAQSIVNEGLKAVAAGMNPMDLKRGIDQAVISAVEELKNLSVPCSDSKAITQVGTISANADEKVGALIAEAMEKVGNDGVITVEEGTGLQNELEVVKGMQFDRGYLSPYFINKPETGIVELENPYILMADKKISNVREMLPILESVAKSGKPLLIISEDLEGEALATLVVNSMRGIVKVAAVKAPGFGDRRKAMLQDISILTGGTVISEELAMELEKSTLEDLGQAKRVVITKDTTTIIGGIGEKHNIQSRISQIRQEVQEATSDYDKEKLNERLAKLSGGVAVLKVGAATEVEMKEKKARVEDALHATRAAVEEGVVAGGGVALVRVAGKISHLRGHNEDQNVXXRVALRAMEAPLRQIVSNSGEEPSVVTNNVKDGQGNYGYNAASDEYGDMINFGILDPTKVTRSALQYAASVAGLMITTEXXXTD

SEQ ID NO: 3265 - protein, 546 aa, Helicobacter pylori 26695
MAKEIKFSDSARNLLFEGVRQLHDAVKVTMGPRGRNVLIQKSYGAPSITKDGVSVAKEIELSCPVANMGAQLVKEVASKTADAAGDGTTTATVLAYSIFKEGLRNITAGANPIEVKRGMDKAAEAIINELKKASKKVGGKEEITQVATISANSDHNIGKLIADAMEKVGKDGVITVEEAKGIEDELDVVEGMQFDRGYLSPYFVTNAEKMTAQLDNAYILLTDKKISSMKDILPLLEKTMKEGKPLLIIAEDIEGEALTTLVVNKLRGVLNIAAVKAPGFGDRRKEMLKDIAILTGGQVISEELGLSLENAEVEFLGKAGRIVIDKDNTTIVDGKGHSHDVKDRVAQIKTQIASTTSDYDKEKLQERLAKLSGGVAVIKVGAASEVEMKEKKDRVDDALSATKAAVEEGIVIGGGAALIRAAQKVHLNLHDDEKVGYEIIMRAIKAPLAQIAINAGYDGGVVVNEVEKHEGHFGFNASNGKYVDMFKEGIIDPLKVERIALQNAVSVSSLLLTTEATVHEIKEEKAAPAMPDMGGMGGMGGMGGMM

SEQ ID NO: 3266 - protein, 523 aa, Buchnera aphidicola (Uroleucon helianthicola)
  misc_feature (17)..(18): Xaa can be any naturally occurring amino acid
MAAKDVKFGNEARIKMXXGVNVLADAVKVTLGPKGRNVVLDKSFGAPSITKDGVSVAREIELEDKFENMGAQMVKEVASKANDAAGDGTTTATLLAQSIVNEGLKAVAAGMNPMDLKRGIDKAVISAVEELKNLSVPCSDSKAITQVGTISANADEKVGSLIAEAMEKVGNDGVITVEEGTGLQDELEVVKGMQFDRGYLSPYFINKTETGIVELENPYILMADKKISNVREMLPILESVAKSGKPLLIISEDLEGEALATLVVNSMRGIVKVAAVKAPGFGDRRKAMLQDISILTGGTVISEELAMELEKSTLEDLGQAKRVVISKDTTTIIGGVGEKRTIQSRINQIRQEVQEATSDYDKEKLNERLAKLSGGVAVLKVGAATEVEMKEKKARVEDALHATRAAVEEGVVAGGGVALVRVAGKIAHLRGQNEDQNVGIRVALRAMEAPLRQIVSNSGEEPSVVTNNVKDGKGNYGYNAASDQYGDMINFGILDPTKVTRSALQYAASVAGLMITTECMVTD

SEQ ID NO: 3267 - protein, 445 aa, Zea mays
  misc_feature (34)..(34): Xaa can be any naturally occurring amino acid
MRMGKYEMGRTLGEGHFGKVRLARHADTGRPFAXKILDRQRILAMKIHDQIKREIATLETVQLPNVARLVQVSASKTKIYMVLEYVNGGELFDKIALKGKLTEKEGRKLFQQLIDAVGYCHEKGVYHRDLKPENVLVDAKGNIKVSDFGLSALPQNQQKDGLLHTTCGSPNYIAPEVLLNKGYDGSISDVWSCGVILYVMLTGNLPFDDQNVVVLYQKILKGNAHIPKWLSQGAQDILRKILDPNPVTRIDVDGIRAHDWFKQGYAPAMPFSDDEEDISMDEDSLNITEHNDIQDKIAINQINAFQLIGMSSCLDLSGFFEKEDVSERKIRFASNYSPAYLFEKIESIVRKMGFQVHKSNGKLKVIQDCKGLANSRGQESLLISAEVFEINESLYVVELKKSSGDCSLYRKLCETLSEDLGTCKSQQFLKQDSIRQDIGRYNSSF

SEQ ID NO: 3268 - protein, 435 aa, Arabidopsis thaliana
MPEIEIAAGSGDNNDALFGKYELGKLLGCGAFAKVFHARDRRTGQSVAVKILNKKKLLTNPALANNIKREISIMRRLSHPNIVKLHEVMATKSKIFFAMEFVKGGELFNKISKHGRLSEDLSRRYFQQLISAVGYCHARGVYHRDLKPENLLIDENGNLKVSDFGLSALTDQIRPDGLLHTLCGTPAYVAPEILSKKGYEGAKVDVWSCGIVLFVLVAGHLPFNDPNVMNMYKKIHKGEYRFPRWMSPDLKRFVSRLLDINPETRITIDEILKDPWFVRGGLKQIKFHDDEIEDQKVESSLEAVKSSNAFDLISYSSGLDLSGLFAGCSNSSGESERSLSEKSPEMLAEEVEGFAREENLRMKKKKEEEYGFEMEGQNGKFGIGICISRLNDLLVVVEARRRGGDGDCYKEMWNGKLRVQLIRVCDQTSSTNAAI

SEQ ID NO: 3269 - protein, 523 aa, Buchnera aphidicola (Uroleucon jaceae)
MAAKDVKFGNEARIKMLRGVNVLADAVKVTLGPKGRNVVLDKSFGAPSITKDGVSVAREIELEDKFENMGAQMVKEVASKANDAAGDGTTTATLLAQSIVNEGLKAVAAGMNPMDLKRGIDKAVISAVEELKNLSVPCSDSKAITQVGTISANADEKVGALIAEAMEKVGNDGVITVEEGTGLQNELEVVKGMQFDRGYLSPYFINKPETGIVELENPYILMADKKISNVREMLPILESVAKSGKPLLIISEDLEGEALATLVVNSMRGIVKVAAVKAPGFGDRRKAMLQDISILTGGSVISEELAMELEKSTLEDLGQAKRVVISKDTTTIIGGVGEKHTIQSRISQIRQEIQEATSDYDKEKLNERLAKLSGGVAVLKVGAATEVEMKEKKARVEDALHATRAAVEEGVVAGGGVALVRVAGKISHLRGQNEDQNVGIRVALRAMEAPLRQIVSNSGEEPSVVTNNVKDGKGNYGYNAASDQYGDMIDFGILDPTKVTRSALQYAASVAGLMITTECMVTD

SEQ ID NO: 3270 - protein, 823 aa, Zea mays
MLCLVSPSSSPTPLPPPRRSRSHADRAAPPGIAGGGNVRLSVLSVQCKARRSGVRKVKSKFATAATVQEDKTMATAKGDVDHLPIYDLDPKLEIFKDHFRYRMKRFLEQKGSIEENEGSLESFSKGYLKFGINTNEDGTVYREWAPAAQEAELIGDFNDWNGANHKMEKDKFGVWSIKIDHVKGKPAIPHNSKVKFRFLHGGVWVDRIPALIRYATVDASKFGAPYDGVHWDPPASERYTFKHPRPSKPAAPRIYEAHVGMSGEKPAVSTYREFADNVLPRIRANNYNTVQLMAVMEHSYYASFGYHVTNFFAVSSRSGTPEDLKYLVDKAHSLGLRVLMDVVHSHASNNVTDGLNGYDVGQSTQESYFHAGDRGYHKLWDSRLFNYANWEVLRFLLSNLRYWLDEFMFDGFRFDGVTSMLYHHHGINVGFTGNYQEYFSLDTAVDAVVYMMLANHLMHKLLPEATVVAEDVSGMPVLCRPVDEGGVGFDYRLAMAIPDRWIDYLKNKDDSEWSMGEIAHTLTNRRYTEKCIAYAESHDQSIVGDKTIAFLLMDKEMYTGMSDLQPASPTIDRGIALQKMIHFITMALGGDGYLNFMGNEFGHPEWIDFPREGNNWSYDKCRRQWSLVDTDHLRYKYMNAFDQAMNALDERFSFLSSSKQIVSDMNDEEKVIVFEREDLVFVFNFHPKKTYEGYKVGCDLPGKYRVALDSDALVFGGHGRVGHDVDHFTSPEGVPGVPETNFNNRPNSFKVLSPPRTCVAYYRVDEAGAGRRLHAKAETGKTSPAESIDVKASRASSKEDKEATAGGKKGWKFARQPSDQDTK

SEQ ID NO: 3271 - protein, 403 aa, Pseudomonas syringae pv. phaseolicola 1448A
MQFNKSNKLANVCYDIRGPVLKHAKRLEEEGHRILKLNIGNPAPFGFEAPDEILQDVIRNLPTAQGYSDSKGLFSARKAVMQYYQQKQVEGVGIEDIYLGNGVSELIVMSMQALLNNGDEVLVPAPDYPLWTAAVALSGGSPVHYLCDEQANWWPDLEDIKAKITPNTKAMVIINPNNPTGAVYSREVLLGMLELARQHNLVVFSDEIYDKILYDDAMHICTASLAPDLLCLTFNGLSKSYRVAGFRSGWIAISGPKHNAQSYIEGIDILANMRLCANVPSQHAIQTALGGYQSINDLILPPGRLLEQRNRTWELLNDIPGVSCVKPMGALYAFPRIDPKVCPIFNDEKFVLDLLLSEKLLVVQGTAFNWPYPDHFRVVTLPRVDELEQAIGRIGNFLKGYRQ

SEQ ID NO: 3272 - protein, 478 aa, Staphylococcus aureus subsp. aureus MRSA252
MTKLPQNFMWGGALAANQFEGGYDKGGKGLSVIDVMTSGAHGKARQITESIDPNHYYPNHEGIDFYHRYKEDIALFKEMGLKCLRTSIAWTRIFPNGDEDVPNEEGLAFYDRIFDELIAQGIEPVVTLSHFEIPLHLAKHYGGFRNREVVNYFVHFARVVFERYKDKVTYWMTFNEINNQMDTSNPIFLWTNSGVALTENDNPEEVLYQVAHHELLASALAVRLGKEINPKFKIGTMISHVPIYPYSCHPKDMMEAQIANRLRFFFPDVQVRGYYPSYAKKMLARKGYDFGWQEGDDSILQQGTVDYIGFSYYMSTAVKHDVDTTVENNIVNGGLNHSVENPHIATSDWGWAIDPDGLRYTLNVLYDRYQLPLFIVENGFGAVDEVVDGHIHDDYRIEYLKAHITAAIEAVDQDGVDLIGYTPWGIIDIVSFTTGEMKKRYGLIYVDRDNDGRGTMERLKKDSFYWYQQVIASNGDKL

SEQ ID NO: 3273 - protein, 903 aa, Arabidopsis thaliana
MVSLSNQTRFSFHPNNLVVSEKRRLGISGVNFPRKIKLKITCFAAERPRQEKQKKKSQSQSTSDAEAGVDPVGFLTRLGIADRIFAQFLRERHKALKDLKDEIFKRHFDFRDFASGFELLGMHRHMEHRVDFMDWGPGSRYGAIIGDFNGWSPTENAAREGLFGHDDYGYWFIILEDKLREGEEPDELYFQQYNYVDDYDKGDSGVSAEEIFQKANDEYWEPGEDRFIKNRFEVPAKLYEQMFGPNSPQTLEELGDIPDAETRYKQWKEEHKDDPPSNLPPCDIIDKGQGKPYDIFNVVTSPEWTKKFYEKEPPIPYWLETRKGRKAWLQKYIPAVPHGSKYRLYFNTPDGPLERVPAWATYVQPEDEGKQAYAIHWEPSPEAAYKWKYSKPKVPESLRIYECHVGISGSEPKVSTFEEFTKKVLPHVKRAGYNAIQLIGVPEHKDYFTVGYRVTNFFAASSRYGTPDDFKRLVDEAHGLGLLVFLDIVHSYAAADQMVGLSLFDGSNDCYFHYGKRGHHKHWGTRMFKYGDLDVLHFLISNLNWWITEYQVDGYQFHSLASMIYTHNGFASFNNDLDDYCNQYVDRDALMYLILANEILHVQHPNIITIAEDATYYPGLCEPVSQGGLGFDYYVNLSASEMWVSLLDNVPDNEWSMSKPVLQIVSTLVANKEYADKMLSYAENHNQSISGGRSFAEILFGGVDNGSPGGKELLDRGISLHKMIRLITFTSGGRAYLNFMGNEFGHPERVEFPTQSNNFSFSLANRRWDLLESGVHHHLFSFDKELMDLDKSKGILSRGLPSIHHVNDANMVISFSRGPFLFIFNFHPSNSYEKYDVGVEEAGEYTMILNSDEVKYGGQGIVTEDHYLQRSISKRIDGQRNCLEVFLPSRTAQVYKLTRILRI

SEQ ID NO: 3274 - protein, 174 aa, Dendrobium grex Madame Thong-In
MGRGRVEMKRIENKINRQVTFAKRRTGLLKKAYELSVLCDVEVALIIFSNRGKLYEFCSSRSMLKTLEKYQKCSDGAPEMTMTSRETQSSQVEYLKLKSQVEALQRSQRNLLGEDLNPLGGKDLDQLERQLEASLKQIISTRMQYMLDQLGDLQQRELLLFETNKSLGTRVSAL

SEQ ID NO: 3275 - protein, 247 aa, Dendrobium grex Madame Thong-In
MGRGRVQLKRIENKINRQVTFSKRRSGLLKKAHEISVLCDAEVALIVFSNKGKLYEYSTDSSMEKILERYERYSYAERALFSNEANPQADWRLEYNKLKARVESLQKSQRHLMGEQLDSLSIKELQRLEQQLESSLKFIRSRKTQLILHSISELQKMEKILLEQNKTLEKEIIAKEKAKALVQHAPWEKQNQSQYSSALPPVISDSVPTPTSRTFQARANEEESPQPQLRVSNTLLPPWMLSHMNGQ

SEQ ID NO: 3276 - protein, 741 aa, Streptomyces coelicolor A3(2)
MALRDTSIPEPSGPVPPAPGACATAPPLDPTDRGRLLAGAHHDPHSLLGAHPVPGGIAFRVLRPFAREVGVVVDGERHTLASEEDGLFSGVLPLAGIPSYTLVVAYEQGETQETHDPYRFLPALGELDLHLIGEGRHEQLWQALGAEPMTHEGVTGTRFTVWAPNAQGVRVATDFTHWDGTAFPMRSLGSSGVWELFLPGVGEGTRYKFEIHSRYGHRFLKADPMARAAEEPPNTASVVTASRYEWGDAQWMRTRADTPVHEAPFSVYEVHLPSWRPGLTYRELAEELPAYVKDLGFTHVELMPVAEHPYGPSWGYQVTGFYAPTARLGSPDDFRFLVDALHRAGIGVIMDWVPAHFPKDDWALGRFDGDPLYEPGDSRRAEHPDWGTYTFDFARTEVRNFLVANAVYWCEEFHIDGLRVDAVASMLYLDYSRDSGQWEPNQYGGREDLAAMAFLQEMNATVYRRCPGVVTIAEESTAWGGVTRPTDTGGLGFGLKWNMGWMHDSLEYVAHEPVHRRYHHHEMTFSMVYAYSENYVLPISHDEVVHGKQALVSKMPGDWWHRRANVRAYLGFMWAHPGKQLLFMGQEFAQGAEWSEKQGPEWWLLDEGYHSAGDHRGVQDLVRELNTRYTRTPALWQRDTDPAGFRWVSVDAAEDNVFAFLRYGTDGTPLLAVSNFSPVVRHEYGLAVGDEAVAWQEVLNTDAEEYGGGGVGNPDPVKPEDGSIRITLPPLATVWLMPYAL

SEQ ID NO: 3277 - protein, 682 aa, Glycine max
MSGGGCSSIVWFRRDLRIEDNPALTAGVRAGAVVAVFIWAPEEEGQYYPGRVSRWWLKNSLAHLDSSLRNLGTPLITKRSTDTLSSLFEVVKSTGATQLFFNHLYDPLSLVRDHRAKEVLTAQGITVRSFNADLLYEPWDVNDAHGRPFTTFAAFWERCLSMPYDPESPLLPPKRIIPGDASRCPSDTLLFEDELEKASNALLARAWSPGWSNADKALTAFVNGALIEYSKNRRKADSATTSFLSPHLHFGEVSVKKVFHLVRIKQVFWANEGNKAGEESVNLFLKSIGLREYSRYISFNHPYSHERPLLGHLKFFPWVVNEGYFKAWRQGRTGYPLVDAGMRELWATGWLHDRIRVVVSSFFVKVLQLPWRWGMKYFWDTLLDADLESDALGWQYISGSLPDGREIDRIDNPQFEGYKFDPNGEYVRRWLPELARLPTEWIHHPWNAPESVLQAAGIELGSNYPLPIVGIDAAKVRLLEALSQMWQQEAASRAAMENGTEEGLGDSSESAPIAFPQDIQMEERPEPVRNNPPHGTRRYQDQMVPSITSSHVRVEEEETSSDLRNSAADSRAEVPINVTTQQNARETVNQGVLLNTNRNTRVQNNPTTWLRNAAEDSTAESSSSTRRERDGGVVPVWSPPASNFSEQFVDDENGIGTGSSYLQRQHPQSHQLMNWTRLPQTG

SEQ ID NO: 3278 - protein, 414 aa, Arabidopsis thaliana
MENGATTTSTITIKGILSLLMESITTEEDEGGKRVISLGMGDPTLYSCFRTTQVSLQAVSDSLLSNKFHGYSHTVGLPQARRAIAEYLSRDLPYKLSQDDVFITSGCTQAIDVALSMLARPRANILLPRPGFPIYELCAKFRHLEVRYVDLLPENGWEIDLDAVEALADENTVALVVINPGNPCGNVYSYQHLMKIAESAKKLGFLVIADEVYGHLAFGSKPFVPMGVFGSIVPVLTLGSLSKRWIVPGWRLGWFVTTDPSGSFKDPKIIERFKKYFDILGGPATFIQAAVPTILEQTDESFFKKTLNSLKNSSDICCDWIKEIPCIDSSHRPEGSMAMMVKLNLSLLEDVSDDIDFCFKLAREESVILLPGTAVGLKNWLRITFAADATSIEEAFKRIKCFYLRHAKTQYPTI

SEQ ID NO: 3279 - protein, 602 aa, Kluyveromyces lactis NRRL Y-1140
MSHDPNQQQPHGGSGQGHHQRQLTNHAQGQHIGKYQIIKTLGEGSFGKVKLAYHISTGQKVALKIINKKVLAKSDMQGRIEREISYLRLLRHPHIIKLYDVIKSKDEIIMVIEYAGNELFDYIVQRDKMPEQEARRFFQQIISAVDYCHRHKIVHRDLKPENLLLDEHLNVKIADFGLSNIMTDGNFLKTSCGSPNYAAPEVISGKLYAGPEVDVWSSGVILYVMLCRRLPFDDESIPVLFKNISNGVYTIPNFLSQGAASLIKKMLIVNPVNRITVHEIMQDEWFKVDLPDYLVPAESTHQENSESKTEDGGPSVPLELIDDSLVQTLSNTMGYDVDEIYEALESDEDHPSLNEIRDAYQLIKENRNLINDIKVNKQQSNDLDTFLSQSPPTFEQSLHAPPGSKNRHSHRHSKRTQQRTYQYHYGNGSQDGDSTIAILPSSLPQIHRANMVAQGSQAAAKISPLSVKKSKTRWHFGIRSRSYPLDVMGEIYIALKNLGAEWAKPSEEDLWTIRVRWRYNIDMPDDEMKNKQIPDLMKMVIQLFQIETNNYLVDFKFDGWESSNGVVYSSRNDDEMSTFSAYPFLHLATRLIMELAVNSQGS

SEQ ID NO: 3280 - protein, 220 aa, Dendrobium grex Madame Thong-In
MGRGRVELKRIENKINRQVTFAKRRNGLLKKAYELSVLCDAEVALIVFSNRGRLFEFCSSTSMTKTLERYQKCSYNASESAVPSKDAQNSYHEYLTLKAKVEYLQRSQGNLLGEDLIELSSKELDQLELQLEMSLKQIRSTKTQLMLDQLCDIKRKEQMLHEANRALSMKLKEDGPEIPLELSWPGGETNGSSERQQPQSDKFFQPLPCSNPSLQIGYSP

SEQ ID NO: 3281 - protein, 620 aa, Candida albicans
MSEQAQPQASADQQQHQHNHHHHHHHHHHNENQSQQQVPIDPAANPANRIGRYQILKTLGEGSFGKVKLAQHLGTGQKVALKIINRKTLAKSDMQGRVEREISYLRLLRHPHIIKLYDVIKSKDEIIMVIEFAGKELFDYIVQRGKMPEDEARRFFQQIIAAVEYCHRHKIVHRDLKPENLLLDDQLNVKIADFGLSNIMTDGNFLKTSCGSPNYMPAPEVISGKLYAGPEVDVWSAGVILYVMLCGRLPFDDEFIPALFKKISNGVYTLPNYLSAGAKHLLTRMLVVNPLNRITIHEIMEDDWFKQDMPDYLLPPDLSKNKNSKIDVDEDVIRALSVTMGYDRDCKIVNVIEKANKQVAAGNSSSQQSKSSNEILDAYLLMKENHALVKDLKKSKSENIESFLSQSPPPSPFPNRGSTSSAPGVQQSLTYQTLATVPDLSTLPNSTIAILPTSLPSIHRAYMAETKQNGDPSQQHAPPPTKKSKTRWHFGIRSRSYPLDVMGEIYRALKNLGAEWAKPTEEELWTIRVRWKYDTSAQFECGSAPNLMKMQIQLFQLEPNNYLVSFKFSGWESAHGNAGTDSPQSHRQQDLDEVGSFSAYPFLHLATRLIMELAVNSQSG

SEQ ID NO: 3282 - protein, 314 aa, Geobacter metallireducens GS-15
MPFSEPGKTKFQVDLRRHLRNQGICDNLVHLICEIAEASKYVINAVRTGDLGVAGTSNLYGEEQLALDVLSDRIIKKRLIHSGVVCNIASEEMDEIFQAQADADGLYSVAYDPLDGSSLVDVNLAVGTIVSIYEGCNLLQKGRNQVAALYILYGPRVSMVYSVGRGVHEFTMNHLMEFTLSRENIVMQEEGNIYAPGGLRNKYQEGTEQFVRYLEEKGAKLRYSGGFVPDINQVIMKGKGIFMYPALNGSPNGKLRLLFELNAMAYLVENAGGAATDGKQPILDLEPHSLDQRAPVYIGCKADVVKAMEFVSRN

SEQ ID NO: 3283 - protein, 1051 aa, Vibrio parahaemolyticus RIMD 2210633
MVGIFSWNNLSVKHKLFGLVLLPIISLFFLAGQHVHNLSTQAQDLQKAQLFSVYIDKVSYLFNLPNNPSIPNKAEKTAQLIQELKETTPRVFGDNSEVLPLLASFEEASLSMFTAIDIEEKLDIAEWRADTFEQILLNLDKVYFSNVSYETDRHLSSLMQLEWLMFWSTEERRLSEYLIYSANKRLHYDDAVRDEIQSLIQNQQLLVERFVALNANHNQVQLLIETFSNKVFQTSQEFRDKLLNQEELQALSPLKTGAGLAALNTRLALLHDINDTMEHELQTKLAQTIKATTQQRLVFIVLMSLVTILVISLTIRLVRKVTNNLHLVLEFLSRENYSEDSPLSELIKGKDELSKFAQEVEKLSHEREQAKQKLTKAKEDAERAKDDAIEASKAKSSFLANMSHEIRTPLNGVIGISEVLADTPLTATQRDYVDTIETSSQLLLSLINDVLDFSKIESGMLLISPHSTCVRESIYDIASIVSPKAKEKGIELTVSISPNTPYHIVIDDHRLRQVIMNFMSNAVKFTERGSVELSITTLESNESEAIIEFSVQDSGIGIDEQQQKRIFAPFAQEDDSTTRQFGGTGLGLAISTQLVELMGGSIQLESEKGRGSRFYFQLTAPISQAHFRARHTVNNQIWLVCDDSDLETKLRNELSFYQIQVHQSVHDLSALPTWINDKERIIILYVETTPDAAVKNTDLMRNLEHQHVQVCLIKHLHSQQLDFGHRVAAIITQPLLGQRLLKALESCAGRFTQSISVVQPATRLETLPKVLVVDDNTVNQKIAGLHVTKAGFSFDVAANGEEAVDLFRTSQYCLILMDCMMPVMDGFEATKQIRQIEQKENRTFRIPIIALTASVVDDDIQKCFDVGMDDYVPKPFKADLLKEKLDKAVGLRLPVTASTKLNQSSLTAFEEPEFKQRVGETLSAAPMRRERILLVEDNRVNQKVASLLLSKAGYQFEVAENGQIAVEMFQRDGGFDIILMDCMMPVMDGFEATKQIRAYEASLGLEKTPIIALTASVVDDDIQRCFDSGMDAYVPKPVRKEKLLHQIENVM

SEQ ID NO: 3284 - protein, 478 aa, Mycoplasma mycoides subsp. mycoides SC str. PG1
MMLIFMELIFYIKRIYMFKFKKDFWWGAASSGCQTESDKDKPNLNIMDYWYKQTPTDFYDNKGPNITCDTYSNYKTDVKLMSEIGLNSFRTSIQWTRLIKNLYTGEVDLKQVEFYRNYFLEIKKNNIKLIVNLFHFDTPIELENIGGWTNKKTVELYFLYAKQCFKYFSDLVDYWTTFNEPVVLVDGCYLNKWYYPKISNLKLAVQAAYNTILAHCKVANYFHSYFKNDQNKKISIILNLTPTIPKNSELKHLKAAKIRDELLNKSFLNAVIKGQFSTFLIKFLNENNLMPEYDQLELNEIKKTRIDFLAVNYYQPARVQAPLNNLTSSTELKLENWFLPYTNKNIRINPYRGWEIHPQTLYDIAIDIKNNYDNIPWIVSENGIGVSDENRFLNKQGYIDDQYRIDFIKEHLIYLYKAIEQGSNCFGYQMWTLIDNWSWANGFKNRYGFISLDTKTLKRTIKKSGYWIKQVIKDQGFE

SEQ ID NO: 3285 - protein, 549 aa, Glycine max
MNSFAKSEPVSSSASSSSSTYQQVPEQDANNDLDRVADNTFRRYTSNVTKGSGKGTAIVWFRNDLRVLDNEALYKAWLSSETVLPVYCVDPRLFATTYHFGFPKTGALRAQFLLECLADLRKNLMKRGLNLLVQHGKPEEILPSLAKSFQAHTVYAQKETCSEELNVERLVMRGLKQVVTSPEESSGITVSNNIPKLQLVWGTTMYHLDDLPFDATSLPDVYTQFRKLVETKCTIRSCIKLPASLGPPPTVQDWGCLPSLEQLGLSSQSVNKGMKFVGGETAALSRVYEYFWKKDLLRVYKETRNGMLGPDYSTKFSPWLASGSLSPRFIYEEVKRYENDRLANSSTYWVLFELIWRDYFRFLSVKYGNSLFHLGGPRKVQRNWSQDKNLFESWRDGCTGYPLIDANMKELSTTGFMSNRGRQIVCSFLVRDMGIDWRMGAEWFETCLLDYDPCSNYGNWTYGSGVGNDPREDRYFSIPKQAQTYDPEGEYVAYWLPQLRKIPKEKRNFPGNLIYIPQIVPLKFGTTSGPNKDKFFGARRTNDRGSKRR

SEQ ID NO: 3286 - protein, 523 aa, Buchnera aphidicola (Uroleucon obscurum)
  misc_feature (15)..(15): Xaa can be any naturally occurring amino acid
  misc_feature (19)..(19): Xaa can be any naturally occurring amino acid
  misc_feature (36)..(36): Xaa can be any naturally occurring amino acid
  misc_feature (45)..(46): Xaa can be any naturally occurring amino acid
  misc_feature (335)..(336): Xaa can be any naturally occurring amino acid
  misc_feature (367)..(368): Xaa can be any naturally occurring amino acid
MAAKDVKFGNEARIXMLRXVNVLADAVKVTLGPKGXNVVLDKSFXXPSITKDGVSVAREIELEDKFENMGAQMVKEVASKANDAAGDGTTTATLLAQSIVNEGLKAVAAGMNPMDLKRGIDKAVISAVEELKNLSVPCSDSKAITQVGTISANADEKVGALIAEAMEKVGNDGVITVEEGTGLQDELEVVKGMQFDRGYLSPYFINKTETGIVELENPYILMADKKISNVREMLPILESVAKSGKPLLIISEDLEGEALATLVVNSMRGIVKVAAVKAPGFGDRRKAMLQDISILTGGSVISEELAMELEKSTLEDLGQAKRVVISKDTTTIIGXXGEKHTIQSRISQIRQEVQEATSDYDKEKLNXXLAKLSGGVAVLKVGAATEVEMKEKKARVEDALHATRAAVEEGVVAGGGVALVRVAGKISHLRGQNEDQNVGIRVALRAMEAPLRQIVSNSGEEPSVVTNNVKDGKGNYGYNAASDQYGDMIDFGILDPTKVTRSALQYAASVAGLMITTECMVTD

SEQ ID NO: 3287 - protein, 523 aa, Buchnera aphidicola (Uroleucon solidaginis)
  misc_feature (368)..(368): Xaa can be any naturally occurring amino acid
MAAKDVKFGNEARIKMLRGVNVLADAVKVTLGPKGRNVVLDKSFGAPSITKDGVSVAREIELEDKFENMGAQMVKEVASKANDAAGNGTTTATLLAQSIVNEGLKAVAAGMNPMDLKRGIDKAVISAVEELKNLSVPCSDSKAITQVGTISANADEKVGALIAEAMEKVGNDGVITVEEGTGLQNELEVVKGMQFDRGYLSPYFINKPETGIVELENPYILMADKKISNVREMLPILESVAKSGKPLLIIAEDLEGEALATLVVNSMRGIVKVAAVKAPGFGDRRKAMLQDISILTGGSVISEELAMELEKSTLEDLGQAKRVVISKDTTTIIGGVGEKHTIQSRISQIRQEIQEATSDYDKEKLNEXLAKLSGGVAVSKVGAATEVEMKEKKARVEDALHATRAAVEEGVVAGGGVALVRVAGKISHLRGENEDQNVGIRVALRAMEAPLRQIVSNSGEEPSVVTNNVKDGTGNYGYNAASDQYGDMINFGILDPTKVTRSALQYAASVAGLMITTECMVTD

SEQ ID NO: 3288 - protein, 180 aa, Zea mays
MADAPASPGGGGGSHESGSPRGGGGGGGGSVREQDRFLPIANISRIMKKAIPANGKIAKDAKETVQECVSEFISFITSEASDKCQREKRKTINGDDLLWAMATLGFEDYIEPLKVYLQKYREMEGDSKLTAKSSDGSIKKDALGHVGASSSAAQGMGQQGAYNQGMGYMQPQYHNGDIKK

SEQ ID NO: 3289 - protein, 523 aa, Buchnera aphidicola (Uroleucon sonchi)
MAAKDVKFGNEARIKMLRGVNVLADAVKVTLGPKGRNVVLDKSFGAPSITKDGVSVAREIELEDKFENMGAQMVKEVASKANDAAGDGTTTATLLAQSIVNEGLKAVAAGMNPMDLKRGIDKAVISAVEELKNLSVPCSDSKAITQVGTISANADEKVGALIAEAMEKVGNDGVITVEEGTGLQNELEVVKGMQFDRGYLSPYFINKPETGIVELENPYILMADKKISNVREMLPILESVAKSGKPLLIISEDLEGEALATLVVNSMRGIVKVAAVKAPGFGDRRKAMLQDISILTGGSVISEELAMELEKSTLEDLGQAKRVVISKDTTTIIGGIGEKHTIHSRISQIRQEIQEATSDYDKEKLNERLAKLSGGVAVLKVGAATEVEMKEKKARVEDALHATRAAVEEGVVAGGGVALVRVAGKISHLRGQNEDQNVGIRVALRAMEAPLRQIVSNSGEEPSVVTNNVKDGKGNYGYNAASDQYGDMIDFGILDPTKVTRSALQYAASVAGLMITTECMVTD

SEQ ID NO: 3290 - protein, 461 aa, Saccharophagus degradans 2-40
MDSADANGEVLPAYIKDTANPWPIQGAAAWWLHHSLAAFTNSIKNKGGVLSLFEGDPATLVPELISQNKIDAVYLSQGFEPYEVQLQANIHKWCKQHNIECKRFAGHLLLNPDTHLNKQGKPFQVFTPYYKAALATHTIPRAKPIPSNLAKVWAAKKLPKSVALNKLKLLPNLNWADQFNSQWQPGEEGAHKNLREAIEDKIASYTRDRDFPAVDGTSLLSAHLRFGEISPRQIWQQVATQMDGEQCAPFLRQLMWRDFSYALLHHWPHIPQQAFKQQFEKFPWQKASNKNVAKQLHAWQTGTTGYPIVDAGMRQLWQTGWMHNRVRMIVASFLTKHLRIHWHEGAKWFWDTLVDADLANNTAGWQWVAGCGADAAPYFRIFNPVLQGEKFDKQGEYIKTWVPELAALPAKFIHAPWLAPQDILQTAGISLGNNSTYPLPIVDHKYAREAALAAYQQLKGD

SEQ ID NO: 3291 - protein, 362 aa, Shewanella oneidensis MR-1
MFKAFKGHALETKNRIVMAPMTRSRSTHPGDVPNEMMANYYRQRASAGLIITEGAPVSAVARGYSMTPGIYTPAQIEGWKKVTEAVHQEGGKIFIQLWHVGRRSHSSVSGAEPLAPSAIKIPDQVFGPLPEGGFGMIETQQPKAMSEQDIQATISDFVQAAQNAMLAGFDGVEVHAAHGYLFDTFLRLESNQRQDRYGGSQENRLRFLVDTLQALTQTIGSGKVAVRISPHIGEGFTGDNPEIIQLTLALLQKLQPMNLAYVHFSENISRYVEVSDAFRQQVRRVYQHPIMVAGKLTKQSAQRLLDQHYADFVAFGTPFVTNPDLVARFTHDWPLTEFDADARLTLYGGGEAGYIDYPAYQA

SEQ ID NO: 3292 - protein, 544 aa, Neisseria flavescens
MAAKDVQFGNEVRQKMVNGVNILANAVRVTLGPKGRNVVLDRAFGGPHITKDGVSVAKEIELKDKFENMGAQMVKEVASKTNDVAGDGTTTATVLAQSIVAEGMKYVTAGMNPTDLKRGIDKAVAALVDELKNIAKPCDTSKEIAQVGSISANSDEQVGAIIAEAMEKVGKEGVITVEDGKSLENELDVVEGMQFDRGYLSPYFINDAEKQIAGLDNPFVLLFDKKISNIRDLLPVLEQVAKASRPLLIIAEDVEGEALATLVVNNIRGILKTVAVKAPGFGDRRKAMLQDIAILTGGVVISEEVGLSLEKATLDDLGQAKRIEIGKENTTIIDGFGDAAQIEARVAEIRQQIETATSDYGKEKLQERVAKLAGGVAVIKVGAATEVEMKEKKDRVEDALHATRAAVEEGVVAGGGVALLRARAALENLHTGNADQEAGVQIVLRAVESPLRQIVAKAGGEPSVVVNKVLEGKGNYGYKAGSGEYGDMIEMGVLDPAKVTRSALQHAASIAGLMLTTDCMIAEIPERKPAMPDMGGMGGMGGMM

SEQ ID NO: 3293 - protein, 523 aa, Buchnera aphidicola (Uroleucon rudbeckiae)
  misc_feature (411)..(412): Xaa can be any naturally occurring amino acid
  misc_feature (461)..(462): Xaa can be any naturally occurring amino acid
  misc_feature (518)..(519): Xaa can be any naturally occurring amino acid
MAAKDVKFGNEARIKMLRGVNVLADAVKVTLGPKGRNVVLDKSFGAPSITKDGVSVAREIELEDKFENMGAQMVKEVASKANDAAGDGTTTATLLAQSIVNEGLKAVAAGMNPMDLKRGIDKAVISAVEELKNLSVPCSDSKAITQVGTISANADEKVGALIAEAMEKVGNDGVITVEEGTGLQNELEVVKGMQFDRGYLSPYFINKPETGIVELENPYILMADKKISNVREMLPILESVAKSGKPLLIISEDLEGEALATLVVNSMRGIVKVAAVKAPGFGDRRKAMLQDISILTGGSVISEELAMELEKSTLEDLGQAKRVVISKDTTTIIGGVGEKHTIQSRISQIRQEIQEATSDYDKEKLNERLAKLSGGVAVLKVGAATEVEMKEKKARVEDALHATRAAVEEGXXAGGGVALVRVAGKISHLRGQNEDQNVGIRVALRAMEAPLRQIVSNSGEXXSVVTNNVKDGKGNYGYNAASDQYGDMIDFGILDPTKVTRSALQYAASVAGLMITTXXMVTD

SEQ ID NO: 3294 - protein, 365 aa, Shewanella oneidensis MR-1
MTQSLFQPITLGALTLKNRIVMPPMTRSRASQPGDVANHMMAIYYAQRASAGLIVSEGTQISPTAKGYAWTPGIYTPEQIAGWRIVTEAVHAKGCAIFAQLWHVGRVTHPDNIDGQQPISSSTLKAENVKVFVDNGSDEPGFVDVAVPRAMTKADIAQVIADYRQAALNAMEAGFDGIELHAANGYLINQFIDSEANNRSDEYGGSLENRLRFLDEVVAALVDAIGAERVGVRLAPLTTLNGTVDADPILTYTAAAALLNKHRIVYLHIAEVDWDDAPDTPVSFKRALREAYQGVLIYAGRYNAEKAEQAINDGLADMIGFGRPFIANPDLPERLRHGYPLAEHVPATLFGGGEKGLTDYPTYQA

SEQ ID NO: 3295 - protein, 178 aa, Oryza sativa (japonica cultivar-group)
MMMMDLGFLEGGAGMADAGHDESGSPPRSGGVREQDRFLPIANISRIMKKAVPANGKIAKDAKETLQECVSEFISFVTSEASDKCQKEKRKTINGEDLLFAMGTLGFEEYVDPLKIYLHKYREMEGDSKLSSKAGDGSVKKDTIGPHSGASSSSAQGMVGAYTQGMGYMQPQYHNGDT

SEQ ID NO: 3296 - protein, 544 aa, Neisseria gonorrhoeae
MAAKDVQFGNEVRQKMVNGVNILANAVRVTLGPKGRNVVVDRAFGGPHITKDGVTVAKEIELKDKFENMGAQMVKEVASKTNDVAGDGTTTATVLAQSIVAEGIKAVTAGMNPTDLKRGIDKAVAALVEELKNIAKPCDTSKEIAQVGSISANSDEQVGAIIAEAMEKVGKEGVITVEDGKSLENELDVVEGMQFDRGYLSPYFINDAEKQIAGLDNPFVLLFDKKISNIRDLLPVLEQVAKASRPLLIIAEDVEGEALATLVVNNIRGVLKTVAVKAPGFGDRRKAMLQDIAILTGAVVISEEVGLSLEKATLDDLGQAKRIEIGKENTTVIDGFGDAAQIEARVAEIRQQIETATSDYDKEKLQERVAKLAGGVAVIKVGAATEVEMKEKKDRVEDALHATRAAVEEGVVAGGGVALLRARAALENLHTGNADQDAGVQIVLRAVESPLRQIVANAGGEPSVVVNKVLEGKGNYGYNAGSGEYGDMIGMGVLDPAKVTRSALQHAASIAGLMLTTDCMIAEIPEEKPAVPDMGGMGGMGGMM

SEQ ID NO: 3297 - protein, 523 aa, Buchnera aphidicola (Uroleucon rapunculoidis)
  misc_feature (314)..(314): Xaa can be any naturally occurring amino acid
  misc_feature (337)..(337): Xaa can be any naturally occurring amino acid
  misc_feature (339)..(341): Xaa can be any naturally occurring amino acid
  misc_feature (350)..(351): Xaa can be any naturally occurring amino acid
  misc_feature (385)..(385): Xaa can be any naturally occurring amino acid
  misc_feature (517)..(520): Xaa can be any naturally occurring amino acid
MAAKDVKFGNEARIKMLRGVNVLADAVKVTLGPKGRNVVLDKSFGAPSITKDGVSVAREIELEDKFENMGAQMVKEVASKANDAAGDGTTTATLLAQSIVNEGLKAVAAGMNPMDLKRGIDKAVISAVEELKNLSVPCSDSKAITQVGTISANADEKVGALIAEAMEKVGNDGVITVEEGTGLQNELEVVKGMQFDRGYLSPYFINKPETGIVELENPYILMADKKISNVREMLPILESVAKSGKPLLIISEDLEGEALATLVVNSMRGIVKVAAVKAPGFGDRRKAMLQDISILTGGSVISEELAMELEKSTXEDLGQAKRVVISKDTTTIIGGVXEXXXIQSRISQIXXEIQEATSDYDKEKLNERLAKLSGGVAVLKVGAAXEVEMKEKKARVEDALHATRAAVEEGVVAGGGVALVRVAGKISHLRGQNEDQNVGIRVALRAMEAPLRQIVSNSGEEPSVVTNNVKDGKGNYGYNAASDQYGDMIDFGILDPTKVTRSALQYAASVAGLMITXXXXVTD

SEQ ID NO: 3298 - protein, 110 aa, Lactobacillus delbrueckii subsp. lactis
  misc_feature (101)..(101): Xaa can be any naturally occurring amino acid
LQPDTKIRTFAIGMDQNPIDLKYAREVADYLGTDHTEFIMTREDVLGVLREVIYTLETWDITTIRASIGMYILCKKIHETTDLKVILTGECSDELFGYKYXDFAPSPEEF

SEQ ID NO: 3299 - protein, 203 aa, Lentinula edodes
MGRVLLKVIILGDSGVGKTSLMNQYVNKRFSNQYKATIGADFLTKEVMVDDRLVTMQLWDTAGQERFQSLGVAFYRGADCCVLVYDVNSAKSFETLDSWRDEFLIQASPHDPENFPFVVLGNKIDVEENKRQVTQKRAMTWCQSKGNIPYFETSAKEAINVEQAFQTVAKNALTQEAEEQLYVDYPDPIQLDSESSQSYGCNC

SEQ ID NO: 3300 - protein, 541 aa, Neisseria gonorrhoeae
MAAKDVQFGNEVRQKMVNGVNILANAVRVTLGPKGRNVVVDRAFGGPHITKDGVTVAKEIELKDKFENMGAQMVKEVASKTNDVAGDGTTTATVLAQSIVAEGIKYVTAGMNPTDLKRGIDKAVAALVEELKNIAKPCDTSKEIAQVGSISANSDEQVGAIIAEAMEKVGKEGVITVEDGKSLENELDVVEGMQFDRGYLSPYFINDAEKQIAGLDNPFVLLFDKKISNIRDLLPVLEQVAKASRPLLIIAEDVEGEALATLVVNNIRGVLKTVAVKAPGFGDRRKAMLQDIAILTGGVVISEEVGLSLEKATLDDLGQAKRIEIGKENTTVIDGFGDAAQIEARVAEIRQQIETATSDYDKEKLQERVAKLAGGVAVIKVGAATEVEMKEKKDRVEDALHATRAAVEEGVVAGGGVALLRARAALENLHTGNADQEAGVQIVLRAVESPVRQIVANAGGEPSVVVNKVLEGKGNYGYNAGSGEYGDMIGMGVHDPAKVTRSALQHAASIAGLMLTTDCMIAEIPEEKPAVPDMGGMGGMM

SEQ ID NO: 3301 - protein, 398 aa, Pyrococcus abyssi GE5
MVRASKRALSIEYAIRDVVLPARELEKKGIKVIRLNIGDPVKFDFQPPEHMKEAYCKAIKEGHNYYGDSEGLMELREAIVEREKKKNGVNITPDDVRVTAAVTEALQMIFGALLDPGDEILIPGPSYPPYTGLVKFYGGVPVEYRTIEEEGWQPDIDDLRKKITERTKAIAVINPNNPTGALYDKKTLEEIINIAGEHDIPVLSDEIYDLMTYEGKHISPASLTKDVPVIVMNGLSKVYFATGWRLGYMYFVDPEGKLSEVREAIDKLARIRLCPNTPAQFAAIAGLRGPMDYLEEYMKKLKERRDYIYKRLNEIPGISTTKPQGAFYIFPRIEEGPWKDDKEFVLDVLHNAHVLFVHGSGFGEYGRGHFRAVFLPPVEVLEEAMNRFEKFMREKLSS

SEQ ID NO: 3302 - protein, 154 aa, Triticum aestivum
SLALVVKDPETSPTSGGGEHADENKETVGGGEPRDLGAVVPAPNRRPRGRPPGSKNKPKPPIFVTRDSPNALRSHVMEVAGGADVCDAIAQFSRRRQRGVCVLSGAGTVANVALRQPSAPGGAVVALHGRFEILSLTGTFLPGPAPPGSTGLTV

SEQ ID NO: 3303 - protein, 110 aa, Kluyveromyces lactis NRRL Y-1140
MSSSVPYDPYVPATEETAGDSKTAALKSEIDDTVDIMRDNINKVAERGERLTSIQDKADNLAVSAQGFKRGANRVRKQMWWKDLKMRMCLVLVVIILLIVIIVPIAVHFS

SEQ ID NO: 3304 - protein, 699 aa, Adiantum capillus-veneris
MAKPCTIVWLRRDLRLEDNPALCAAGRIGNVVPVFIWSPEEERQFHPGRVSRWWLKQSLIQLDVSLRSFGVPLVMRKSTDTLGTLQELIKATGATQVFYNHLYDPISLVRDHHVKQGLTQSGIQVQSFNGDLLYEPWEVLNDDGKPFTSFESYWQKCLNMPFEPDSPLLPPRRLTSIAGSIPTYTPEELGLEDETEKSSNALLARAWAPGWSNADRALEAFLAGPLLEYSRNRHKIDGPTTSLLSPHMHFGEVSVRKVYHSVRRLQLLWAKDGSKLGEESIYFFMRSIGFREYSRYLSFNFPFTHERSLLSNLKSFPWRVDEGFFKAWRQGRTGYPLVDAGMRELWATGWLHNRVRVIVSSFCVKFLQLPWRWGMKYFWDTLLDADLESDVLGWQYISGSLPDGHELDRMDNPQTEGYKHDPVGEYVRRWLPELVRLPTEWIHHPWDAPPAVLRAAGVELGSNYPRPIVEVAAARERLRQAVAQMWEQEAALKAAGVATDAEALDENLEVKVVTPPLVSTHSLKTAVAGTLSRSSLRDQRVPTCGKQLSMENGVPHEGDNSPDIAMSPQQDNLLATTAPPEAHSTAEKCDNKSMNCDQTPEPKHNVPPPAVSDGNSTAESSSSPKQVNDELRNGVPLVWVPSIVNQQPVVEPSCVPYAGDAGQLRKHLLALQNSRTENKMEEKSPLSEWRRRTKRKAKA

SEQ ID NO: 3305 - protein, 487 aa, Adiantum capillus-veneris
MTTSTTIVWLRRDLRLDDNPALKEASKIGNAVVPVFVWVPEEEGQFQQGRMSRWWLKQSLKQLAQSLDSLGSPLIIRRSSSSLQALMDLVIHTQASQVFFNHLYDPISLVRDQRVKEGLLQTGIHVRTFNADLLYEPWQVNDPSGKAFTTFNEFWDKCLNMPEEPHAPLLPPTRSLLAFAGHLPGCTVEDLELENNSEKDSNALLARSWTPGWINAEKALEAFVERHLLQYAANQHMVDGSTTSFLSPHLHFGELSVRKVFYNVRIKAVQWTKEGKPDGEQSVNLFLRSIGLRDYSRYICFNFPFTHERLILQNRRPFPWRVDEGLFKAWRQGRTGYPLVDAGMRQIWATGWLHNRIRVIVSSFFVKVLQLPWTWGMKYFWDALLDADLENDILGWQYISGGLPDGHELERMDDLQIEGYKYDPRGEYVRKWLPELSRLPTEWIHHPWDAPPRALRAAGVELGSNYPRPLVEFAAAWSRLQTALREA

SEQ ID NO: 3306 - protein, 423 aa, Trichodesmium erythraeum IMS101
MPYYISPRFIDKLAVHITKNFLEIPRIRVPLIIGIHGRKGEGKTFQCQLVFEKMGIEPVTISGGELESKDAGDPARLLRLRYREASEKVKVQGRMCALFINDLDAGAGRFDGGTQYTVNTQLVNATLMNIADNPTNVQLPGSYDETPLHRIPIIVTGNDFSTLYAPLIRDGRMEKFYWEPNREDRVGIVGSIFKTDELSTGDIDNLIDEFSDQAIDFFSALRSRIYDEQIRDFIHQVGIEKISRRVVNSVEKIPDFPQPTFNVSRLLEYGKIMVGEQERIRELGLVEEYNKSRLFGVFKTSQRENITPNSNGLFPEVTTENKLNANRINHSIKSSNLSSEVREKIQKILEDGGKIGMEYADKRRYKTGSWKSCGKIENGEVKEVINAVENCLVKHQNDYVRLIGIDGNVKRRIVEKIIYRPDI

SEQ ID NO: 3307 - protein, 112 aa, Listeria monocytogenes
MTDRKNLTTNQGVPVGDNQNSMTAGRKGPTLIEDYVLIEKLAHFDRERVPERVVHARGAGAHGKFVTKKSMKKYTMAKFLQEEGTETEVFARFSTVIHGQHSPETLRDPRGF

SEQ ID NO: 3308 - protein, 280 aa, Bacillus subtilis subsp. subtilis str. 168
MTTHLQAKATLHNGVEMPWFGLGVFQVEEGSELVNAVKTAIVHGYRSIDTAAIYGNEAGVGEGIREGIEEAGISREDLFITSKVWNADLGYEETLAAFETSLSKLGLDYLDLYLIHWPVEGKYKEAWRALETLYKEGRIKAIGVSNFQIHHLEDLMTAAEIKPMINQVEFHPRLTQKELIRYCQNQGIQMEAWSPLMQGQLLDHPVLADIAQTYNKSVAQIILRWDLQHGIITIPKSTKEHRIKENASVFDFELTQDDMNRIDALNENLRVGPDPDNFDF

SEQ ID NO: 3309 - protein, 323 aa, Aspergillus nidulans FGSC A4
MSLPSHFSLNTGAKIPAVGFGTWQAKPLEVENSVEVALKQGYRHIDCAAIYRNETEVGNGIRKSGVPREEIFLTGKLWNTKHAPEDVEPALDKTLKDLGVEYLDLYLMHWPCAFKASDKWFPLDDNGVFQLADIDYVTTYRAMEKLLNTGKVRAIGVSNFNVRRLEDLLSKVSVVPAANQIEAHPYLQQPDLLRYCQSKGIIIEAYSPLGNNQTGEPRTVDDPVVHTVAGQLSMDPGPLLASWAVQRGTVVLSKSVTPSRIAANLQVKRLPDDAFATLAALERHKRFNFPAFWGYDIFDEAGEEAVKKAAMDAAPINKTKFTV

SEQ ID NO: 3310 - protein, 541 aa, Enterococcus faecalis V583
MAKEIKFAEDARAAMLRGVDVLADTVKVTLGPKGRNVVLEKSFGSPLITNDGVTIAKEIELEDHFENMGAKLVSEVASKTNDIAGDGTTTATVLTQAIVREGLKNVTAGANPLGIRRGIELATKTAVEELHNISSVVDSKEAIAQVAAVSSGSEKVGQLIADAMEKVGNDGVITIEESKGIETELDVVEGMQFDRGYLSQYMVTDNDKMEAVLENPYILITDKKISNIQDILPLLEQILQQSRPLLIIADDVDGEALPTLVLNKIRGTFNVVAVKAPGFGDRRKAMLEDIAILTGGTVITDDLGLELKDTTIENLGNASKVVVDKDNTTIVEGAGSKEAIDARVHLIKNQIGETTSDFDREKLQERLAKLAGGVAVVKVGAATETELKELKLRIEDALNATRAAVEEGMVSGGGTALVNVIGKVAALEAEGDVATGIKIVVRALEEPIRQIAENAGYEGSVIVDKLKNVDLGIGFNAANGEWVNMVEAGIVDPTKVTRSALQNAASVSALLLTTEAVVADKPEPAAPAPMMDPSMGMGGMM

SEQ ID NO: 3311 - protein, 167 aa, Oryza sativa (japonica cultivar-group)
GRWSATRPGGGGGGGGGVREQDRFLPIANISRIMKKAIPANGKIAKDAKETVQECVSEFISFITSEASDKCQREKRKTINGDDLLWAMATLGFEDYIEPLKVYLQKYREMEGDSKLTAKAGDGSVKKDVLGSHGGSSSSAQGMGQQAAYNQGMGYMQPQYHNGDVSN

SEQ ID NO: 3312 - protein, 190 aa, Ophioglossum vulgatum
DDHGEIFAEIRRSNLEPYLGLHYPATDIPQASRFLFMKNRVRMICDCSASPVKVIQDEKLGQPLSLTSSTLRAPHGCHSLYMGNMGSIASLVMAVVINDNEDDISNNGHAYQGRRLWGLVVCHHTAPRFVPFPVRSACEFLMQVFGLQLNMEVGLAAQVREKHILKTQTVLCDMLLRDAPIGIVSKSPNM

SEQ ID NO: 3313 - protein, 252 aa, Prunus caroliniana
AHYKSEADVGNAIAEAIRSGLVKREELFITSKASNHGHVVEACKNSLKKLQLDYLDLYLVHYPLATKHSGVGTTASLLDENKVLDIDVTVSLETTWHDMEKTVSLGLVRSIGLSNYELFLTRDCLSYAKIKPQVSQFETYPYFQRESLVKFCKKHGVTPMAHTPLGGATANVKSFGSISPLEDPVLLGLAKKYKKSVAQIALRWNIERDTPVIPKSSKVERLKENLEVLNFKLEKEDIELINTIDKKSRTTL

SEQ ID NO: 3314 - protein, 219 aa, Hordeum vulgare subsp. vulgare
MGATEDSSSGSETTTSSSVEALASPPSPTATTASSKKKRARNDGRHPTYRGVRMRSWGKWVSEIREPRKKSRIWLGTFATAEMAARAHDVAALAIKGRAAHLNFPDLAHELPRPATAAPKDVQAAAALAASADFPASATATANAGAKNPDGPEPNAASASTPPDTAEDALFDLPDLLFDLRHGPPSCQVSCASTWDDDVAFAGPGAGVFRLEEPLQWEY

SEQ ID NO: 3315 - protein, 334 aa, Triticum aestivum
  misc_feature (50)..(50): Xaa can be any naturally occurring amino acid
AYLGDTTEQVCTKKQAGTGPEFPADRRPTRPLGTVHHELHFTVQEGIDAXEEVIYHIETYDVTTIRASTPMFLMSRKIKSLGVKMVLSGEGSDEIFGGYLYFHKAPNKKELHEETCRKIKALHLYDCLRANKATSAWGLEARVPFLDKNFINVAMDLDPECKMIRRDLGRIEKWVLRNAFDDDEKPYLPKHILYRQKEQFSDGVGYSWIDGLKDHANAHVSDSMITNASFVYPENTPTTKEAYYYRTVFEKFYPKNAARLTVPGGPSVACSTAKAVEWDAAWSKLLDPSGRAALGVHDAAYEEEKAPALADHVFRPPAHGESILVETGVPAAAV

SEQ ID NO: 3316 - protein, 119 aa, Zea mays
IGFREYSRYLCFNYPFTHERSFLGNLKHYPWLLDEGRFKSWRQGMTGYPLVDAGMRELWATGWTHNRIRVIVSSFAVKFLQIPWIWGMKYFWDVLLDADLESDILGWQYISGSLPDGHE

SEQ ID NO: 3317 - protein, 931 aa, Ashbya gossypii ATCC 10895
MTSIPHRHTYYGGGATPPAATGPLSGSRGHAAGRSKKKQVTFGPYIIGPTLGEGEFGKVKLGWSKARLDGDSRNVAIKLIRRDTVPKNSEKEIKIYRELNALKLLSHPNIVRLEEVLQNSKYIGIVLQYASGGEFYKYIQKKRRLKEPPACRLFAQLISGVHYIHYKGLAHRDLKLENLLLDEHENLIITDFGFVNEFHKNDLMRTSCGSPCYAAPELVVSSKPYSAQKADVWSCGVILYAMLAGYLPWDDDPENPEGEDIAKLYQYITHTSLKFPEYIKPIPRDLLKRILVSNPEVRLTVADIEQHAWLQPHAQFLMWSPSDWDAKAKAETNNLFRQPSAVHAGVLRPQSSCSISSANSKGDNRGSLIMDSTLNPQPVPPQEFQSHIIMKPTSPSNGLRKMSPVRRHARSNSAASIALQAVVDAERDYFNSPSIHSLHHDSLSQNTTPPSSAGRVPTYAITRSATHHNGISSSLMNRNSVIIEVSPQKGSVPPVMIPGNRESLNGQESGGIAMADMSQRPTIVKDKTSSHMVPQAGRKQRPTSYQPCSTTAFAQSPDLVSGAGALVPIMGKQQRVSTASNPTFVDVGRSGSTRRLPGPNNQLLETPFEADRQIDDNPVVDDATIKSDDMLPSTLEIVAYDNECGTSPGSNGQHRRYSAIVMSEIYEQEEGERISCELSSPNKMGSARPDCSTARISINTPNMGLQNRECIVSSSSPESDASSKQKSGKTDKKDKRFSLLSFYSFYNNSKSSIDSSTDAVQPTGLVLDVVKHPNISRTSSQKKNPAPAGNGTQAIPRRHNTLPREAQRTPVALSYVYASLDVTPNAGTPELADVPSPINLVKMAEQPHGTKQHDPSTPTRSATVHGKSQRLSNNTPKGPIYEDPKPKRKTNKVSLMVSSINPSQAPQPPRQKEPSTARKVLDFFKRRSLRI

SEQ ID NO: 3318 - protein, 418 aa, Emericella nidulans
MSDLQVQGRKVFKVFNQDFIVDDRYTVTKELGQGAYGIVCAATNVQTGEGVAIKKVTNVFSKKILAKRALREIKLLQHFRGHRNITCLYDMDIPRPDNFNETYLYEELMECDLAAIIRSGQPLTDAHYQSFIYQILCGLKYIHSANVLHRDLKPGNLLVNADCELKICDFGLARGFSIDPEENAGYMTEYVATRWYRAPEIMLSFQSYTKAIDVWSVGCILAELLGGRPFFKGRDYVDQLNQILHYLGTPNEETLSRIGSPRAQEYVRNLPFMPKVPFQRLFPNANPDALDLLDRMLAFDPSSRISVEEALEHPYLAIWHDASDEPSCPTTFDFHFEVVDDVQEMRRMIYEEVVRFRQSVRMPPQAQSLAQQQQIGNIPIPEHQQGVWRQEEPRPQEAGAVGGNHNDLESSLQRGMDA

SEQ ID NO: 3319 - protein, 181 aa, Malus x domestica
LENFIDPDIPATWRAMETLYDSGKARAIGVCNFSTKKLSDLLDIARVPPAVDQVECHPSWQQNKLRSFCKSKGVHLSGYSPLGSPGTTWIKSEVLTNPILATVAEKLGKTPAQVALRWGLQKGHSVLPKSTNEARIKENIDVFGWSIPDDLFAKFSEIEQARLIRWLSPVHHTSGPYRSLE

SEQ ID NO: 3320 - protein, 478 aa, Streptococcus pneumoniae R6
MTTFKDGFLWGGAVAAHQLEGGWQEGGKGISVADVMTAGRHGVAREITLGVLEGKYYPNHEAIDFYHRYKEDIALFAEMGFKCFRTSIAWTRIFPKGDELEPNEEGLQFYDNLFDECLKNGIEPVITLSHFEMPYHLVTEYGGWKNRKLIDFFARFAEVVFKRYKDKVKYWMTFNEINNQANYQEDFAPFTNSGIVYEEGDNREAIMYQAAHYELVASARAVKIGHEINPDFQIGCMIAMCPIYPVTCNPKDILMAMKAMQKRYYFADVHVLGKYPEHIFKYWERKGISVDFTDQDKEDLLGGTVDYIGFSYYMSFAIDSHRENNPYFDYLETEDLVKNNYVKASEWEWQIDPEGLRYALNWFTDHYHLPLFIVENGFGAIDQVAADGMVHDDYRIEYLGAHIREMKKAVVEDGVDLMGYTPWGCIDLVSAGTGEMRKRYGFIYVDKDDNGKGSYNRSPKKSFGWYKEVISSNGESVE

SEQ ID NO: 3321 - protein, 463 aa, Mycobacterium avium subsp. paratuberculosis K-10
MPQHPSLPAHAIAPAYTGRLFTAPVPALRMPDESMDPDAAYRFIHDELMLDGSSRLNLATFVTTWMDPEAGRLMAETFDKNMIDKDEYPATAAIEQRCVCMVADLFHAEGLNDADPYSACGVSTIGSSEAVMLGGLAMKWRWRAKTKDWKKRTPNLVMGSNVQVVWEKFCRYFDVEPRYLPMEEGRYVITPEQVVDAVDEDTIGVVAILGTTYTGELEPVADICGALDKLALKPASAGGVDVPVHVDAASGGFVVPFLHPELKWDFRLPRVVSINVSGHKYGLTYPGVGFVVWRSKEYLPDELVFRVNYLGGDMPTFTLNFSRPGNQVVGQYYNFLRLGREGYTKVMQTLSGTARWLGEQLRVSEHCELISDGSAIPVVAFRLAKNRGYTEFDVSHELRTYGWQVPAYTMPDNATDVSVLRIVVREGLSADLARALHDDAVSALTSLDKVKPGGHYDAQHFAH

SEQ ID NO: 3322 - protein, 177 aa, Arabidopsis thaliana
MTGTGQKLNIRRRVGENRCVNMIANLFHAPVGQDEAVISCGIVASSESAGLAFKMKWQHRRKAQGLPIDKPNIVTGVNVQVCWEKFARYFEVELKEVKLSEDYYVMDPAKAVEMVDENSICVAAILGSTFTGEFEYVKLLNDLLAEKNAKTAWETPIHVDAASGGFIASMGEEYQCQ

SEQ ID NO: 3323 - protein, 475 aa, Borrelia burgdorferi B31
MKNKFLICVYFLLTLGISSLVIVESIFAFDESNNKLSRSNYEQMMIQAFEFVKENYVDPVSDEVIFEGALKGIFQSLGDPYSQYLTKKDLEEISKTTVGDYVGIGISIIKKMHSQDKQDKAKDFDPNSACVSIVTPFEGGPAYKAGIKSGDCITAVDGKSVYSMEVDQVVDLLKGKEGTKVKVSILRGKNLTLDFELTREKIEIQTIKYDVINSDIGYIRIVSFNPHTSVDFRKALDNLKNKNIKSLILDLRLNTGGYFQAAIKMADDILSKGIIVSTKSRNSSKPIDYKASSKQVLPSNIKIVALIDRSSASASEVFVGALKDNKRAYIIGEKSYGKGLIQHVVPFYTGGFKITSSKYYTPSGKSIHKVGIEPDLEIKSPDFSEEEALIYKEIFDKKLIEGFLKGKKFITEQEIDFFVENLVKENPKYKIDKEFLGKYVFFNYYQDNNKELPIYNLHYDKVLKTACEYLSKLGN

SEQ ID NO: 3324 - protein, 373 aa, Corynebacterium glutamicum ATCC 13032
MANVVLVDRMEPLVSKLFTPIQIRDITIPNRVWMSPMCTYSAATGSGLPTDFHQAHYAARAAGGVGLVMVEATGVNPVAPISPVDLGLWSHDQIEPFSRVTAAIRAGGAVPAVQLAHAGRKASTDAPWNGGGYVGPETNGWETVGPSPLAFPGLPAPRELTVSEIQEVVQQFAGAAVRADQAGFDVVEIHAAHGYLLHNFLSPISNKRTDSYGGSLENRARIVLEVIDAIRAVWPEEKPVFMRISTTDWVEENPQDDRESWTLSQSRQLALWASEHGVDLIDASSGGLDIVPIPHDRDYQTAKAADLHASTGVTVAAVGRIDDAQTAHNLVDSGDVNAVFLGRPLLKDPSWANQAALALGAEPRYVHQYDYVL

SEQ ID NO: 3325 - protein, 494 aa, Trichodesmium erythraeum IMS101
MASQKEETALVQAVKNSNFAQVSILVAQNINANAQALDGTTALMVAAEKGYTQIASLLLDKGANVNYTKKKFGATALMLAAAHGRSEIVEVLLSRGADVNAKNYDGASPLMVASMNGYLLVVNQLIAAGADVNVVDKDHDTALGLATAQGYQNVVQVLLDAGARIDESTLSVVAHSNHAKMREILLNYGVDVNTKNLQGKTWLIQAAEAGDLSTVKTLLKAGADVNFRDKDGETALILSADQGDLEIVKALLESGADVNIKSRSGGTALMAAAAEGNLVIVSTLLDANSDVNAQDLEGETALSFAIGENHTETVKILLEHQAEIITKNQAGDTPLFSAIFHGYTDVVSILLATIEKQNLTSLLNSKYLGETALTLAIWQKNREIINILLDVGVDINIPAQGGYTPMIKAVYQGDIETLKILLGREADINLRDDNQATALMWAAYQGHTEAVKLLIDSGANLTYKNTSGYTALMLAEFNGYQDIVRLLSNAKGEH

SEQ ID NO: 3326 - protein, 334 aa, Haemophilus influenzae R2846
MKTLSEFIVERQAEYPNAKGELSGILSSIRLLAKIIHRDINKAGLTNILGQSGVENVQGESQMKLDLFAHNTMKAALMAREEVAGFASEEEESFIAFDTERGRNAKYIILTDPLDGSSNIDVNVSVGTIFSIYRRVSPIGTPVTLEDFLQPGNKQVAAGYIVYGSSTMLVYTTGNGVNGFTYDPSIGTFCLSHENMQMPKTGRIYSINEGQYLKFPQGVKKYIKYCQEEDKATNRPYASRYIGSLVADFHRNLLKGGIYIYPSATNYPNGKLRLLYEGNPIAFLAEQACGVATDGYRRILDIQPTELHQRVPLFVGSEDMVKKAQEMMEEFKEE

SEQ ID NO: 3327 - protein, 494 aa, Sinorhizobium meliloti
MTDRPTITTTAGAPVPDNQNSLTAGPRGGIMLQDYQLIEKLAHQNRERIPERVVHAKGWGAFGSLKITGDISQYTRAKCLQPGAETPMLARFSTVAGEQGAADHERDVRGFALKFYTDEGNWDLVGNNTPVFFIRDPYKFPDFIHTQKRHPKTNLRSATAMWDYWSLSPESLHQVTILMSDRGLPQTPMHMNGYGSHTYSFWNDAGERYWVKFHFKTQQGHKFFTNEEGEAVIGKTREGYQESLFYAIENGEFPRWTVQVQIMPELDVEKTPYNPFDLTKVWPHADYPPVEIGVLELNRNPENYFAEIENAAFSPSNIVPGIGFSPDKVLQARIFSYADAHRYRLGTHYEHIPVNQPRCPVHHYHRDGQMNTYGGIRTGNPDAYYEPNSFNGPAEQPLAKEPPLRIDGDMSRYDHRVGNDDYVQVRALFGLFDEGQKSRLFSNIAAAMGGVPGEIIERQLIHFARVHPEYEAGVRQALKTAHGYEADTISTAAE

SEQ ID NO: 3328 - protein, 461 aa, Magnetococcus sp. MC-1
MSSEKKSARGWLWLVVVFILFIVGVQAANNGMALGRITYEKLKVFTEVLDLVRTQYVEEADEEKLLYGAIGGMLETLDPHSSFLNPDSFKEMKVDTKGEFGGLGIEITRGEQAIKVVAPIADTPADRAGMKAGDLIIKIEDESTQDMNLMDAVKRMRGKPDTDIKLTVVREGEPKPLVFTLTRAIIKISSVKWRAEQNNLAYVRITSFNEQARPLLDKALDEIEAELKGNVRGLVLDLRNNPGGLLDQAVQVSDAFLNKGRIVYTKGRIPGKDLSFDARNGDLMEGAPIVVLVNGGSASASEIVAGALQDHKRAVIMGTQSFGKGSVQTILPLSDGSGVRLTTALYYTPSGRTIQAKGIVPDIVVEDLTLIKRKDRLERTKEKDLKGHFNNDGKRSMDDKEETTSTTEDSAKKGDTKSTEDEDDQAERDSVTGRSKDDYQLKRALDLLRGLQVFQTTAAQN

SEQ ID NO: 3329 - protein, 856 aa, Gloeobacter violaceus PCC 7421
MAVGFSLRVLVVAANGPLVHALEKTLLSGGYDLALRWAAGTASLHQALMSERPEMILAADGPGEIDALLLLRSLTVHNCCELPLVWIGDAPSTPEGGYLNGADLHLLVLTVERALHQAQQRRETGVARAALRRSEQRLDLFFSQSLDGFFFMMLDRPVRWDATVDKERTLDYVFAHQRLTRVNDALLAQYRASGEQLLGRTPADLFAHDLELGRRLWREFFDRGKLHVETDERRFDGSPMWVEGDYSCLYDEQGRITGHFGIQRDVTVRKLAQEALRTSEAALQEQLQRTLLLQRICEQIRSSLESRQIFQATVDQVGQALGVNCVRILVYSPTPKPELHFAAEYLEAGYPPVHHGSVPVAGDPHAQRVLECDRAVCSPDVYADPQLAPVHELCRSVGLKSLLAVRTSYQGKPNGVITVQQRDRFRRWTPEEIALLEAVAAQVGIALNQAKLLEQEKAQSLLLAEQNAALARARQAAEAASRTKNEFLATMSHEIRTPMNGVIGLADVLLADGGLTHRQRDSIETIRASGETLLTIINDILDFSKAESGCIELETKRFDLHALLAGCVDLLRPEATQKHLQLCCTLHGQVPQAVVGDAARLRQILVNLIGNAVKFTTSGAVSVNVTAARPAAEPPQKWELHFAVRDTGIGIPAERMDRLFKPFSQVDASTTRRYGGTGLGLAICKRLAELMDGRIWVESEPGRGSTFSFTIVAAAATDAPAPAPPVEASWSKPLPLRILLAEDNPLNQKVALQLLRRLGYRANVATDGEEVLRALRRQRYDLVLMDVQMPMIDGLEATRRIASEFAAAERPRIIALTAGATLQDEQACLRAGMDGFISKPIRIGELRRALERWGTG

SEQ ID NO: 3330 - protein, 1005 aa, Desulfovibrio vulgaris subsp. vulgaris str. Hildenborough
MARRKDKQHRARMVQAESTIRTLRRERVLHDSQVEQLRRTGALYRSVFERIPVMVFVWRVARDVGASRLIDMNPLAKAYLENVPRNGDDGSPDLPESPDLLGSLLPWLVESPFGEALRRVHAEGGTLEIPALRHGAAGGGRFWRCIFCRLPLGDVIAISEDITAAQETGAALVTSERGYRTLVENIPDIVVRFDARGRLLFANPALRRFVRSKRLPSGHVTGQPLGQQPAMLRELRERVQLAMSSGEVQRAELEERTRQGRRFFEWRIVPEPAPDGGDATVLCIGRDVSAMRRATEDYRALFNGMLSAFALHEIICDGAGVPVDYRFLAVNPAFERMTGLLASEMVGRTARDVLPGLESEWLQRYGQVALTGVPVTFEAFNRDLGKYFKVSAYRPAERQFACMFHDVTDRVRGREERRSNARRMAALQRIFRMKEPEEVVARYALTQSMQLTGARVGRVVLHDPETRVIRHIVDHGDPLFGTEGWQWASVAHGGAGGDDTDGGAAGGRGPDEPEGIAGPRRVPPQPDAGHVAEPDRARLDDLMTRAAAGMGPLASELTHGRHGPHARHLAVPVRLDGRLGAVAVLLDKPTPFTRADIKQLDLLMRGMLEHLERRRSLHRLSLAKEHAESANRAKSEFLANMSHELRTPLNGMLGMLQLLEAGDLDRDQNELVHIALDSGRTLLRVLSDILDLSRIEAGRMELRHDRFSPEEAVRQVYDMFAQDARIRGLRLRWRCDELPCEVWGDGTRLRQILFNLLGNAMKFTHEGTVGVEVCAVRRTEESVRLLFSVSDTGIGIPHDRLMSIFEPFTQLDGSTTRRYSGTGLGLGIVRRLVHLMGGGLNVESALGEGTAVHVCLPFRLPSGGGVTCDVMDSTPALRRPLKVLVAEDEAVNRMTLSRCLHHLGHEAVCVTNGLEAVEALREGRFDCVLMDIQMPELDGLEALARIRAEAGEQARALPPVVALTAHAMEGDRERFLAAGMSAYIPKPIELGELERVLLRLAAAMP

SEQ ID NO: 3331 - protein, 338 aa, Methanocaldococcus jannaschii DSM 2661
MDFIVIDGSYLEGGGQIIRTAVSLSALTQKPVKIINIRKKRKNKGLAPQHVSAVKAVKKLCNAEVFGLNVGSEELTFIPSKLSPKDFTIDIGTAGSISLVIQTLLPLSLGINKKFTVKIKGGTDVKRAPPIDYVKNVTLKILRNFGVLTELKVLKRGFYPEGGGEVIFEVKPSKIKKFDLIEHSKSNLVEGISYVQNLDESIARRMRKKAVDLLNKEKLLPNIKIECSKGISTGAGIVLWNDTLGGSCLGEKGLRAEIVAERAVNELLKERESGMALDKYMGDQIIPFLAFGKGIVGVSEITNHTKTNMWVVKHFLDVDFEIKEYKENNCNGFTIEVV

SEQ ID NO: 3332 - protein, 423 aa, Gloeobacter violaceus PCC 7421
MEANLDKPNDARPVRLRRHAVWAAALASAALAGCSAEVLSSTAGPAPKEVLTETWTYINNEYVDPKFNGQDWWSVRQTYLEKPAETSEQVYEQIASMLKTLDDPYTRFLNPKQFKSLQTTTSGELSGVGLQITLDTESELPVVIAAVEGSPAFRGGVKARDLIVEIDGRPTKGQALDDVADRLRGKIGSQVNVGLRRGERTFDVTLTRETIQVNPVTSQLKRLDGRPIGYIRLSQFNGNAAQQVRQAIEKLEAQDAAGYILDLRSNPGGLLEAGVEIARYWLTPGQTVVYTVNRQGERDQARAQRAPLTARPLVVLIDGGSASASEILAGALQDNRRAQLVGTKSFGKGLIQAIHPLKDGSGLAVSIARYQTPSRRDIHKQGIEPDVKVELPKSFSLEQLATDADSQYQAGAKALSRALASSQ

SEQ ID NO: 3333 - protein, 756 aa, Prochlorococcus marinus str. MIT 9313
MTTSVALDWVVQDGQRLAECRHDDPFSLLGPQSHEGQWIVRIWMPEASQVELLCDGRTTAMTTPNHSWIFEAALNQNPGRTYQVRVKRAGIVHEQHDPWAFHDEWMGEMDRHLFAEGNHHHIWQRMGAHLMEREGVEGVMFCLWAPHACSVAVLGELNGWDGRHHPMQRRQGGLWELFIPGFKEGTLYKYEIRTQEGHCYQKADPYGFQHEVRPATSSVVARLDRYQWQDEQWMRQRDSRNALDQPISVYEMHLGSWIHAATDEPYIELDGTPRAPVPAADMKPGARLLTYPELADQLIPYVKDRGFTHIELMPISEHPFDGSWGYQVTGWYAPTSRFGSPDEFRAFVDRCHAEGLGVIIDWVPGHFPKDGHGLAFFDGTHLYEHSDPRIGEHKEWGTLIFNYSRNEVRNFLVANLVYWFEQFHIDGIRVDAVASMLYRDYLRPDGEWIANEDGGRENTEAVRFLQQANHVLFQHFPGALSIAEESTTWPMVTQPTDIGGLGFNLKWNMGWMHDMLDYFELDPWFRQFHQNNITFSIWYAYTENFMLALSHDEVVHGKSNLLHKMPGDDWQKFANVRALLAYMWTHPGKKTIFMGMEFGQRSEWNVWGDLQWELLKHDPHKGLQRLVDDLNTFYKGEPALWKDDFDQYGFQWIDCNDNRHSVISFMRRESSGGTWLVVVANFTPQSHSNYRIGVPMSGYYQEVFNTDSSCYGGRNLGNMGGKNTDEFNIHGYEQSLELCLPALSVLVFRHDPKRSL

SEQ ID NO: 3334 - protein, 367 aa, Vibrio fischeri ES114
MKNALFQPMQLGNLTLKNRIVMPPMTRSRASQPGNVANDMMAKYYAQRASAGLIIAEGTQISEMGQGYAWTPGIYSQEQILGWKKVTDAVHAKGGTIFAQLWHVGRVTHPENIGGQQPISSSALKAENVKVFIDNGTDAPGFVDVVEPREMTQQDINDVIAEYRQAALNAIEAGFDGIELHAANGYLINQFIDSEANNRTDEYGGSIENRLRFLGEVVEAVNEAIGYDRVGVRLAPFTSLNGTVDKTPVETYTAAAALLNKHNVVYMHIAEVDWDNAPETPEEFKTAIREAYQGTIIYAGRYNTGKAAQALTDNLADLVGFGRPFIANPDLPNRIKNDYPLAEHDPNTLFGGTQQGLVDYPEYQEAH

SEQ ID NO: 3335 - protein, 468 aa, Idiomarina loihiensis L2TR
MREAIWFRSDLRILDNPAVFSACHGDEPPLAIFFVCHETWKSHDWAPIKVDFIWRNLECLQQDLAEKGIELQVQLVPKFSQVPGALRSFCRENKIARVHINAEYALDEKRRDAATNAVLSNDDIELVSHHGNLLVSPGEVRTQQGDYYKKFTPFNRRWRQVLSEKTYSEPLQIKSYSRVTAKGLPECPLGRKDSSDWSAGEQQVLGKLGQFVGHSVDDYQQARDLPAENGTSQLSAYLAQGVIGPQTAVRALHKFSPEFPFGLASGADTWLTELAWREFYQHLMYFVPRLSKGESFQSETDSIQWLEDDDAFQRWCDGRTGYPIVDAGMRQLTSTGWMHNRLRMITANFLVKDLLVDWRKGEAFFMQHLIDGSFPANNGGWQWSASVGTDAVPYFRVFNPVKQSEKFDPDGQYIRKWVEELKEVPTKYIHWPHSWLQQQSSNNYCDPMVEHKFARERFLTTFKQVKNG

SEQ ID NO: 3336 - protein, 471 aa, Rhodobacter sphaeroides 2.4.1
MMADAPLILWFRRDLRLADNPMLAEAAATGRPLIPLFILDPETEALGAAPKWRLGLGVEAFARALEGLGSRLVLRRGPALAVLEALVAETGAAGVHWSRLWEPDWRARDEGVKAGLRQAGIEAASHAGHTIFEPREVETGQGGFYRVYTPFWKAVKDRPVAASSPPPARLLSPAEWPVSERLACWDLGRAMHRGAAVVAPHLAVGEAAAAERLTRFLSGPLDRYAAERDRPDAPVTSRLSENLTYGEISARSLWHAGMRARAEGRAGAEKFLQELAWREFGWHLLYHTPEIARRNWRGDWDAFPWRGDNPDAERWRRGMTGEPFVDAAMRELFVTGTMHNRARLIAGSYLTKHLLTDWRVGQAWFEDCLIDWDPASNALGWQWVAGSGPDASPYFRIFNPATQAEKFDPESAYRQRFLAEIARRPGPEALAFFEAVPRSWGLRPDRCYPRPVVGLAEGRERALAAYGRRNN

SEQ ID NO: 3337 - protein, 310 aa, Triticum aestivum
MARHFLLNTGAKIPSVGLGTWQADPGVVGAAVYAAVKAGYRHIDCARVYGNEKEIGLALKKLFEEGVVKREDLFITSKLWNDHHAPEDVPEALNESLNDLQLDYLDLYLIHWPFRVKKGTNNNPENIVTPDIPATWAAMEKLHDAGKALAIGVSNFSSKKLGDLLDVARVPPAVNQVECHPCWQQTKLHNFCQSTGVHLSAYSPLGSPGTSWMNGNVLEEPIIISIAEKLRKTPGQVALLWNIQMGHGVLPKSTNPERIKQNLDVYDWTFPADMLAKFSEIKQARLLRGNMMINPQSVYKTYEELWDGEI

SEQ ID NO: 3338 - protein, 552 aa, Nostoc punctiforme PCC 73102
MAKPIEFNLFAPYNKGAALIGSFSDWQEIPMEKGNDGYFRTSVELKDGVYKYKFRVQSNSWFFEPEQWVDVTDPYATDIDELSGKDDSVIHVKDCERITDTYVWQNDDKPLPADHELVIYELHVGDFSGGEDDPYARGKYKHVIEKLDYLSELGINAIELMPLKEYPGDYSWGYNPRHFFATESSYGSTAELKKLIDECHGRGIRVIIDGIYNHSEASAPLTQIDHDYWYHHEPRDPDNNWGPEFNYEHYDEKLEIHPARKFIGETIRFWIQEYHLDGIRYDAARQIANYDFMHWIVQEAKNTAGAKPFYNVAEHIPETTSITNVDGPMDGCWHDSFYHCILEHICGDTFDLERLKDVIDCKRQGFLGATNVVNYLTNHDHNHIMVELGNREIFDEEAFRRAKLGVAILMTAVGVPLIWMGEEFGEYKPKQPESSKIDWTLLGNDLNRSLFESYKGLTNLRKSNHALYTENIDFIHENPEAKVLAYTRWNDEGSRVVVIANFSENFLAGYHVPNFPSAGTWHEWTGNYDVESGDDGIITDLGPYEAKVFVWQ

SEQ ID NO: 3339 - protein, 323 aa, Debaryomyces hansenii CBS767
MPSFNKSFVMNHTCLRIKDPKVSIPFYTENLGMKLIATLPFPDSKFTLYMLAYDNGDNNNDVSWSAREGVLELCHNHGVENDESYTLNNGNGEKFRGFGHICVSVDNIEAAEAQFLSKGVKFQKKLSDGRQKNIAFALDPNGYWIELIEHGQGKASDKTDSTHYKLNHTMIRVKDPKKSLDFYRNVLGMKLFSTSVHEGAKFTLYFLGYEHDASFKEDTLSRDEQSKKQGLIELTHNWGTESDNDFEGYHNGNSTENGAIQGYGHTCVSCSDPGKFCKEINEEFGEANIDWAVQWGKGGIKQLAFIRDPDGYSIEIINSVFKQ

SEQ ID NO: 3340 - protein, 700 aa, Zea mays
MSVSPSSLCGGDPAMRIVVWFRRDLRVEDNPALAAAARAGGEVVPAYVWSPEEEGPYYPGRVSRWWISQSLNHLDASLRRLGAGKLVTRRSADAAVALLQLVRDTGATHVYFNHLYDPISLVRDRRLKEMLAAEGIVVQSFNSDLLYEPWEVVDDEGQPFTMFDPFWNRCLSMPYDPPAPLLPPKRINSGDLSMCPSEDLIFEDESERGSNALLARAWTPGWQNADKALTAFLNGPLADYSVNRKKADSASTSLLSPHLHFGELSVRKVFHLVRMKQLVWSNEGNHAAEESCTLFLRSIGLREYSRYLSFNHPSSHERPLLAHLRFFPWVVDESYFKIWRQGRTGYPLVDAGMRELWATGWLHDRIRVVVASFFVKVLQLPWRWGMKYFWDTLLDADLESDALGWQYITGSLPDGRELDRIDNPQFEGYKFDPHGEYVRRWIPELARLPTEWIHHPWDAPVSVLQAAGIELGSNYPLPIVELDAAKGRLQAALSEMWQLEAASRATMNNGTEEGLGDSSEVLFPQELQMEVDRQPAPAEAAANVHVPVPMPARRRGDQMVPTMTTSSLNRAGTEVSADLVVANSEEEDTRAQVPFHAHLHPRAEAPPAARRTNNGARQHDVFQQPRNHRREALLAPSASEASSSWTGREGAVVPVWSPPAASGHSDAFAADEADVSSRSYLGRHPQSHRLMNWSQLSQSS

SEQ ID NO: 3341 - protein, 1046 aa, Methanosarcina barkeri str. fusaro
MNVSRKILAIIYIIFALLISVVIFASQSILGSTFSDLQEKEVTDNVEKVESMIELQILQLEKINSVLSSRDDVRNLMLNQDFQNLSSGTSLDDIFSISGCDFIFLVNNSGYIVYSDISDPEPSTNASALNASILNVSILNVSTLNASPLPKVRQRINDGSFLCKGAETSLKGLFMLKNDPAIISSQPVSAAPESKEISGTIILGKYLDSSFIESVQESTGSTFTLYSFNNASSDLLQAFFENPGPNFTYTVTGEHTTCYSVLEDLSGSPAIVIRADAGSNIYAEGQEALRYIVFFLLFAGLMIGASCKFLLDREVVSRIVAIDNFVEKVGMNENFSERYFMEGDDELSRLSKGINQTLDRLRTTSNEFKAQEHEKKLILDSLSELVVFMDSELKIIWLNKAALDHMGMKINDVIGRHYQDMYILYKENPGKSPVLKVLESGNEEFGEVVTQDGKIWTVTAIPIKNEDGRITGILKTGLDITAHRRSEEKLIQAKLEAEEANNSKSEFLANVSHELRTPLNSIIGFSDILIEKVFGELNEKQFRYVNNISTSGKHLLVLINDILDLSKVEAGKMELHYSEFSIDPVFEEVKAVLFPLIQAKPLEVTFNVEPDFTTLEADRGRLIQILYNLISNAIKFTPNGGKVSVYCKESGNRALISVIDTGIGISAEDQVKLFQPFTQLDASTSRQYCGTGLGLALVKKIVNLHQGDIWVESDPGKGSNFTFALPLRKPLERRKVSEIGIEDVTIEFEMNKAEALSVKENAENLQEEVKLPEICHSEKGDVKQELILVVDDDKSSSELHSTILKDAGYSVAILYSGKRVLEVAKNLKPDIITLDVFLPGTNGWLVLRQLKNDPYTTSIPVLIISMTNNNELGITLGATYSFAKPVNRIELVNSLREITGKFRFEYPKVLIVDDDENTVELLSSMIEPEGFETIKAYSGRECLQKLFFSEQQPDILILDLMMPEISGFDIISSMRADVHTKDIPLIVCTSGELTEKNLEELNSELERHLISILKKGTFGRKELINRIKQLAMLKRRNDEKNPDCRR

SEQ ID NO: 3342 - protein, 861 aa, Saccharophagus degradans 2-40
MTNSSTTHLAKNQRIRLINSTWAAGGGVLLSFVAYYSTTMGLFLGDKNVLIWVLVGFWLGNFAFIGTIASGLNKRFRDPALTLPQMYWAVSTTNIALMFTTQLDVLYYLLIMLTMVFGIFRLSVRQFNVFCYFAIAQLLLSLFVRYSLYASDAIGTLIINWVAFGFCAITLTALCNSIVRLRHRLKQKNEELSEALKAKSEFLANMSHEIRTPMNGVIGMLDVALLSETSPEKHRYLSVARNSAQSLLGIINDILDFSKVEAGKLELEAIDTDIDDLVHEVLVNFSGLAEQNDVELIADISPTISHLVKCDPGRIKQILNNLVGNALKFTPHGEVLVKARAEKLVSGRIQLHFLVRDTGIGIAAQNQKHLFDSFTQADTSTTRKYGGTGLGLSIAKRLCETMNGAISLESYEGKGSTFAFFIEVEASEERPPKAILPEYIRDFRVLVVDDNATSRAVITKYLEYLEVHVVAVENGKQALTRLANNTTFDAVIIDRQMPGMTGDTLAQQIRMQQNDERVPIIMLSNMKAEGASNLITELRLAAYITKPLRANQLYTALGFTFNSACYISENAPNSDTADTPTDTAPLPTITKPTNKERKKILLVEDNKTNQEVALLTLEILGYNADVANHGGEAIEILKQQSDSEQHYGAILMDCQMPVLDGYKTTETIRSDAALSAFKYIPIIALTANALRDDKEKCLAAGMNDFLSKPIDSAKLGATLAHWLHEEAQPEISPPPKKKSAVTEAEESLVWNRAELERLVGNNAQRAYKLISGFVASLVAMRTELEAHIDGKRYSDAANTLHGLKGAASNMRVNKLAEAAGNFEHALKYESTATIASSQEHFVEQLEIAVSHLSEYLETHEQ

SEQ ID NO: 3343 - protein, 1653 aa, Saccharophagus degradans 2-40
MNKSSFNYLTRNSKWLIPTFAAIVLLTLAIAVDRVIYSRFALEERTAVHNEASKLRASIESTINSNLQAVQGLVLVLNAFPEPSQEEFASFAAPLFNQNTQLRNIAAAPGMVIKYMHPLEGNEAAIGLDFRATPAQKEAAERAERTGQLVLAGPVNLKQGGQGFIGRIPVFTYNKQNNTKSSWGLLSTVIDLDRFYSATGITQFNETLQLALRGKDAKGAQGQVFYGDEALFHADAVLLEVSVPSGSWQLAILPKQGWANSAEDSALLRIILLLIILAILIPIIISVNLLANRHDSDLKFRGLFELSPVGIALNRFTDGKYVETNTALENMLGYSADELHGKTYLEITSPVYEDHQKAVINSLKNYGRYGPYEKEFIRRDGTLLPVIMNGMLVTDSNGEKLIWSIVEDITSRKQAELALAQNRKQLEQIIDSTSVAIWDWNIVTGEIVINERWAEIIGYSLMDLEPVSIDTWTNFTHPEDLDKSSELLNAHWNGESNHYQCEARMHHKDGHWVWVLDSGKVIEWTSEGKPLRMVGTHLDITEQKESQRLIEQSQIELKNFFDLSPNFMCIIDREGFFERINDTFLSQLDFTRDDFFSCKYIDFVHPDDREITQDHFEKMKSGALTQVFTNRYMHSNGDYLYLQWYTFADPASGMVYTTALDITNQKLDEKRMARQQEMLLSMSEQGRIGAWEVNLEEQQMYWSTMTKDIHEVDANYTPHYESAIDFYKEGESRDTISRLLNLAINKGIPASIELPIITAKHNERWVSVTVQPEFRNKQCIRLFGSIQDIDARKRIEQGVQLANTKLEKQMTLVNAIAAAQASFIQQTDIAIAFRNLLDGVLELAESEYGFVSEILYTEKNEPYIRTHAIANRSTHDRYNAFFAAQGENPIEFFNLDSLLGAAVTSCKPVIANSPTTDSRRAGVPDGHPQLESYLGIPIILNGSIIGLIGLANNPNGYNQALVDWLAPLINTVGQMIENTRAIRERDNAQQALVKAKNAAELAARTKSEFLAMMSHEIRTPLNGVLGMLNLVKRTQLEDKQRYQIDIAKSSAESLLNLINDILDFSKVDAGKLDLEVVDFNIITLLEDIAHAMAGRALERGNELIIDTTKLEFTYLSGDPSRLRQILVNLIGNAIKFTQNGEVTVTASLTKNTSGFNLNISVADTGIGIAEEKIPLLFSAFTQVDASTTRKYGGTGLGLAICKKLCALMGGDINITSQEGNGSEFSFQILVKNSVKNIDLPPLIEQKVDLNDKTIFIAESNPKNTAILENMISSKRCIAVSSLPDSNLNLPNEPIDVAFIDRKLLTSMESITPLKNKPNFANTQWLMLTAINQTKDIENYTAKGFDTYLTKPITQSGLTLSLKSLKLDSNQAESEQQQTSEKLTLPQSPQGEASQFAARILLVDDNTVNQDVAKMMLEDFGLIIDVANNGLEAIAALDACSIREPYSLILMDCQMPELDGYETTKRIRKGATDFDNTKIPIIAMTANAMKGDKEKCIAAGMDDYLSKPIEADALEHMLKLWLPLHNFSQDSNTQATSQHPQVVEGFWQHDELLATLKGREDRLKILVASFTKRIPALLEEFEEATASNDLEALSFIAHSVKGSAGQLKCNLLFVCASELELTAKNGDLTTALELSQNFKQYTLDFYNLLNKYLA

SEQ ID NO: 3344 - protein, 497 aa, Zea mays
AVVAAHNHTSDTITASHLPVPSIAKGHIGRPRARGKKDQVTDEQEGGIMAYAAGRKKRVGRYEVGRTIGQGTFAKVKFAVDADTGAPVAMKVLDKETIFAHRMLHQIKREISIMKIVRHPNIVRLNEVLAGKTKIYIILELVNGGELFDKIARYGKLRENEARKYFQQLIDAIDYCHSKGVYHRDLKPENMLLDSRGNLKVSDFGLSTLSQNGAGLLHTTCGTPNYVAPEVLGSNGYDGSAADIWSCGVILYVLMAGYLPFEENDLPSLYEKITAAKYSCPYWFSPGAKSLIQRILDPNPRTRITIEEIREDPWFEKNYVAIRCGEDENVSLDDVQAIFDNIEDKYVSDEVTHKDGGPLMMNAFEMIALSQGLDLSALFDRQQEFVKRQTRFVSRKPAKTVVATIEVVAESMGLKVHSRNYKVRLEGPASNRASQFAVVLEVFEVAPSLFMVDVRKVAGDTPEYHRFYENLCSKLCSIIWRPTEVSAKSTPLRTTTC

SEQ ID NO: 3345 - protein, 356 aa, Bdellovibrio bacteriovorus HD100
MNNHALFQPFQFKGLTLKNRIVMAPMTRQKSPDGVPTEDVAKYYQRRAEGEVGLILSEGTVINRPASSNEKDVPHFHGEKSLHQWQAVIQAVHSAGGKMAPQIWHMGKMKPSSSGWLPKAAFEGPAEMTLEDIQNTINAYAQAALDAKNLGFDTVELHGAHGYLIDQFFWPGMNTRTDRFGGNTIAARNTFAVEVVKAVRAKVGADFPVILRLSQWKQQDYNAKVATTPKEMEEWLLPLSEAGVDIFHCSQRRFWEPEFADSDLNFAGWAKKITGKPTITVGSIGLSGGDFLNSFRGQGAEVGGLEELTRRLDRGDFDLVAVGRALLTDPQWVKKVKEARTNELKGFNPADLAVLT

SEQ ID NO: 3346 - protein, 554 aa, Desulfitobacterium hafniense DCB-2
MTKFSMFCSKLIKANTKAGRILTASALALILTVSAPAAALGSPVDDVRSLLESQYVDPVDPWVLSASSVEEMLKRLDDPHTVFFTQKEYQNFLNSMDLSFSGIGVYIELEPRGLEIVGIIPGSPAEEAKLKTGDIIAQVGGQSLAGLSQDAATTLIKGPEGTTIDIVVLRGEERLSLKVARRAVEVPTVSGEMLNEDIGYVAIESFGETTEELFEQVIKELDKQGADAWVMDLRNNPGGYLDSALSLAGYFIGEQTALQTKDRSQKFEPYQAEKQEFIIAEPVIFLTNENSASASEILTAVVKDYQKAVVVGTNTYGKGSVQSLWQLTDGDVLKITVAKFYSPYGKEINGVGISPDVEILENDPLEMAVLMLAGSIQGNDDGQEVADLVQFTAGGKDWNISLEEARNPEYWSAYRELIQNNSFPGGFSWRHNSDWAAISQSEQDALWPLFYPGYHGMKELKDLAVDKTFTVRFTAPIDFKSVTENSFELIESESGKRMPVTFEQVDERSVKVIPQGLLEPEKTYWLLTHQGIAAKDGSILKEGALTVGTTGAGH

SEQ ID NO: 3347 - protein, 371 aa, Helianthus annuus
MAGVVKEFDSSHDMFKVREEPKVVFNNKDLSEEMMKIKEEPMLVFDEHEDFVGGEEAPKPIEGLRDGGPPPFLKKTFEMVDDPTTDSIISWSSSKNSFILWDPHKFSTDLLPQRFKHNNFSSFVRQLNTYRFKKIDPDRWEFANEFFQKGKKHLLRDIKRRTNQPQNTQKQEEIRKQEQQQCCGHQTNSTMETELKNLRKERITLKQEILKMKQQQENTEKHLEMVEERMLRMEFKQQQLLVFMSKAFRNPIFVKLLQHLVQKQKTGSVEMCKKRKLEQMLNTDDLDRFQEMWNMIEPDAYTVLSSDGSVSPPEDQNTSDKSGSNGSDYNSESFILWEKLMEDELIFGGEQSGKDQTETYLQEWEELIPKA

SEQ ID NO: 3348 - protein, 404 aa, Shewanella oneidensis MR-1
MRPIIKSNKLDTVCYDIRGPVHKEARRLEDEGHRILKLNIGNPAPFGFEAPEEIVRDVILNLPSAQGYCESKGLFSARKAIVQHYQAQGIYDVDIEDVYIGNGVSELIMMAMQGLLNTADEILIPSPDYPLWTAAANLAGGKAVHYRCDEEADWFPDLDDIKSKISSRTRGIVLINPNNPTGAVYSKELLLQVVELCREHNLILFADEIYDKILYDEAKHIPAASLSDDILTVTFNGLSKAYRAAGFRIGWMMLSGNLKAAKSYIEGLDMLASMRLCANVPNQHAIQTALGGYQSINELILPSGRLTVQRDTCYELLNQIPGVSVKKPKGALYAFPKLDMKKFNLRDDERLVLDLLRDKKILLVHGTAFNWPEPDHLRVVFLPYKEDLTKALTEFGNFLETYKQ

SEQ ID NO: 3349 - protein, 236 aa, Shigella flexneri 2a str. 301
MGYRSIDTAAAYKNEEGVGKALKNASVNREELFITTKLWNDDHKRPREALLDSLKKLQLDYIDLYLMHWPVPAIDHYVEAWKGMIELQKEGLIKSIGVCNFQIHHLQRLIDETGVTPVINQIELHPLMQQRQLHAWNATHKIQTESWSPLAQGGKGVFDQKVIRDLADKYGKTPAQIVIRWHLDSGLVVIPKSVTPSRIAENFDVWDFRLDKDELGKIAKLDQGKRLGPDPDQFGG

SEQ ID NO: 3350 - protein, 621 aa, Listeria monocytogenes EGD-e
MCGFVGCVHDRITEITGADKETFRQMNSMITHRGPDDEGYFTDDHVQFGFRRLSIIDVENGHQPLTYENERYWIIFNGEVYNYVELREQLVAEGMTFETESDTEVIIATYAKYKEKTAERLRGMFGFVIWDKQEELVYGARDPFGIKPFFYAEEDDKLFMGSEKKSILHALKEKELDEVSLQNYMTYQFVPEPDSLTKNVKRLEPGHQFTKKIGQPMEITTYWKASFAPVTKSEDAWIKEVRDVMYDSVKMHMRSDVPVGSFLSGGIDSSIIAAIAKEYHPAIKTFSVGFERDGFSEIDVAKETADKLGVENISYVISPEEYMKELPKIVWHMDDPLADPAAIPLYFLSREARKQVTVALSGEGADELFGGYNIYNEPNSLAMFNKMPGVFKSMLNNLARIMPEGMRGKSFLERGTTPMEERYIGNAKMFTEKEKQILLPKYQAGHDYTNITDPFYAETTNYHPVERMQYIDIHTWLRGDILLKADRMTMANSLEVRVPFLDKEVYNVARNIPDTMKTTNGTTKYILRKAAATFVPEHVLNRRKLGFPVPIRHWLKDEMNAWVKNIIKESPTDHLINKQYVLDLLDDHCAGKFDYSRKIWTVVIFMIWYDVYVADKYDFGK

SEQ ID NO: 3351 - protein, 216 aa, Triticum aestivum
MVAAAMQALFDQTDLSLSLSLVPAAAPALNKDDYLAICLAALAKSGQQVQGMEGQARVWRPAPAPAQELRFSCAVCGKAFASYQALGGHKSSHRKPPPTGERCVVVAQASAGTGSEASAAASSGGSSGGPHQCTVCGRGFATGQALGGHKRCHYWDGTSVSMSVSVSVSASSSVLRNFDLNLLPMPENVNAGLKRCAEEEEVQSPLPPRSSGFCCR

SEQ ID NO: 3352 - protein, 388 aa, Saccharomyces cerevisiae
MNCTLTDNTRAINVASNLGAPQQRTIFAKERISIPGYYEIIQFLGKGAYGTVCSVKFKGRSPAARIAVKKISNIFNKEILLKRAIRELKFMNFFKGHKNIVNLIDLEIVTSSPYDGLYCYQELIDYDLAKVIHSSVQLSEFHIKYFLYQILCGLKYIHSADVIHRDLKPGNILCTLNGCLKICDFGLARGIHAGFFKCHSTVQPHITNYVATRWYRAPELLLSNQPYSKSVDIWAVGCILAEFYARKPVFMGRDSMHQIFEIIKVLGTPDKDILIKFGTIKAWNLGKNSNNPVYKKIPWSNIFPFASHEAINLIESLLHWDSTHRLNVEQAISHPFLNEVRKPDDEPVCLQGPFDFTYESELNSMSKLRDYLVEEVKNFKTDLSSSSL

SEQ ID NO: 3353 - protein, 545 aa, Campylobacter jejuni
MAKEIIFSDEARNKLYEGVKKLNDAVKVTMGPRGRNVLIQKSFGAPSITKDGVSVAKEVELKDSLENMGASLVREVASKTADQAGDGTTTATVLAHAIFKEGLRNITAGANPIEVKRGMDKACEAIVAELKKLSREVKDKKEIAQVATISANSDEKIGNLIADAMEKVGKDGVITVEEPKSINDELNVVEGMQFDRGYLSPYFITNAEKMTVELSSPYILLFDKKITNLKDLLPVLEQIQKTGKPLLIIAEDIEGEALATLVVNKLRGVLNISAVKAPGFGDRRKAMLEDIAILTGGEVISEELGRTLESATIQDLGQASSVIIDKDNTTIVNGAGEKANIDARVNQIKAQIAETTSDYDREKLQERLAKLSGGVAVIKVGATTETEMKEKKDRVDDALSATKAAVEEGIVIGGGAALIKAKAKIKLDLQGDEAIGAAIVERALRAPLRQIAENAGFDAGVVVNSVENAKDENTGFDAAKGEYVNMLESGIIDPVKVERVALLNAVSVASMLLTTEATISEIKEDKPTMPDMSGMGGMGGMGGMM

SEQ ID NO: 3354 - protein, 159 aa, Glycine max
MDFRVMGLEPPLFHTLQHMMDMSEDAAGENKTYSAPTRSYVRDAKAMAATPADVKEYPNSYVFEIDMPGLKSGDIKVQVEDDNVLLISGERKRDEEKEGVKYLRMERRVGKFMRKFVLPENANTDAISAVCQDGVLSVTVQKLPPPEPKKPRTIEVKVF

SEQ ID NO: 3355 - protein, 1122 aa, Arabidopsis thaliana
MSGSRPTQSSEGSRRSRHSARIIAQTTVDAKLHADFEESGSSFDYSTSVRVTGPVVENQPPRSDKVTTTYLHHIQKGKLIQPFGCLLALDEKTFKVIAYSENASELLTMASHAVPSVGEHPVLGIGTDIRSLFTAPSASALQKALGFGDVSLLNPILVHCRTSAKPFYAIIHRVTGSIIIDFEPVKPYEVPMTAAGALQSYKLAAKAITRLQSLPSGSMERLCDTMVQEVFELTGYDRVMAYKFHEDDHGEVVSEVTKPGLEPYLGLHYPATDIPQAARFLFMKNKVRMIVDCNAKHARVLQDEKLSFDLTLCGSTLRAPHSCHLQYMANMDSIASLVMAVVVNEEDGEGDAPDATTQPQKRKRLWGLVVCHNTTPRFVPFPLRYACEFLAQVFAIHVNKEVELDNQMVEKNILRTQTLLCDMLMRDAPLGIVSQSPNIMDLVKCDGAALLYKDKIWKLGTTPSEFHLQEIASWLCEYHMDSTGLSTDSLHDAGFPRALSLGDSVCGMAAVRISSKDMIFWFRSHTAGEVRWGGAKHDPDDRDDARRMHPRSSFKAFLEVVKTRSLPWKDYEMDAIHSLQLILRNAFKDSETTDVNTKVIYSKLNDLKIDGIQELEAVTSEMVRLIETATVPILAVDSDGLVNGWNTKIAELTGLSVDEAIGKHFLTLVEDSSVEIVKRMLENALEGTEEQNVQFEIKTHLSRADAGPISLVVNACASRDLHENVVGVCFVAHDLTGQKTVMDKFTRIEGDYKAIIQNPNPLIPPIFGTDEFGWCTEWNPAMSKLTGLKREEVIDKMLLGEVFGTQKSCCRLKNQEAFVNLGIVLNNAVTSQDPDKVSFAFFTRGGKYVECLLCVSKKLDRKGVVTGVFCFLQLASHELQQALHVQRLAERTAVKRLKALAYIKRQIRNPLSGIMFTRKMIEGTELGPEQRRILQTSALCQKQLSKILDDSDLESIIEGCLDLEMKEFTLNEVLTASTSQVMMKSNGKSVRITNETGEEVMSDTLYGDSIRLQQVLADFMLMAVNFTPSGGQLTVSASLRKDQLGRSVHLANLEIRLTHTGAGIPEFLLNQMFGTEEDVSEEGLSLMVSRKLVKLMNGDVQYLRQAGKSSFIITAELAAANK

SEQ ID NO: 3356 - protein, 545 aa, Haemophilus influenzae 86-028NP
MAAKDVKFGNDARVKMLKGVNVLADAVKVTLGPKGRNVILDKSFGAPTITKDGVSVAREIELEDKFENMGAQMVKEVASKANDAAGDGTTTATVLAQAIVNEGLKAVAAGMNPMDLKRGIDKAVSAVVSELKNLSKPCETAKEIEQVGTISANSDSIVGQLISQAMEKVGKEGVITVEDGTGLEDELDVVEGMQFDRGYLSPYFINKPETATVELDNPYLLLVDKKISNIRELLPVLEGVAKAGKPLLIIAEDVEGEALATLVVNTMRGIVKVAAVKAPGFGDRRKAMLQDIAILTAGTVISEEIGMELEKATLEDLGQAKRVVINKDNTTIIDGIGDEAQIKGRVAQIRQQIEESTSDYDKEKLQERVAKLAGGVAVIKVGAATEVEMKEKKDRVDDALHATRAAVEEGIVAGGGVALVRAAAKVAASLKGDNEEQNVGIKLALRAMEAPLRQIVTNSGEEASVVASAVKNGEGNFGYNAGTEQYGDMIEMGILDPTKVTRSALQFAASVAGLMITTECMVTDLPKDDKADLGAAGMGGMGGMM

SEQ ID NO: 3357 - protein, 244 aa, Gossypium hirsutum
MVYPNESLEDSPQKKMGRGKIEIKRIENTTNRQVTFCKRRNGLLKKAYELSVLCDAEVALVAFSSRGRLYEYANNSVKATIERYKKASDSSNTGSVAEVNAQFYQQEADKLRNQIRNLQNANRHMLGESIGGLPMKELKSLESRLEKGISRIRSKKNELLFAEIEYMQKREIDLHNNNQLLRAKIAENERKQQSMNLMPGGSSANFEALHSQPYDSRNYFQVDALQPATNYYNPQLQQDQIALH

SEQ ID NO: 3358 - protein, 140 aa, Pediococcus pentosaceus ATCC 25745
MANEMMNRRNDMWDPFFDRLSRGFFNNGWDGTSKTLKTDVSESDTDYKVKIDVPGIDKKDIKLDYQDGVLNVEVKKDSFADHEDEKHNVTMTERSYGIMRRSYELPRVKAEDIKAKVDNGVLSITLPKASGEKTSGIEIE

SEQ ID NO: 3359 - protein, 379 aa, Aspergillus nidulans FGSC A4
MDSSKLFTPLKVGNIQLAHRITLPPMTRFRVDEGHIPQDQVAEYYAQRAAVPGTLLITEATLISTRPGVYTHVPGLWSKEQIAQWRKVTDAVHAKGSFIYNQLWALGRVADPEATKKEHGGSEGRVIAPSAVPLDPSGEPPKEMSEEDIAGVIQDFATAAKNAIEAGFDGVEIHGANGYLVDQFIQKAANKRSDRWGGSVENRARFPLEVIRAVVDAIGAERTAIRYSPWSTFQGMGVDPDEEQIAQFAYLAKKTAEFKLAFVHLVEGRIAGNTETDENGGRNLHFFFDAYGRAGPIMVAGGYVGETAREAADVQYKDYDVMIAIGRPWTANPDLPFKVKKGIPLRPYEREHFYTVRSPKGYIDYDFSEEFKAATGTRL

SEQ ID NO: 3360 - protein, 270 aa, Helicobacter hepaticus ATCC 51449
MQTLTLNNGVKMPILGLGTYSLTGKAGQKAMSEAIEVGYRLFDSAQMYNNEAELGAAINAAVKGGIKREEFFIQTKLLESSSEDLAKKSIEKSLKTLGLDYIDSLLIHMPYSQSKAMYRAMESFYKQGILRVIGISNFGAKAYSEFVKSCEVIPAINQCETHLLLQQKPLREAMKSKKTLLQSWSPFIAGKGSILENPTLKSIAQKYNKTPAQVVLRFLIEQGISVIPKTSKRARMQENLNVFDFSLSAQDTQILKELDTNKSAFSWTNY

SEQ ID NO: 3361 - protein, 441 aa, Triticum aestivum
  misc_feature (422)..(422): Xaa can be any naturally occurring amino acid
TPAGAPRSGERLVSAARDGDAVEARMLLELSPALARYSTFGGLNSPLHFAAAKGHLHAAALLLEKGADVNARNYCGQTALMHACRHGHWEVVQMLLLFRCNVTRADYLSGRTALHFAAHDGLVRCVRLLLADFIPSGPLEDTASSVADGGDSQTNSGSSPTSSLGLKFNEPARVRYINKPADGGVTALHMAALNGHFDCMQLLIELGANVSAVTFPYGTTSNLIGAGSTPLHYAAGGGSLECCQVLLSKGASRLTLNCNGWLPMDVARIFGRRCLEPLLSPNSHTIIPAIQPSSYLALPLMSILNIAREFGLQHTVSSVDESDLCAVCLERSCSVAAEGCGHEFCIKCALYLCSTSNVRVEFTGPAGSIPCPLCRNGIMSFTKLPSTPTEGLKSSSALTFCNPCILNTRSVDSPATVCKAEXIRPNRVAAPSSRVGRPLTC

SEQ ID NO: 3362 - protein, 118 aa, Brassica napus
  misc_feature (115)..(115): Xaa can be any naturally occurring amino acid
MKFCKKYEEYMQGQKEKKNLPGVGFKKLKKILKRCRRRDHQIASINHQHGNNCPRECTVCDGTFFPELLKEMEDVVGWFNENAQKLLELHLASRFKRCHTWLKGNNNRKRSHLGXIQE

SEQ ID NO: 3363 - protein, 279 aa, Ralstonia metallidurans CH34
MHGSPLARSPSHLHRLSSASAFTPSAVAEGVFLELRPSGHLCHTDDPRRGEGHNPHRHHPDPVHHPVPARPPGGHRGVSGLLNVIATACKVIATAASRGALAGVLGSAEHENVQGEVQKKLDVISNAILVHATERGGHLVALASEEMDTIYPIPAAFPRGKYLLVFDPLDGSSNIDANISVGAIFSVLRSPDPEVPPTLEHFLQAGAGQVCAGYALYGPATMLVLTTGQGTHGFTLDRDVGEFILTHPMLRIPAATQEFAINTSRGLLVFSAISDGTQS

SEQ ID NO: 3364 - protein, 496 aa, Listeria innocua Clip11262
MEQSPQNKEEKVEKPEEEKTKPGNGYIKMKLFPFIMLLFAFVFVTALVTTIVMSLGDDKQVKVSIPERKEFTKLYDVYDEISEKYYKDTKSTNMIDGAITGMVNSLDDPYSTFMSKKESAEFNDTISSSFEGIGAEIQEKDGAIVVVSPIKNSPAEKAGLRPQDIITQVDGKSVKGDTATEATKKIRGEKGTDVTLTIQRSNEDKPFDVTITRDEIPIETVYKEMGNDKIAHVTISTFSENTYDELEKALKALEKDGMKGLVIDLRGNPGGLLDQAVSISSLFVPDGKIVVQEQGKDGDKSAIKADSSSHGDYKVKVPTTMLIDGGSASASEILAAAAKESGGIKLVGNKSFGKGTVQTATTLSDDSTLKLTVAKWLTPNSEWIHEKGITPDVVVNMPSYATMTIPSSTKVYKNGDFGDDVKTIETLLKALDYNVGKVDGLYDIDTEYAVQRFQAANNLDVTGIMTGVTTDKLVELTQKHLKETDPQLQKAKALVK

SEQ ID NO: 3365 - protein, 505 aa, Schizosaccharomyces pombe
MFTDYPNDINCESPRMSDLDGFCQNAFSDLNSLNQQVFKANYAVRGALAILADEIQDDLLENPSSYPFSEIVYANIGNPQQMGQSPITFVRQVLSLCQYPTLLDHAEEKWFQNLFPTDVVQRSKMLLKESGSLGAYSASQGIPLVRRHVADFIRARDGFDCEPSDIYLTSGASHAARLIMTLIIARPTDGVMVPAPQYPLYGAQIDLMSGSMVSYSLSEENNWDIDFDQFKKSFDEASKKGINVRLCVVINPGNPTGACISENSMEKVLRFAKAKGIVLLADEVYQNNIYQNKFHSFRRKLGELREKEPDNHWDQVSLISVNSVSKGQFGECGQRGGYLDVVNIPEPAKDQILKLATIDICPPVAGQLLVDMLVNPPKPGDPSYDLFIKEVDEIHEALRLQCRQLYEGTKRMKRVSCLEPHGAMYLHPSVSLPEKLITTAKAQKIQPDEFYAIELLKRSGICVVPGSGFGQPEGDYHIRITFLAKGTEYIERFVKAHNEIMDLYE

SEQ ID NO: 3366 - protein, 365 aa, Ralstonia metallidurans CH34
MPLSHRQTLTRYLIEERRRFPEASGELNALILDVALACKALARVVSFGELGDALSDGSAAPTGGGINVQGEVQKPLDVQSNEMFIRMNEWNGQLAGMASEEMEEPYLIPSSYPRGKYLLVFDPLDGSSNIDVNVSIGSIFSILRAPADVVASGRDVTEADFLQPGAAQVAAGYTIYGPTTQLVLTVGNGVAAFTLDPNLGEFLLTRSDIRVPEQTQEFAINSSNSRFWEPPVKRYVDECLAGKTGPRGKDFNMRWVASMVAEAHRILMRGGVFMYPRDTKDPAKPGRLRLLYEANPVAMLMEQAGGRASTGREPILGVSPTALHQRIGLIFGSKDEVERIERYHQEPASNEAAAPLFAERSLFRD

SEQ ID NO: 3367 - protein, 1283 aa, Haematonectria haematococca mpVI
MIDDAALAAAAEIVASIAPDSRLPNSIPVGVASQVQLPGRDTPAKRKLEIELQNLALRVGKLESQASATSTFPETPNEAIDTLFGGEDTSNTNVPVTTRPKPKVIHAQGSLHSPHLPSYQLTKEALEGLRDHVDDQSKLLDSQREELAGVNAQLLEQKQLQERALEVLEQERIATLERELWKHQKANEAFQKALREIGEIVTAVARGDLTMKVRMNTVEMDPEITTFKRTINAMMDQLQTFASEVSRVAREVGTEGLLGGQARIGGVDGTWKELTDNVREIASVTTAVAHGDLTKKIERPARGEILQLQQTINTMVDQLRTFASEVTRVARDVGTEGMLGGQADVGGVQGMWNDLTVNVNAMANNLTTQVRDIIKVTTAVAKGDLTQKVQADCRGEIFDLKSTINSMVDQLQQFAREVTKIAREVGTEGRLGGQATVHDVEGTWRDLTENVNGMAMNLTTQVREIAKVTTAVAKGDLTKKIGVEVKGEILELKNTINQMVDRLGTFAVEVSKVAREVGTDGTLGGQAQVANVEGKWKDLTENVNTMASNLTVQVRSISTVTQAIANGDMSQKIKVGANGEIQVLKETINNMVDRLSSFCYEVQRVAKDVGVDGKMGAQADVAGLDGRWKEITTDVNTMASNLTTQVRAFSDITNLATDGDFTKLVDVEASGEMDELKRKINQMISNLRDSIQRNTQAREAAELANKTKSEFLANMSHEIRTPMNGIIGMTQLTLDTDLTQYQREMLNIVNNLANSLLTIIDDILDLSKIEARRMVIEEIPYTLRGTVFDALKTLAVKANEKFLDLTYKVDSSVPDYVIGDSFRLRQIILNLVGNAIKFTEHGEVSLTIKERVEQRNVRPGEYAVEFIVEDTGIGIAKDKLDLIFDTFQQADGSMTRKFGGTGLGLSISKRVVNLMGGDLWVISEQGKGSEFHFTCLVKLAHDDAAMIEQQIRPYRGHQVLFVDKAQSKGGASIKGMLEQIGLHPVVVESEKSPALTRLQASGSLPYDAILVDSIDTARRLRAVDDFKYLPIVLLAPVVHVSLKSCLDLGITSYMTTPCKLIDLGNGMIPALENRATPSLADNTKSFEILLAEDNTVNQRLAVKILEKYHHVVTVVGNGWEAVEAVKRKKFDVILMDVQMPIMGGFEATGKIREYERGIGTHRTPIIALTAHAMMGDREKCIQAQMDEYLSKPLQQNHLIQTILKCATLGGPLLEKNRERELALHAEAKSSKHKEGGQGLLRPALESRSFTSREPLSGNGKESPALLSPDEDPMARVYMRSLSS

SEQ ID NO: 3368 - protein, 430 aa, Glycine max
MSEKEKGNNSEGQSTLLHGKYELGRVLGHGTFAKVYHARNLNTGQHVAMKVVGKEKVIKVGMMEQVKREISVMKMVKHQNIVELHEVMASKSKIYIAMELVRGGELFNKVSKGRLKEDVARLYFQQLISAVDFCHSRGVYHRDLKPENLLLDEHGNLKVSDFGLTAFSEHLKEDGLLHTTCGTPAYVSPEVIAKKGYDGAKADIWSCGVILYVLLAGFLPFQDDNLVAMYKKIYRGDFKCPPWFSLDARKLVTKLLDPNPNTRISISKVMESSWFKKPVPRKLAAEKVDLEEEKIESQLETINAFHIISLSEGFNLSPLFEDKRREEMRFATAGTPSTVISRLEEVAKAGKFDVRSSETKVRLQGQERGRKGKLAIAADIYAVTPSFMVVEVKKDNGDTLEYNQFCSKQLRPALKDIFWNSSQNSAPASA

SEQ ID NO: 3369 - protein, 236 aa, Oryza sativa
MGRGKIEIKRIENTTNRQVTFCKRRNGLLKKAYELSVLCDAEVALIVFSSRGRLYEYANNSVKSTVERYKKANSDTSNSGTVAEVNAQHYQQESSKLRQQISSLQNANSRTIVGDSINTMSLRDLKQVENRLEKGIAKIRARKNELLYAEVEYMQKREVELQNDNMYLRSKVVENERGQQPLNMMGAASTSEYDHMVNNPYDSRNFLQVNIMQQPQHYAHQLQPTTLQLGQQPAFN

SEQ ID NO: 3370 - protein, 366 aa, Cryptococcus neoformans var. neoformans JEC21
MTIDQSQINFNVPSTYKLEEIVGEGAYGLVVAGTHLPSGTQVAIKRITPFDHTMFCQRTLREIKLLRHFHHENIISILDLIQPESYEVFNEVYLVQELMETDLHRVIRSQELSDDHCQYFVYQTLRGLKALHSADVLHRDLKPSNLLLNANCDLKICDFGLARSSAKPPPGTSDGGQGFMTEYVATRWYRAPEVMLSFQEYTKAIDLWSVGCILAEMINGKPLFPGRDYHHQLSLILQVLGTPTMDDFNEITSQRSKDYLRALEFTRRQDFSAICPKAKPAAVDLLKQTLTFSPSKRITVEEALMHSYVEAYHDPHDEPNAEPLKPGFFDFEFHQEKLSRDQWKRMIYDEVQDPVPTILSQWTESH

SEQ ID NO: 3371 - protein, 399 aa, Magnaporthe grisea 70-15
MASTASAPGYVRFTGHRHLTQRLVLSTLTGKPVHISGIRSSSPTAPGLAPHEISFLRLLETVTNGSSIQISYTGTTMTYHPGLITGSVPGAGAAVNGDSIEFSLPETNRRGITYYLIPIAMLAPFSKAHVNICFSGPGVITAATELGDMSVDSFRLAILPLYGLFGIPPARIDILVRQRSCAGYGDRRGGGVVELRFASQVRLPKTLHMNRTPGRIRRIGGVAYSTGVSASNNKRMIHAARGVLNALTGEIKIGEAPPGKDDAKNKIGIGFGLSLVAESSVPGVVYSADVVSPARGGALPEDLGAQCAHQLLEAIAKGGCVSWAAARSVLTLMAMGSEDVGRLRIGKDVVDEDTIGLARDLRKFGASSWGLRAVDDDDTDDMLISVKGTGVGNVGRKIA

SEQ ID NO: 3372 - protein, 312 aa, Arabidopsis thaliana
MAQQGQGSMDPAALDDIIRRLLDYRNPKPGTKQAMLNESEIRQLCIVSREIFLQQPNLLELEAPIKICGDIHGQYSDLLRLFEYGGFPPTANYLFLGDYVDRGKQSLETICLLLAYKIKYPENFFLLRGNHECASINRIYGFYDECKRRFSVRLWKVFTDSFNCLPVAAVIDDKILCMHGAISPDLTNVEQIKNIKRPTDVPDSGLLCDLLWSDPSKDVKGWGMNDRGVSYTFGPDKVAEFLIKNDMDLICRAHQVVEDGYEFFADRQLVTIFSAPNYCGEFDNAGAMMSVDESLMCSFQILKPADRKPRFL

SEQ ID NO: 3373 - protein, 58 aa, Pisum sativum
MASMISSSAVTTVSRASTVQSAAVAPFGGLKSMTGFPVKKVNTDITSITSNGGRVKCM

SEQ ID NO: 3374 - protein, 1430 aa, Cryptococcus neoformans var. neoformans JEC21
MVPPARAHTHNTTNTKQAQLSSAYHELANELGTDNISVVGNYTLGRVIGQGTYGSVHLATHRLTGTRAAVKKVPKSFTPHLTRELHHHRRLHHPHIVHLHEIIATESHIWLVTELCSGGELFDYLVERGRILEGEARRLFGELTLAVGWLHMHGVVHRDLKLENVLLDGELRIKLGDLGFAREWQKGRLMDTYCGTTGYASPEMLACQKYLGVETDIWSLGIILYTLLCGGLPFDDDDERVMKELIQKGEYEEPDWLSQEARDLIRGMLQHDPSKRLSIREILTHPWFKMTIVDKVYPNGDVPSIPPSPNPTSPTAAGDDFFAESALRQQQQQQSRLTPHVAGRSPLSTHLPTTPRQNSGSSEAENGDSRTERKASNMQRLNSAEFSTTEKELEQLHLCTSRPAATATGSGAISPRSISSPSMRGKTLRTLPEGQVDVDETPAGLPPPLSLIDEHPHLPVALHSRTPSRTKRRSVSSTLSLERRLSHHSSHNSYITFPPEDYLSKLDPSLLPNPDSSSSSTTTPPARSFTTPSETRLLRQLDDLGLDVGQLKHSVETDACDASAGLWWLLRQKQEERGETDEVVRRREKEVVRREEKVAEYAKEERRKAREAERERERIPTSPMGILGTRPGKRDSIEKSSEGLRFKEEQPPSIPTTPSYTSVIDLGPPVLPVDVDVDVERTAVGRDAPREAAGEEMKSWKRVESPQSVAISSQSSLDPAPTLPPPAAAGGGGAAGAKTQKEDGRDQAGLDPVAVATPMSNANSSTGASTVAKPEPNVNASANANTSANPRLKAKSPSMNMLQRATSVLGGVGKKGDDKDKDKNGMNEKREESTNDSLHPKRGGSSSPNKLKKPMPAGMKGLTSTLSRSESESEGLLAGGGGGGGGGDSPAVSASGSKTVTPGSSPRRKGLTPQGTPRGGLRDAGAKDSSGERASGNGNGNAGGGNEKGKGGKKDSLWTTFRHLFYEDRRRRKRESVTPSASSPLLLPPSDIKLPAGAVVLSRGANSRTSQFKRSNVGYAPSTGSRRTSLDGNRPVYSRRSSSVHTTSRRSSVGSLHFQDHQAMISDLSRRASQRSHGSQTPTSDREYLDYPSAAAPISRPGSSHSIRGGVGGGSRRSSFSVRSPSLHPETFSASAGGPTSTRFKSSVPPPASPLLGYRRRPAGGNDSSRVRHIKVIPESQIMRSSSVASSIRSNASSRASSMDRDRDRDRESEYESGRDDVSLRSGKRQKRRSGSQRSLAQQIHRTRSPLALSLENTYGSNSVANVGLGIGGASRIPKKPLRDVFQKKGKRKDGGDDDWVSEDEDGFACGLGQGRGIAKSFSNANANGTVWMNVNAKTNPARSAAAFPTSKMVAQPTAQGGTSRRRERGRRSSLEEERGRPQEGKGKAKGETAAQGLMGIESLSGRSRRNLPDRSTAPGIIEEEEEDEE

SEQ ID NO: 3375 - protein, 134 aa, Brassica napus
  misc_feature (122)..(122): Xaa can be any naturally occurring amino acid
  misc_feature (130)..(130): Xaa can be any naturally occurring amino acid
MVLSHAASDSDVSVHSTFASRYVRTSLPRFKMPENSIPKEAAYQIINDELMLDGNPRLNLASFVTTWMEPECDKLIMSSINKNYVDMDEYPVTTELQNRCVNMIAHLFNAPLGETETAVGVXGTVGSSEXIMLA

SEQ ID NO: 3376 - protein, 357 aa, Helicobacter hepaticus ATCC 51449
MQEHKELLERREFLKTSAKFGAAVSLASLSGFALSACDSKEDLKTDSTQNLQSTEKAGKSQIQNHLQGDTMEFITLNNGVKMPILGYGVYQIDPKETQRCVEDAISVGYRSIDTAQAYFNEAEVGAAIKTALQGGLKREELFITTKLWIDNYPEEKALKACEESLRKLGLEYVDLMLLHQPYNDTYGAWRALSRFYKEGRFKAIGVSNFYPDRIMDFYLNNEIKPMINQIELHPFYQKQAEQKVNTELDIVTQSWASFAEGKNGLFTNEILRNIGEKYNKSAAQVVLRWLIQRQIVVIPKTTRKERMIENFNVFDFSLSGEDMQKIATIDTGKTLFLDHHDPQSAKFLFDYTKIHKA

SEQ ID NO: 3377 - protein, 544 aa, Methylobacillus flagellatus KT
MAAKQVIFGDDARAKIVNGVNILANAVKVTLGPKGRNVVLERSFGSPTVTKDGVSVAKEIELSDKLENMGAQLVKEVASKTNDNAGDGTTTATVLAQAIVREGFKYVAAGFNPTDLKRGIDKAVAEIVNEIKAIAKPTTTSKEIAQVGSISANSDADIGQIIADAMDKVGKEGVITVEDGSGLQNELDVVEGMQFDRGYLSPYFINNPERQIALLENPFVLLYDKKISNIRDLLPTLEQVAKAGRPLLIIAEDVEGEALATLVVNNIRGILKAVAVKAPGFGDRRKAMLEDIAILTGGTVIAEEVGLSLEKVTLENLGQAKRVEIGKENTTIIDGAGSENNIKVRIDQIKKQIEDATSDYDREKLQERVAKLAGGVAVIKVGAATETEMKEKKARVEDALHATRAAVEEGIVPGGGVALLRARSSIKELKGDNPDQDAGIKIVLRAIEEPLRQIVANAGDEPSVVVNKVLEGTGNYGYNASNGTYGDLVELGVLDPAKVTRSALQNAASVASLILTTDALVAELPKEEAAPAMPDAGGMGGMGF

SEQ ID NO: 3378 - protein, 581 aa, Streptomyces coelicolor A3(2)
MQFEVWAPQAGRVTLRCDGATRALERDPERPGWWCGEAPARDGSRYGFAVDDGPVLPDPRSRRQPDGPDGLSAVVDHGRYAWRTPWAGRPLPGGVLYELHVGTYTPEGTLDAAADRLEHLVRLGVTHVELMPLCPFPGRHGWGYEGVSLWAVHEPYGGPEALKRFVDRAHDLGLGVVLDVVHNHLGPSGNHLPAFGPYFTDTHHTPWGVAVNLDAPGSDEVRAYLVDSALAWLRDYRLDGLRLDAVHALADTRACHFLEQLSTAVDGLAADLERPLFLIAESDLNDPRIITPRAEGGLGVHAQWNDDFHHALHAALTGESQGYYADFARDPLAALAKTLIRGYFHDGTYSSFRGRSHGRALDRGRVAAHRLTGYSQTHDQVGNRAQGDRLASLVSPGLAACAATLTLTAPFTPMLFMGEEWAAGTPWQFFTDHTDPQLAQAVRQGRRREFAAHGWREEDVPDPQDPATRERSCLDWSEPEREPHARVLDWYRRLIALRAEQPDLTDPDLADTRVAYDGTGRWLAFRRGDIRVAVNLGTEPAAIPLGNRPARVLAAWEPVEGPGANGILRVPGESSVVLVQE

SEQ ID NO: 3379 - protein, 368 aa, Methylobacillus flagellatus KT
MADLFSPYKLKDVELRNRIAVPPMCQYMATNGLANDWHRAHYASLARGGSGLVIVEATAVAPEGRITPHCLGLWNDAQAEQLRSIAAAIKAAGAVPGIQIAHAGRKASANVPWEGDDHIPEGDARGWQPIAPSAKAFGGLLPRVPTEMTIADIQRVQQNFVDAARRALEAGFEWLELHFAHGYLAQSFTSTHSNLRTDAYGGTLENRGRFTRETLAAVRQTWPEHLPLTARFGVLEFDGQDEQTLSESIQLVNEWKQLGLDMLSVSIGFSTPEAKIPWGPAFLAPIAQRVRNEAGIPVSSAWGFGAPDLADQAIRNEQLDIAMIGRAHLENPHWTYQAAKELNKKDPAWVLPPPYAHWLARYHDPRQR

SEQ ID NO: 3380 - protein, 323 aa, Zea mays
MSYMRKKKKKKKKKLEAAGTHLLSPACARLSSFLPRPLAFAWLHRAGRAGEEKLASSYQLSAGGGSLPAAGVSCKGWELAMGRGRVELKRIENKINRQVTFAKRRNGLLKKAYELSVLCDAEVALIIFSNRGKLYEFCSGQSITKTLERYEKNSYGGPDTAVQNKENELVQSSRNEYLKLKARVDNLQRTQRNLLGEDLGSLGVKELEQLEKQLDSSLRHIRSTRTQHMLDQLTDLQRREQMLCEANKCLRRKLEETSNQVHGQVWEHGANLLGYERHSPQQQAPSHVGNGLFFHPLEAAAEPTLQIGFAPEHMNNFMPTWLP

SEQ ID NO: 3381 - protein, 237 aa, Oryza sativa
MVMNPDAVRNVVGIIGNLISFGLFLSPLPTFVTIVKKKDVEEFVPDPYLATFLNCALWVFYGLPFIHPNSILVVTINGTGLLIEIAYLAIYFAYAPKPKRCRMLGVLTVELVFLAAVAAGVLLGAHTYDKRSLIVGTLCVFFGTLMYAAPLTIMKQVIATKSVEYMPFTLSLVSFINGICWTIYAFIRFDILITIPNGMGTLLGAAQLILYFCYYDGSTAKNKGALELPKDGDSSAV

SEQ ID NO: 3382 - protein, 371 aa, Ralstonia metallidurans CH34
MPHLFDPYRIGNLELANRIAIAPMCQYSAQEGNATDWHMIHLGQMALSGAGLLIIEATAVSPEGRITPTDLGLYNDANEAALGRVLGAVRNHSPIAVTIQLAHAGRKASSEAPWDGGGQIRPDQPRGWQTFAPSAVPHAAGEVPPAALDKAGMKKIRDDFVAAAKRAARLGIEGIEVHGAHGYLLHQFLSPIANHRTDEYGGSLENRMRFPLEVFDAVREAFPAERPVWMRVSATDWVPNGWDIEGTIALSHELKARGSAAVHVSTGGVSPQQAIKIGPGYQVPYAQRVKAEVGLPTMAVGLITEAEQAEAIIANNEADIISIARAMLYDPRWPWHAAAKLGASVNAPKQYWRSQPRGLEKLFKDAHFGQR

SEQ ID NO: 3383 - protein, 375 aa, Trichodesmium erythraeum IMS101
MNQLKILEPFTLGDLQLPNRIVMAPLTRRRADINNAPTPLNALYYSQRSSAGLIISEASQISPQGTSLPKTPGIYSQKQIEGWQLVTKAVHNSGGRIFIQLWHGGRCSHPSLQPNGELPVAPSARAPIEEKALTAQEKEVPFVNPRSLLTTEIPEIIAQYRQGAINALEAGADGVEIHGANGYLLDQFLQDNSNQRTDKYGGSIENRSRLLLEVTQAVTEVWGSQRVGIRLSPSSTYQDMYDSNPEALFNYIVSKIDQFNLAYLHIVEPRIKGSHDDLTEKKLQLGVKHFRPLYSGNLMTAGGYTRDLGEEIISQGYTDLVAYGRLFIANPDLPKRFALNAPLNPYYRPTFTGGNEIGYTDYPFLSIDTLAKNII

SEQ ID NO: 3384 - protein, 251 aa, Triticum aestivum
AYLGDTIEQVCTKKQAGTGPEFPGYRRPTRPRIRKYGLVYAGIGWCIWRSKEDLPDELIFHINYLGADQPTFTLNFSKGSSQVIAQYYQLIRLGFEGYRNIMDNCQENAMVLKEGLERTGRFNIVSKDQGVPLVAFSLKDSSRHDEFEISEFLRRFGWIVPAYTMPPDAQHVTVLRVVIREDFSRTFAERLVIDIEKVLHELDALPSRSSGPALQHPNGDTVSEKDLARQREVVSVWKRAVAARKKTQGVC

SEQ ID NO: 3385 - protein, 311 aa, Brassica napus
GPDSRVDPRVRVGIPQDYRHMEGFGVHTYTLVSKSGKVLFAKFHWKPTCGIKNLTDEEAKVVGGANHSHATKDLHDAIASGNYPEWKLFIQTMDPADEDKFDFDPLDVTKIWPEDILPLQPVGRLVLNRTIDNFFNETEQLAFNPGLVVPGIYYSDDKLLQCRIFAYGDTQRHRLGPNYLQLPVNAPKCAHHNNHHEGFMNFMHRDEEINYYPSKFDPVRCAEKVPIPTKSYTGIRTKCIIKKENNFKQPGDRYRSWAPDRQDRFVKRWVEILSEPRLTHEIRSIWISYWSQADRSLGQKLASRLNVRPSI

SEQ ID NO: 3386 - protein, 412 aa, Streptococcus pyogenes SSI-1
MEYEVYETMKIIEKSSKLEHVAYDIRGPVLDEANRMIASGEKILRLNTGNPAAFGFEAPDEVIRDLIVNARLSEGYSDSKGIFSARKAIMQYCQLKGFPDVDIEDIYLGNGVSELISISLQALLDNGDEVLVPMPDYPLWTACVSLGGGKAVHYLCDEEAGWYPDIADIKSKITSRTKAIVVINPNNPTGALYPKEILEDIVALAREHQLIIFADEIYDRLVMDGKEHIAIASLAPDVFCVSMNGLSKSHRIAGFRVGWMVLSGPKDHVKGYIEGLNMLANMRLCSNVLAQQVVQTSLGGHQSVDALLLPGGRIFEQRNFIYEAINAIPGLSAVKPEAGLYLFPKIDRQMYRIDDDEEFVLQLLKQEKVMLVHGRGFNWKDPDHFRIVYLPSVEELEDVQEKITRVLYQYRR

SEQ ID NO: 3387 - protein, 589 aa, Bradyrhizobium sp. BTAi1
MSGRQFGPRLSEHGTSFRLWAPAARRVDLVLDDGRREMQRRDGGWYALDAPGIGAGTRYKFRIDDELDVPDPGSDFQPEDVSGPSEVIDHCAYVWRAKDWRGRPWQDAVFLESHVGTFTEEGTYRAMIDKLDHLVETGITALELMPLADFAGRRNWGYDGVLLYAPDSVYGRPDDLRALIDEAHLRGLMVFLDVVYNHFGPEGNYIARYAPTFFTDTHTPWGSAIDYRRPEVRAFAIENALHWLTDYRFDGLRFDAVNHILSNEGEIPMLHELSAAVGRLVAQTGRHIHLVLENGDNRASMLDAAEEPPRGKFRAQWNDDYHHVWHVMLTGETTGYYGDYQDNPRGGLARALASGFVYQGEQAAFWGGIRRGEPSGHLAPGAFVNFLQNHDQIGNRVFGDRLEALAPPEGIAAALAVTLLAPTVPMLYMGEEWGSKQPFPFFCDFQGDLAHAVRKGRRKEYEWAYAKYGDEVPDPLDVETFRSAIIDWDARNEPPGRERLALVRDLLAVRHSKVAPLLPGATFGAADVTDEGRLTAHWTMGDGSQLRLLANVSDKEIAGPSNDVNGTPIWGGTPGDRLPPWSVYWSIGG

SEQ ID NO: 3388 - protein, 712 aa, Bradyrhizobium sp. BTAi1
MTHLSPEAFAIIEGRHADPFRYLGQHDVDGRTVIRAFLPEASRVEAVGDNGEVAPLARIHDAGLFTGTMSGPQRYRLRATFGDHVTDLEDPYRFLPILTDFDLHLLGEGNHERLYDKLGAHPMVLDGVDGVGFVVLAPNARRVSVVGDFNFWNARRHPMRVRGNGYWELFIPRAKAGDHYKFDIIGPQGEHLPLKSDPMAFAAEMRPKTASIVVDETRLPRPRPAPSDINKLDRPVSIYEVHLGSWRRKDNNQWLTYRELAEQLPAYARDMGFTHIEFLPVSEHPFDGSWGYQPTGLFAPTSRFGSPEDFCALVDACHREGLAVWLDWVPGHFPDDPHGLGHFDGTALYEHANPMQGRHLDWGTLIYNYGRTEVANFLRSNALFWLERYGIDGLRVDAVASMLYLDYSRPSGGWIPNKYGGRENLEAIEFLRRTNIEVFGHFPQATTAAEESTAWPQVSRPVDIGGLGFGYKWNMGWMHDTLRYVGKDPIHRKYHHGEILFGLHYAFSENFILPLSHDEVVHGKRSILGRMPGDDWQRFANLRAYYSFMFGHPGKKLLFMGCEIAQEREWNHDSSLDWHLLGDAKYAGIQALIRDLNHLYRNQPALHERDCEPEGFDWLITEDADRNVFAWVRKGFDERARCVVVVNFSPNVYYNYRVRVPLGGTWREVFNSDSSHYGGSNVGNVGQVHASEDQQLNLILPPMAAVFLVPEA

SEQ ID NO: 3389 - protein, 220 aa, Glycine max
GAVHGVPSIEKITFHLLRLEDGEILDKKVFSNDFVNLTHNMGVFLYDDLLAIVSLRYQTIHILQIRDSGNLVDVRAIGEFCREDDELFLNSNAQLQLPGNHIENHMHQGQPNLGNSFLSGIKQRLLSFIFQGLWNEERDDTLRIQRLRKKFYFHFQDYVDLIIWKVQFLDRHHLLIKFGSVDGGVSRNADHHPAFVAVYNMDTTEIVSFYQNSADELYLL

SEQ ID NO: 3390 - protein, 479 aa, Prochlorococcus marinus str. MIT 9313
MALHRSNPRSNDLEEHAIGETVDALVSPLPRTTFPQEYRPALTTFNLLKEELLLDGNSKQNLATFCQTYESQQVAELMALAVDKNLIDKDEYPQTAEIERRCVSMMADLWHAPGEAVGCSTIGSSEAAMLGGLAAKWRWREHRKAAGQSIDRPNMVCGSVQICWTKFARYWDVELREVEMTSGELCMSPERMLEQVDENTIVVVPTLGVTYHGLYEDVQAVSQALDELQQRKGLDIPIHVDAASGGFLAPFCAPDLAPWDFRLPRVKSINSSGHKFGLAPLGVGWVLWRESRDLPEGLVFHVSYLGGDMPTFQINFSRPAGQVISQYYDFVRLGRDGYQAIHGASYANAQYVAQELKKLGPFELINDGNPAGGIPTVVWTLRADQELGFNLYDLSDRLRLRGWQVPAYPFTGELAHQAFQRILVKRDFSREMADLLLTDIRNAITHFESHPVKISLNANEAASTNHLGRSMVECRDAHG

SEQ ID NO: 3391 - protein, 887 aa, Methanosarcina acetivorans C2A
MKKSNELIFILVLGFIFTLVASNYNLFESVVLFVEEYNLDGLGLLLILSIYTSFGMGIFSLGRWMELENTLTLYRKAEEDLREKDQMYRALFEMSNDAVIISDGKKVLDINNKGCEIFGFREERPLNVSLISFIPPEYLSELQQALKETFKQASSCFEMRYQKAEGEIVDIEVSLSLIDRNNNIIHIVAQDITGVKNAERLEQENRERFKTVLDNTLCSILLIEASSRKIVDANPVALKTTGYSEKELIGMVCSRLICQAGEERCNVPSLDPAGELSESILFKAGGDKISILRNVVPVSIGGNGYFVESFIDLSERKKVEEELLQAKLAAEGANRAMSEFLATMSHELRTPLTAIIGFSELMLGEATGEFDELNRKFLGHISNSGKHLLSLINSVIDLSRIEAGKMDLEPDFFSLYDIFADTKSISSPLALKKNISMDFNVESDFLIYADRTRFKQIMYNLVSNAIKFTPAGGSVEVVGRRSENRIRVTVSDTGIGISQDEIKHLFKPFKQINFALSREYESTGLGLVLSKNFVEMHGGRIWVESEPGKGSTFTFEVPVEILNSGEKMKIPEICGINGANNFEIPAETGEAGNSEIGSQTEKSEEKDFVEIFEPEGSDGSEPLVMIVEDDKLSRELLIFTLKEAGYRVVRALSGKQALSLAQKLNPFVITLDLMLPEMNGWDVLKNLKKDSETAGIPILLLSIDERDECNMVWGAFDHLVKPVEKSILLSTLERLNKKTKKGSPKILIADDQEDMVELMVSLVKEEGYIISRAYGGKEAIDKALTELPDAIILDLMMPEVSGFEVIRTLKKDPETVDIPVIVCTARDLSAEETELLNSNVSVVMQKEDLNKQILMQLIRSLESREEGCRTCILSAPREDRSFCKAEE

SEQ ID NO: 3392 - protein, 540 aa, Streptococcus agalactiae NEM316
MAKDIKFSADARSAMVRGVDILADTVKVTLGPKGRNVVLEKAFGSPLITNDGVTIAKEIELEDHFENMGAKLVSEVASKTNDIAGDGTTTATVLTQAIVREGLKNVTAGANPIGIRRGIETAVSAAVEELKEIAQPVSGKEAIAQVAAVSSRSEKVGEYISEAMGRVGNDGVITIEESRGMETELEVVEGMQFDRGYLSQYMVTDNEKMVSELENPYILITDKKISNIQEILPLLEEVLKTNRPLLIIADDVDGEALPTLVLNKIRGTFNVVAVKAPGFGDRRKAMLEDIAILTGGTVVTEDLGLDLKDATMQVLGQSAKVTVDKDSTVIVEGAGDSSAIANRVAIIKSQMEATTSDFDREKLQERLAKLAGGVAVIKVGAATETELKEMKLRIEDALNATRAAVEEGIVSGGGTALVNVIEKVAALKLNGDEETGRNIVLRALEEPVRQIAYNAGYEGSVIIERLKQSEIGTGFNAANGEWVDMVTTGIIDPVKVTRSALQNAASVASLILTTEAVVANKPEPEAPTAPAMDPSMMGGF

SEQ ID NO: 3393 - protein, 433 aa, Cytophaga hutchinsonii
MNEVVVFWFRRDLRLTDNAGLFQALTSGYAVLPVFIFDINILNALEHKNDARVEFIHDTIQSLKNELQKIHSDMEVYHATPAEAFEQLVKKYTVKAIYTNTDYEPAAIKRDNEISDWAAQQQIAFKSFKDQVIFEKNEILTDTGAPYRVYTPYKNKWLKKLTENPVTHSPSEKHTDAFLRMEAKPIVTLKQLGFTPSSIQIPPLETLRKTIQEYDKTRDYPYLEHGTSLLGIHFRFGTISIREKVVKALPLNATWLSELIWREFFMQLLFHFPHVVTESFQSKFNRLEWRYSQADFEKWCTGKTGYPLVDAGMRELNTTGHMHNRVRMVVASFLTKHLFIDWRWGEAYFAQKLLDYDLSANNGNWQWAAGTGADAQPYFRIFNPISQQEKFDPDFIYIKKWVPEFGTSSYIEPIIEHKKATERAKLLFSVLKN

SEQ ID NO: 3394 - protein, 339 aa, Glycine max
MDHSADAQRTDLMTITRFVLNQQSNHPESRGDFSILLSHIVLGCKFLCSAVNKAGLAKLIGLAGETNVQASEQKKLDVLSNDVFIKALVSSGRTCILVSEEDEEATFVEASKRGKLYCVVFDPLDGSSNIDCGVSIGTIFGIYLIKEDHEPTIEDVLQPGKNMLAAGYCMYGSSCTLVLSTGSGVNGFTLDPSLGEFILTHPDIKIPKKGKIYSVNEGNAKNWDDPTTKYVENCKYPRDGSSPKSLRYIGSMVADVHRTLLYGGIFLYPADKKSPNGKLRVLYEVFPMSFLMEQAGGQAFTGNQRALDLVPKKLHERSPIFLGSYEDVEEIKALYAAEE

SEQ ID NO: 3395 - protein, 372 aa, Burkholderia sp. 383
MSSLLSNFDLNGLILPNRVVMGPMTRSRAPYRGQPTELMAEYYAQRASAGLIVSEATNVSPVSASFELTPGLITDEQVAGWKKVTEAVHAKGGRIFAQLWHGGRVSSLTLLGGQAPLSPSGVNDDLEQLQVWAQLQNGYYTKIHATPSRAMTTDEVVKTIDEFRQSAAHARSAGFDGVEIHAANGYLPHQFLSSTLNRRDDRYGGTLANRVRFLEEIIAAVGGEIPLSRVGVRISPYAKYNNVRDTDPDATYAYVGRMLDEAGVAYVHAADTNGWSGEPDLPRIIEIVRKSFGGALIVNGGISPDVATKLIMSGDADLVAFARAYIANPDLVERIANKAPLAAPQAVGWYGGDRTGYVDYGRHDATGHTTGE

SEQ ID NO: 3396 - protein, 225 aa, Arabidopsis thaliana
MLSKLPTQRHLHLSPSSPSMETVGRPRGRPRGSKNKPKAPIFVTIDPPMSPYILEVPSGNDVVEALNRFCRGKAIGFCVLSGSGSVADVTLRQPSPAAPGSTITFHGKFDLLSVSATFLPPLPPTSLSPPVSNFFTVSLAGPQGKVIGGFVAGPLVAAGTVYFVATSFKNPSYHRLPATEEEQRNSAEGEEEGQSPPVSGGGGESMYVGGSDVIWDPNAKAPSPY

SEQ ID NO: 3397 - protein, 156 aa, Ananas comosus
MSLVRRSNIFDPFSLDLWEPFEGFPFGGALSFPRPSASFPAETASFAGARIDWKETPEAHVFKADLPGVKKEEVKVEVEEGNVLQISGERTREKEEKNDTWHRVERSSGKFLRRFRLPDNAKVDQVKAAMENGVLTVTVPKEDVKKPQVKSVQISG

SEQ ID NO: 3398 - protein, 716 aa, Pseudomonas syringae pv. tomato str. DC3000
MASKKAPPATDTSKSQMAGTDTPDRGNTNAKLESLEQFRSDATGQALRTNHGVKISDNQNTLKVGSRGPSLLEDFIMREKITHFDHERIPERIVHARGTAAHGYFQTYENHGALSKAGFLRDPAEKTPVFVRFSTVQGPRGSGDTVRDVRGFAVKFYTGEGNFDLVGNNMPIFFIQDAIKFPDFVHAVKPEPHNEIPTGGSAHDTFWDFVSLVPESAHMVLWTMSDRAIPKSLRTMQGFGIHTFRLINTEGKSSFVKFHWKPKFGVCSLVWDEAQKLAGKDTDFHRRDLWESIEMGDYPEWELGVQIVAEEDEHKFDFDLLDPTKIIPEELVPVTPLGKMVLNRNPDNYFAETEQVAFCPGHIVPGIDFSNDPLLQGRLFSYTDTQISRLGGPNFHEIPINRPIAPNNNGQRDAQHRTTIDKGRASYEPNSIDGGWPKETPAAAVDGGFETYPERVEAHKVRERSESFGDHFSQATLFFQSMSHHEKEHIIAAYSFELGKVEREYIRARQVNEILANIDLELASRVAANLGLPAPTAGTVPVRNTSVKESPALSQVNLLSGDIVSRKVAILVANGVDGKAVEAMKKELTAKGAHAKVLGPTSAPVKTADGASLPVDASAEGLPSVAFDAVFVPGGKDSVKALSTDGVALHFILEAYKHLKAISVAGEAKELLTLLRLEEDAGLLVVSDSKSFETFFNAIAQHRVWDREVKAKAVPA

SEQ ID NO: 3399 - protein, 651 aa, Psychrobacter arcticus 273-4
MCGVNGFFNAHTTIPVQNVIAQMNAAIDHRGPDAGDAWLDENIGLVLGHQRLAIQDLSPAGAQPMHSACGRYVLAFNGEIYNHLQLREQLMIEGHAPAWRGHSDTETMLACFVAWGIEKTLQAMVGMFAIVLWDRQQKVLTLARDRMGEKPLYWGWQGQSLYFSSELKGLKAHPSFKTDINRDAITLLLRHNCIPAPYSIYQGIEKLRPGHWVQLPLSDIQQAKTAQSKAYWRFNDIVEAGLADPFTGSPEQAVDALESALMQSIGGQMQSDVPLGAFLSGGIDSSTVVALMQAQSSRPVKTFTIGFDDAGYNEATHAKAIAKHIGTEHTEMYMRPEDALAVIPKLSSIYCEPFSDSSQIPTFLVNQLAHQHVTVALSGDGGDELFGGYNRYLMAQQVWSKSRKLPRPMRQLAAVSLTALSPKSWDTLVNTLSPVIPKRLNLRTPGDKAHKLAGVLNIDSEQAFYQNLTSHWQDPAQLVIGAQEPATLISDSSCWPTTDSFQHAMMAMDAQTYMTDDILVKVDRAAMANSLETRVPMLDHRIAELAWRMPLDYKIRNGEGKWLLKQVLYRHVPRELIERPKMGFGIPLHDWLRGSLRDWAEALLDRNLLQQQGYFNPAPIRKIWNEHLSGVFNHQHQLWDILMFQAWLETQ

SEQ ID NO: 3400 - protein, 246 aa, Oryza sativa (indica cultivar-group)
MGRGKVQLKRIENTINRQVTFSKRRSGLLKKANEISVLCDAEVALIIFSTKGKLYKYATDSCMDKILERYERYSYAEKVLISAESDTQGNWCHEYRKLKAKVETIQKCQKHLMGEDLESLNLKELQQLEQQLENSLKHIRSRKSQLMLESINELQRKEKSLQEENKVLQKELVEKQKVQKQQVQWDQTQPQTSSSSSSFMMREALPTTNISNYPAAAGERIEDVAAGQPQHVRIGLPPWMLSHING

SEQ ID NO: 3401 - protein, 1384 aa, Trichodesmium erythraeum IMS101
MKLRKKTRIIINTVIASIVAILYVVQSIILLHHFQYLEANYVRLNVDRGLNILDEQLSNLSAIAKQDRVLLLSKNFANQNQLESNVNLTKEEFINFNSVKNFFINQKLNLILRVNSQGEILFSQVFDLNKQTEIPISESFKKHLSRIQNLKQENYLSKIGIIILPEAPMLIVATNVPNEKDSLSNDTLIVGRYLDNTMISRLAESTKLSLTISRNLQTNQQLKLKNSEIVVKPLSSNKIAGYKIIKDIYSQPVLILQVKIDRIISNSLQSFWGYLIFLWVIVGLVFCVVIIAVIEKLLVSRVLQLSKLVKKIASSGDFSSRISMLGNDELSSLAGTINNILEGLKNYHSDYQESEESYRLMIENSTCIISRHSLNGIFLDISPNCRNLLGYSPLELLGNHPQKLFAHEDTKAIAKAYYAVLKNSVTSTITYRLLCKDSKYIWLETSFRTIRDSKTGKVQEIIALSYDISELKQKKEELQESEAAILRLYQITSATCKDKNLDMDPSSFFNYRLQKLLEMGCEKFDLETGVLFKIEDGISTTIASITPDNCISKGQEFEVEKNFIFTAITEKPICFESITSSGFSITTDIDFQIEAYMGAPVMVGGLVYGTLNFWSPKPLRQPFKAIDKELLKLMAQWVGGELERQKTATDATDLAKARDEALAATRAKSEFLATMSHEIRTPINAVIGMTGLLLDTSLKSDQTEFVETIRSSGDALLTLINDILDFSKIESEKFDLEEHPFDLETCLEESIDLLVAKVSEQGLELVYFIDPETPTIVIGDVTRVRQILVNLLSNAVKFTSDGEVLVSVSGRKLEIEENVQNLAVENISESDTCDIWPAYEIQFSVKDTGIGIPANRMNRLFKRFSQVDSSTNREYGGTGLGLVISKRLAEMMGGQMWVESMGVVGGNPPATYRLPDLYEHSAAVNEKSGSTFYFTIVSKCSIQTVQNKFIQTNYVNGSQHKLVDKRILIVDDNSTNRTILLRQTESWGMIVRTAENANRALELIATENKFDVAIIDMKMPEIDGLSLGKKITEYPIYQNLPIILLSSLGQQEINFSDKLLGSVINKPIKQSQLYEALLNIFSGQDVKVKFKNNNKRNYQTIPVLAKELPLRILLADDHLVNQKVALRILQRMGYRADLASNGLEVLAAVFRLPYDVVLMDVQMPLMDGLEASRHIQREYENATKYSQKSPQKRPRIIAMTANVMQGYREECIAAGMDDYISKPIQIEELIKALSKCKSVVSEVKEKLNFPQLNTFLETEDNNNNIFPDKPILESKVIENLREVEYLDESIDIYLETSPELLENINIAINQTDPLRLKNAAHSLKSISGTLGAMNLYNICQELEVLARLAYESGNFTPKEVIDIFSEVKIEYEKVIAALKLEQHK

SEQ ID NO: 3402 - protein, 80 aa, Brassica napus
MQCANHSILLLTPYKMGRFNLSHRVVLAPLTRQRSYGNVSHPHAVLYYSQRTCPSGFLTTEASGVLDTAQGFQDTSGDLV

SEQ ID NO: 3403 - protein, 406 aa, Pyrococcus furiosus DSM 3638
AHHHHHHGSIRASKRALSVEYAIRDVVLPARELEKKGIKVIRLNIGDPVKFDFQPPEHMKEAYCKAIKEGHNYYGDSEGLPELRKAIVEREKRKNGVDITPDDVRVTAAVTEALQLIFGALLDPGDEILVPGPSYPPYTGLVKFYGGKPVEYRTIEEEDWQPDIDDIRKKITDRTKAIAVINPNNPTGALYDKKTLEEILNIAGEYEIPVISDEIYDLMTYEGEHISPGSLTKDVPVIVMNGLSKVYFATGWRLGYMYFVDPENKLSEVREAIDRLARIRLCPNTPAQFAAIAGLTGPMDYLKEYMKKLKERRDYIYKRLNEIPGISTTKPQGAFYIFPKIEVGPWKNDKEFVLDVLHNAHVLFVHGSGFGEYGAGHFRAVFLPPIEILEEAMDRFEKFMKERLKE

SEQ ID NO: 3404 - protein, 545 aa, Sinorhizobium meliloti 1021
MAAKEVKFGRSAREKMLRGVDILADAVKVTLGPKGRNVVIDKSFGAPRITKDGVTVAKEIELEDKFENMGAQMVREVASKTNDIAGDGTTTATVLAQAIVREGAKAVAAGMNPMDLKRGIDLAVAEVVKDLLAKAKKINTSDEVAQVGTISANGEKQIGLDIAEAMQKVGNEGVITVEEAKTAETELEVVEGMQFDRGYLSPYFVTNPEKMVADLEDAFILLHEKKLSNLQAMLPVLEAVVQTGKPLLIIAEDVEGEALATLVVNKLRGGLKIAAVKAPGFGDRRKAMLEDIAILTGGTVISEDLGIKLESVTLDMLGRAKKVSITKENTTIVDGAGQKSDIEGRVAQIKAQIEETTSDYDREKLQERLAKLAGGVAVIRVGGATEVEVKEKKDRIDDALNATRAAVQEGIVPGGGVALLRSSVKITVKGENDDQDAGVNIVRRALQSPARQIVENAGDEASIVVGKILEKNTDDFGYNAQTGEYGDMIAMGIIDPVKVVRTALQDAASVASLLITTEAMIAELPKKDAPAMPGGMGGMGGMDMM

SEQ ID NO: 3405 - protein, 1131 aa, Glycine max
MSTSRPSQSSSNSRRSRHSARMAQATVDAKIHATFEESGSSFDYSSSVRVSGTADGVNQPRSDKVTTAYLRGKMIQPFGCLLAIDEKNHMQTCKVIAYSENEPEMLTMVSHAVPSVGDHPALGIGTDIKTLFTAPSVSGLQKALGCADVSLLNPILVHCKTSGKPFYAIVHRVTGSLIVDFEPVKPYEVPMTAAGALQSYKLAAKAITRLQSLPSGNMERLCDTMVQEVFELTGYDRVMAYKFHEDDHGEVIREITKPCLEPYLGLHYPATDIPQASRFLFRKNKVRMIVDCHAKHVRVLQDEKLQFDLILCGSTLRAPHSCHAQYMANMDSIASLVLAVVVNDNEEDGDTDAVQPQKTERLWGLVVCHNTTPRFVPFPLRYAREFLPQVFADHVHKEIELEYQIIEKNILHHPGHLLCMLMRDAPLGIASESPNIMDLVKCDGAALIYRNKVWRLGVTPSEPQIREIALWLSEYHMDSTSFSTDSLFDAGFPSALSLGDVVCGMASVRVTAKDMVFWFRSHTAAEIRWGGAKHEAGEKDDSRRMHPRSSFKAFLEVVKARSLPWKEYEMDAIHSLQIILRNAFKEDTESLDLNAKAINTRLRDLKIEGINDLKIERMQELEAVTSEIVRLDYTATVPILAVDVDGLVNGWNIKIAELTGLPIGEATGKHLLTLVEDSSTDRVKKMLNLALLGEEEKNVQFEIKTLGSKMDSGPISLVVNRCASRDLRDNVVGVCFVAHDITAQKNVMDKFIRIEGDYKAIVQNRNPLIPPIFGTDEFGWCCEWNPAMMKLTGWKREEVMDKMLLGEIFGTQMAACRLKNQEAFVNLGVVLNKAMTGSETEKVPFGFFARNGKYVECLLSVSKKLDVEGLVTGVFCFLQLASPELQQALHIQRLSEQTASKRLNALSYMKRQIRNPLCGIVFSRKMLEGTDLGTEQKQLLRTSAQCQQQLSKILDDSDLDTIIDGYLDLEMAEFTLHEVLVTSLSQVMEKSNGKSIRIVNDVAGHIMMETLYGDSLRLQQVLADFLLISINFTPNGGQVVVAGSLTKEQLGKSVHLVKLELSITHGGSGVPEVLLNQMFGNNGLESEEGISLLIRAKLLKLMNGDVRYLREAGKSAFILSAELAAAHNLKA

SEQ ID NO: 3406 - protein, 540 aa, Streptomyces albus G
MAKILKFDEDARRALERGVNQLADTVKVTIGPKGRNVVIDKKFGAPTITNDGVTIAREVECDDPYENLGAQLVKEVATKTNDIAGDGTTTATVLAQALVREGLRNVAAGASPAALKKGIDAAVAAVSAELLDTARPIDDKSDIAAVAALSAQDKQVGELIAEAMDKVGKDGVITVEESNTFGVDLDFTEGMAFDKGYLSPYMVTDQERMEAVLDDPYILIHQGKIGSIQDLLPLLEKVIQAGGSKPLLIIAEDVEGEALSTLVVNKIRGTFNAVAVKAPGFGDRRKAMLGDMATLTGATVIAEEVGLKLDQAGLDVLGTARRVTVTKDDTTIVDGGGNAEDVQGRVAQIKAEIESTDSDWDREKLQERLAKLAGGVCVIRVGAATEVELKERKHRLEDAISATRAAVEEGIVSGGGSALVHAVKVLDDNLGRTGDEATGVAVVRRAAVEPLRWIAENAGLEGYVITTKVAELDKGQGFNAATGEYGDLVKAGVIDPVKVTRSALENAASIASLLLTTETLVVEKPAEEEPEAGHGHGHSH

SEQ ID NO: 3407 - protein, 540 aa, Streptomyces albus G
MAKIIAFDEEARRGLERGMNQLADAVKVTLGPKGRNVVLEKKWGAPTITNDGVSIAKEIELEDPYEKIGAELVKEVAKKTDDVAGDGTTTATVLAQALVREGLRNVAAGANPMALKRGIEKAVEAVSSALLEQAKDVETKEQIASTASISAADTQIGELIAEAMDKVGKEGVITVEESQTFGLELELTEGMRFDKGYISAYFATDMERMEASLDDPYILIVNSKIGNVKDLLPLLEKVMQSGKPLLIIAEDVEGEALSTLVVNKIRGTFKSVAVKAPGFGDRRKAMLGDIAILTGGTVISEEVGLKLENAGLDLLGRARKVVITKDETTIVDGAGDTDQVNGRVAQIRAEIENSDSDYDREKLQERLANVAGGVAVIKAGAATEVELKERKHRIEDAVRNAKAAVEEGIVAGGGVALLQASSVFEKLELEGDEATGAAAVKLALEAPLKQIAVNGGLEGGVVVEKVRNLSVGHGLNAATGQYVDMIAEGILDPAKVTRSALQNAASIAALFLTTEAVIADKPEKAAAAAPGGMPGGDMDF

SEQ ID NO: 3408 - protein, 274 aa, Zea mays
  misc_feature (44)..(44): Xaa can be any naturally occurring amino acid
RGGDAVAERQGGRGGGGGGPGRHDERLQRPRGRGGGGGAAAAGXDGQGRAKRKRSRRRRDRDGQQPKEPTTQEEYLALCLVMLATGRRDADADAAAPPQDHACSVCGKAFPSYQALGGHKASHRAKPSPSPSPAAALAPEPGAGDGDRHDEKKPAQPSSSSAGSRPAAAAHECNVCGKAFPTGQALGGHKRRHYDGTIGSAAAPARASSSSVPASAATSSLGAATSVPASAPPPPQAVAFDLNLPALPERCAGVDEDEVLSPLAFKKPRFMIPA

SEQ ID NO: 3409 - protein, 212 aa, Glycine max
  misc_feature (47)..(47): Xaa can be any naturally occurring amino acid
  misc_feature (168)..(168): Xaa can be any naturally occurring amino acid
MGQQSLIYSFVARGTVILAEYTEFTGNFTGVAAQCLQKLPSSNNKFXYLVDNGFTYCVGAVESAGRQIPIAFLGRIKEDVTKKYAGGKAATAAAQSLNREFGPKLKEQMQYCVDHPEEISKLAKVKAQVSEVKGVMMENIEKVLDRGEKIELLVDKTENLRSQAQDFXQQGTKIRRKMWFQNMKIKLIVLGIIIALILIIVLSVCGGFNCGK

SEQ ID NO: 3410 - protein, 367 aa, Pseudomonas fluorescens Pf-5
MPVQALFKPFQLGALELPTRVVMAPMTRSFSPGGVPNSKVIEYYRRRAAAGVGLIITEGTTVGHQAANGYPNVPQFHGEAALAGWKKVVDAVHAEGGKIVPQLWHVGNVRRLGTEPDASVPGYGPTEKLKDGKVLVHGMTHQDIQEVIAAFAQAAKDAQSIGMDGVEIHGAHGYLVDQFFWEGTNQRTDEYGGDLAQRSRFAIELIQAVRAAVGPDFPIILRFSQWKQQDYSARLVQTPEALEAFLKPLADAGVDIFHCSTRRFWEPEFEGSDLNLAGWTRKLTGKPTITVGSVGLDGEFLQFMVNTDKVAQPASLENLLQRLNNDEFDLVAVGRALLVDPDWAQKVREGREQDILPFSRDALTTLV

SEQ ID NO: 3411 - protein, 476 aa, Methylobacillus flagellatus KT
MRKLKKIGLIVAGPLLGVMLSLSYSAIADKETKPQLPLDDLRTFAEVFGKIKSDYVEPVEDKKLLTEAINGMLAGLDPHSAYLDADAFKDLQAGTQGEFGGLGIEVGMEDGFVKVVAPIEDTPAYKAGLKSGDLIMKLDDTPVKGMTLTDAVKRMRGKPDTKITLTVLRKGEAKPLTFVLTRAIIKTQSVKYKLSEPGYAYIRITQFQEHTGEDLAKALKTMREQNKEAFKGLILDLRNNPGGLLNAGVGVSAAFLPKGELVVYTEGRGEEAKMRLTANPENYVRGGARADYLRDLPAEMKTLPIVVLVNGGSASASEIVAGALQDHKRAIIMGTQTFGKGSVQTILPMNNGAAIKLTTARYFTPKGRSIQAKGIVPDIVVEEATVSSQEHAAMLREADLSRHLSNPKEGEEAPTVQPAPAEPENTKPEAPATEPDSKDQKDKPAANGPIEPGSKADYQFNQALNLLKGLQILQRK

SEQ ID NO: 3412 - protein, 371 aa, Agrobacterium tumefaciens
MTSLFEPAQAGDIALANRIVMAPLTRNRSPGAIPNNLNATYYEQRATAGLIVTEGTPISQQGQGYADVPGLYKREAIEGWKKITDGVHSAGGKIVAQIWHVGRISHTSLQPHGGQPVAPSAITAKSKTYIINDDGTGAFAETSEPRALTIDDIGLILEDYRSGARAALEAGFDGVEIHAANGYLIEQFLKSSTNQRTDDYGGSIENRARFLLEVVDAVAEEIGAGRTGIRLSPVTPANDIFEADPQPLYNYVVEQLGKRNLAFIHVVEGATGGPRDFKQGDKPFDYASFKAAYRNAGGKGLWIANNGYDRQSAIEAVESGKVDAVAFGKAFIANPDLVRRLKNDAPLNAPNQPTFYGGGAEGYTDYPALAQ

SEQ ID NO: 3413 - protein, 351 aa, Ralstonia eutropha JMP134
MPTLFDPIRIGDLDLPNRVIMAPLTRSRAVGGKRVPNALMAEYYVQRASAGLIISEATAVTPQGVGYADTPGIWTDEQVAGWKHVTDAVHAAGGRIFMQLWHVGRISDPIFLDGELPVAPSAIAAQGHVSLVRPKRAYVTPRALETEEIAGVIAAYRHGAENAKKAGFDGVEIHGANGYLLDQFLQDSTNQRTDAYGGPIENRARLLLEITDACIDVWGADRVGVHLSPRGDVHSMGDSDLAATFGYVARELGKRRIAFICAREALGDNRLGPALKAAFGGVYIANEKMTKQTAEHVLAAGEADAVAFGQLFIANPDLPRRLALDASLNEPRPETFYHPGAEGYTDYPALV

SEQ ID NO: 3414 - protein, 453 aa, Glycine max
  misc_feature (153)..(153): Xaa can be any naturally occurring amino acid
MEECHTVFGKYEMGRLLGKGTFAKVYYGKQISTGESVAIKVINKEQVRKEGMMEQIKREISVMRLVRHPNVVEIKEVMATKTKIFFVMEYVRGGELFAKISKGKLKEDLARKYFQQLISAVDYCHSRGVSHRDLKPENLLLDEDENLKISDFXGLSALPEQLRYDGLLHTQCGTPAYVAPGVLRKKGYDGSKADIWSCGVVLYVLLAGFLPFQHENLMTMYNKVLRAEFEFPPWFSPDSKRLISKILVADPSKRTAISAIARVSWFRKGFSSLSAPDLCQLEKQEDAVTVTVTEEENNSKVPKFFNAFEFISSMSSGFDLSGLFESKRKTATVFTSKCSAAAIVAKIAAAARGLSFRVAEVKDFKIRLQGAAEGRKGRLAVTAEVFEVAPEVAVVEFSKSAGDTLEYAKFCEEDVRPALKDIVWTWQGDATCAANFPACHGEECQKQVVVSTI

SEQ ID NO: 3415 - protein, 430 aa, Arabidopsis thaliana
MSLTLEFLLLLIVLFLSHHAHSGSIVKFLPGFEGPLSFELETGYIGIGEEEEVQLFYYFIKSEKNPEEDPLLLWLSGGPGCSSLTGLLFENGPVALKFEVYNGSVPSLVSTAYSWTKMANIIFLDQPVGAGFSYSRTPLVDKTSDTGEVKRIYEFLQKWLSKHQQFFSNPFYVGGDSYSGMIVPPLVQEIAKGNYQINLQGYILGNPITDTESEQNYQIPYAHGMALISDELYKSMERICKGNYVNVDSLNTKCYKLIKDYQKCLHKLNKYHILLPDCDITSPDCFLYRYTLMTFWANNKSVREALQVNKGSIGEWVQCNYKNISYNYDIKSSVAYHMKNSIDGYRSLIYNGDHDMMVPFLATQAWIRSLNYSITDDWRPWMINDQIAGYTRSYSNKMTFATIKASGHTAEYLPNESSIMFQRWISGQPL

SEQ ID NO: 3416 - protein, 876 aa, Nicotiana tabacum
MAAPSSTTNVMLSISEKKTVSVDLYRPLRNYIIYNYSEREAQNIEDDLQTLKEYRSDIERAGSTDSSSSLPARRDLLQNYYKALCAVESRFPISPDQDHINSVTFTWFDAFKNKNKAAQQNIHLEKAAVLFNLGAVHSQMGLGFDRSSVEGRRQASHSFIAAAGAFAFLRDNVAMKASMGSSTTVDVSVECAGMLERLMLAQAQECVFENSIAKGNTPGVCAKISRQVGLFYEEALAALSVAPLNQHFDKAWLAHVQLKAALFYAEACYRYSLELHEKEEIAEEIARLKSGVNALSEARKTSPRGAAQQLLDAMNKLEASLNLNLEKAMKENDRVYLMRVPPASSLSPLPAFSLVKPMQMNDVLDASKEKMFASLVPDNSAKALSRYTEMVDDVIRTQAEKLQQGSELARVRLREMDLPDSILALDGNLSLPLALKEDVEAVQICGGPAGLDAELQQLRDLKRVNQELLVQTEEHLQKEATEDAQFRTQFGTRWTRPQSTTLTKNLLDRLNRFAANLKQAAESDARIERSVRDHAALMSILDRHPIESALPTLERPIMSLDATEDAIVGALKQSLRHLETLGAQRAGLEDMLKEMKRKDDILPKLMTSTGSHEDLFRKEIAKYDHICEEIARNLEAQEQLLLQIQAHNEEFASIFSLEDYKANRERIYNQIEAAISKYREIKDNINEGLKFYVTLQEAITNVKQQCSDFVMTRSIQCREMIEEVQRQISGLSFQDSKSSSGYAYPSVGQPQQAPRANPQLPADTGNIPNHPRPQNPTYQPPQQPTMPGYSQTSPYGSPQPPAPPYNFPGQGQPYPHPQHQQQPPQSHEYGQPAYPGWRGPYYNAPPQQPGAMPRPPYTAPSPYPHPPPHQSGYYRQ

SEQ ID NO: 3417 - protein, 242 aa, Neurospora crassa
MASSSSSATPLLYSCIAHNTTILAECTTSASSQTSSLASLILPKIDHSTPQKLTYTHGSYHIHYMSESPSDWTSQPSASSAGGLTFLVVADSSLGRRIPFGFLVEVRKRFLAQYPPGPTNDFSDMPNYGTASFNSELKTLMVDYGTTGQGQNDAITNAKREIEDVKGIMTRNIEGLLERGERIDLLVDKTDRLGGSAREFRVRSRGLKRKMWWKNVKLMALLALVVVLIVLSIVIAVKNSLP

SEQ ID NO: 3418 - protein, 230 aa, Arabidopsis thaliana
MGRGKIEIKRIENSTNRQVTFCKRRNGLLKKAYELSVLCDAEVALIVFSTRGRLYEYANNNIRSTIERYKKACSDSTNTSTVQEINAAYYQQESAKLRQQIQTIQNSNRNLMGDSLSSLSVKELKQVENRLEKAISRIRSKKHELLLVEIENAQKREIELDNENIYLRTKVAEVERYQQHHHQMVSGSEINAIEALASRNYFAHSIMTAGSGSGNGGSYSDPDKKILHLG

SEQ ID NO: 3419 - protein, 737 aa, Chlamydia muridarum Nigg
MDPFFLNTQHVELLVSGKQSSPQDLLGIVSESLNQDRIVLFRPGAKTVFVELQGKIQQAESHHSGIFSLPVTKGISPQDYRVYHQNGLLAHDPYAFPLLWGEIDSFLFHEGTHQHIYDRMGAIPCEIGGVPGVRFVIWAPHAQRVSVVGDFNCWHGLVNPLHKVSDQGVWELFVPGLTAGSCYKWEIVTASGQVLIKSDPYGKFFGSPPQSVSVVVDDRYEWGDKEWLDERSKKAEGPMNIYEVHVGSWRWQEEQPLNYRELADQLSLYCKQMHYTHVELLPVTEHPLNESWGYQTTGYYAPTSRYGSFEDLQYFIDTMHQHGIGVILDWVPGHFPVDSFAMSNFDGTPLYEYTRNPSPLHPHWHTYTFDYAKPEVCNFLLGSALFWIDKMHIDGIRVDAVSSMLYLDYGRNPGEWIPNRYGGRENLDAVRFLQQFNTIIHEKYPGVLTFAEESTTFPKITVSVEEGGLGFDYKWNMGWMHDTLHYFEKDFPYRPYHQSDLTFPQWYAFSERFLLPFSHDEVVHGKRSLIGKMPGDAWRQFAQLRLLLGYQICQPGKKLLFMGGEFGQGREWSPNRELDWDLLDIHYHQGVHLCSQKLNSLYVNSPQLWKGDHLPQSFRWIDFSDTRNGVVAYLRFASDEDKEALLCVHHFGVNHFLHYILPMLPMKSCSLLMNTDDLAFGGSGKGFRNPKMLTPEMVRKEKTSSELAPLDDDGSVAWGLDIEMPPSATLIFSVTLQ

SEQ ID NO: 3420 - protein, 312 aa, Oryza sativa (japonica cultivar-group)
MAAAEVYSPTAAAAAQQQQRGKVAAQAWQAVVGWIGFLLQVLLQILRGTPSCAQLLSFVGFRYPLLSGPADSEQSPSVAFMPLRSEIPADTAPAPTPPPESLQRLTVVLDLDETLVSAYESSSLPAIVRTQAVEAGLHCFDMECISTEKDVEGRNKVNHVTVFERPGLHEFLQKTSEFADLILFTAGLEGYARPLVDRIDVHNRFKLRLYRPSTVTTEYREHVKDLSCVSKDFCRVVIVDNNPFSFILQPLNGIPCVPFSAGQHNDNQLMEVIFPLLKHLSIQRDVRPALYERFHMPEWFQKHGIPQTDQAV

SEQ ID NO: 3421 - protein, 542 aa, Lactobacillus acidophilus NCFM
MAKDIKFAENARRSLLKGVDKLADTVKTTIGPKGRNVVLEQSYGNPDITNDGVTIAKSIELKDHYENMGAKLVAEAAQKTNDIAGDGTTTATVLTQAIAREGMKNVTAGANPVGIRRGIEKATKAAVDELHKISHKVESKEQIANVAAVSSASKEVGELIADAMEKVGHDGVITIEDSRGINTELSVVEGMQFDRGYLSQYMVTDNDKMEADLDNPYILITDKKISNIQDILPLLQEIVQQGKSLLIIADDVTGEALPTLVLNKIRGTFNVVAVKAPGFGDRRKAQLEDIAALTGGTVITDDLGFELKDTKIDQLGQARRVTVTKDSTTIVDGAGSKDAIKEREDSIRKQIEESTSDFDKKKLQERLAKLTGGVAVIHVGAATETELKERRYRIEDALNSTRAAVDEGYVAGGGTALVDVEKAIKDLKGETSDEQTGINIVLRALSAPVRQIAENAGKDGAVVLNKLESQENEIGYNAATDKWENMVEAGIIDPTKVTRTALQNAASIAALLLTTEAVVADIPEDKPEAPQAGAAGAPGMGM

SEQ ID NO: 3422 - protein, 232 aa, Oryza sativa (japonica cultivar-group)
MTWSSDSDRDDEPATAAAASADDASLATSFFLQQPGTPPAAAPAPARRRRHKNRRPRAHRRAAAKNEEEEEVAGTEDVWRGAQWEAAWPRRAAARPVVVADDAAGAAAAREDAPGVGGEGGGLGVGRARSLTDDDLEELKGCVDLGFGFSYDEIPELCGTLPALELCYSMSQRFLDEHYHSPVAEPAPVAPSSPAQPIANWKISSPGDSPDEVKARLKYWAQAVACTVRLCS

SEQ ID NO: 3423 - protein, 325 aa, Cryptococcus neoformans var. neoformans JEC21
MSLGRTLKLNNGVVAPQIGFGTWQAAPGEVEKAVEEAIKVGYRHIDCALIYRVFDATGVYGTVAQGIKASGVPRKDLFLVSKLWNNSHRPEKVEADLDTSLKQLGTDYLDVYLIHWPVPFAPGDNLFPKTEDGKVAIDWDGPSVVDTWKELIRISKETKKVKAIGVSNFNVELLEKLIKETGVVPTMNQIECHPSLIQPELFKYCKEKNIVITAYSPLGNNTTGKPRIIDQPQIIDIAKKLNKEPAQVLINWAAHQGFAVIPKSVTPSRIKSNFEDFKLNDDVFEEINKVGKANAARANIPAEYNPSWPINVFGEKSEEQYKKVW

SEQ ID NO: 3424 - protein, 142 aa, Brassica napus
  misc_feature (120)..(120): Xaa can be any naturally occurring amino acid
SHGHSETTELRGKKHRKIYRFFCNLHSIQFTASKMVAKEAIPLLTPHKMGQFELSHRVVLAPLTRCRSYANVPQPHAAAYYSQRATKGGLLIAEATGVSATPQGYPETPGVWTQQQVDAXKPIVDAVHRKGALFFCQIWHVG

SEQ ID NO: 3425 - protein, 213 aa, Methanosarcina barkeri str. fusaro
MEVRYICPTAYDSSVYLVNGKVLIDTGMNSDLIIKQLEKYIKLTDIELIVLTHCHYDHTAAAAVIAERSGAKVGIHKADLEGINDDYLSVAVIFGERAPEVRPTITYEEGDKIDIGNGEYLEVIHTPGHSKGSICLYEPVSKSLFSGDTVFPGGGSGRTDFEGSVPEKMASSIEKLTKLDVKNLYPGHGSPTDRDGNNQIMASYRMLKMMMGE

SEQ ID NO: 3426 - protein, 533 aa, Ustilago maydis 521
MSIANASSSTASHDLDAADADPCPSACTSVSALCNMSTLPSPRPFGYRPTYVPAMVASGVSAVTVTTNSHRPPSKSHSISSVDSLASVSSNAPSTPTHDADDVRFEMAVIPKLVRASADAYLDRVGKPLPPSPAPQIVATSATTKTNAQAARSVAAAAAAAAAAAAVPPSHSALRNENHKNAISFRVGSKYKVCEIIGEGAYGVVCSAIHRATGQKVAIKKIQPFEHQMFALRTLRELKLLRFFQECDVSENIISILDIIKPSTYEAFTEVYLVQELMETDLHRVIRTQELSDDHCQYFTYQTLRALKPMHCADVIHRDLKPSNVLLNANCDLKVCDFGLARSVLTADQDTGFMTEYVATRWYRAPEIMLTFKQYTKAIDVWAVGCILAEMLTGRPLFPGRDYHQQLSLILDVLGTPTLEEFQNINSRRSRDYIRSMPFRKRREFRTLFPKASPEAIDFLQKTLTFDPRNRLTVEECLQHPYLSAYHDPDDEPGAPRLDPDFFYFDMQKESITKEDLRKELWYQVQEFQPLLR

SEQ ID NO: 3427 - protein, 129 aa, Brassica napus
MESKPFVSVTFLTVTLFLGGAIRSGICRSEERRMEHVRLGGVHDLPGNQNSGEIESLARFAIQEHNNKENKVLEFKKIVKARQQVVAGMMYYLTLEANEGGQAKNFEAKVWVKPWMNFKQLREFKESSS

SEQ ID NO: 3428 - protein, 744 aa, Aspergillus nidulans FGSC A4
MATSITAGLQKAQQAVQDTATKNKKIVDISHDTVNVHTDQEQRTDFGVAITDPDHWLRVTNETHSGPSLLEDHIARERIHRFDHERIPERVVHARGTGAYGNFTLKESIEDLTYAGVLTDTSRNTPVFVRFSTVQGSRGSADTVRDVRGFAVKFYTDEGNWDIVGNNIPVFFIQDAIKFPDFVHAVKPEPHNEVPQAQTAHNNFWDFVYLHPEATHMFMWAMSDRAIPRSYRMMQGFGVNTFSLVNKEGKRHFVKFHWIPHLGVHSLVWDEALKLAGQDPDFHRKDLMEAIDNKAYPKWDFAIQAIPEEDQDKFEFDIFDATKVWPEEQVPLRVVGELELNRNIDEFFPETEQVAFCTSHIVPGIDFSDDPLLQGRNFSYQDTQISRLGVNWEEIPINRPVCPFLNHNRDGAKRHRITKGTVNYWPNRFEANPPASDKGFKSHPAPITGRKRRDLTPKFKEYHNQAQLFYNSLSEVEKVHVKKAFSFELDHCDDPIVYERLAGQRLAEIDLPLAQAVAEMVGAPIPTKALRDNHGKTSVRLSQFDFTPKAPGIISRRIAIIIGDGYDKIAFNGMKAAILAAQALPFVIGTKRSAIYAQGEDKNSSKGVIPDHMYDGMRSTMFDATFIPGGSHIETLQKNGQIRYWIAETFGHLKALGAMGEAAQLVKEVLGNVMGVQIAGADSAEPVEWYGVVTARGPESAESLSEGFKVLKDAGDFTSKFFYQISQHRNWQRELDGLASTVAF

SEQ ID NO: 3429 - protein, 1525 aa, Arabidopsis thaliana
MPGNEYGERIHNFFGQEGLSQDSHQPQAGDGSWSGFRNGLVSNQRQIDPSLIANLKTYSTQQSVDPERGQSSNSQHGLNFAQQPMRSDYSRSVLREHQQSTTGYMHGNLMLQASPNEGSFVGVDVESSRDRLSGSGFTLDRHKTPMRFDMGESPVNYDFFGGQQQLNNQLPGMIQPFPRQQMTFNDMQLLKQHAMAKQMHEYQIQQQLQKQQLEARQLNSLHSNAVNGSLSSDNQSHPSISGVPLQDASNNWLQPDLMTGNTNWMHRGISPIVQSSSSGLVITPEHGHANLMAQQFETSLYGMPVGGTDAPQNAFSSFQMKMLAAQHGSANMSSSLTNQPTSFLNQSDSHMLPRSTYQENLYSHISVPGSNDRPNFESFQQDNSGQQNISGQEEFGQMDGSGLSEKSFMKVPENINTLQKSTTLDPTEEKILFGSDDNLWEAFGNSTDMSLTGNLMSSSSDLFDACPSLQSGSWSALMQSAVAETASDDAGVHEWGSKQQSVWANNINAPHPDSRIGNRAQVSGGHTDSTRSTVQHLQDKGNIVSDHGLLEKPMTPQSQMAGNMFQSLSSGIDVQNNSCSIGKNEDIDDRLGNWRGASNPNSAALMERKNHFTQNLQMQRASYGAGDDSRASRDIQQNIQHHLDNNSVEKAIHQLNSGDSSQILESYASNNVSKVMTESNEMGNSGKENSSDSFRSKFSPESLTQVNARDLSVLPGGKETQSPSRSDGLIRDGLNHKDSANCMLQFGPTISQSFFNKNHAVSAGSDHQQISPQIAPSRFSQYEAFKNGLVQPVNDTGRFTLLKIGERYSNLGNSDDGLHSVQSSKQLNTADPGYIVHMQQISGSTPGVETLSSASLPCGATDQLLKVYKPKKRKNVTSELLSWSKEVMQRPQRLKTLGFLFEAEVDWARATNRFAEKGLFVEFATLLEDGPPIRSKRRLIYTTQLMQQLFRPLPGRVKSLVTSYEFVAYSAARAALGDACSSTSTDRIEGFLLQNNLNPLSERTETEKMSDQYISKAAEDFISRTKKLETDFAGLEKGTTITDLRVEVQDLERFAVINRFASFHQSSSSMDRSVSSLRLNPQRYVTVAPVPRHIPDRCCKKQGPKIREIKREKVGFHIFCIWTEKSLNSTNEQELKVLVCYSRIRESKTQRQTTSNLWCGNKSHTRATIRRGEMKIYPEHNAGDAEDNGDESGVVNGKILRRYRPWNVRLCRRRLPWIVHRRSVPVTFPPPASPSPASSSRSLASSSPSPGSFSSSMRLWRPAAQRNLRNQWSNLSNCRQQWIVACSAGRSHATLLVNSYLSQKYMPMMELGVLSDMFDIDKKALKKLFTQQSSYRIKLLSSYKEMVAVVVEMVNASRSLRCYTKLSTGSLIQFSGTKEDSNDAGDCGGIPVFNFWNVSAFEKMAEELVEMFKREVMLKRLLIMELISLSTEVPQPINNSWSDELYHGEFDHLTKCSLYSMEVAKPVLPRVKDYNIGSSSISHTNQPTAEILQIYLTTWLAEVNIDTHRVDEILALVGEEIRVTF

SEQ ID NO: 3430 - protein, 462 aa, Leptospira interrogans serovar Copenhageni str. Fiocruz L1-130
MKNKERMIWIGIVSFLSFALIFPIETVKGISKTGESYLQIFHEVLSTIHSDYVESVDEEKLYQGAIRGLISSLGDPHSRFMDKDDFSQLQEETRGSFGGLGMEVSFADGAIVVISPIEDTPAMKAGILPQDRIIEIDGKNTHDLSLSDSIKLMRGKVGTSVSIKLERKNQKEPMVLTLVREMIKIRYVRSSFLEKEKLGYIKLNQFMGKENTLSEFKKELNSLKEKGAEGLILDLRMNPGGLLDLAIALSDLFLKPDLDIVSVRGRGGELVRVFRSTAANDKFINLPLVVLINEGSASASEIFAGAMQDHGRGKILGTVSFGKGSVQNIYSLSHNTGIALTIQKYYTPSGKSIHGKGIQPDVIVKPIEPTEDDRFYIRKMAEKKMLETFLLKNPNYSEANFVLLEKYLSEKGIKLSADVARFLYKSKTRQEGQNSILDLELDPQLRKAIEILSPNKDGEKKS

SEQ ID NO: 3431 - protein, 544 aa, Chlamydophila pneumoniae
MAAKNIKYNEEARKKIHKGVKTLAEAVKVTLGPKGRHVVIDKSFGSPQVTKDGVTVAKEIELEDKHENMGAQMVKEVASKTADKAGDGTTTATVLAEAIYSEGLRNVTAGANPMDLKRGIDKAVKVVVDELKKISKPVQHHKEIAQVATISANNDSEIGNLIAEAMEKVGKNGSITVEEAKGFETVLDVVEGMNFNRGYLSSYFSTNPETQECVLEDALILIYDKKISGIKDFLPVLQQVAESGRPLLIIAEEIEGEALATLVVNRLRAGFRVCAVKAPGFGDRRKAMLEDIAILTGGQLVSEELGMKLENTTLAMLGKAKKVIVTKEDTTIVEGLGNKPDIQARCDNIKKQIEDSTSDYDKEKLQERLAKLSGGVAVIRVGAATEIEMKEKKDRVDDAQHATIAAVEEGILPGGGTALVRCIPTLEAFLPMLANEDEAIGTRIILKALTAPLKQIASNAGKEGAIICQQVLARSANEGYDALRDAYTDMIDAGILDPTKVTRSALESARSIAGLLLTTEALIADIPEEKSSSAPAMPSAGMDY

SEQ ID NO: 3432 - protein, 480 aa, Lactobacillus plantarum
MSEFPEGFLWGGATAANQLEGGYQEGGRGLSIADRLPGGKDRFKIVSQPDFDWTIDTDKYTYPNHEGIDFYHHYKEDIALFAEMGFKCYRFSIAWSRIFPNGDETQPNEAGLKFYDDVIDECLANNIEPVITISHYELPLNLAKRYGGWKNRYLIEFYETFARTILTRYASKVKYWMTFNEINSAVHFPVMGQGLVLSTGANDKKNVFQAWHNQFVASAKAVKIAHELRDDIQVGCMILYATSYAYDSNPVNQLANLQHNQDFNFFCADVQVRGAYPTYTKRLLAEYNLTFDDLETTDGDLALLQQYPVDYIGFSYYMSSAVETTGSVTDTVAGNLMGGVKNPFLKASDWGWQIDPTGLRIALNELHDRYQKPLFVVENGLGAIDKPDKNFYVEDDYRIDYLKQHIEAMAGAIDDGVDLMGYTPWGCIDLVSASTGEMSKRYGFIYVDLDDQGHGTLARYPKKSFYWYQDVIKHNGLTKK

SEQ ID NO: 3433 - protein, 472 aa, Bartonella alsatica
MLREVASKTNDIAGDGTTTATVLGQAIVQEGIKAVAAGMNPMDLKRGIDAAVDEVVANLFKKAKKIQTSAEIAQVGTISANGAAEIGKMIANAMEKVGNEGVITVEEAKTAETELEVVEGMQFDRGYLSPYFVTNAEKMVADLDDPYILIHEKKLSNLQSLLPVLEAVVQSGKPLLIIAEDVEGEALATLVVNKLRGGLKIAAVKAPGFGDRRKAMLEDIAILTSGQVISEDVGIKLENVTLDMLGRAKKVNISKENTTIIDGAGQKAEINARVNQIKAQIEETTSDYDREKLQERLAKLAGGVAVIRVGGATEVEVKEKKDRVDDALNATRAAVEEGIVAGGGTALLRAASALTVKGSNPDQEAGINIVRRALQAPARQIASNAGEEAAIIVGKVLENKADTFGYNTATGEFGDLIALGIVDPVKVVRSALQNAASVASLLITTEAMVAETPKKETPMPPMPGGGMGGMGG

SEQ ID NO: 3434 - protein, 544 aa, Chlamydia trachomatis
MVAKNIKYNEEARKKIQKGVKTLAEAVKVTLGPKGRHVVIDKSFGSPQVTKDGVTVAKEVELADKHENMGAQMVKEVASKTADKAGDGTTTATVLAEAIYTEGLRNVTAGANPMDLKRGIDKAAKVVVDQVKKISKPVQHHKEIAQVATISANNDAEIGNLIAEAMEKVGKNGSITVEEAKGFETVLDVVDGMNFNRGYLSSYFATNPETQECVLEEALVLIYDKKISGIKDFLPVLQQVAESGRPLLIIAEDIVGEALATLVVNRIRGGFRVCAVKAPGFGDRRKAMFEDIAILTGGQLISEELGMKLENANLAMLGKAKKVIVSKEDTTIVEGMGEKEALEARCESIKKQIEDSSSDYDKEKLQERLAKLSGGVAVIRVGAATEIEMKEKKDRVDDAQHATIAAVEEGILPGGGTALIRCIPTLEAFLPMLTNEDEQIGARIVLKALSAPLKQIAANAGKEGAIIFQQVMSRSANEGYDALRDAYTDMLEAGILDPAKVTRSALESAASVAGLLLTTEALIAEIPEEKPAAAPAMPGAGMDY

SEQ ID NO: 3435 - protein, 247 aa, Prunus dulcis
  misc_feature (220)..(220): Xaa can be any naturally occurring amino acid
  misc_feature (228)..(228): Xaa can be any naturally occurring amino acid
  misc_feature (235)..(235): Xaa can be any naturally occurring amino acid
  misc_feature (243)..(243): Xaa can be any naturally occurring amino acid
RIENKINRQVTFAKRRNGLLKKAYELSVLCEAEVALIIFSNRGKLYEFCSSSSMLKTLERYQKCNYGAPETNVSAREALELSSQQEYLKLKARYEALQRNQRNLLGEDLGPLSSKELESLERQLDMSLKQIRSTRTQCMLDQLTDLQRKEHMLNEANKTLKQRLFEGYHVNSLQMNPNADEYGRQQTQAHGDGFFHPLDCEPTLQIGYQNDPISVVTAGXSVSNYMAXMVAMIIXKCVLESTXSHEW

SEQ ID NO: 3436 - protein, 540 aa, Clostridium scindens
MSYEALFSPFKVRGLELKNRIVLPGMNTKMAKNKHDIGEDMIAYHVARAKAGCALNIFECVALCPAPHAYMYMGLYTDHHVEQLKKLTDAVHEAGGKMGIQLWHGGFSPQMFFDETNTLETPDTLTVERIHEIVEEFGRGARMAVQAGFDAVEFHAAHSYLPHEFLSPGMNKRTDEYGGSFENRCRFCYEVVQAIRSNIPDDMPFFMRADCIDELMEQTMTEEEIVTFINKCAELGVDVADLSRGNATSFATVYEVPPFNLAHGFNIENIYNIKKQINIPVMGVGRINTGEMANKVIEEGKFDLVGIGRAQLADPNWITKVREGKEDLIRHCIGCDQGCYDAVINPKMKHITCTHNPGLCLEYQGMPKTDAPKKVMIVGGGMAGMIAAEVLKTRGHNPVIFEASDKLAGQFRLAGVAPMKQDWADVAEWEAKEVERLGIEVRLNTEVTAETIKEFNPDNVIIAVGSTYALPEIPGIDSPSVYSQYQVLKGEVNPTGRVAVIGCGLVGTEVAELLASRGAQVIAIERKGVGTGLRCFAECS

SEQ ID NO: 3437 - protein, 398 aa, Nitrosomonas europaea ATCC 19718
MDDIASILMNGLIDLPWWGYIVVALVFTHITIASITIFLHRYQAHRSLELHPIPSHFFRFWLWLTTGMVTKEWAAVHRKHHAKCETVDDPHSPQVFGIKKVLGEGAELYKVETKNQETLDRYGHGTPDDWIERNVYTKHSVAGIASMLIINVILFGPLGLTIWAVQMMWTPVMAAGVINGIGHYWGYRNFRSEDASRNIVPWGILIGGEELHNNHHAYPTSARLSNKWYEFDIGWMYIRILEMMGLARVKKIAPKLQLNKAKTECDLETLQAVISHRYEILAKYTKSLKIALKNELVHLQQAAIENGVDGLTLRNWVLADAKTLKEEERTKLETVLSHAQKLDKLYRMREELSLIWERSAATKDELLKQLEDWCRRAEESGIELLEKFSRRLRCYAMA

SEQ ID NO: 3438 - protein, 380 aa, Mannheimia succiniciproducens MBEL55E
MNPIFSPLFQPYTLNNGVEIKNRLVVAPMTHFGSNTDGTLGKQEHRFISNRAGDMGMFILAATLVQDGGKAFHGQPEAIHTSQLPSLKATADIIKAQGAKAILQIHHGGKQAITELLNGKDKISASADEESGTRAATIEEIHTLIDAFGNAADLAIQAGFDGVEIHGANNYLIQQFYSGHSNRRTDEWGGSRENRMRFPLAVIDAVVAAKIKHQRDDFIIGYRFSPEEPEELGLTMEDTLALVDVLKEKPLQYLHISLWDFYKKARRGADSNTARLQLVHERIGGKLPLIGVGNLFTAQQILEAYQTGWAEFIALGKTVMVNPKIATMILNGQENQLITEVDENQADHYGFPDFLWNATMSATQAWLPPVKGKPWSPLDI

SEQ ID NO: 3439 - protein, 321 aa, Schizosaccharomyces pombe
MSAEQKYFENAQNVHFTLADGSKIPGLGLGTWRSEPNQTKNAVKTALQYGYRHIDAAAIYGNEDEVGDGIKESGVPRKDIWVTSKLWCNAHAPEAVPKALEKTLKDLKLDYLDEYLIHWPVSFKTGEDKFPKDKDGNLIYEKNPIEETWKAMEKLLETGKVRHIGLSNFNDTNLERILKVAKVKPAVHQMELHPFLPQTEFVEKHKKLGIHVTAYSPFGNQNTIYESKIPKLIEHETIQKIAKSKGEGVTGATIAVSWAITRGTSVIPKSVNEQRIKSNFKYIPLTKEDMDEINSIGIRARFNQATFSNEPVFAGLEDGRT

SEQ ID NO: 3440 - protein, 331 aa, Arabidopsis thaliana
MQAISKVSSAASFFRCSRKLVSQPCVRPCVRQLHVRKGLVSGVMKLFSSPLRTLRDAGKSVRISRFCSVSNVSSSLQIELVPCLTDNYAYILHDEDTGTVGVVDPSEAVPVMDALQKNSRNLTYILNTHHHYDHTGGNLELKDRYGAKVIGSAADRDRIPGIDVALKDADKWMFAGHEVHIMETPGHTRGHISFYFPGARAIFTGDTLFSLSCGKLFEGTPEQMLASLQRIIALPDDTSVYCGHEYTLSNSKFALSIEPTNEVLQSYAAYVAELRDKKLPTIPTTMKMEKACNPFLRTENTDIRRALGIPETADEAEALGIIRRAKDNFKA

SEQ ID NO: 3441 - protein, 569 aa, Debaryomyces hansenii CBS767
MMTDNKSDSDSIEIHLAKEMTNIPRTSSTPTPVVGIPGGTKPQTIFIHKLYDMLEDGNISHLIWWTENSESFGLLPGEEFSKVLAQYFKHTNIASFIRQLNMYGFHKVNDAGQSENGGDNNVARWEFRHLANHFRKGDIESLKLIKRRSSKNINHTREAAKTAGGTEDDIHEAVNEDDTKGIHTGDQHDVRAHEQQQHYHQTLQLQQQDQIPQPPSAIQHHHLTQIDGAPSPSVLPPLSKLPQIYKLSSDKSLETRLNEATSNLGTLRHEHHQLQTQFDLVFNEQKKSQFDLIQLVEIMQRHAVKSEDDKKLDYELTNFKQVLLNKFNNLHVLLSQAQGHQTPTIHPQHLSHAHPSMKPQYNSSHLHYSYSQSSADSNTDSSNIETQKLSKNGSKQPVSDGPMAKDVQPPYTYAEKFLEKNNIPTSLHSPHTSEVRRGYQQYPFPNMNSDPRASAPSTPDQFGQSVPPRVSLPSTNTYEQRPQSIPTPNSSLSLSRLALSNSSVSSGSSYSSNISVETPPKLVPLPSVSELDKLIKNGGGGLPLYRMLNSYGPMKRKNSTEEETRKRQA

SEQ ID NO: 3442 - protein, 910 aa, Legionella pneumophila str. Paris
MLKSIGIKYQLRITTLIPAFLVALLFAFFYNGLFGKDLKQHMSRLGEAYIRQLLPAAQYAMLRNDYRTLQGLINASTINPEVKALAFYNADGRLIAYRGGKHSIHKPFNPPDYTGDYIESKQINPFTINFIAPITIPKFNLYSSTEFKELSTPKIFQADDILGWLSIDIDTQSLLIKRYQMLIVTIFITLFGLLMGLTIHYFLSKRIYMPIARLRRSMKQILSNEFETEIRVSSPGELGIIEKGCAHLQRQYLNTVRDLNHHIEIATADLQQSLELLEEKNIELSLEKKKTEEKSRQKSEFIANMSHEIRTPMNGVIGFTNVLLESKLDPLQLDYVKTIKSSAQDLLSIINDILDFSKIDAGKLNLDCIPLDIRGCIDEVLSLASPNAHKKGIDLIPITDINVPKMVLGDPLRIKQIISNLVTNAVKFTDHGYVLIRTKIEQETDKDYTLLFAITDTGIGISPEDQTKLFTAFNQADTSITRRYGGSGLGLVICKKLCEEMHGRISLTSEINKGSTFSARIKVEKLVAYEIEKNQTHRFAHLKIICFDDNPLHLEAIGNGLGFWGIEAIRVDSFNKLSRILTKHKDCKIAFINVNQGCERQAAELIAKHKQIPFVLISKWPINDFAALGARGFLYKPISIQKLQDLIESIANENQTEKNTNQELDTLREQLRFLHPEILIAEDNPVNKMLLTSLLNNNANITTVDDGEMAVTACEDKKFDMILLDLHMPKLNGLEAAKMIRQKSLMNKHSPIVLITASSSDLSSIDMKKSGVDFCFQKPIDEKQLLIQILRIVDKTKHAAIDWQLCVQKVSGNQALAEEFLAKFIEELYKNREEFIELMHQKNVKGLADLAHKLHGACCFCGVPILQKRVAQLEKLARRTANADNLTGAFTDLIQSIDAVISEYENQYSQ

SEQ ID NO: 3443 - protein, 178 aa, Oryza sativa (japonica cultivar-group)
MMMMDLGFLEGGAGMADAGHDESGSPPRSGGVREQDRFLPIANISRIMKKAVPANGKIAKDAKETLQECVSEFISFVTSEASDKCQKEKRKTINGEDLLFAMGTLGFEEYVDPLKIYLHKYREVIGDSKLSSKAGDGSVKKDTIGPHSGASSSSAQGMVGAYTQGMGYMQPQYHNGDT

SEQ ID NO: 3444 - protein, 364 aa, Vibrio vulnificus YJ016
MSKLFEPTQLKHLDLQNRVVMAPMTRARTSQPGNIPNAMMATYYKQRASAGLIISEATQISDDSQGYSFTPGVYTDEQVAGWKSVTQAVKSQDAAMFCQLWHVGRVSHPVFQKGEQPIAPSALAPVETKVWIADEQGNGNMVDCVEPRAMTQDDIDRVVSDFSYAAKRAIEAGFDGVEIHGGNGYLIDQFLRTNSNHRTDQYGGSRENRIRFLLQVVDAVSQAIGADKVGVRLAPFITFKDMNCPDIVPTILEASKQLQARDIAYLHLSEADWEDAPEIPESFRIELREYFTNTIIVAGSYTQARADEVLKKGYADLVAFGRPFVSNPDLVARLKHQQPLAELDGATLFGGDERGYTDYTALHV

SEQ ID NO: 3445 - protein, 473 aa, Arabidopsis thaliana
MAAAVSTVGAINRAPLSLNGSGSGAVSAPASTFLGKKVVTVSRFAQSNKKSNGSFKVLAVKEDKQTDGDRWRGLAYDTSDDQQDITRGKGMVDSVFQAPMGTGTHHAVLSSYEYVSQGLRQYNLDNMMDGFYIAPAFMDKLVVHITKNFLTLPNIKVPLILGSRGGKGQGKSFQCELVMAKMGINPIMMSAGELESGNAGEVRKLIRQRYREAADLIKKGKMCCLFINDLDAGAGRMGGTTQYTVNNQMVNATLMNIADNPTNVQLPGMYNKEENARVPIICTGNDFSTLYGPLILDGRMEKFLTGPTREDRIGVWGIFRTDKIKDEDIVTLVDQFPGQSIDFFGALRARVYDDEVRKFVESLGVEKIGKRLVNSREGPPVFEQPEMTYEKLMEYGNMLVMEQENVKRVQLAETYLSQAALGDANADAIGRGTFYGKGAHEVNLPVPEGCTDPVAENFDPTARSDDGTCVYNF

SEQ ID NO: 3446 - protein, 164 aa, Legionella pneumophila str. Paris
MGSLRKHQPGKTTDLLMSPFLRLQQEVNHAMSDFYNLFDPQRSANLEQFEHISLTPSLDIVEDKDNFKIEVEMPGMGEEDIKVSFCENRLTIEGEKTTSKKDENKNYISREISYGRYERTISLPLSADVDKATASFKKGMLWITIPKKTEARENVKTIKIEKAK

SEQ ID NO: 3447 - protein, 330 aa, Triticum aestivum
YNKFVQKSRLVPVRNSRDIVDPRVRLTEGYYVMDPKKAVEMVDENTICVAAILGSTLTGEYEDVKLLNDLLVAKNKETGWDVPIHVDAASGGFIAPFLQPELEWDFRLPLVKSINVSGHKYGLVYPGVGWVIWRSKADLPDELIFHINYLGTDQPTFTLNFSKGASQIIAQYYQLIRLGFEGYKHIMENCKLNAAVLKEGIDATGRFDVLSKADGVPLVAIRLKDSTNFSVFDISENLRRFGWIVPAYTMPADAEHVAVLRIVIREDFNRSLAQRLLTDINKIVGELDAHAVHAIKLSTAAAAEGASKSTVDAVTEAFKGLAGNKKAGVC

SEQ ID NO: 3448 - protein, 160 aa, Oryza sativa (japonica cultivar-group)
MSLIRRSNVFDPFSLDLWDPFDGFPFGSGSRSSGTIFPSFPRGTSSETAAFAGARIDWKETPEHVFKADVPGLKKEEVKVEVEDGNVLQISGERSKEQEEKTDKWHRVERSSGKFLRRFRLPENTKPEQIKASMENGVLTVTVPKEEPKKPDVKSIQVTG

SEQ ID NO: 3449 - protein, 495 aa, Escherichia coli
DRGIPRSYRTMEGFGIHTFRLINAEGKATFVRFHWKPLAGKASLVWDEAQKLTGRDPDFHRRELWEAIEAGDFPEYELGFQLIPEEDEFKFDFDLLDPTKLIPEELVPVQRVGKMVLNRNPDNFFAENEQAAFHPGHIVPGLDFTNDPLLQGRLFSYTDTQISRLGGPNFHEIPINRPTCPYHNFQRDGMHRMGIDTNPANYEPNSINDNWPRETPPGPKRGGFESYQERVEGNKVRERSPSFGEYYSHPRLFWLSQTPFEQRHIVDGFSFELSKVVRPYIRERVVDQLAHIDLTLAQAVAKNLGIELTDDQLNITPPPDVNGLKKDPSLSLYAIPDGDVKGRVVAILLNDEVRSADLLAILKALKAKGVHAKLLYSRMGEVTADDGTVLPIAATFAGAPSLTVDAVIVPCGNIADIADNGDANYYLMEAYKHLKPIALAGDARKFKATIKIADQGEEGIVEADSADGSFMDELLTLMAAHRVWSRIPKIDKIPA

SEQ ID NO: 3450 - protein, 680 aa, Desulfitobacterium hafniense DCB-2
MSEFTHLFKPIKVGSLTLRNRMITTSMSPGHGYTTDDNKPTQVFLNYLEERSKGGYALICQSVAFYPRQSRHPLPNAYAPEHLPHLRAMAEAVHKHGGLLVGQALALHDWRRNTNEPEGHFGPSDIQILKGVGPFQTMTKEDIKTYATQVANCGKILQAAGWDGIELLAGVGGVLSRFLSKATNNRTDEYGGSVENRCRFAMEVVQAVKEACGQEFPVLIRWSPVDYVKNGNEIEDAKQIVPYLEKAGVAWHNLAVGWHESSVPLTTKEIPDGHWSWIAAEIKKVATIPVVTGYRETDPLVMEKVLAEGKADLIGGVRYCIADPEFPNKVREGRLEDIQMCITCCRCLDEMAAGHGLEYCSVNPRLGPELLTPVEPVARPKKVMVVGSGPGGLAAALTAAKRGHQVTLYERGPRVGGCLVMSAIFSPTYERLTRYYKAQLSKTPNIQVKLNTLVTPELVRSEKPEAVIIAVGGHPVDLKAPGVERGDVVRSHDFLEMLNGKPPQKPGLINKVMWNGGAVFLRLFYSPKLVRSLMGMPWPFGKRVAIIGGGLPGCELGQELLAHQRKMAILEERKKIGYDVGASDRFHVVSKFKKSPDVQMEPSTKVLAITAEGVKFRREDSTEAIYPADTVAVTLGFEKNLELADRLKGKVPILKVIGDCEDPKRMADATKKGYRAAMEL

SEQ ID NO: 3451 - protein, 289 aa, Bifidobacterium longum DJO10A
MTNGHINPANVPDIALKDGHSIPQVGLGVLRIDDEGVVPVVESALEAGYRHIDGAAGYNNEAGVGRALAASGYNKGTKRETLWVTTKLRDSQQGYDSALKAFDNSLKLLQLDYVDMYMIHWPTPFDWRSTDTWKAFVKLRDEGMARTLGVCNFMPADLKRLHEETGAWPAVNQIELHPTWQQREVVAFCKEHGIAVEAYSPMARGADLNAGDGTIEKIAAAHEVSPAQVILRWHIENGTIIIPKSVHADRQKENLNLFGFALTADEHAAIDALDGPTRAGHDPLTFTYA

SEQ ID NO: 3452 - protein, 148 aa, Alkaliphilus metalliredigenes QYMF
MDLTMKICYNDIRIKKERGYFMKYKMLHTCIRVMDLEKSLRFYEDALGLVEKRRKDFPEHEFTLVFLSDEAGHYDLELTYNYNQDQSYEIGNGFSHIAVSVDDLEASQERHRKMGYKVTKLTGLPGSPPRYYFVTDPDGYDVEVIRAD

SEQ ID NO: 3453 - protein, 367 aa, Saccharomyces cerevisiae
MSSSAPKYTTFQGSQNFRLRIVLATLSGKPIKIEKIRSGDLNPGLKDYEVSFLRLIESVTNGSVIEISYTGTTVIYRPGIIVGGASTHICPSSKPVGYFVEPMLYLAPFSKKKFSILFKGITASHNDAGIEAIKWGLMPVMEKFGVRECALHTLKRGSPPLGGGEVHLVVDSLIAQPITMHEIDRPIISSITGVAYSTRVSPSLVNRMIDGAKKVLKNLQCEVNITADVWRGENSGKSPGWGITLVAQSKQKGWSYFAEDIGDAGSIPEELGEKVACQLLEEISKSAAVGRNQLPLAIVYMVIGKEDIGRLRINKEQIDERFIILLRDIKKIFNTEVFLKPVDEADNEDMIATIKGIGFTNTSKKIA

SEQ ID NO: 3454 - protein, 429 aa, Arabidopsis thaliana
MESLPQPQNQSSPATTPAKILLGKYELGRRLGSGSFAKVHLARSIESDELVAVKIIEKKKTIESGMEPRIIREIDAMRRLRHHPNILKIHEVMATKSKIYLVMELASGGELFSKVLRRGRLPESTARRYFQQLASALRFSHQDGVAHRDVKPQNLLLDEQGNLKVSDFGLSALPEHLQNGLLHTACGTPAYTAPEVISRRGYDGAKADAWSCGVILFVLLVGDAPFDDSNIAAMYRKIHRRDYRFPSWISKQAKSIIYQMLDPNPVTRMSIETVMKTNWFKKSLETSEFHRNVFDSEVEMKSSVNSITAFDLISLSSGLDLSGLFEAKKKKERRFPAKVSGVEVEEKAKMIGEKLGYVVKKKMMKKEGEVKVVGLGRGRTVIVVEAVELTVDVVVVEVKVVEGEEDDSRWSDLITELEDIVLSWHNDIM

SEQ ID NO: 3455 - protein, 170 aa, Brassica napus
DLDDSSTVSGDASVSSTGNQNPPPQSAVKKKRNLPGMPDPDSEVIALSPKTLMATNRFVCEICSKGFQRDQNLQLHRRGHNLPWKLRQRSSKEVRKKVYVCPVSGCVHHDPSRALGDLTGIKKHFCRKHGEKKFKCEKCSKSYAVQSDWKAHSKICGSKEYRCDCGTLFS

SEQ ID NO: 3456 - protein, 434 aa, Psychrobacter arcticus 273-4
MLESADQTDDLIDSVADESVLNNESAVINTDIPAEVAQVSLNAISPETLKTFVTLIDLVRREYVDTVNDEELFNNAMSGMLTKLDSHAEFLDAEAYENLRAFTEGDVGDIGIKVEYQSALGYWVITEVLDDSPADKKGIAVGDYLHQVDEFKLGEDEESNDIEQLLTGIAGTQVDVVTSKAGRRKHITTLQRNSSHPQIIETRFVDGMAVVRLPAFQNNSREKLLQSLIDLNKPVTGILLDLRDNPGGVLASAVSVASLFMTDTDVVQIKSRQADSRTLSTKGAALFKSLPVVVLQNRYSASAAEVLTSSLQAQKRATILGEISYGKGSVQSVIPLNDAQAVKLTVANYMTALGKKIDGIGVEPDVALSGSESTWEEQALNLLRKKALTSGIQFVYRAALEDLSKKKSDPKNSVIKNNTVINNVIEKPTFKEKS

SEQ ID NO: 3457 - protein, 492 aa, Yarrowia lipolytica CLIB122
MSGKRVPTYTTTNGNPVKDPLASQRIGKHGPLLLQDFALIDLLAHFDRERIPERVVHAKGSGAYGEFEVTDDITDLNCADFLSKIGKKTKTFTRFSTVGGEKGSADAARDPRGFATKFYTDEGNIDWVYNNTPVFFIRDPSKFPVFIHTQKRNPETNLKDATMMWDYIANNQECCHQIMVLFSDRGTPANYRQMNGYSGHTYKWIKKDGSFNYVQIHMKTDQGIKNLTNDEAVALSGTNPDHAQEDLFNSIKSGSFPSWTCYVQVCTPEQAEKLKWSVFDLTKVWPHDQFPLRRFGKLTLNKNVQNYFAETEQAAFSPSNTVPGWETSADPVLQSRLFSYPDTQRHRLGTNFAQIPVNCPYHAHTPYHRDGQMAVNGNSGSLPNYPSSFEPLQYRQDINLHEKHEKWVGEAVAYQWVVGTDGVDFQQPAELWKVLGKTPDQQEHLVYNIAVSLSGARPEVQDKTFGMFDKVDAHFGKLVRDATLQRSPRSKL

SEQ ID NO: 3458 - protein, 318 aa, Synechocystis sp. PCC 6803
MLNPLNIEYLYLSKLFDNSLIVFNKRQLFRFFVRFFFMTAALPNDSKPKLTPAWTVIFFFTSIHLVALLAFLPQFFSWKAVGMAFLLYVITGGIGITLGFHRCISHRSFNVPKWLEYIFVICGTLACQGGVFEWVGLHRMHHKFSDTTPDPHDSNKGFWWSHIGWMMFEIPAKADIPRYTKDIQDDKFYQFCQNNLILIQVALGLILFALGGWPFVIWGIFVRLVFVFHFTWFVNSATHKFGYVSHESNDYSRNCWWVALLTFGEGWHNNHHAYQYSARHGLQWWEVDLTWMTIKFLSLLGLAKDIKLPPETAMANKA

SEQ ID NO: 3459 - protein, 1683 aa, Colwellia psychrerythraea 34H
MIKLNKSSFIVFFFLQSFFLQNGMAENLPTDLVTWAHANPVVHIGVDGTFPPFDYIDEQGVTAGAGKLIRQQLSAILPVDLQETSVSDFRLEYDDMLRGNIDAISVCGNIEQRRDEVLFTKPFLQMTPIVVVNKNSDIKSEMDITSELKIASIAGYADANFAKQLSVNSKGLSSNLQGYQSIESGKYDVFITYLYLYKYMLKKHDFKNIKPIAISQFESLPIGFCVNKNKPQLVGLLNWGIDQLGDDFILAMQSKWAESSLDEGQNSRAHIDKSISLTSVFIYAVIFVLLALFFARKFASTIAIKLDTLAFRTTYFTVLILIISLSTGGIYLFLNDFKDQLLIDQKETFNVTRDVTKKTLAGWYRERELLAHNIAKSKSFKRLVNQLVIASEIDDTIKLAQAKKALRVYFSKRPYTTQGGRAYTITDVQGRYLLNLVQSAEGKKSPIISQRPELFNEVLMGRTEFIPPVWANVNIDGNRNAEDKDAEVFIATPVRNEQQEIIAVLGFRFDPDREFSQLFIDGRLGKSFESFAVDSRGYMISSSRFTSELQQKGIVPAGESTVLNVRLQNPETNPIVQAAKFKLNGQNLHGYTNYRGKTVVGQWISLKNSNITVVSEIELSEMLAEYYDVRNLLLIGLIISSAFILSISIFMITISNRANDISRRSQQELAEQVTIRTKELAASEQKSKLINSSVADGILGVDKLGHFIFANESATKITGYSEEQILSSDLISLFAGDNKENLTFEDTEVYKAIQSKEVIRISNEYVLMSGARELPLEYSISPVEDDESELACVIALQDITLRVQETERLEKMLEHLPVCMVIMNQNDEVEQINQTGIELLGFERDEIVGNPVDLFIPQEQVESHKALLKKFFQEETVIDTRSLERDFKVKHKSGKLIEIQAVYTPVHFHNGLYAAVMVRDITLDRQAEFALLEAKRISDDASKAKSDFLANMSHEIRTPMNAIMGMSHLALGCELDRKPKNYVTKVYKAAESLLGIINDILDFSKIEAGKLDIEVIEFSLHDTFADLANIIGLKAGEKNLELLFDISPDVPVNLKGDPLRLNQILINLAGNAVKFTEQGQVVISVNVVTNVSTSHCDDINLEFSVKDSGIGMDDEQQKKLFQSFSQADSSTTRKYGGTGLGLTISKKLVELMNGQIWLESKAGEGSCFSFTTTLQVSDVIDNRLVEQQKSFLADKRILIVDDNLLALDVLSSILKSFHCHVVAANSGEEAIELVKQATLTFDFIMLDWNMPDLDGIETYHIIKSQNNYQDNQFILVTSNANDNEAVDQLKKRINSVLVKPVTSSSIFDEMMRLNGDEAYSNTREMKRDDELIQNQQHLSGAKILLVEDNELNQELALELLKQSNIDVELAENGAIAVEKFSSRHFDGILMDLQMPVMDGFTATKIIRESDSSIPIIAMTANAMVSDKEKVLASGMNDHITKPINVNTMFATIAKWVSPSIKLDHDIDKAKLSVYTLPEKVISIPDFNTINTSAGLAVANGNKSLYVKLLGRFVSGQDDFVERFKVAMLKQDKEEVTRFAHTLKGSAGNIGANALQGYADQLELVCANDANTDELVNLLDQVTEELTLVLNELTEYLAKENSVESTAPINDFNFNEEFTVQLAQLLELIENFETESIELAEDILNQLKGTKQEALFEKIYQQIESYEFTEAETALNEFIDVLNN

SEQ ID NO: 3460 - protein, 368 aa, Synechococcus elongatus PCC 7942
MSESLKLLTPVQVGRYELRNRIVMAPLTRNRATGPDNIPNDLNVLYYQQRASAGLIITEASQISPQGQGYPLTPGIHSPEQVEGWKPIVQAVHDRGGCIFLQLWHVGRISHPSLQPDGALPVAPSAIQPAGMAATFQGEQPFVTPRALETEEIAGIVEDYRRAAENALAAGFDGVEVHGANGYLIDQFLQDGTNQRSDRYGGSFENRSRFLREVLDAVISVWGSDRVGLRLSPWGQFNDMRDSDPVGLFSYVAQMLNPYNLAYLHWIEPRWDKAEESPEFNQMATPVFRSLYNGPVIAAGGYSRSTAEAAIASGAADLVAFGRLYISNPDLVERFALDAPLNPYDRNTFYGGDEHGYTDYPSLEAASV

SEQ ID NO: 3461 - protein, 1519 aa, Azoarcus sp. EbN1
MPFRILRSPRSVRCVPRAGSGRQTGSDSFDSALMTAIADIPAEQTASASTVGPVALSSRIVVLAAMYIAVGLFARALTQSSGYSSPVWPAAGFALAALLVWGARCWPGVWLGAFVIVLLPDRTTSGALVAALGASGMTLQALLGVCLARRCLRSSSFPARNRDIARLVLLTGPLASLVASSIAVAALLAFERIAPAAGPSEWLTWWAGDTLGVLLFAPLVLLAWPGPLRGWIRRSGGGRISILLVLAAALFSAGSFTVDRLWKERERTEIAQRMDEVFEIGFLLLPEVIASLEGVERFVSASSAVTRDEFETFTVWITRHPAVVSIDWAPRVLAEERESFERAVRAEGGRDFRIFEPGDDGNTRPATGRPEYFPVLYSAPREAGRSILGLDHGYDPHRRVAMEQARQSREAHTVRGVPLLRTKRLSLLVFQPVHDVARASWDAAARAGPRDLLGHVVGVFDVEKLFIPLAEAAHTRSIGFRVSDVTSGEPAQILLDEMPAGVAPTLRKEIGFGGRTWSLELAAKAPTGYVDTHGEEEIYLAFSVLAAVLVAYIALSNAGHTAAIQREVAEQTAELTRALDARLAAEDERDRIFEQSVDLLGIVGIDGYFKRVNPAFARTLGWSNEEFLSRPYLDFVHPDDVEGTRADAARVAAGHTTVGFENRYRCKDGNWRWLEWKAVPRTGGLMFVTAIDTTQRRENARHLRTLNAELVHRVDEREAALEALGAKKDEIRAVLDNLIECVVTINAQGIVQGANAAVEAVFGYPLGEVIGRNVSLLMPSPERERHDDYLARYLDTGARHVIGSTREVEGQHKLGHRIPMELSVAEYRVRDEQFFVGTLRDISERKAFIAALTRAREDAEQASRAKSAFLAAMSHEIRTPMNGVMGLIEVLARTSLSEHQADLVATICGSSSTLLRIIDDILDFSKIEAGRLKLDVRPVSIGDLVESLAGSLLPLAARLDVDLSVFVSPEVPERVEADEVRLRQVLYNLVGNAVKFSAGRQNVRGRVAVRVAVADVVPLQLAVSIVDNGIGIDPEKVEELFNPFTQAEASTTRRFGGTGLGLAICRRLVDLMEGGIKVRSEPGQGSTFTVTIPFVLSDEQPAPILPEVRGINCVVIDSPEINSEDLRVYLEDAGASVFRVDDEAAAGVKAASLAAPVVLIDFAREGKNTETDGTVPASGAARVRITRGRRRRPRIKDRQVVMLNGNALRRQSLLRAVAVAAGRASPEIIHAGTAERAVLPSTTAPTIDEAREHGRLILVAEDDPINKKVILEQLALLGHAAEIAGDGAEALEMWRRGTYALILTDLHMPKMDGYRLTEAIRQAEGEAARIPIVALTANALQSESRRAREAGMDEYLTKPVRLEVLGAHLDRWLPRQETALAETAQVPPDAAPDAVACTLPILDVSVLNGLIGDDPQVIREFLGDYLASTRSLAAETRTAFSDGDRGAVAASSHKLKSSSRAVGALALGDLCNRIESAVITGDRVAFEQEMSRYDDVVRTTETHVIKLLNEPISAAGGTQ

SEQ ID NO: 3462 - protein, 397 aa, Clostridium acetobutylicum ATCC 824
MCGIAGFVNFKKNLIDKKSIIEDMTNTLIKRGPNEKGYYISKNALLGHRRLIVVDPKGGSQPMIKIHNGKKYIIVYNGELYNTEDIRKELLEAGYEFSSYSDTEVLLTSYIHWKEDCVNHINGIFAFAIYSETDKKIFLARDPLGVKPLFYTIKNNNLIFGSEIKTLLANPLVEPILTKEGLTEIFALGPARNLGSGVLKDIHEIPPANFIEFTEHKFKLHEYWRLSCKPHTENASETAEHIKFLLTDAIKRQLYADVPVCTFLSGGLDSSIISAVAASEFKKHGKTLNTYSIDYKDNNLYFKNDNFVITPDSVWAEKMRKFIGSNHHKIINNNLDLASALYDAVKANDIPGMADIDSSLFLFCKGVAEKNVVSLSGERAIQMITNLVKQFINIGEL

SEQ ID NO: 3463 - protein, 441 aa, Rickettsia prowazekii str. Madrid E
MLLRFIIALFLSINCAIEGKETENKISNQEAYKQFQDVFERIEKDYVQVPDRQKMIDEAINGMLNSLDPHSNYYTDEDLEDIFTFTKGEFGGIGVEIMYDSGAIKIISSIDDLPAFKAGLKGGDYIVGVNDELVSTLGPNKAIKEMRGTPGTKVRLLIIKEEEAKPQELELTREIVKIKPIKAHLEKNNIAYIRITTFNESTISELKAAVKKLKTESKDNLKGIILDLRNNAGGILDQAIAVSDYFIDSGVIVTTKGRTTSSNSETKANEFSLKAPKVPMIVLINGNSASASEIVAGALQDHKRAIILGTKSFGKGSVQALTQINSRAAVKLTISKYYTPSGRSIQAEGIEPDILIEPAKVEYPEVKKIDKRFSESSLKNYLKNDNAKNKDSNKETKTKNNKQEESELSELYKKDYQFARAYDVITGLIINTNLETQGKAK

SEQ ID NO: 3464 - protein, 279 aa, Bacillus cereus E33L
MKNLQSKAVLNNGVEMPWFGLGVFKVEEGPELVEAVKAAIKAGYRSIDTAAIYGNEKAVGEGIRAGIEATGIAREDLFITSKVWNADQGYETTIAAYEESLKKLGLDYLDLYLVHWPSEGKYKDTWRALETLYKEKRVRAIGVSNFQIHHLQDVMKDAEIKPMINQVEYHPRLTQKELQAFCKEQGIQMEAWSPLMQGQLLDNETLQEIAEKHGKTTAQVILRWDLQNGVITIPKSTKEHRIIANADVFNFELTKEDMEKIDALNQNHRVGPDPDNFDF

SEQ ID NO: 3465 - protein, 480 aa, Bacillus subtilis subsp. subtilis str. 168
MNQKIMAVIAAGSMLFGGAGVYAGINLLEMDKPQTAAVPATAQADSERDKAMDKIEKAYELISNEYVEKVDREKLLEGAIQGMLSTLNDPYSVYMDKQTAKQFSDSLDSSFEGIGAEVGMEDGKIIIVSPFKKSPAEKAGLKPNDEIISINGESMAGKDLNHAVLKIRGKKGSSVSMKIQRPGTKKQLSFRIKRAEIPLETVFASEKKVQGHSVGYIAISTFSEHTAEDFAKALRELEKKEIEGLVIDVRGNPGGYLQSVEEILKHFVTKDQPYIQIAERNGDKKRYFSTLTHKKAYPVNVITDKGSASASEILAGALKEAGHYDVVGDTSFGKGTVQQAVPMGDGSNIKLTLYKWLTPNGNWIHKKGIEPTIAIKQPDYFSAGPLQLKEPLKVDMNNEDVKHAQVLLKGLSFDPGREDGYFSKDMKKAVMAFQDQNKLNKTGVIDTRTAETLNQQIEKKKSDEKNDLQLQTALKSLFVN

SEQ ID NO: 3466 - protein, 497 aa, Burkholderia mallei ATCC 23344
MFRQLFIGALPLSSSISIAPAVVWFCDDLRVSDHPALMRAAESGRPVIGVYVFDERAGGRPLGGAARWWLHGSLRALGAALAALGGTLALLRGDEHDTIVSFAAALGAGAVYWSRRYALAARAVDNAVQTALDAQGIAVETFNASLLFEPGDLVNADGRPYQVFSAYWRAAMRRGVPAPPLGAPRRLNGGALPAALARQCVALDALGLEPTGPDWAGGLRDAWRFGEDAAHRRLRAFVDSRLGGYAAERDRPGIASTSRLSPYVRFGNLSARQLWHAAADAYAHGAATQADLDKFLSELGWREFGWTQLHHFPDLPRRNLRHTLDGMPWRDDPAALAAWRRGATGYPFVDAGMRELWATGWMHNRVRMVCASFLVKHLLIDWRAGEAWFWDTLVDADAASNAANWQWVAGCGADAAPYFRIFNPVAQGRKFDPDGAYVRRWVPELAGLPPATIHEPWAAPGAQLAAAGVRLGETYPLPIVAYDAARRRALDAFGAIR

SEQ ID NO: 3467 - protein, 483 aa, Oryza sativa
MREEARTMVATRSTTSRRCLTWWWLACCCFVSWVASSSWTAAACVAVSSLPGFDGPLPFSLETGYVEVNESTGVQLFYYFVRSEKNPDLDPLLLWLTGGPGCSSISGLAHEIGPFQFAAKRYYSGGLPIIIYRPETWTKVSNIIFVDSPVGAGFSYAATEEGSKSSDTNAVKQLLIFLRKWLHDHPRFSLNPLYIGGDSYSGMIVPTLTLAIDESNGSEEKPFFNLKGYIAGNPVTDYKIDEDGRIPFLHGMGLISDELYEHAKETCGEKYSAPSNAQCAHSVQAINDDINRGHILEPLCEELQSPIHNTAARDVMSRLMLESRPAAADDDIIIFECRKASHVLLKIWANDETVRESLGVQKGTVGEWKRCNRDIDYNSDVRSTVEYHLTLMRKGYRAIIYSGDHDSRVPSISTQAWIRLLNLSIADDWRPWYVDGQVAGFTRSFASNNLTYATVKGAGHTAAEYKPKECQEMFARWISGTPL

SEQ ID NO: 3468 - protein, 193 aa, Brassica napus
  misc_feature (162)..(162): Xaa can be any naturally occurring amino acid
  misc_feature (167)..(167): Xaa can be any naturally occurring amino acid
MEEKKAESTNKNVKKANLLEHNSIKHILDESVSDIVRSRGYKEDVRLSNLKLILGTVIIVVALVAQFYNKKFPENRDFLIGCIASYVVLNGVLQLILYTKEKNAILFTNPPEGSFTSTGLVMSSKLPRFSDEYTLTIDSADPKSISAGKSVQLTKSVTQWFXKDGVXVEGLFWKDVEALIKDYAEEGEPKKKK

SEQ ID NO: 3469 - protein, 1102 aa, Desulfotalea psychrophila LSv54
MKEFRNGWNRASVWLTIILGLLLSGIMAYINYQQVSENTIAQFQREADRQAAAIRRDIEVDLSILTPAVAFFDASHLVERYEFRLWFQSVKVVDNSLDVLGWIPRVANSQRAKFVDEARAVGLSGFRFSELQNGKLVRAGVREKYFPVFYIEPTGVNGAAFGFDLSSEPKRRTMLMQARDSGKVTASQVIHLVQHKKKRFSFLVVAPVYQGLASTIAERRETLRGFVVAAFAVDTIGERALAQIDPGQFHIMMHIHDGAELIYPAGGKCPGEQYFKEGIRTSGLHVIREIAVAGRQWRVCLSPSEAGQIQGFPPSAMAVFIVGIVLTVLLALQFRNNALRTSEIEWQVAEKTAQLRKSELRAEAIIDKAVIPIITIDETGIVQSFNRSAEKMFGYGPEEIIGRNVRMLMPEPHRSSHNKYVDHYLKTGRMKAIGVGNKLTGVRKDGVEFPMHLSVSEVRLEKRIFVGMVVDLSEINRAEEALRKHRDNLARLVEERTYELKIAKEAAETANIAKSAFLANMSHEIRTPMNSVLGFIQITLESRLLCAELRRHLETAYSSAKGLLIIINDILDVSKLESGEFALEATCLDMPRIVQEALKTVESQAEEKGIGLDFHFDADLPHCYLGDPTRLGQVIINLVGNAIKFTKTGKITIGVRASDQGDASLHFSVADRGIGMTAEQAANIFNPFTQADISTARCYGGTGLGLTISKQLVELMGGRIWVESELGRGVTFHFTAQLPVISPCRATGVDHALTGEASSPESPRRFQILLAEDVPGNATLAQLRLEQQGHRVRHVWNGSQAVEMYKGGTFDLILMDVMMPEMDGIEATRKIRALERESKGHITIIALTASIMKEDRQRYMRAGMDAVVGKPIILEGLFATMERVVPKGIGSLNEETFPGDQARQDIDLTPLADVVDIDRGLASWRDPLVFAKSLASFADRHSADAEKIQQLLDENSKEARMISHTLKGLAGNLSLPEVARLATEINAALKAGSHEPAATLLPSLQAALKNAAVVIRKLKMPVARIATPEFDSKAVSSLLQELLIMLDQDDPVVAEPGLSKLGEYLTQDDMINIRRAIDAFDFARAKSQTRILAERLGIQLEG

SEQ ID NO: 3470 - protein, 479 aa, Bordetella bronchiseptica RB50
MTNKTLTTAAGAPVADNNNTMTAGPRGPALLQDVWFLEKLAHFDRERIPERVVHAKGSGAYGTFTVTHDISRYTRARIFAEVGKQTPLFLRFSTVAGERGAADAERDVRGFAIKFYTDEGNWDLVGNNTPVFFIRDPLKFPDFIHTQKRDPKTNLRNATAAWDFWSLNPESLHQVTILMSDRGLPQNYRQQHGFGSHTYSFVNDAGERFYVKFHFKSQQGIACYTDGEAAELVGRDRESAQRDLFQNIEQGQFPRWTLKVQVMPEAEAATYHINPFDLTKVWPHADYPLIEVGVLELNKNPENYFAEVEQAAFTPANVVPGIGFSPDKMLQGRLFSYGDTHRYRLGINHHQIPVNAPRCPFHSFHRDGMGRVDGNGGATLNYEPNSFGEWREAKHAAEPPLALDGQAADRWNHRVDEDYYSQPGALFRLMNDDQKQQLFGNIGRHMAGVPEEIQRRQLEHFRRADPAYAAGVAKALGLK

SEQ ID NO: 3471 - protein, 492 aa, Lycopersicon esculentum
MDPYKYRPSSAFNSPFCTTNSGAPVFNNNSSLTVGARGPVLLEDYHLVEKLANFDRERIAERVVHARGASAKGFFEVTHDIAHLTCADFLRAPGVQTPVIVRFSTVIHERGSPETLRDPRGFAVKFYTREGNFDLVGNNFPVFFIRDGMKFPDMVHALKPNPKSHIQENWRVLDFFSHHPESLHMFTFLFDDIGIPQDYRHMDGSGVHTFTLINRAGKSTYVKFHWKPTCGVKSLLEEKAIRVGGANHSHATQDLYDSIAAGNYPEWKPSIQIMGPEHEDKFDFDPLDVTKTWPEDILPLQPVGRLVLNKNIDNFLYMNEQLAFCPSIVVPGVYYSDDKMLQTRIFSYSDTQRYRLGPNYLQLPANAPKCAHHNNHYDGSMNFMHRDEEIDYFPSRYDQVRHAEVYPIPSTVCSGKREKCIIQKENNFKQPGERYRSFTPDRQERFIRRWVEALSDPRITYEIRSIWITYWSQADKSLGQKLASRLNVRPSI

SEQ ID NO: 3472 - protein, 334 aa, Aspergillus nidulans FGSC A4
MSLGKKVTLNTGAQIPQLGFGTWQSAPGQVGEAVYQALKVGYRHLDLATIYQNQREVAEGIKRAYKDIPGLKREDIFITSKLWNTQHDPAVVEKALDDCLAELELDYLDLYLVHWPVAFKTGDNYFPLDESSDHPDGDVLIDDSISIVDTWKAMTKLPKEKARAIGVSNHTVEHLEAIINATGVVPAANQIERHPVLQSNDLIEYAAKKNIHITAYSAFGNNMFNIPLLVAHPEVKAVAEEASKRLGKTVTPAQVILNWSQEGGHSVIPKSVTASRIAENFQEVELTKEELAKVSKLGEERRRYNTPYVANKPRWNINIFGEEDEKPAKHKVIV

SEQ ID NO: 3473 - protein, 576 aa, Gibberella zeae PH-1
MAPSADTSFSAHVASQFQSYEEDRQSASKESTYATSNGVPVAHAYEAQRCGENGPLLLQDFHLIDLLSHFDRERIPERVVHAKGSGAHGFFECTDPLDDLCLADIFSAKGKKCPVSMRFSTVGGESGSHDMARDPRGFSVKMRTEEGNLDWVFNNTPVFFLRDPAKFPHFIHTQKRDPSTHLTHADDSFAFWDYLSQNPESIHQVMILMGDRGIPKGYRKMHGYSGHTFKLVNKAGDWVYTQIHLKSMQGTDFVTQEDSADYSPDFSQKDLYEAIQNGDYPKWTLEVQTMTPKEAEELWEKEKINVFDLTHVWPQKQFPRRKVGEFTLNENAINYFAEVEQIAFNPAHLPPGIEPSADPVLQSRLFSYPDTHRHRIGVNYQQLPVNATRTGYKFGNFQRDGQMAFYNQGARPNYLSSIDPIKFRTRTVDLDKTHGHFTGEAITFLTAIRPEDFNAPRALWRNVFDEPARERFINNVTGKMKLCKQEEPLKRQIAIFREVDPEIADRLEKSTGIKGYDGIADMKFNGSHNCMNGEMKLANDIIANKGKSATARNGAPAKGCHSRLETNGHLNGTNGK

SEQ ID NO: 3474 - protein, 546 aa, Lactobacillus acidophilus
MAKDIKFAENARRSLLKGVDKLADTVKTTIGPKGRNVVLEQSYGNPDITNDGVTIAKSIELKDHYENMGAKLVAEAAQKTNDIAGDGTTTATVLTQAIAREGMKNVTAGANPVGIRRGIEKATKAAVDELHKISHKVESKEQIANVAAVSSASKEVGELIADAMEKVGHEGVITTEDSRGINTELSVVEGMQFDRGYLSQYMVTDNDKMEADLDNPYILITDKKISNIQDILPLLQEIVQQGKSLLIIADDVTGEALPTLVLNKIRGTFNVVAVKAPGFGDRRKAQLEDIAALTGGTVITDDLGFELKDTKIDQLGQARRVTVTKDSTTIVDGAGSKEAIKEREDSIRKQIEESTSDFDKKKLQERLAELTGGVAVIHVGAATETELKERRYRIEDALNSTRAAVDEGYVAGGGTALVDVEKAIKDLKGETSDEQTGINIVLRALSAPVRQIAENAGKDGAVVLNKLESQENEIGYNAATDKWENMVEAGIIDPTKVTGKVTRTALQNAASIAALLLTTEAVVADIPEDKPEAPQAGAAGAPGMGM

SEQ ID NO: 3475 - protein, 463 aa, Novosphingobium aromaticivorans DSM 12444
MHAHSRKAPRAMKSASFKFAGLLRVTALVSAVALIPATTAGLAAVDARTGPEFGKLIAVYERVKANYVEPVDDEKLLKGAIDGMLATLDPHSSYLDARDFENLRTQTEGSYGGLGLSVTMDDGAVKVIAPTKGSPADLAGVKAGDFITHLDGKLIYGGSLDEAVDQMRGVPGTKIRLSVFRPGRDEPFDVTITRQIIELKPVEWEMRGNVGVISVSSFSADVGTSVQKAWNEIRARSGGKVAGLVLDLRGNPGGLLDEAVALSDLFLDKGTIVSQRGRYARDNEVYPAEIDTKGDIAKGTPMIVLIDEGSASASEIVAGALQDQHRAVVMGQRSFGKGSVQTLIPLTRDTAIKLTTARYYTPSGRSVQEGGIEPDIAVPQISDPDLRKRQLRSYRESDLRGHLINEIKLEDKDLEKDKTEDPRFKMTAEELKAKDIKDFQLYYAVQTLSRTAPRGALAAKVKG

SEQ ID NO: 3476 - protein, 95 aa, Brassica napus
GAMYSFPQIRLPPGALQAAKQAGKVPDVFYCLKLLEATGISTVPGSGFGQKEGVFHLRTTILPAEEEMPEIMDSFKKFNDEFMAQYDNGFGYSRM

SEQ ID NO: 3477 - protein, 460 aa, Arabidopsis thaliana
MLSSKVVGDSHGQDSSYFLGWQEYEKNPFHESFNTSGIVQMGLAENQLSFDLIEKWLEEHPEVLGLKKNDESVFRQLALFQDYHGLPAFKDAMAKFMGKIRENKVKFDTNKMVLTAGSTSANETLMFCLANPGDAFLIPAPYYPGFDRDLKWRTGVEIVPIHCVSSNGYKITEDALEDAYERALKHNLNVKGVLITNPSNPLGTSTTREELDLLLTFTSTKKIHMVSDEIYSGTVFDSPEFTSVLEVAKDKNMGLDGKIHVVYSLSKDLGLPGFRVGLIYSNNEKVVSAATKMSSFGLISSQTQHLLANLLSDERFTTNYLEENKKRLRERKDRLVSGLKEAGISCLKSNAGLFCWVDLRHLLKSNTFEAEHSLWTKIVCEVGLNISPGSSCHCDEPGWFRVCFANMSDQTMEVAMDRVKGFVDNNNGGKQKRTMWDTRRRSLINKWVSKLSSVTCESER

SEQ ID NO: 3478 - protein, 386 aa, Oryza sativa (japonica cultivar-group)
MDSSSGGAGGGGGAQIKGMGTHGGRYVLYNVYGNFFEVSSKYAPPIRPIGRGAYGIVCAAVNSENGEEVAIKKIGNAFDNHIDAKRTLREIKLLRHMDHENSDGDFNTGSQIIAIKDIIRPPRRDNFNDVYIVSELMDTDLHQIIRSNQPLTDDHCQYFLYQLLRGLKYVHSANVLHRDLKPSNLFLNANCDLKIADFGLARTTTETDLMTEYVVTRWYRAPELLLNCSQYTAAIDVWSVGCILGEIVTRQPLFPGRDYIQQLKLITELIGSPDDSSLGFLRSDNARRYMKQLPQYPRQDFRLRFRNMSAGAVDLLEKMLVFDPSRRITVDEALHHPYLASLHDINEEPTCPAPFSFDFEQPSFTEEHIKELIWRESLAFNPDPPY

SEQ ID NO: 3479 - protein, 403 aa, Arabidopsis thaliana
MAWNSERSIRECINRRQVHGPSMLPTLNLTGDVILAEHLSHRFGKIGLGDVVLVRSPRDPKRMVTKRILGLEGDRLTFSADPLVGDASVSVLVKQHGIANLGLRVKRCMIDELGWSRRFRKVMFGFREITCMLQLIHVILGLYLTVSLKEKLFYGNHLFACLGLATRILWVIEMTIIYTYTFSNRRKAMVLILFLKPELQYQMLRFILLVSKKLLYEPTRSKEFIAKQSFKTEQTQRVAITRGSETMSLIPSIFGGRRTNVFDPFSLDVFDPFEGFLTPSGLANAPAMDVAAFTNAKVDWRETPEAHVFKADLPGLRKEEVKVEVEDGNILQISGERSNENEEKNDKWHRVERSSGKFTRRFRLPENAKMEEIKASMENGVLSVTVPKVPEKKPEVKSIDISG

SEQ ID NO: 3480 - protein, 414 aa, Arabidopsis thaliana
  misc_feature (47)..(47): Xaa can be any naturally occurring amino acid
  misc_feature (99)..(99): Xaa can be any naturally occurring amino acid
  misc_feature (125)..(125): Xaa can be any naturally occurring amino acid
  misc_feature (238)..(238): Xaa can be any naturally occurring amino acid
MATLKCIDWQFSGSEAAKDAAAASLGSYTSALYALCDPHGKPILPPXNEILETSNTAEKAVVKAVLYGSGNAYAPSLGLAAAKSAVAEYLNQGLPKKLXTADDVFMTLGCKQAIELAVDILAKPXKANVLLPSPGFPWDLVRSIYKNLEVRHYNFLPEKNFEIDFDSVRALVDENTFAIFIINPHNPNGNTYSEAHLKQLAELAKELKIMVVSDEVFRWTLFGSNPFVPMGKFSSIKXWKVPGWQPGWLTLHDLDGVFRNTKVLQAAQDFLQINNNPPTVTRAAIPDILEKTSSKFFQKLGNFMKDKVEFGSCKLKYIPSLTCCMKPEACTFLGTELDLSSFVDIEDDQDFCNKLAKEENLVVLPGIAFSQKNWLRHSIDMETPVLEDALERLKSFCDRHSNKKAPLKDVNGVK

SEQ ID NO: 3481 - protein, 613 aa, Moorella thermoacetica ATCC 39073
MCGITGWVDWELDLTGQKNILEAMTATLACRGPDAAGTWVAPRVALGHRRLVVVDPAGGGQPMVRRRGNQTFVLTYNGELYNTGEIREELLSRGYTFRGHSDTEVLLTAYMEWGVECVRRFNGIFAFAIWDEARERLFLARDRLGVKPLFYATLPHSFLFGSELKALLAHPAIKPEVDAEGLAEVFVLGPARTPGHGVFHNLAELKPGYYMTYDRQGLRLHQYWALQSHPHTDNLETTIAKVRQLLQDTVERQLVADVPVCTLLSGGLDSSAVTVFAARAFQGRGQGHIHTWSVDYIDNDRYFQPSHFQPNPDAPWVKLVSEHLETIHHYVYIDTPELVDSLKAAMRARDLPGMADVDSSLLLFCREVKREATVALSGEAADEVFGGYPWFRSEKALAANTFPWNRAGQERIRLLSPELKAMVRPEEYVARRYREALAEVPALPGEEARAARLREISYLSLTRFMPVLLDRKDRMSMAVGLEVRVPYCDHRLVEYVWNIPWEMKFVGQMEKGILRRALAGILPAEVINRRKSPYPKTYNPAYLEAVRNWMLDILADPASPLLPFIDVAAVKALTQSREVFNLPWFGQLMSGPQLFAYLAQIDTWMREYGVSVR

SEQ ID NO: 3482 - protein, 591 aa, Bacillus subtilis
MTDTLSKRGPDDSNVWGEHHVLFGHKRLAVVDIEGGRQPMACTYKGDTYTIIYNGELYNTEDLRKELRARGHQFERTSDTEVLLHSYIEWQEDCVDHLNGIFAFAVWDEKRNLLFAARDRLGVKPFFYTKEGSSFLFGSEIKAILAHPDIKARVDRTGLSEIFGLGPSRTPGTGIFKGIKEIRPAHALTFSKDGLNIWRYWNVESEKHTDSFDDTVANVRSLFQDAVTRQLVSDVPVCTFLSGGLDSSAITAIAAGHFEKEGKAPLHTYSIDYEENDKYFQASAFQPNDDGPWIEKMTEAFGTTHHKCVISQKDLVDHLEEAVLVKDLPGMADVDSSLLWFCREIKKDFVVSLSGECADEIFGGYPWFHTADVESGFPWMRSTEERIKLLSDSWQKKLNLKEYVNAKYEETLAETPLLDGETGVDKARRQLFYLNMLWFMTNLLDRKDRMSMGASLEVRVPFADHRLVEYVWNIPWEMKMHDNREKGILRKALEGILPDDILYRKKSPYPKTHHPEYTKGVSEWLKTIRSQKDSVLHTLLDRKQLDQLLETEGSSFKVPWFGQLMKGPQLIAHLAQIHTWFEAYRIDIDER

SEQ ID NO: 3483 - protein, 505 aa, Arabidopsis lyrata subsp. lyrata
GLELQLSYTLRHQHPVEYTVPIQLPVINQVFGTSRAVKISPNSPVARLRPVSGKYMLGEVVAVRVPLLHLSNFQINDWPELSTKRYALMVLMLPSDSARQWHVHELELVEVVADQVAVALSHAAILEESMRARNLLMEQNVALDLARREAETAIRARNDFLAVMNHEMRTPMHAIIALSSLLQETELTPEQRLMVETILKSSNLLATLMNDVLDLSRLEDGSLQLELGTFNLHTLFREVLNLIKPIAVVKKLPITLNLAPDLPEFVVGDEKRLMQIILNIVGNAVKFSKQGSISVTALVTKSDTRDADFFVVPTGSHFYLRVKVKDSGAGINPQDIPKLFTKFAQTQSLATRSSGGSGLGLAISKRFVNLMEGNIWIESDGLGKGCTAIFDVKLGISERSNESKQSGIPKVPAIPRHSSFTGLKVLVMDENGVSRMVTKGLLVHLGCEVTTVSSNEECLRVVSHEHKVVFMDVCLPGVENYQIALRIHEKFTKQRHQRPLLVALT

SEQ ID NO: 3484 - protein, 371 aa, Rhodopseudomonas palustris CGA009
MTKSKLFAPLQVGGLKLENRIVIAPMCQYSAREGQMTDWHLMHLGHLALSGAAMLTIEATAIAPEGRITPFDVGLWDDRTEAAIGRVIDAVRSWSSIPIAIQLSHAGRKASADVPWRGGRHLPPHDPDGWQTVAPSALPLSVGGRTPVALHAESLEQIRQGFAQSARRAARLGVDAVQLHAAHGYLLHQFFSPISNKREDEYGGSLENRMRFPLEVFEGVRAAFPTDRPVTVRISGADWIDGGATIDDAVAFAQALEARGCSALNVSSGGIDPLQRISDGPNYQVPFARAVKQAVSIPVVAVGLITDYEQAEAIIATGDADLVALARGILYDPRWPWHAAAHLDGRVRAPDQYRRSQPYQYKNLFDYRSED

SEQ ID NO: 3485 - protein, 546 aa, Psychrobacter arcticus 273-4
MMADDKTKSTQAERLVQLRRDKGMTAEQLAQAMTAAGAKVSRGAISNWERGTNGIVSSKLPTLARILGCSEGYLLRGELESDSKSDVDLKNIASDNTNVYVESDEQAHSASQITHTTTIPSTPRKISPNNLMSGPFMNTIKKSDKLQNVCYDIRGPLLQTANKMEAEGKRILKLNIGNPAPFGLEAPHEILRDVAMNLPEATGYSDSQGIFSARKAVLQYYQSKGLLSAVDVRDVYLGNGVSELIVMTLQALMNDGDEVLIPMPDYPLWTAATNLAGGTAVHYRCNEEDNWHPDIEDIKSKITSKTKGIVVINPNNPTGALYSDEVLLQIIEVAKEHDLIIMADEIYDRILYDDMEHTPMSTLTDEVLVLSYNGLSKSHRIAGFRAGWMMISGRKEHAADFIEGLDMLASMRLCSNVQGQYAIQTAMGGYQSMKDLTSKKGRLYKQRELAVTRLNAIKGISCTMPQGAFYCFPKMDPEIYPIKDDMQFMMDLLLEENVLMVQGTGFNWDKHDHFRLVFLPNLHDLEDAMDRLDRFFAKKRKQFGTD

SEQ ID NO: 3486 - protein, 140 aa, Arabidopsis thaliana
MASLEMNDLKKIGLGLTGFGVFFTFLGVIFVFDKGLIAMGNILFLAGVTLTIGINPAIQFFTKRQNFKGTISFGLGFLLVVFGWPIFGLLLESYGFLVLFSGFWPTLAVFLQRIPLLGWLLQQPYIRSLLDRYRGRRVPV

SEQ ID NO: 3487 - protein, 442 aa, Oryza sativa
MDSVVRTHIGHMLKMIHFCSMFLITFSDYKIQAILSSQQKRKAPEESDVAESSDCMITSPGFAVSPMLTPVSGKAVKTSKSKTKNNKAGPQTPTSNVGSPLNPPTPVGTCRYDSSLGLLTKKFINLLKQAPDGILDLNNAAETLEVQKRRIYDITNVLEGIGLIEKTLKNRIRWKGLDDSGVELDNGLSALQAEVENLSLKEQALDERISDMREKLRGLTEDENNQRWLYVTEDDIKGLPCFQNETLIAIKAPHGTTLEVPDPDEAGDYLQRRYRIVLRSTMGPIDVYLVSQFDEKFEDLGGGATPSGHANVPKHQPTEVFNTTNAGVGQCSNSVAVDNNIQHSQTIPQDPSASHDFGGMTRIIPSDIDTDADYWLISEGDVSITDMWKTALLNMETADVQWDESLDTDVFLSEDVRTPSSHNQQPSAVGGPQMQVSDMHKP

SEQ ID NO: 3488 - protein, 218 aa, Ipomoea batatas
MGRGKVEIRRIEKSTNRRVTFWKRRNGLLKKAMEMGILCDAEVGLMIFSSTGKLHEFATTSIRSVIERYNKTQGDGLQSPLDPTLELKFWQIKVAILRKQLHNMQEDHRKAMGEVYGLSVKDLLNLENQLEMSMSSIIMKKEQLLIDQILELTHQQRSIVLQENFELFNKFQAYGTSDPNAVNGDTISPYDFTISEESQGHIHFQLPQNFSDLARALY

SEQ ID NO: 3489 - protein, 338 aa, Ralstonia metallidurans CH34
MTRISLTRYLVEEQRKHNTIEPELRLLIEVVARACKAISNAVSKGALAGVLGSAGTGNVQGETQQKLDVIANEVLLDANEWGGHLAAMASEEMDSFYEIPNRYPKGEYLLLFDPLDGSSNIDVNVSIGTIFSVLHMHKPGQTVTEHDFMQPGTQQVAAGYAVYGPQTTLVLTVGNGVHMFTLDREAGSFVLTQSDVMIPEDTKEFAINMSNMRHWAPPVRRYIDECLAGDEGPRGKNFNMRWIASMVADVHRILTRGGVFMYPWDKREPEKPGKLRLMYEANPMAFLVEQAGGAATNGQQRILDVEPTKLHQRVSVILGSKNEVERVTRYHQEDAAKA

SEQ ID NO: 3490 - protein, 545 aa, Borrelia burgdorferi
  misc_feature (200)..(200): Xaa can be any naturally occurring amino acid
MAKDIYFNEDARKSLLSGVEKLSNAVKVTLGPKGRNVLIDKKFGSPTVTKDGVSVAREIELENPFENMGAQLLKEVAIKTNDVAGDGTTTATVLAYAIAREGLKNVSSGINPIGIKKGIDHAVSLAAEKIRQSAKKITTKEEIAQVASISANNDSYIGEKIAEAMDKVGKDGVITVEESKTFDTTISYVEGMQFDRGYLXPYFSTNKENMSVSFDDAFILIYEKKISSIKELLPVLEKVLGTNKPLLIIAEDIEGDALAALVLNSVRGALKVCAIKSPGFGDRRKAMLEDIAVLTGGVLISEELGLTLETVEIEQLGQAKTIKVDKDNTTIINTGNKEQIKERSELIKKQIEDSTSEYDKEKLQERLAKLVGGVAVINVGAVTEVELKEKKHRVEDALSATRAAVEEGVVPGGGSTLIEVAMYLDTIDTSKLSYEEKQGFEIVKRSLEEPMRQIISNAGFEGSIYIHQIKTEKKGLGFDASSFKWVNMIESGIIDPAKVTRSALQNAASIAGLLLTTECAITDIKEEKNTSGGGGYPMDPGMGMM

SEQ ID NO: 3491 - protein, 237 aa, Gossypium barbadense
LTDDHCQYFLYQLMRGLKYIHSANALHRDLKPSNLLLNANCDLKICDFGLARTTSETDFMTEYVVTRWYRAPESLLNCSEYTAAIDIWSVGCILMEIIRREPLFSGKDYVQQLGLITQLLGSPEDSDLGFLRSDNARKYVKQLPHFPKQPFAGKFPDVSPLAIDLAEKMLVFDPSKRITVEEALNHPYLSSLHEINEEPTCPSPFVFDFEQMALNEEDIKELIWRESLNFNQDKMPE

SEQ ID NO: 3492 - protein, 471 aa, Lycopersicon esculentum
MLKMLSKMAMCKSHGQDSSYFIGWQEYEKNPYDPLQNPSGIIQMGLAENQLSFDLIESWLTRNQDVIQFRENGGSMFRDLALFQDYHGLQAFKNVLVSFMAEIRRKKVKFDPKNLVLTAGSTSANETLIFCLAEPGEALLIPTPYYPGFDRDLKWRTGAEIVPIQCYSSNNFRITESALEEAYEQAQKRNLTVKGVFITNPSNPLGTTMSRNELNILITFAMTKNIHIVSDEIYAGTVFDSPKFVSIIEALIDRKLEKSKMWNQVHIVSSLSKDLGLPGFRVGMIYSNNETLIAAATKMSSFGLISSQTQYLLSKILGDRRFIKRYVKQNKKQLIHRREMLASGLANSGIECLDSNAGLFCFVDMRDLLNSNTFEAEMELWKKIISNVGLNVSPGSSCHCSEPGWFRVCFANMSKETLDLAMQRINNFVNSDRDIHRQQPLRFVTGAGSRRRRTIANWVVKFSSGDGRRDR

SEQ ID NO: 3493 - protein, 227 aa, Glycine max
LCRYCVVFDPLDGSSNIDCGVSIGTIFGIYLIKEDHEPTIEDVLQPGKNMLAAGYCMYGSSCTLVLSTGSGVNGFTLDPSLGEFILTHPDIKIPKKGKIYSVNEGNAKNWDGPTTMYVENCKYPKDGSSPKSLRYIGSMVADVHRTLLYGGIFLYPADKKSPNGKLRVLYEVFPMSFLMEQAGGQAFTGNQRALDLVPKKLHERSPIFLGSYEDVEEIKALYSADEK

SEQ ID NO: 3494 - protein, 339 aa, Bacillus pseudofirmus
DQVLKKDGTPYKVFTPYYKAWAKERKRTPAVIKRDVLLGSVHKGTAPDREAETLFNNLIKKCSYDWSAIGEEHAIKRLQMFTKKRLSGYKANRDFPSITGTSRLSPYIKTGAVSSRSIYYHILNAEADSYSAETFLKELAWRDFYRMVHFYEPDCKDREIMEGYRELNWSHDQDDLTSWKRGETGFPIVDAGMRQLLNEGWMHNRLRMITASFLTKDLLIDWRLGERYFERMLIDYDPSSNIGGWQWAASVGTDAVPYFRIFNPVTQSKRFDENGTYIRTYIPELNHVPDHYIHEPWKMSEEEQVKYKCRLDEDYPLPIVDHSKQRKKALSFFKGDDEE

SEQ ID NO: 3495 - protein, 443 aa, Thlaspi caerulescens
MSESQQDSEQYPPSKRQYHPSVSSMKPPLVAPGEYHRFDAAETRGGGASDQLKRKTDMVNQIEEPNELNTGVLQTPVSGKGGKPKKSSRSVKSNKTGTQASGSNAGSPGNNFAQATCRYDSSLGLLTKKFINLIKQAEDGILDLNKAADTLEGTKETDIRYTNVLEGIGLIEKTLKNRIQWKDLDVSKPGETVESIANLQDEIQNLTAEEVKLDDQIRESQERLTSLSEDENNKRFLFVTEDDIKNLPCFQNKTLIAVKAPHGTTLEVPDPDEAGGYPQRRYRIILRSTMGPIDVYLVSQFEEKFEEIPNADEPSNLPSTSGLPENQDVAMPMEEDSSDKNMETQEVDDTQRVYSEIESHDFVDGIMKIVPPDLDMDVDYWLRSEVGEVSITDLWPNESGADWNQIVTFDQDHAGPSNTTLEQPRTPLSPAPENSTATKSTGS

SEQ ID NO: 3496 - protein, 477 aa, Lycopersicon esculentum
MGLISKIATNDGHGENSAYFDGWKAYENDPFHPTQNPNGVIQMGLAENQLCFDLIQEWIVNNPKASICTYEGVQDFQDTAIFQDYHGLPEFRKAVARFMEKVRGDRVRFDPERIVMSGGATGAHESLAFCLADPGDAFLVPTPYYPGFDRDLRWRTGVQLFPVVCESSNNFKVTKEALEEAYSKAQESNIKVKGLLINNPSNPLGTILDKETLKDILRFINDKNIHLVCDEIYAATAFSQPSFISISEVKSEVVGCNDDLVHIVYSLSKDLGFPGFRVGIIYSYNDAVVNIARKMSSFGLVSTQTQRLIASMLLDTIFVEDFIAKSSMRLLQRHGLFTKGLGQVGITTLKSNAGLFIWMDLRRFLENSTFDDELKLWHIIIDKVKLNVSPGCSFHCSEPGWFRVCFANMDDATMKIALRRIRHFVYLQPNKGVEVATKKQYCRTRSKLEISLSFRRLDDFMNSPHSPMSSPMVQARN

SEQ ID NO: 3497 - protein, 131 aa, Streptococcus thermophilus CNRZ1066
MTKFLHTCVRVKDLEASLQFYQEALGFKEVRRNDFPEYKFTLVYMQLEDDPDYELELTYNYDHEVYDLGNGYGHIAVGVDDLEATHQAHKEAGYNVTDLSGLPGKPKMYYFITDPDGYKIEVIRLAQFLEK

SEQ ID NO: 3498 - protein, 307 aa, Arabidopsis thaliana
MSVTSTVEENHQKNPSTPAAVEEKKKRRWVFWDRRWRRLDYVKFSASFTVHSLALLAPFYFTWSALWVTFLFYTIGGLGITVSYHRNLAHRSFKVPKWLEYLLAYCALLAIQGDPIDWVSTHRYHHQFTDSERDPHSPKEGFWFSHLLWIYDSAYLVSKCGRRANVEDLKRQWFYRFLQKTVLFHILGLGFFLFYLGGMSFVTWGMGVGAALEVHVTCLINSLCHIWGTRTWKTNDTSRNVWWLSVFSFGESWHNNHHAFESSARQGLEWWQIDISWYIVRFFEIIGLATDVKVPTEAQRRRMAIVR

SEQ ID NO: 3499 - protein, 567 aa, Magnaporthe grisea 70-15
MPGTSRIPQSLRDGLISVKRNRPTSVVQLLSIDLLRNIVFTLFVLRWTRRAFWKLRGRGLLGWLAELYAAMRVTAYGWLLRAPGVRNKVRSEVDTALSKLSKKTLPPPEAPRYLQIPKQGWTNEAVRAELESLANMDHTRWEDGYVSGAVYHGEDELISLQTDAYGKFTVANPIHPDVFPGVRKMEAEVVAMVLSLFNAPVGAAGVSTSGGTESILMAVLSARQKAYNERGVTEPEIILPETSHTAFRKAAEYYKIKVNFVACPAPDYQVDVSRVRRLINANTIMLVGSAPNFPHGIIDDISGLSKLAVRYKIPLHVDCCLGSFLVPFLERAGFETRPFDFRLKGVTSISVDTHKYGFAPKGNSTVLYRTAELRKYQYFVCPDWSGGVYASPGIAGSRPGALIAGCWASMMAVGEAGYLAACVEIVGAAKKLVDHINASPSLAAELEIIGKPLSSVVAFRARNLNIYDIADAMGEKGWHLNSLQNPPAMHVAFTLPTAKVWERLATDLEACVEGEREKERARIAEGKGAKGAAVGDSAALYGVAGSLPNKSVVVELANGFLDLLYKT

SEQ ID NO: 3500 - protein, 547 aa, Brassica juncea
HELLHGLALVFLLAASSCKADEEITCEENTPFTCGNTDILSSKNFGKDFIFGVASSAYQIEGGRGRGVNIWDGFSHRYPEKSGSDLMNGDTTCESYTRWQKDVDIMGELNATGYRFSFAWSRIIPKGKVSRGVNQGGLDYYHQLIDALLEKNITPFVTLFHWDLPQTLQDEYEGFLDRQIIQDFKDYADLCFNEFGGKVKHWITINQLYTVPTRGYASGTDAPGRCSYMVDTKHRCYGGNSSTEPYIVAHNQLLAHAAVVDLYRTKYKFQNGKIGPVMITRWFLPFDESDPACVEAAERMNQFFHGWYMEPLTKGRYPDIMRQIVGSRLPNFTEEEAALVAGSYDFLGLNYYVTQYAQPQPNPYPSETHTAMMDPGVKLTYNNSRGELLGPLFAEDKVNGNSYYYPKGMYYVMDFFKTNYSNPLIYITENGISSPGTENRCEAIADYKRIDYLCSHLCFLRKVIREKGVNVRGYFAWALGDNYEFCKGFTVRFGLSYVNWDDLDDRNLKESGKWYQRFINGTVKNHANQDFLRSSLSSQSQKKRLAC

SEQ ID NO: 3501 - protein, 251 aa, Arabidopsis lyrata
MGRGRVQLKRIENKINRQVTFSKRRAGLLKKAHEISVLCDAEVALVVFSHKGKLFEYSTDSCMEKILERYERYSYAERQLIAPESDVNTNWSMEYNRLKAKIELLERNQRHYLGEDLNAMSPKELQNLEQQLDTALKNIRTRKNQLMYESINELQRKEKAIQEQNSMLSKQIKEREKILRAQQEQWDQQNHGHNMPPPPPPQQHQIQHPYMLSHQPSPFLNMGGLYQEEDPMAMRRNELELTLEPVYNCNL

SEQ ID NO: 3502 - protein, 424 aa, Ustilago maydis 521
MSAHPSNPHRTPYNVLNQTFLIDNAYAITKDLGQGAYGCVAAATHKGTGESVAIKKITNVFTKKILTKRALREIKLLRHFRGHKNITCLYDMDIIDPVGFNEVYLYEELMEADLHAIIRSGQPLSDAHFQSFIYQTLCGLKYIHSASVLHRDLKPGNLLICDFGLARGFETDPELAKQVGAGFMTEYVATRWYRAPEIMLSFQNYTTAIDIWSLLGGRPIFKGRDYVDQLNQILHYLGTPSEETLRRVGSPRAQDYIRSLPYQPRIPFDRLYPQANPQALNLLERMLEFDPAKRISCEEALQHPYLSVWHDPADEPVCPRKFDFGFESVDEVQGMKTLILEEVRSFRTEVRRQARLMQQPKRQESLPIPSREDIQRSSPTEEGNPAYSVLGASAGIIQGATNSEHASGVLNDACSKDVGLGSLG

SEQ ID NO: 3503 - protein, 585 aa, Elaeagnus umbellata
MCGILALLGCSDDSQAKRVRVLELSRRLKHRGPDWSGLFQFGDCYLAHQRLAIIDPASGDQPLFNEDKTVVVTVNGEIYNHEELRKKLSHHKFRTGSDCDVIAHLYEEYGEDFVDMLDGIFAFVLLDTRDNSFIVARDAIGVTSLYIGWGLDGSIWISSELKGLNNDCEHFETFPPGHLYSSKAGGMRRWYNPVWFSETIPSAPYDPLALRRAFENAVIKRLMTDVPFGVLLSGGLDSSLVASITARHLSGTKAAKQWGTKLHSFCVGLEGSPDLKAAKEVAAYLGTVHHEFHFTVQDGIDAIEDVIYHVETYDVTTIRASTPMFLMSRKIKSLGVKMVMSGEGSDEIFGGYLYFHKAPNKEEFHEETCRKIKALYLYDCLRANKSTTAWGLEARVPFLDKEFINVAMNIDPEYKKIKRDEGRIEKWVLRKAFDDEERPYLPKHILYRQKEQFSDGVGYSWIDGLKAHAAKHVTDKMIRNAAHIFPHNTPNTKEGYYYRMIFERFYPQNSARLTVPGGASVACSTAKAVEWDESWSKNLDPSGRAALGVHLSAYDNQVPSGVVQPEIISNVPQITVNTLGLEIQS

SEQ ID NO: 3504 - protein, 299 aa, Arabidopsis thaliana
MGDTTKDDGSSQSKAVRGEKRALFFRKWTRIDLARASAVGAVHLLCLLAPFNYKWEALRFGVILAIVTSLSITFSYHRNLTHKSFKLPKWLEYPFAYSALFALQGHPIDWVSTHRFHHQFTDSDRDPHSPIEGFWFSHVFWIFDTSYIREKCGGRDNVMDLKQQWFYRFLRNTIGLHILTFWTLVYLWGGLPYLTCGVGVGGTIGYNGTWLINSACHIWGSRAWNTKDTSRNIWWLGPFTMGESWHNNHHAFEASARHGLEWYQVDLTWYLICFFQALGLATDVKLPTDAQKRKLAFAR

SEQ ID NO: 3505 - protein, 551 aa, Ehrlichia ruminantium str. Welgevonden
MANMVVTGEQLDKSIREVVRILEDAVGCTAGPKGLTVAISKPYGAPEVTKDGYKVMKSIKPEDPLALAIANIIAQSASQCNDKVGDGTTTCSILTAKVIEEVSKVKAAGADIICVREGVLKAKEAVLEALKCMKREVLSEEEIAQVATISANGDKNIGTKIAQCVKEVGKDGVITVEESKGFKELDVEKTDGMQFDRGYLSPYFVTNSEKMLVEFENPYILLTEKKLNIIQPLLPILENIARSGRPLLIIAEDVEGEALSTLVLNKLRGGLHVAAVKAPGFGDRRKDMLGDIAILTGAKHVINDELAIKMEDLTLCDLGTAKNIRITKDTTTIIGSVDNSCAHVQSRICQIRMQIDNSTSDYDKEKLQERLAKLSGGVAVLKVGGSSEVEVKERKDRVEDALHATRAAVEEGVVPGGGAALLYTLSALDNLKSKNDDEQLGINIVKRALQAPIKRIIKNAGSENAPCVIAHLLKQNDKELIFNVDVMNFANAFTSGVIDPLKVVRIAFDFAVSLAAVFMTLNAIVVDIPSKDDNSAAGGAGMGGMGGMGGF

SEQ ID NO: 3506 - protein, 132 aa, Prosthecochloris aestuarii DSM 271
MLVKLSQDPLQLFDDIWQGSNAPSSPAFKVDISEDNHAFYIDAELPGLAKENITLGIEDDVLTFKAERKKESEEKEKNYHRIERTYGSFSRSFNLGELIDKENIGASYDNGMLHVTLPKAQEVKRTRAISIT

SEQ ID NO: 3507 - protein, 737 aa, Bifidobacterium longum NCC2705
MPVAQGDLDATSNAEFYNPHGVLGGHLGIGKHADTATIRVLRPLAKSVTILTQDGEYPMTHEYNGVFVVTVPASGTKKQPTIPDYRVRTEWESGAVLIEDDPYRYMPTVGDMDTYLFGEGRHEKLWETLGAHVLRYDDPMGGADGTPGEQVVGTAFSVWAPNAHAVRVVGNFNAWDGRRHAMRELGSSGVWEIFIPGIGAGETYKFQILNANYTWEMKADPMERQHEVPPSTASIVTESTYKWNDDAWMQHRRTTNPHDGPVSIYEVHAGSWKQGLTYRDLAKQLVDYVKQEGFTHVEFMPLAQHPFSGSWGYQVTGYYAVDSRLGSPDDFRYLVDQFHQAGIGVIMDWVPAHFPKDAFALGRFDGTPLYEDPDPLRGEHPEWGTYVFNFGRREVRNFLVANALFWLEDLHVDALRVDAVSSMLYLDYSREPGHWRPNIYGGRENLEAIDFLKEATATAYKNNPGVMVIAEESTAWPGITAPTSAGGIGFGMKWNMGWMHDTLEYLHEEPINRKWHHNEITFSMVYAYSEHYVLPISHDEVVYGKGSLYGKMPGDDWQKLAGVRSMFAYQWAHPGKKLSFMGNELAQWGEWDHDASIDWDCLNWQEHRQVQTMVADLNAFYKAHPALWSQDFDPAGFQWLTSDDADHNTLSFLRIGTKGETLAVVVNFSGEAWSDYQVALPTGGKWTEVFTTDDAKYGGSDIHNGTFEAVEGEYHSRPFSAKITVPALGVVFLKPED

SEQ ID NO: 3508 - protein, 237 aa, Populus tremuloides
SGTENKINRQVTFAKRRNGLLKKAYELSVLCDAEVALIIFSNRGKLYEFCSTSNMLKTLERYQKCSYGAEEVNKPAKELENSYREYLKVKARFEALQRTQRNLLGEDLGPLNTKDLEQLERQLESSLNQVRSTKTQYMLDQLADLQNKEHLLLEANRGLTIKLDEISARNSLRPSWEGDDQQNMSYGHQHAQSQGLFQALECNPTLQIGYNAVGSDQVSAITHATQQVHGFIPGWML

SEQ ID NO: 3509 - protein, 445 aa, Pseudomonas syringae pv. syringae B728a
MLHLSRLTSLALAIAIVIGAPLAQAAEKTAPATPAAVSPAKTNATAKPPLPLDELRTFAEVMDRVKAAYVEPVDDKTLLENAIKGMLSNLDPHSAYLGPEDFQELQESTSGEFGGLGIEVGVEDGFVKVVSPIDDTPASKAGIEAGDLIVKINGTPTQGQNMQEAVDKMRGKIGEKITLTLVRDGGTPFDVTLARATIQVKSVKAQMLENGYGYIRITQFQVKTGDEVGKALAKFRKDNGKKMSGLILDLRNNPGGVLQSAVQVADHFLTKGLIVYTKGRIANSELRFSADPADASEGVPLVVLINGGSASASEIVAGALQDQKRGILMGTDTFGKGSVQTVLPLNNDRALKITTALYYTPNGRSIQAQGINPDIVVRRAKVTNEADGENYKEADLLGHLGNGNGGADKPTVKSGAAAKARPQDDDFQLSQALSLLKGLSITRGN

SEQ ID NO: 3510 - protein, 545 aa, Borrelia burgdorferi
MAKDIYFNEDARKSLLSGVEKLSNAVKVTLGPKGRNVLIDKKFGSPTVTKDGVSVAREIELENPFENMGAQLLKEVAIKTNDVAGDGTTTATVLAYAIAREGLKNVSSGINPIGIKKGIDHAVNLAAEKIRQSAKKITTKEEIAQVASISANNDSYIGEKIAEAMDKVGKDGVITVEESKTFDTTISYVEGMQFDRGYLSPYFSTNKENMSVNFDDAFILIYEKKISSIKELLPVLEKVLGTNKPLLIIAEDIEGDALAALVLNSVRGALKVCAIKSPGFGDRRKAMLEDIAVLTGGVLISEELGLTLETVEIEQLGQAKTIKVDKDNTTIINTGNKEQIKERSELIKKQIEDSTSEYDKEKLQERLAKLVGGVAVINVGAVTEVELKEKKHRVEDALSATRAAVEEGVVPGGGSTLIEVAMYLDTIDTSKLSYEEKQGFEIVKRSLEEPMRQIISNAGFEGSIYIHQIKTEKKGLGFDASSFKWVNMIESGIIDPAKVTRSALQNAASIAGLLLTTECAITDIKEEKNTSGGGGYPMDPGMGMM

SEQ ID NO: 3511 - protein, 173 aa, Gibberella zeae PH-1
MWSNCKVTCTDLAFQVVAVLPSPLRSILSLSPSRNTAHRALSVPTEPISTTSNIIQEMSSRGGKLAPEVNRALFVKNLSYNVTPEELFDLFGKFGPIRQVRQGIANNTKGTAFVVYEDVTDAKQACDKLNGFNFQNRYLVVLYHQPDKMAKSKEDLEARRESLAQLKQQHGID

SEQ ID NO: 3512 - protein, 547 aa, Novosphingobium aromaticivorans DSM 12444
MAAKDVKFGRDARERILRGVDILADAVKVTLGPKGRNVVIDKSFGAPRITKDGVSVAKEIELKDKFENMGAQMLREVASKANDAAGDGTTTATVLAQAIVREGMTAVAAGMNPMDLKRGIDIAVGKVVENLKARSTPVAGSSEIAQVGIISANGDTEVGQKIAEAMEKVGKEGVITVEEAKGLEFELDVVEGMQFDRGYLSPYFITNPEKMTVELENPYILIHEKKLSSLQAMLPILEAVVQSGRPLLIIAEDIEGEALATLVVNKLRGGLKIAAVKAPGFGDRRKAMLGDIATLTAGEMISEDLGIKLESVTLAMLGQAKKVTIDKDNTTIVDGAGSAEEIKARVEQIRAQIEVTTSDYDREKLQERLAKLAGGVAVIKVGGATEVEVKERKDRVDDALHATRAAVEEGIVPGGGTALLYATKALEGLKGANDDQTKGIDIVRRAIQAPIRQIAANAGHDGAVVSGNLLRENDENQGFNAATDTYENLKAAGVIDPTKVVRTALQDAASVSGLLITTEAAISEKPDDKPAMPPMGGGMGGMGGMDF

SEQ ID NO: 3513 - protein, 319 aa, Arabidopsis thaliana
MANIIFLDQPVGSGFSYSKTPIDKTGDISEVKRTHEFLQKWLSRHPQYFSNPLYVVGDSYSGMIVPALVQEISQGNYICCEPPINLQGYMLGNPVTYMDFEQNFRIPYAYGMGLISDEIYEPMKRICNGNYYNVDPSNTQCLKLTEEYHKCTAKINIHHILTPDCDVTNVTSPDCYYYPYHLIECWANDESVREALHIEKGSKGKWARCNRTIPYNHDIVSSIPYHMNNSISGYRSLIYSGDHDIAVPFLATQAWIRSLNYSPIHNWRPWMINNQIAGYTRAYSNKMTFATIKGGGHTAEYRPNETFIMFQRWISGQPL

SEQ ID NO: 3514 - protein, 194 aa, Triticum aestivum
  misc_feature (175)..(175): Xaa can be any naturally occurring amino acid
  misc_feature (188)..(188): Xaa can be any naturally occurring amino acid
MMGRKALDYEELNENVKKVQYAVRGELYLRASELQKEGKRIIFTNVGNPHALGQKPLTFPRQVVALCQAPFLLDDPNVGLIFPADAIARAKHYLSLAPGGLGAYSDSRGIPGVRQEVAEFIQRRDGYPSDPELIYLTDGASKGVMQMLNAIIRNERDGILVPVPQYPLYSAAISXLGGSLVPYYLEEXEANWGT

SEQ ID NO: 3515 - protein, 152 aa, Zea mays
MSLVRRSNVFDPFSMNLWDPFDTMFRSIVPSAASTDSETAAFASARIDWKETPEAHVFKADLPGVKKEEVKVEVEDGNVLVISGQRSKEKEDKDDKWHRVERSSGQFVRRFRLPENAKVDQVKAGLENGVLTITVPKAEEKKPEVKAIEISG

SEQ ID NO: 3516 - protein, 385 aa, Lithospermum erythrorhizon
MSIPSSKLLFTPYQLGKHLLSHRIVMSPMTRNRSFDAMPQKHAILYYSQRTSPGGFIVTEATGVSDTAQGYPHTPGIWTKEQTEAWKPIVDAVHAKGGVFFCQLWHVGRVSNKGFQPNGQDPISSTTKGFTPAVRASYVQEDWFSPPRALETDEIPKIIEDFVVSARNAIDAGFDGIELHGAHGYLLEQFLKDNVNDRTDKYGGSLENRCRFVLELVEAVVKEVGADKVGIKLAPFSDFMEAGDSDPAALGTYLVEALNKYGLLYLHVLEPRMKTTGETNNQSIDPMRKAFKGTFMVGGGYDKDLGEKALEEGRADLVVYGRPFVANPDLPKRFEVDAPLNEPDRNTFFSHDPVVGYTDYPFLEEATCLVPVFDTHCIFSIFLFN

SEQ ID NO: 3517 - protein, 214 aa, Prunus persica
IDFEPVKPYEVPMTAAGALQSYKLAAKAIARLQSLPSGSMERLCDTMVQEVFELTGYDRVMAYKFHDDDHGEVVSEITKPGLEPYLGLHYPSTDIPQASRFLFMKNKVRMIVDCCAKQVKVLQDEKLPFDLTLCGSTLRSPHSCHLQYMKNMESIASLVMAVVVNEGDDEVASPDSVQPQKRKRLWGLVVCHNTSPRFVPFPLRYACEFLAQSS

SEQ ID NO: 3518 - protein, 366 aa, Lithospermum erythrorhizon
MASKKLLFTPYQLGKHLLSHRIVMSPMTRNRSFDAMPQKHAILYYSQRASKGGFILTEATGVSDTAQGYPHTPGIWTKEQPEAWKPIVDAVHAKGAVFFCQLWHVGRVSNKGFQPNGQDPISSTTKGFTPAVRASYVQEDWFSPPRALETDEIPKIIDDFRIAARNAIDAGFDGVELHGAHGYLLEQFLKDNVNDRTDKYGGSLENRCRFVLELVEAVVNEVGADKVGIKLAPFSDFMEAGDSDPATLGTYLAEALNKFGILYMHVLEPRMKTTGETNNESIDPMRKAFKGTFVVGGGYDKELGEKALEEGRADLVVYGRPFVSNPDLPKRFEIDAPLNEYDRNTFFTHDPVVGYTDYPFLEEATA

SEQ ID NO: 3519 - protein, 144 aa, Nitrosomonas europaea ATCC 19718
MAITRYEPWGLLTQLQRELERARDDMATEGASAIAEWAPAVDIKEESDKFIVHADLPGVKPEAIDVTTENGVLTIKGEKQTEARTEKEGYKRVERTHGSFYRRFSLPDTADLGAISAVTKDGVLVVTIPKREAVQPKKVSVTAQ

SEQ ID NO: 3520 - protein, 305 aa, Brassica napus
  misc_feature (294)..(294): Xaa can be any naturally occurring amino acid
MSCFGWCGNDDGFRNGDDTRPMPSHIPAGDSGSHYLRSDPPMNQPVVQMEPIAVPAIPADELSDVTDNYGSKALVGEGSYGRVFHGVLKSGITSAIKKLDSSKQPDQEFLSQISMVSRLRHGNVIALVGYCVDGPLRVLAYEYAPNGSLHDVLHGRKGVKGALRGPVMTWHQRVKIAVGAARGLEYLHEKVNPQVIHRDIKSSNVLLFDDDVAKIGDFDLSNQAPDMAARLHSTRVLGTFGYHAPEYAMTGTLSTKSDVYSFGVVLLELLTGRKPVDHTLPRGQQSLVTWATPXLSEDKVKLCVD

SEQ ID NO: 3521 - protein, 377 aa, Pseudomonas putida
MPDTSFSNPGLFTPLQLGSLSLPNRVIMAPLTRSRTPDSVPGRLQQIYYGQRASAGLIISEATNISPTARGYVYTPGIWTDAQEAGWKGVVEAVHAKGGRIALQLWHVGRVSHELVQPDGQQPVAPSALKAEGAECFVEFEDGTAGLHPTSTPRALETDEIPGIVEDYRQAAQRAKRAGFDMVEVHAANACLPNQFLATGTNRRTDQYGGSIENRARFPLEVVDAVAEVFGPERVGIRLTPFLELFGLTDDEPEAMAFYLAGELDRRGLAYLHFNEPDWIGGDITYPEGFREQMRQRFKGGLIYCGNYDAGRAQARLDDNTADAVAFGRPFIANPDLPERFRLGAALNEPDPSTFYGGAEVGYTDYPFLDNGHDRLG

SEQ ID NO: 3522 - protein, 206 aa, Thermoanaerobacter tengcongensis MB4
MKILVTAFDPFGGESINPSYEVLKNLKDNIEGAEIVKIQVPTVFYLSVEKAIEKIKEVNPDAVLSIGQAGGRYDISVERVAINIDDARIPDNIGQQPIDTPIDPEGAPAYFATIPIKEIVEEIKKENIPASISNTAGTYVCNHLMYGILNYIHKNKLNIKAGFIHIPYLPVQVLNKPSTPSMSLGDMVKAIETAIKVIVKSCKKSR

SEQ ID NO: 3523 - protein, 258 aa, Xylella fastidiosa Temecula1
MRLTPLPAFDNNYIWTLIAPDGRAIIVDPGQALPILEAHSKGLIPTAILLTHHHADHIGGVPELLERWPTLPVYAPHDTRIALNYHRIGEGDSLNILGMRFQVIHTPGHTHSHLTFIGNDLLFCGDTLFSLGCGQIFEGTPTQMLASLQRLAALPIQTRVCCGHEYTLSNAAFALHVDPTNTALQKRRQQANAMRLAGLPTLPISLESELNTNPFLRTAAPTIHAATATHLQRTPIDEVEVFATLRHWKNNFPIKNIP

SEQ ID NO: 3524 - protein, 108 aa, Triticum aestivum
  misc_feature (47)..(47): Xaa can be any naturally occurring amino acid
  misc_feature (49)..(50): Xaa can be any naturally occurring amino acid
  misc_feature (62)..(62): Xaa can be any naturally occurring amino acid
  misc_feature (64)..(64): Xaa can be any naturally occurring amino acid
  misc_feature (66)..(70): Xaa can be any naturally occurring amino acid
  misc_feature (72)..(80): Xaa can be any naturally occurring amino acid
  misc_feature (83)..(83): Xaa can be any naturally occurring amino acid
  misc_feature (85)..(88): Xaa can be any naturally occurring amino acid
  misc_feature (92)..(96): Xaa can be any naturally occurring amino acid
  misc_feature (98)..(98): Xaa can be any naturally occurring amino acid
  misc_feature (100)..(105): Xaa can be any naturally occurring amino acid
MAAASLRKGNARLPPEVNRALFVRNLPFNISSEEMYDIFGKYGAIRXIXXGNAKDTRGTVFXLXPXXXXXKXXXXXXXXXKEXKXXXXGGEXXXXXMXGXXXXXXKEG

SEQ ID NO: 3525 - protein, 297 aa, Yersinia pestis KIM
MRYAFPTQQLKDNVMQTVKLNNGIAMPLLGFGVFQMTNTAECERAVIDAIETGYRLIDTAASYQNETQVGNALKLSGIARDELFITTKLWLQDTYYEGAKAQFERSLNRLQLDYVDLYLIHQPYGDVHGAWRAMEELHQAGKIRAIGVSNFHPDRLADLMAFNKIIPAVNQIEVNPFNQQLHAVPWMQSRGIQPEAWAPFAEGRNGLFQNPVLTAIGEKYGKSVGQVVLRWIFQRGIVSLAKSVRKGRMEENINILDFELSAEDMLQIAALDTATSAFFSHRDPAMVEWLTGRKLDV

SEQ ID NO: 3526 - protein, 431 aa, Magnetospirillum magnetotacticum MS-1
MFETDPDTFERAGLGQLDEAGSAALMKSIFSDILGDHPVLTNRSIWRQFPMIRNARWVRGNRVLLGDAKATAHFSIGSGTKLAMEDAIALYEALVAEAEVPAALDRFEKGRREEVEKIQHAADVSLVWFEHVARYLDFEPVQFAFGAMTRAKAITYDNLRLRAPGFVAQMDRAFAEGVRREGFDVSLDKPAAPMFQPLRLREMVVPNRVAMSPMCLYAATEGVPNDFHLVHYGSRAIGGPGLMFTEMTCVSRDARITPGCAGLWNDAQETAWRRIVDFVHANAATKFCLQLGHAGRKGATKRMWEGIDRPLESGGWEVMSASALPYFPDSTVPREMTRADMDAVIADFVAATRRAERAGFDMLELHCAHGYLLASFLSPLTNHRSDVYGGSVENRLRFPLEVFTAMRAAWPAERPMSVRVSATDWAEGGLT

SEQ ID NO: 3527 - protein, 656 aa, Burkholderia pseudomallei K96243
MCGITGFVGPVACAPQTARATLARMTDSLAHRGPDDTGLWIDHDAGVALGHRRLSIVDLSEHGHQPMLSACGRYAMTFNGEIYNFRALRSELEREHRAPEWRGHSDSEVLLAAFCAWGVDRALQKAVGMFALALWNRESRVLTLARDRIGEKPLYYGRIGGSFVFGSELKALRRFPGFDAHPIDRDALCLYLRHASVPAPYTIYEGIRKLPPGTYAQFEDLAEAPAPRRYWSLERAIAAGRANPFDGDANAAVAQLDHVLRDAIAEQSVADVPLGAFLSGGVDSSVIVALMQTQTAQPVQTFTIGFHEAGYDEAGYAKAVARHLGTSHTELYVKPADVLATVPRMPCVYDEPFADSSQIPTLLVSELTRRHVKVSLSGDGGDELFGGYTRYFLTPRLWGRLRRVPAAVRMRIAAALHALRPDHADQIASLVQGAWSASAQRDASPRVGDRLHKLANVMTADSRASLYRLLMSSVHHPERFTLAGHEPQTLIDTPGAWPPGLSFAEQAMAVDTLTYLPTDILTKVDRAAMAVSLETRMPFLDYRVVEFAWRLPEALRIPDGQDKWLLRKLLYRYVPRPLIDRPKQGFCAPVGAWLRGELSDWAAELLRPARLRDEGYLDAARVERLWRQHQSGRMNWQHPLWTVLMFQAWLERQRAE

SEQ ID NO: 3528 - protein, 981 aa, Desulfovibrio desulfuricans G20
MMNNMLRYGVRGVQTRICLLTLVVSTLVALAFGSYEYVTALDAEYARLERFAVSQADRVARLLLVPVWNVDRQASMSIIDTEMDDERVHAVIVYDEGGSIFIGRQRGSGGVLVNTSRSIPRGEFIVTSRPLRQGSLRFATLQLYVTPEYVHRTMKDNVVAAVMHMLALELVLVLGILLVVRRSLIVPLSALTAWVRRESPLYDYGTRIPKQADDELGELVDSMNGMLSEIEKRDRMLNDHSKHLEKLVAERTQELEHARHTAEQASKAKGDFVASMSHELRTPMNAIIGMIEIALKTELTVKQREYLTIIRSSARSLLGVVNDILDISKIEAQKMELEHIPFSTQEMLEEVTDLFRERVGMKGVELVLDIEADVPAVLVGDPLRLKQVLVNLVTNAFKFTKQGEVRIRVAVGSRSQDVVQLEFSVRDTGLGIGEEARNRLFDTFSQAEGSTARLFGGSGLGLSIARELVRLMGGTITVASEPGKGSDFRFTGRFSLPVEAVEARHHRTGEAPRGRVLLVEDNESNRLVMTRMLERLGYDCDALQDGYTAYERLKRQAALYDLILLDWRLPGVDGLEVLEKLRAEKQPLPPVFMMTAFGREAELERAEELGVASFLSKPVKLSSLSDAIRAMRGEMTPEEQTDTAMIRQFDGMRALLVEDNIINRHVALDMLQDMGFSVVSAEHGEEALAVLDDVEPPSGPGFDVVFMDIQMPVMDGIEATRVIRQHPRWRHIPIIAMTAHVMSEDRDKALEAGMNDYVTKPVDRMMLLQVLQRHVGEHAARAAEDGARRIRQSFDARSEHLQEHNILHMHGMGVAGAEQEGAVGGVSSGHAGAGVPEQGTDIISDGGPDGVPPMPARLPGLILEEGVDRLGGKQDIYFEILKKFAEVYAQAADAVRQAAEQNHRDVVAEKAHAIAGAAANISAGELRESALALERAARDGAPMELELEQFAYWLEQVVRSIGVLKSRMRPVPDAPEDGMHP

SEQ ID NO: 3529 - protein, 766 aa, Saccharomyces cerevisiae
MSEEETVSAPAPASTPAPAGTDVGSGGAAAGIANAGAEGGDGAEDVKKHGSKMLVGPRPPQNAIFIHKLYQILEDESLHDLIWWTPSGLSFMIKPVERFSKALATYFKHTNITSFVRQLNIYGFHKVSHDHSSNDANSGDDANTNDDSNTHDDNSGNKNSSGDENTGGGVQEKEKSNPTKIWEFKHSSGIFKKGDIEGLKHIKRRASSRNNSSINSRKNSSNQNYDIDSGARVRPSSIQDPSTSSNSFGNFVPQIPGANNSIPEYFNNSHVTYENANHAPLESNNPEMQEQNRPPNFQDETLKHLKEINFDMVKIIESMQHFISLQHSFCSQSFTFKNVSKKKSENIVKDHQKQLQAFESDMLTFKQHVMSRAHRTIDSLCAVNAAATAASVAPAPAPTSTSAYAPKSQYEMMVPPGNQYVPQKSSSTTNIPSRFNTASVPPSQLLYNTNRSRNQHVTYASEPAHVPNFINQPIPIQQLPPQYADTFSTPQMMHNPFASKNNNKPGNTKRTNSVLMDPLTPAASVGVQGPLNYPIMNINPSVRDYNKPVPQNMAPSPIYPINEPTTRLYSQPKMRSLGSTSSLPNDRRNSPLKLTPRSSLNEDSLYPKPRNSLKSSISGTSLSSSFTLVANNPAPIRYSQQGLLRSLNKAANCAPDSVTPLDSSVLTGPPPKNMDNLPAVSSNLINSPMNVEHSSSLSQAEPAPQIELPQPSLPTTSTTKNTGEADNSKRKGSGVYSLLNQEDSSTSSADPKTEDKAAPALKKVKM

SEQ ID NO: 3530 - protein, 348 aa, Saccharomyces cerevisiae
MPTLVNGPRRDSTEGFDTDIITLPRFIIEHQKQFKNATGDFTLVLNALQFAFKFVSHTIRRAELVNLVGLAGASNFTGDQQKKLDVLGDEIFINAMRASGIIKVLVSEEQEDLIVFPTNTGSYAVCCDPIDGSSNLDAGVSVGTIASIFRLLPDSSGTINDVLRCGKEMVAACYAMYGSSTHLVLTLGDGVDGFTLDTNLGEFILTHPNLRIPPQKAIYSINEGNTLYWNETIRTFIEKVKQPQADNNNKPFSARYVGSMVADVHRTFLYGGLFAYPCDKKSPNGKLRLLYEAFPMAFLMEQAGGKAVNDRGERILDLVPSHIHDKSSIWLGSSGEIDKFLDHIGKSQ

SEQ ID NO: 3531 - protein, 456 aa, Securigera parviflora
MCGILAVLGCSDDSQAKRVRVLELSRRLKHRGPDWSGLHQHGDCFLAHQRLAIVDPASGDQPLFNEDQSIIVTVNGEIYNHEELRKQMPNHKFRTGSDCDVIAHLYEEHGENFVDMLDGIFSFGLLDTRDNSFIVARDAIGVTSLYIGWGLDGSVWIASELKGLNDDCEHFETFPPGHLYSSKEREFRRWYNPPWFSESIPSAPYDPLALRQAFEKAVVKRLMTDVPFGVLLSGGLDSSLVASITARHLADTKAAKQWGAKLHSFCVGLEGSPDLKAGKEVADYLGTVHHEFQYTVQDGIDALEDVIYHIETYDVTTIRASTPMFLMSRKIKSLGVKWVISGEGSDEIFGGYLYFHKAPNKEELHKETCRKIKALHKYDCLRANKSTFAWGLEARVPFLDKEFINVAMNIDPENKMIKLDEGRIEKWILRKAFDDEENPYLPKHILYRQKEQFSDG

SEQ ID NO: 3532 - protein, 156 aa, Arabidopsis thaliana
MDLEFGRFPIFSILEDMLEAPEEQTEKTRNNPSRAYMRDAKAMAATPADVIEHPDAYVFAVDMPGIKGDEIQVQIENENVLVVSGKRQRDNKENEGVKFVRMERRMGKFMRKFQLPDNADLEKISAACNDGVLKVTIPKLPPPEPKKPKTIQVQVA

SEQ ID NO: 3533 - protein, 227 aa, Pisum sativum
  misc_feature (200)..(200): Xaa can be any naturally occurring amino acid
IILLKGKSKRNHSTLVHEGKDLVVYALINAVAIRKILKKYDKIHYSKQGQLFKSHAQTMHKEILQSPWLIELMALHINLRETKVKSRKSSALFDECYLTIKDGKPSLACELCDSIKIDIDLTCSICLETVFDPVSLSCGHIFCYSCACSSASLTIVDGLKEAHPKEKCPLCRSAGVYEGAVHLEELNIMLGRSCTEYWEXRLQMERVERVKQAKEHWETQCRAFMGI

SEQ ID NO: 3534 - protein, 240 aa, Glycine max
MALEALNSPTTTAPSFPFDDPTIPWAKRKRSKRSRDHPSEEEYLALCLIMLARGGTTTVNNRHVSPPPLQPQPQPTPDPSTKLSYKCSVCDKSFPSYQALGGHKASHRKLAGAAEDQPPSTTTSSAAATSSASGGKAHECSICHKSFPTGQALGGHKRCHYEGNGNGNNNNSNSVVTVASEGVGSTHTVSHGHHRDFDLNIPAFPDFSTKVGEDEVESPHPVMKKPRLFVIPKIEIPQFQ

SEQ ID NO: 3535 - protein, 412 aa, Thermosynechococcus elongatus BP-1
MGIRWLQRLIGCLVVLVGIWGIFPPDSAIALTEEQKLFNEAWRIVNQAYVDPTFNGQNWWRVREKALKRPLPDREATYAAIEAMLATLEDPFTRFLRPEQFRSLQTTTAGELIGVGLQISTDPKTGVLEVIAPIDGSPAAEAGIQPRDRILAIDGISTNQLSLDEAAERMRGTAGSAVHLLLQRGNDTPQELILHRGHIEINPVTAEVRQVQGHTVGYIRLSQFSAMAPTEMRKAIQILEQQGAEEYILDLRNNPGGLLQAGVEIAQLWLDSGAIVYTVDRQGIVDSLNASGGALTHDPLVVLVNGGTASASEILAGALQDHGRARLVGDRTFGKGSIQSLFHLSDGSGLAVTIAHYETPNHHNINKVGIEPDRRVLDAPESLMAMGTAADPQYLAALELLHSPIQVATSAG

SEQ ID NO: 3536 - protein, 544 aa, Francisella tularensis
MAAKQVLFSDEARAKMLDGVNTLANAVKVTLGPKGRNVVLDKSFGAPTITKDGVSVAKEIELEDKFENMGAQIVKEVASKTADVAGDGTTTATVLAQALLTEGLKAVTAGMNPMDLKRGIDKATARLVEELKALSKPCSDPKSIEQVGTISANSDATVGKLIADAMAKVGKEGVITVEEGKGFEDELDVVEGMQFDRGYLSPYFATNQENMTTDLENPYILIVDKKISNIRDLLPILEGVSKSGRALLIIAEDVESEALATLVVNNMRGVVKVCTVKAPGFGDRRKAMLEDIATLTGATFVSEDLSMKLEETNMEHLGTASRVQVTKDNTTIIDGAGEKEAIAKRINVIKANIAEANSDYDREKLQERLAKLSGGVAVIKVGAVTEAEMKEKKDRVDDALHATRAAVEEGIVAGGGVALIRAQKALDGLTGENDDQNHGIALLRKAIEAPLRQIVSNAGGESSVVVNQVKANQGNYGYNAANDTYGDMVEMGILDPTKVTRSALQHAASIAGLMITTEAMIGEIKEAAPAMPMGGGMGGMPGMM

SEQ ID NO: 3537 - protein, 436 aa, Oryza sativa (japonica cultivar-group)
MDSVVRTHIGHMLKMIHFCSMFLITFSDYKIQAILSSQQKRKAPEESDVAESSDCMITSPGFAVSPMLTPVSGKAVKTSKSKTKNNKAGPQTPTSNVGSPLNPPTPVGTCRYDSSLGLLTKKFINLLKQAPDGILDLNNAAETLEVQKRRIYDITNVLEGIGLIEKTLKNRIRWKGLDDSGVELDNGLSALQAEVENLSLKEQALDERISDMREKLRGLTEDENNQRWLYVTEDDIKGLPCFQNETLIAIKAPHGTTLEVPDPDEAGDYLQRRYRIVLRSTMGPIDVYLVSQFDEKFEDLGGGATPSGHANVPKHQPTEVFNTTNAGVGQCSNSVAVDNNIQHSQTIPQDPSASHDFGGMTRIIPSDIDTDADYWLISEGDVSITDMWKTAPDVQWDESLDTDVFLSEDVRTPSSHNQQPSAVGGPQMQVSDMHKP

SEQ ID NO: 3538 - protein, 549 aa, Wolbachia endosymbiont of Drosophila melanogaster
MTNVVVSGEQLQEAFREVAAIVDSTVAITAGPRGKTVGINKPYGAPEITKDGYKVMKGIKPEKPLNAAIASIFAQSCSQCNDKVGDGTTTCSILTSNMIMEASKSIAAGNDRVGIKNGIQKAKDVILKEIASMSRTISLEKIDEVAQVAIISANGDKDIGNSIADSVKKVGKEGVITVEESKGSKELEVELTTGMQFDRGYLSPYFITNNEKMIVELDNPYLLITEKKLNIIQPLLPILEAIVKSGKPLVIIAEDIEGEALSTLVINKLRGGLKVAAVKAPGFGDRRKEMLEDIATLTGAKYVIKDELGIKMEDLTLDDLGTAKNVKITKDNTTVVSENSDSDSVKARIEQIKSQIETSTSDYDKEKLRERLAKLSGGVAVLKVGGATEVEVKERRDRVEDALHATRAAIEEGIVPGGGVALLYASSVLDKLKGASDEEQIGINIIKKVLSAPIRRLVKNAGLESAVIIDYLIKQNDKELIYNVEAMNYANAFTAGVIDPAKVVRIAFETAVSVASVLITTESMIVDVPSKENASSPMGAGEMSGMGGF

SEQ ID NO: 3539 - protein, 578 aa, Arabidopsis thaliana
MCGILAVLGCVDNSQAKRSRIIELSRRLRHRGPDWSGLHCYEDCYLAHERLAIVDPTSGDQPLYNEDKTIAVTVNGEIYNHKDLRENLKSHQFRTGSDCEVIAHLYEEHGEEFVDMLDGMFAFVLLDTRDKSFIAARDAIGITPLYIGWGLDGSVWFASEMKALSDDCEQFMCFPPGHIYSSKQGGLRRWYNPPWFSEVVPSTPYDPLVVRNTFEKAVIKRLMTDVPLGVLLSGGLDSSLVASVALRHLEKSEAACQWGSKLHTFCIGLKGSPDLKAGREVADYLGTRHHELHFTVQDGIDAIEEVIYHVETYDVTTIRASTPMFLMSRKIKSLGVKMVLSGEGSDEIFGGYLYFHKAPNKKEFHEETCRKIKALHQYDCLRANKSTSAWGVEARVPFLDKEFINVAMSIDPEWKMIRPDLGRIEKWVLRNAFDDEKNPYLPKHILYRQKEQFSDGVGYSWIDGLKDHANKHVSDTMLMNASFVFPDNTPLTKEAYYYRTIFEKFFPKSAARATVPGGPSVACSTAKAVEWDAAWSQNLDPSGRAALGVHVSAYGEDKTEDSRPEKLQKLAEKTPAIV

SEQ ID NO: 3540 - protein, 578 aa, Arabidopsis thaliana
MCGILAVLGCIDNSQAKRSRIIELSRRLRHRGPDWSGLHCYEDCYLAHERLAIIDPTSGDQPLYNEDKTVAVTVNGEIYNHKILREKLKSHQFRTGSDCEVIAHLYEEHGEEFIDMLDGMFAFVLLDTRDKSFIAARDAIGITPLYIGWGLDGSVWFASEMKALSDDCEQFMSFPPGHIYSSKQGGLRRWYNPPWYNEQVPSTPYDPLVLRNAFEKAVIKRLMTDVPFGVLLSGGLDSSLVAAVALRHLEKSEAARQWGSQLHTFCIGLQGSPDLKAGREVADYLGTRHHEFQFTVQDGIDAIEEVIYHIETYDVTTIRASTPMFLMSRKIKSLGVKMVLSGEGSDEILGGYLYFHKAPNKKEFHEETCRKIKALHQFDCLRANKSTSAWGVEARVPFLDKEFLNVAMSIDPEWKLIKPDLGRIEKWVLRNAFDDEERPYLPKHILYRQKEQFSDGVGYSWIDGLKDHANKHVSDTMLSNASFFFPDNTPLTKEAYYYRTIFEKFFPKSAARATVPGGPSIACSTAKAVEWDATWSKNLDPSGRAALGVHVAAYEEDKAAAAAKAGSDLVDPLPKNGT

SEQ ID NO: 3541 - protein, 242 aa, Glycine max
MEFPNEAIPEGCSQKKTGRGKIEIKRIENTTNRQVTFCKRRNGLLKKAYELSVLCDAEVALVVFSSRGRLYEYANNSDLGTIDRYKKACAASTNPESVSEANTQFYQQEASKLKRQIRDIQNLNRHILGEALSSLSLKELKNLESRLKKGLSRVRSRKHETLFADIEFMQKREIELQNHNNFLRAKIAEHEKAQQRQQDMIPGNVCESTIPPQSYDRNFFPVNLIDSNNQYSNQDQTALQLV

SEQ ID NO: 3542 - protein, 377 aa, Dehalococcoides sp. CBDB1
MTFRIKVLLGTILSMVGLLGSFALGYFSGGVSALNSDENLSSIVTAWQIITTEYVEPDIIDQAALAEAAIKGMMDELNDPHSVYLNAEDYQASLEYDDGQYVGIGATVQIEDGVITLIPYEGSPAALAGIQAGDILLEVDGQSVDGFSLADLSPLVRGEKGTLITLKVERSTSAQPLLFNVTRNEILIPSVSSEMMGDIAYIRLSRFSERTDAELEQVLKNLGDAKGIVLDLRGNPGGLVSSVINVTSRFVSSGVVLTTVDNAGNSEEYKIVPKAVTTSLPMVVLVDQYSASGSEALSGALQDYGRATIVGKTTYGKGSVNRTFDVTGNTGIYLTIGRWYTPNGRMIEGQGITPDIELELAGDEAVNWALNFMHGEA

SEQ ID NO: 3543 - protein, 546 aa, Xanthomonas oryzae pv. oryzae KACC10331
MAAKDIRFGEDARTRMVRGVNVLANAVKATLGPKGRNVVLEKSFGAPTITKDGVSVAKEIELADKFENMGAQMVKEVASKTNDNAGDGTTTATVLAQALIREGAKAVAAGMNPMDLKRGIDQAVKAAVVELKNISKPTTDDKAIAQVGTISANSDESIGNIIAEAMKKVGKEGVITVEEGSGLENELDVVEGMQFDRGYLSPYFINNQQSQSADLDDPFILLHDKKISNVRDLLPVLEGVAKAGKPLLIVAEEVEGEALATLVVNTIRGIVKVVAVKAPGFGDRRKAMLEDMAVLTGGTVISEEVGLALEKATIKDLGRAKKVQVSKENTTIIDGAGDSAAIESRVGQIKTQIEDTSSDYDREKLQERVAKLAGGVAVIKVGASTEIEMKEKKARVEDALHATRAAVEEGVVPGGGVALVRALVAVGNLTGANEDQTHGIQIALRAMEAPLREIVANAGEEPSVILNKVKEGTGNYGYNAANGEFGDMVEFGILDPTKVTRSALQNAASIAGLMITTEAMVADAPKKDEPAMPAGGGMGGMGGMDF

SEQ ID NO: 3544 - protein, 538 aa, Thermotoga maritima MSB8
MPKILKFNEEARRALERGVDKVANAVKVTLGPKGRNVVIEKSWGSPTITNDGVSIAKEIELEDKFENLGAQLVKEVASKTNDVAGDGTTTATVLAQAMIKEGLKNVAAGANPILLKRGIDKAVEKAVEEIKKVSKKLSGREDIAHVAAISANSAEIGELIAEAMDKVGEDGVITVEDSKTLETYVEFTEGMQFDRGYISPYFVTDAEKMEVVLKEPFILITDRKLSAVKPLIPILEKVAQTGKPLLVIAEDVEGEVLTTLVLNKLKGTLQSCAVKAPGFGERRKAMLQDIAILTGGQVASEELGINLEDLTLEDLGRADLVRVKKDETIIIGGKGDPEAIKKRIAQIKAQIEETTSEYEKETLQERMAKLAGGVAVIKVGAATETELKEKKHRIEDALSATRAAVEEGIVPGGGVTLLRARKAVEKVIEELEGDEKIGAQIVYKALSAPIKQIAENAGYDGAVIIEKILSNDDPAYGFDALRGEYCNMFERGIIDPAKVTRSALQNAASIAGMLLTTEVLIVEKPEEKKETPSMPEEF

SEQ ID NO: 3545 - protein, 461 aa, Oryza sativa (indica cultivar-group)
MGGKLLPAAAFAGSAPPLSQVSTSAAHGEDSPYFAGWKAYDEDPYHAVDNPDGVIQMGLAENQVSFDLLEAYLRDHPEAAGWSTGGAGAGSFRDNALFQDYHGLKSFRKAMASFMGKIRGGKARFDPDHIVLTAGATAANELLTFILANPGDALLIPTPYYPGFDRDLRWRTGVNIVPVRCDSANGFQVTVAALQAAYDEAAAVGMRARSVLITNPSNPLGTTVRRKMLDDILDFVSRNDIHLISDEIYSGSVFAAPDLVSVAELVEARGGGGIAGRVHIVYSLSKDLGLPGFRVGVVYSYNDAVVTVARRMSSFTLVSSQTQKTLAAMLSDEAFAGEYIRTNRRRLRERHEHVVAGLARAGVPCLRGNAGLFVWMDMRRLLLGGGGVGGELRLWEKLLRQAKLNISPGSSCHCSEAGWFRVCFANMSLDTLDLALHRISRFMDTWNGTKQQASCQQQEQQ

SEQ ID NO: 3546 - protein, 772 aa, Pseudomonas aeruginosa UCBPP-PA14
MDIALTHRLSFKQASLTVLVAFILGTLLSLIQVGVDYASQDASINREVRALLDVSHNPAARIAYNIDAELAQELVLGLLRSPAVVRAEIIDTSGLPLASASREPAESRLRPLSDFLFGHKRVYEDPLHVDHAPGEALGVLQLEIDTFVFGNDFLRRAGITLLSGFVRSLLLSLILLVLFYTLLTKPLVSLIQALSGHDPRSPARMRLPCPKGHERDEIGVLVEVINRQLGRISVEIEQRREAENRLTQYLEELESIVAARTAELKAANARLTLSNQELEEARQTALDMAQARASFLANMSHEIRTPLNGLLGMLSLSLDGPLTPEQRQQLSIAHDSGKVLVELLNDVLDLSKFEAGQLVLEQIPFDLGVLVEDTASLLSQNAAAGVELTCLVDPALPAQVSGDPTRIRQVVSNLLSNALKFTRLGRVDVRVEATAEGVRISVRDTGIGIAQEALDRIFQPFTQADAGITRQYGGTGLGLALTRKLCEAMQGELTVESTVGLGSLFSVGLPLAPVSPPLQALPLRGRVIAQCSANSGLAQLLQTWLPRWGLEYKRLETDDSLLGHSLDVLISDCPDCLMGLRPSIGTPILLVTAYGSFLEPELARRLSPLRQLARPLSRNQLYQALKHVLEHTAIAPSSASDTAGEQRDTRVLLVEDNPVNQLVAKGLLHKLGCQVWIAEHGLNALKMLEEHPIDLVLMDCNMPVMDGYEATRQIRDSGRWGGLPIIALTANALPDERERCRAAGMDDYLAKPFHRDELKAILDRWCPLTAGD

SEQ ID NO: 3547 - protein, 355 aa, Nostoc sp. PCC 7120
MTHLFEPLRIREVTFRNRIALSPMCQYSSTNGFANDWHLVHLGSRAVGGAGLVMTEAAAVEARGRISPQDLGIWSDAHIEALARTVGLIHNFGAVAAIQLAHAGRKASTSKPSKGGKFLDESHEGWRPVVSSSAIAFSKESPVPEALSIEGIQQVIQAFVQATKRSLQAGFKVIEIHAAHGYLLHQFLSPLVNQRQDDYGGSFENRTRLLREVVEAVREVWPESYPLFVRLSATDWVDKGWDIEQSIAISDKLKSLGVDLIDCSSGGVIPGINIPVKPGYQSQFAERIRKEAHIPTGAVGLITSPEQADQIIRSGVADIVLLGRELLRNPYWPHLAAKELGHEKHWPVQYDRAWL

SEQ ID NO: 3548 - protein, 192 aa, Metasequoia glyptostroboides
DDHGEVISEIRRSDLEPYLGLHYPATDLPQASRFLFMKNKVRMICDCYATPVKVVEDSRLPRELILCGSALRAPHGCHAEYMSNMGSIASLVIAVTINAKEEDGDTDGQQHQQKGRRLWGLVVCHHTSPRFVPFPMRYACEFLMQVFAIQLNKEVELADQLREKHILRTQTLLCDMLLRDAPMGIIGQKPNI

SEQ ID NO: 3549 - protein, 719 aa, Nocardia farcinica IFM 10152
MTGHTPDTPDNAADADHAAGGADRKQRQLDAHRVDREQGHLTTQQGVRVRHTDDALSAGARGPTLLDDFHAREKITHFDHERIPERVVHARGAGAYGYFQPYDDRLAEYTVAKFLTDPAERTPVFVRFSTVAGSRGSADTVRDVRGFATKFYTSQGNYDLVGNNFPVFFIQDGIKFPDFVHAVKPEPHNEIPQAASAHDTLWDFVSLQPETLHAIMWLMSDRALPRSYRMMQGFGVHTFRFLDAAGTPTFVKFHWTPKLGVHSLVWDECQQIAGRDPDYNRRDLWDCIEAGHYPEWELGVQLIPVEKEFDFDFDLLDATKLVPEEQVPVLPVGRMVLDRNPDNFFAETEQVAFHTANLVPGIDFTDDPLLQLRNFSYLDTQLIRLGGPNFAQIPINRPVADVRNHQQDGYGQHAIPRGQASYTVNSIGGGCPVVGGDGSYEHYPRQVDGRAQRRRAESFREYYRQPRMFWRSMSAPEAEHIVEAFAFELGKVQRVEIRERTLGQLVRIDPDLAVRVAGRLGLPAPPPDPEAGTDAFVSPALSQAHTAKDSIATRQVAVLAADGVDAAGVRALRSALTERGAIVEVIASHGGMVHADGGDGDTLPVDRTLMTVASVLYDGVVVAGGQTGVETLTRNGEAVHFVLEAFKHAKPVAAFGAGVSLLRIAGILDAARAHDADPATGVITTEARGDGLDEEFVTDLARALANHRTWQRATSAIPA

SEQ ID NO: 3550 - protein, 333 aa, Zea mays
KGDQKGGVSPGGGGPFKKKGVPPGGRNFPGALSLDILIWKPFPSRALRPSSVSFIHTERETQKTKTLRKEMMEWDNQQQPSNNPSSNLQGIDVNGGSGSGGMYVKVMTDEQLETLRKQIAIYATICERLVEMHKTLTSQQDLAGRVGGLYADPTFGHKMTGGRQRWTPTPVQLQILERIFDQGIGTPSKQKIKDITEELSQHGQIAEQNVYNWFQNRRARSKRKQHGGGGGGVGSSSNNNNGESEVEAETETVNEKRKMPESLLVFPDGNKNAIGTTSATSPRPEDLYFQSPEMSSDLDLLGVLSNPRDEHFVGKMGLSESYNMYDHVEDYGM

SEQ ID NO: 3551 - protein, 181 aa, Metasequoia glyptostroboides
DDHGEVVAEMRRPDLEPYLGLHYPATDIPQASRFLFLKNRVRMICDCRAPAVKVRHDKRVAQALSLSGSTLRAPYGCHAQYMANMGSIASLVMAVTVSNNEEGGRRLWGLVVCHHTVPRFVPYPLRYACEFLMQVFGVQLNKEVELAARLRERHILRTQTVLCDMLLRDAPVGIVTKTPNI

SEQ ID NO: 3552 - protein, 192 aa, Stangeria eriopus
DDHGEVVAEIRRSDLEPYLGLHHPATDIPQAARFLFMKNRVRMICDCCAAPVRVIQDKNLARDLTLCGSTLRAPHGCHSHYMSNMGSIASLVMAVIINEREDEEGDNLGQQQVKGRRLWGLVVCHHASPRFVPFPLRYACEFLMQVFGIQLNKEVELAAQLREKHILRTQTLLCDMLLRDAPIGIVIRSPSI

SEQ ID NO: 3553 - protein, 189 aa, Stangeria eriopus
DDHGEVLAEIRRSDLEPYLGLHYPATDIPQASRFLFMRNRVRMIYDCSSPPVKVIQDKRLPKPLSLCGSTLRAPHGWHAQYMANMGSIASLVMAVTINDSDDDIGSSGQQKGRRLWGLVVCHHTSPRFVPFPLRYACQFLMQVFGIQLNREVELAAQLREKHILRTQTMLCDMLLRDAPVGIVAQTPNI

SEQ ID NO: 3554 - protein, 131 aa, Glycine max
  misc_feature (67)..(67): Xaa can be any naturally occurring amino acid
  misc_feature (93)..(93): Xaa can be any naturally occurring amino acid
MASKAPKKANLLDHHSIKHILDESVSEVVTSRGFVEDVRLSNVRLLIGAIIIVIALFAQFYKKKFPXENRDFLIACIALYVIFNGLLQLIIYXTKEKNAILFTYPPVIVKGPTTQTDLRKTSALIMKSVYF

SEQ ID NO: 3555 - protein, 488 aa, Bacteroides thetaiotaomicron VPI-5482
MEEKKLTAANGRPIADNQNSQTAGQRGPVMLQDPWLIEKLAHFDREVIPERRMHAKGSGAFGTFTVTHDITKYTRAAIFSEVGKQTECFVRFSTVAGERGAADAERDIRGFAMKFYTEEGNWDLVGNNTPVFFLRDPLKFPDLNHAIKRDPKTNMRSPNSNWDFWTLLPEALHQVTITMSPRGIPYSYRHMHGFGSHTYSFINADNQRIWVKFHLRTLQGIKNLTDQEAEAIIAKDRESHQRDLFESIEKGDYPKWLFQIQLMTEEEADHYRINPFDLTKVWPHKDFPLQDVGILELNRNPENYFAEVEQAAFNPINTVDGIGFSPDKMLQGRLFSYGDAQRYRLGVNSEQIPVNKPRCPFHAYHRDGAMRVDGNYGATKGYEPNSYGEWKDSPHMKEPPLKASGNGEIYNYNEREYDDDYYSQPGDLFRLMPADEQQLLFENTARAMGDSELFIKQRHTRNCYKADPAYGAGVAKALGIDLQEALKE

SEQ ID NO: 3556 - protein, 137 aa, Brassica napus
  misc_feature (126)..(126): Xaa can be any naturally occurring amino acid
MASDGAAATPAKVTPKKANLLDPHSIKHLLDETISEVVKSKGYTEDTRLGNWKLGIGAAVIAVALLAQFYPKKFPQNRDFLLGCIALYVVLNVVLLILSYTKEKDAILFTHPPMGSFNNTGLVISXKLPRFSDMYTL

SEQ ID NO: 3557 - protein, 381 aa, Methylobacillus flagellatus KT
MIPARPSGVPELLTSPFSANRQDLSMAKLFTPIRFRDTEIKNRIFVSPMCQYSAEEGIANHWHLVHLGGLAVGGAGLIIVEATAVAPEGRITPFCLGLWSDAHTQAFKPIVDFIKQQGAIPAIQIAHAGRKASCDAPWRDGKFLPPEQGGWQTFAPSAIPVTPEHGTPHALSREEIQQVAAQFHAAAKRALDAGFEVLELHCAHGYLLHEFLSPLSNRREDEYGGSLENRCRLALDIARDLRTLWPQDKPVFVRISATDWVEGGWDIDQSIQFAKWLKEAGIDLIDCSSGGLILDAKIPAGPGYQTEFAQRIRHETGIATGAVGLITSAVQAEHILVSGQADVVMLARKLLSDPHWPLHAAKELRTDVTWPAQYVRAKHIE

SEQ ID NO: 3558 - protein, 205 aa, Eucalyptus globulus subsp. globulus
MVRGKTQMKRIENDTSRQVTFSKRRNGLLKKAFELSVLCDAEVALIIFSPRGKLYEFSSSSLCKTIEKYQTRAKDMEAKTAEISMQPSKGNTLDMEKKIEHFEISRRRLLGEGLDSCSVEELQQTENQLERSLTKIRARKNHLIREHIERLKAEERKLLEEKRKLLQEIECGKGLTPVSSERPREEIRAESMDVETELFIGPPKR

SEQ ID NO: 3559 - protein, 306 aa, Oryza sativa (indica cultivar-group)
MPSHADLDRQISQLRECKFLGEAEVRALCEQAKAILMEEWNVQPVRCPVTVCGDIHGQFYDLIELFRIAGDSPDTNYLFMGDYVDRGYYSVETVTLLVALKVRYRDRITILRGNHESRQITQVYGFYDECLRKYGNANVWKYFTDLFDYLPLTALVENQVFCLHGGLSPSLDTLDNIRALDRIQEVPHEGPMCDLLWSDPDDRCGWGISPRGAGYTFGQDIAQQFNHTNGLTLISRAHQLVMEGFNWCQDKNVVTVFSAPNYCYRCGNMAAILEIGENMDQNFLQFDPAPRQIEPDTTRKTPDYFL

SEQ ID NO: 3560 - protein, 268 aa, Thiomicrospira crunogena XCL-2
MKIVGLPTLSDNYTWVIQSENADDKRAWIVDPGESQKVIHYFEENQLQLDGILLTHHHYDHTDGIMGVMDALGEVAIVSNAQGPFKPVTHPVKEGDQVQVLNETFQVIETPGHTDEHICFYHPEALFSGDTLFTGGCGKIWQNPPEQMAESLLKLRALNDDCMVYCGHEYTYANLNFAKIAEPNTPAILDRLAEVKTNTQRNIPCVPARLGLEKQTNPFLRFDHPPLMQTLMERQAQPNESVSTLFATLRAWKDELDQTNILEAGLND

SEQ ID NO: 3561 - protein, 403 aa, Pseudomonas aeruginosa UCBPP-PA14
MQVSKSNKLANVCYDIRGPVLKHAKRLEEEGHRILKLNIGNPAPFGFEAPEEILQDVIRNLPTAQGYSDSKGLFSARKAVMQYYQQKQVEGVGIEDIYLGNGVSELIVMSMQALLNNGDEVLIPAPDYPLWTAAVSLAGGKPVHYLCDEQANWWPDLEDIKAKITPNTRAMVIINPNNPTGAVYSREVLEGMVELARQHNLVLFSDEIYDKILYDGAVHVSTASLAPDVLCLTFNGLSKSYRVAGFRSGWVAISGPKQRAQSYIEGLDILANMRLCANVPAQHAIQTALGGYQSINDLVLPPGRLLEQRNRAWELLNDIPGVSCVKPMGALYAFPRIDPKVCPIHNDEKFVLDLLLSEKLLIVQGTAFNWPWPDHFRVVTLPRVDDLEQAILRIGSFLKGYQQ

SEQ ID NO: 3562 - protein, 322 aa, Candida tenuis
MSASIPDIKLSSGHLMPSIGFGCWKLANATAGEQVYQAIKAGYRLFDGAEDYGNEKEVGDGVKRAIDEGLVKREEIFLTSKLWNNYHDPKNVETALNKTLADLKVDYVDLFLIHFPIAFKFVPIEEKYPPGFYCGDGNNFVYEDVPILETWKALEKLVAAGKIKSIGVSNFPGALLLDLLRGATIKPAVLQVEHHPYLQQPKLIEFAQKAGVTITAYSSFGPQSFVEMNQGRALNTPTLFAHDTIKAIAAKYNKTPAEVLLRWAAQRGIAVIPRSDLPERLVQNRSFNTFDLTKEDFEEIAKLDIGLRFNDPWDWDNIPIFV

SEQ ID NO: 3563 - protein, 589 aa, Zea mays
  misc_feature (559)..(559): Xaa can be any naturally occurring amino acid
  misc_feature (572)..(572): Xaa can be any naturally occurring amino acid
MCGILAVLGCSDWSQAKRARILACSRRLKHRGPDWSGLYQHEGNFLAQQRLAVVSPLSGDQPLFNEDRTVVVVANGEIYNHKNVRKQFTGTHNFSTGSDCEVIMPLYEKYGENFVDMLDGVFAFVLYDTRDRTYVAARDAIGVNPLYIGWGSDGSVWIASEMKALNEDCVRFEIFPPGHLYSSAGGGFRRWYTPHWFQEQVPRTPYQPLVLREAFEKAVIKRLMTDVPFGVLLSGGLDSSLVASVTKRHLVETEAAEKFGTELHSFVVGLEGSPDLKAAREVADYLGTIHHEFHFTVQDGIDAIEEVIYHDETYDVTTIRASTPMFLMARKIKSLGVKMVLSGEGSDELLGGYLYFHFAPNKEEFHRETCRKVKALHQYDCLRANKATSAWGLEVRVPFLDKEFINVAMGMDPEWKMYDKNLGRIEKWVMRKAFDDDEHPYLPKHILYRQKEQFSDGVGYNWIDGLKSFTEQQVTDEMMNNAAQMFPYNTPVNKEAYYYRMIFERLFPQDSARETVPWGPSIACSTPAAIEWVEQWKASNDPSGRFISSHDSAATDHTXAVSRRWPTAAATXAANGTVNGKDVAVAIAV

SEQ ID NO: 3564 - protein, 511 aa, Oryza sativa (japonica cultivar-group)
MARMGISKGGSGKEAKKPPLLLGRFEVGKLLGQGNFAKVYHARNVATGEEVAIKVMEKEKIFKSGLTAHIKREIAVLRRVRHPHIVQLYEVMATKLRIYFVMEYVRGGELFARVARGRLPEADARRYFQQLVSAVAFCHARGVFHRDIKPENLLVDDAGDLKVSDFGLSAVADGMRRDGLFHTFCGTPAYVAPEVLSRRGYDAAGADLWSCGVVLFVLMAGYLPFQDRNLAGMYRKIHKGDFRCPKWFSPELIRLLRGVLVTNPQRRATAEGIMENEWFKIGFRRFSFRVEDDRTFTCFELDDDAAVDAPTSPPDTPRTVDSGDVGAAPTRPRKAGSLTSCDSAPSLLEGRFGLGGSSRRRSSLNAFDIISFSPGFDLSGLFDQDDGGGAGAGSIPEQQKHTARFVSAAPVEVIVATLEAAAAAAGMAVREREDGSISMEGTREGEHGALAVAAEIYELTPELVVVEVRRKAGGAAEYEEFFRARLKPSLRELVCDDRPCPEDSGELSRSL

SEQ ID NO: 3565 - protein, 140 aa, Glycine max
MVSFEMNDRKKIGLGLTGFGIFFSFLGLIFFFDKGLLAMGNILFVSGVSLTIGLKSTMQFFMKRSNFKGTISFGIGFFILILGWPILGMIVESYGFIILFSGFWPTLAVFLQKIPVLGWLFQQPYVRSLLDRYRGRRVPV

SEQ ID NO: 3566 - protein, 311 aa, Capsicum chinense
MGSKYSKATNSISDASNSFESYRFPLEDLEEATNNFDDKFFIGEGAFGKVYKGVLRDGTKVALKRQNRDSRQGIEEFGTEIGILSRRSHPHLVSLIGYCDERNEMVLIYDYMENGNLKSHLTGSDLPSMSWEQRLEICIGAARGLHYLHTNGVMHRDVKSSNILLDENFVPKITDFGLSKTRPQLYQTTDVKGTFGYIDPEYFIKGRLTEKSDVYSFGVVLFEVLCARSAMVQSLPREMVNLAEWAVESHNNGQLEQIVDPNLADKIRPESLRKFGETAVKCLALSSEDRPSMGDALWKLECALRLQESVI

SEQ ID NO: 3567 - protein, 138 aa, Candida glabrata CBS138
MWLSESQKFGVAFTFGGVLFFIFGIFTFFDRALLALGNILFLIGVVLIIGSQKTLIFFSRPTKRRGSILFLLGIFLILIKWTFIGFLVESLGIVGLFGDFFGIIVQFLRSLPIIGPILSHPAVAPIVDKIAGVRVLPV

SEQ ID NO: 3568 - protein, 688 aa, Haemophilus ducreyi 35000HP
MLTKIRIFMKVNKLSRLIAFCLGTMISTAFAIEPKIKANELVLPQPTELHNLSTKRVTARLTQSHYRKFNLDDEFAGKIFNRYIDWLDVAHNTFLQSDIDELRTKYASKLDEELYEGKLDSAFEMYDVMVKRRYERYKHVLSLLDKPLDLKGRDQIENEREKAPFPVTIEEANKLWEQRVKNDVISLTLKNKKWPEIKKTLIKRYNLAIKRLTQVKPDDVLQTYLNAFAREIDPHTSYLSPRAAKAFQESMNLSLEGIGATLSMEDDITTIKSLIPGAPAARSKKLGVGDKIVGVGQEKGEIEDVIGWRLDDVVDKIKGKKGSKVRLEIEPAKAHKTKIITLTRDTVRLEDSAAKLTIDKVAGKNIAVIKIPAFYIGLANDMHKLLAKIKTKKIEGLIVDLRDNGGGSLTEVVELTRLFIKSSPVVQVRDAFNRIKVYEDEPQIQVDKSVVTTNKPLYDGKLMVMINRHSASASEIFAAAMQDYNRAIIIGQQTFGKGTVQQSRSLNFVYDLDRDPLGFIQYTIQKFYRIDGGSTQLKGVQADIKFPEIIDAEKTGESFEDNALPWDKIPAANYQEVGNARDVVAVLTEKHQARIAKEPEFITLSENIAIRKERDQRKFTSLNLEERKKEDQADDMKRLKDLNARFIREGKKPLKNLDALPKDYEGPDFFLKEAKQMMFDWLQINKKA

SEQ ID NO: 3569 - protein, 1038 aa, Mesorhizobium sp. BNC1
MKFAESRTELLLYSAIAGLMALTFIADLYFPLGTAIWVIYLFPIALCYLVSRPVVPVAAATVVSFFVVIGFFYAPAGVDPDIARTNRVLGALTSWIIALTGYFFIRNKLAIQKQEWLQAGQVHLARSVSGNQKIEELSGNILAFLAEYLDAQAGALYVRRGSTFGRSGVYGVPAGAPIPDRFKPGDGLLGQAVADRRSFVLRDVPENYLYFGSGLGRAKPRHLLIAPASVDDEVNAVLELGFLKEAGEEVGELLERISEPMAIALRSARYRAQLQELLEETQRQAEELQTQSEELRSANEELENQSRSLQDSQVRLEEQQAELEQSNAQLEEQTQLLEVQRDELSRAQGALQAKARDLEEASRYKSEFLANMSHELRTPLNSLLIMARLLADNREGNLTSDQVKFAETIETAGNDLLNLINDILDISKIEAGHIELQIERVRVEPMLEKLRATFQSSASEKGLNFRIETVPGTPDRIESDPQRIEQVLKNFLSNAIKFTEKGEVVLSVAEEEDGRIAFAVRDTGIGIPEDQQQAIFEAFRQADGSINRKYGGTGLGLSISSELTRVLGGEIRVESTVGQGSSFILVVPKIYDAASVQKSAGAGRRTPVVSRAAPAAAESEAEKIDTVPARPRIIEDDRDKLTGGRVILVVEDDPAFARILMDLAHELGFECLVAETADEGVLLARRYLPAGVILDIGLPDHTGLSVLDRIKHDVRTRHIPVHVVSVSDYTRTARSFGAAGYMLKPVKREELERALTGLAKQLAQTVRRVLIVEDDATQLEALQLLLSSQDVETIAAASAAECFGKLKAETFDCMVLDLSLPDASGFEVLEQLSAEDAYSFPPTIVYTGRDLTPDEELRLRKFSKSIIIKGAKSPERLLDEVTLFLHQMVAELPERKREMLVRSLNRDAALEGRRILVVEDDIRNVYALMSVFEGHGAAVQIARNGREALQALEKMADEGNPAIDLVLMDVMMPEMDGLTATREIRKRERWKNLPIIVLTAKAMPGDQEQCLAAGANDYLAKPLDVDKLLSLARVWMPR

SEQ ID NO: 3570 - protein, 258 aa, Xylella fastidiosa 9a5c
MRLTPLPAFDNNYIWTLIAPDGRAIIVDPGQALPILEAHSKGLIPTAILLTHHHADHIGGVPELLERWPTLPIYAPHDTRIALNYHRIGEGDSLNILGLRFQVIHTPGHTHSHLTFIGNDLLFCGDTLFSLGCGQIFEGTPTQMLASLQRLAALPIQTRVCCGHEYTLSNAAFALHVDPTNTALQKRRQQANAMRLANLPTLPISLESELNTNPFLRTAAPTIHAATATHLQRTPIDEVEVFATLRHWKNNFPIKNIP

SEQ ID NO: 3571 - protein, 140 aa, Zea mays
MVSFEMNDLKKIGLGLTGFGIFFSFLGIVFFFDKGLIAMGNILFLSGLGLTIGLKSTMQFFTKPKNYKGTISFGAGFFLVLIGWPFFGMLLEAYGFIVLFSGFWPTLSVFLQRIPIIGWIFQQPFVTSFLDRYRGKRVPV

SEQ ID NO: 3572 - protein, 678 aa, Agrobacterium tumefaciens str. C58
MSNDPLLQPYQLKHLTLRNRIIVTSHEPAYPEDGMPKGRYRAYTVERAKGGVALTMTAGSAAVSRDSPPVFNNLLAYKDEIVPWIREMTDAVHEQGAAIMIQLTHLGRRTRWDKGDWLPVLAPSHQREAAHRAFPKKIEDWDIERVIKDFADAAERMKAGGMDGVELEAYGHLIDQFVSPLTNELDGPYGGSLDNRMRFCLDVFKAMRERVGDDFILGVRYTADECLKGGTGKAEGLEISRRLRDSGLIDYLNVIRGHIDTDPGLTDVIPIQGMANAPHLDFAGEIRAATQFPTFHAAKIQDVATARHAIASGKVDMVGMTRAHMTDPHIVRKIMEKREDDIRPCVGANYCLDRIYQGGLAFCIHNAATGREETMPHDITRAAERRKVVIVGAGPAGLEAARVCAERGHDVVVFEAANDAGGQIRLTAQSERRREMIGIIDWRMSQCERLGVTFHFNSWAEADTVLSENPDVVIIATGGLPHTDVLSKGNDLVVSAWDIISGDVKPGTNVLVFDDAGDHAGLQAAECLAKAGAKVEIMTPDRAFAPEVMAMNLVPYMRALQKLDVTFTVTYRLEAAERNSNQLIAHVGSDYGGVAKSRNVDQIVVNHGTVPLDELYFELKSGSKNLGETSYDALLAGEAQTVERNPAGTYRLFRIGDAVAARNTHAAIYDALRLAKDI

SEQ ID NO: 3573 - protein, 677 aa, Burkholderia sp. 383
MTTTFPHLLAPLDLGFTTLKNRVLMGSMHTGLEDSRKTLPRLAEYFAERARGGVGLIVTGGFAPNVAGWTKPFGGTLMTSAAARRHREITDAVHREDGKIALQILHTGRYGYHPFAVAPSKIKSPISPFAPHELSAGGVERQIRAFVRCAKLAREAGYDGVEIMGSEGYLINQFISMHTNKRTDQWGGSYENRIRLPIEIIERTREAVGRDFILIYRLSMLDLIPDGSDWSETVQLAKAVERAGATIINTGIGWHEARVPTIATSVPRGAFAWVTKKMKGEVGIPLVTTNRINRPEVAEQILADGCADMVSMARPLLADAEFVVKAAQGRADEINTCIGCNQACLDHAFKNKIASCLLNPRACHETELKYTPAAQPKRIAVVGAGPAGLACSTVLAQRGHQVDLFDGAAEIGGQFNMAKRVPGKEEFHEALSYFGRQVELTGVNLHLNRRVDASDLIAGGYDEIVLATGVAPRDPKIPGQDGPNVLSYIDVLAGRQPVGRRVAVVGAGGIGFDVAEYLVQEGESPALDLDEWKAEWGVTDPAATRGGVTRAQVTAPAREVTLLQRKAAPLGKGLGKTTGWIHRATLKMKQVKMIGGVNYELIDARGLHVSYGEQRTDHELIEADTIVLCTGQEPQRALLAPLQAAGRSVHLIGGAELAAELDAKRAIDQGSRLAARL

SEQ ID NO: 3574 - protein, 502 aa, Glycine max
  misc_feature (421)..(421): Xaa can be any naturally occurring amino acid
  misc_feature (451)..(451): Xaa can be any naturally occurring amino acid
  misc_feature (470)..(470): Xaa can be any naturally occurring amino acid
  misc_feature (480)..(480): Xaa can be any naturally occurring amino acid
  misc_feature (493)..(493): Xaa can be any naturally occurring amino acid
FGSRLAQAQECVFENTIAKGSTPGVCAKISRQVGIYYEEALAALNVAPLSQHFDKSWIVHVQLKAALFYAEACYRYGLELHDKEEIAEEIARLRSAVNVLTEAKKSSKGAAAQILDAIGKLEANINRNLERAVKENDRVYLMRVPSPSSLPPLPAFSMVKSMVMNEMLDASKEKMFASLVPDNSAKALSRYTEMVDDVIRTQAEKLQQASELTRVRLKEMELPESILALEGNFTLPTSLKEDVEAVQISGGPAGLEAELQQLKDLRRVNQELLVQTEELLQKEAREDSQFRSQFGTKWTRPQSSTLTKNLQDRLNRFAGNLKQAAESDGRIERSVREHSALMSILDARPIESALPSLARPIMSFDQNEDAIVGSLKQSLRQLETLGAQRAGLEDMLKEMKRKDDILPKLMTSTGSYDDLFXKEIAKYDHICEEIAQNIEAQEQLLLQIQAXNDEFSVIFNLEDYKASREXLQQIEAAIAXFKRNKGHINERLXKFYVTLQDA

SEQ ID NO: 3575 - protein, 107 aa, Candida albicans SC5314
MSSYEFPIVSVKNLPYNTSNSSLYEFFGKYGYINQIRINSSQPGTCFIIYHNIKNAQRAAQDLNGVNFNGRYLVTSMYQVDKSKINEEEMALRQEQLNLLKQQYSIK

SEQ ID NO: 3576 - protein, 502 aa, Medicago sativa
MDGASGGSGGGEGSTTQIPAPTPMLNANAPPPFLSKTYDMVDDPSTDAIVSWSATNNSFVVWDPPEFARDLLPKFFKHNNFSSFVRQLNTYGFRKVDPDRWEFANEGFLRGQKQLLKSISRRKPAHGHTQQQAQQPHGQSSSVGACVEVGKFGLEEEVERLKRDKNVLMQELVRLRQQQQTTDGQLQTMVQRLQGMEQRQQQMMSFLAKAVQSPGFFAQFVQQQNDSNRRITEVNKKRRLKQDGIAETTEQATPPDGQIVKYQPMMNETAKAMLRKIMKWDTPRVESFNKNPDNYLIGDGTSPSSAMDSSSSTSWNSGVTLQEVPPSSVQSTQIPMSTGTQGHIPSAEKPEILSVPQAAASANVMKDGTHAASTIPTSQADVIMPDIPSVPEIVPKSILDIPEDNYMAPETDDGFMDPSSLGSLPIDLDCLSPGADIDDLLSNSIWDDLLQTPIPEDFEANIDEISRGNEVQPTENGWDNNTQPLDQLTEQMGLLSSDAKRI

SEQ ID NO: 3577 - protein, 255 aa, Rhodobacter blasticus
MALNLLTVPCLKDNFAFLLHDAASGRTALVDAPEAAPVLSALAAQGWRLTDILLTHHHDDHIQAVPEIHAATGARVHGAAADAHRLPPLDHALREGDRVAIGAESAVVIDVPGHTRGHIAFHFPGSALAFTGDSLMAAGCGRLFEGTPAEMWASLSKLAALPPETLICSGHDYLDGNLRFALALEPGNPALISRQGRLSEMRREGRLPMPWTLAEELATNPFLRAPLPQMKAAVGLPQASDTVVFAEIRARKDLF

SEQ ID NO: 3578 - protein, 535 aa, Ralstonia metallidurans CH34
MRKTLKNISLVSIGVVAGVLATLQISATAQNTTGPLPLDQLRLMADIFGQIKREYVEPVDDKKLLTEAIKGMVASLDPHSAYLDEKDFKELQEGTRGRFAGLGIEISQEEGLVKVINPIEDTPAFRAGIQPGDLITRIDDKPVRGLPLEQAVKRMRGEPGTKVTLTIYRKSEERTFPVSITRAEIRVQSVKTKMLDNNTIGWVRLTSFQERTVTDLGRRLKEMADKNPNLRGIVLDLRNNGGGVLQGAVGVAAAFLPEDSVVVSTNGQVPDAKRVYKASFSNYRLSSLEDDPLKDLPAEFKKLPMVVLTNAYSASASEIVAGALQDHKRATLMGKTTFGKGSVQTVRPLTNDTGIKLTIAYYYTPSGKSIQAKGIRPDIPVDQNPDGDPDDALITREIDTERHLHNKQESEEPEMAEREQRRVEELRRLEEENAKKTPEEREKERKKKPVEFGSADDFMLQQAIAQLDGKPVQRSKSRLEATGTAGKPDSSDNPKPASKAPAKPAAKPAAPAKPSSPPPASAPIGEPLGTPTGKK

SEQ ID NO: 3579 - protein, 276 aa, Triticum aestivum
MMSMMADLSCGASGVTANDHQLAAPAPEDSAVAGSEKMGRGRIEIKRIENTTNRQVTFCKRRNGLLKKAYELSVLCDAEVALIVFSSRGRLYEYSNNSVKATIERYKKANSDTSNSGTVAEVNAQYYQQESSKLRQQISSLQNSNSRSLVRDSVSTMTLRDLKQLEGRLEKGIAKIRARKNELMYAEVEYMQKREMELHNDNIYLRSKVSENERGQQPMNMMASGSTSSEYDHMVPPYDSRNFLQANILQQQQQQQQHYSQQLQPTALQLGQQYFN

SEQ ID NO: 3580 - protein, 374 aa, Leptospira interrogans serovar Copenhageni str. Fiocruz L1-130
MSFHFQTFYGIFSLEFTDPQKNSVGIIFLEESMSVHPTQTLSLSQYLIEEQLKLPQATGDFTALMSHLVYAAKIVSREVRKAGLLENILGATETVNVQGETQMKLDEYADKVFNHTLTRSGHLCILGSEEHEETVPVPNGYKIGKYTIAIDPLDGSSNIDANVSIGTIFSVHLRKSPAGTPGTLSDLLQQGSGQRAAGYVLYGSSTMLILCTGKGVSGFTLDPSCGEFILSHPDMQIPETGGIYSINEGNYNYWSDEVKNYIRDIKSIEGGRKPQSGRYIGSLVADFHRNLLKGGIFLYPNDTKSTKYPNGKLRLLYEAAPMAFIAEQAGGMAVTVYGERILDLTPKELHERTTLVVGSKKEVEHFLKFAPKKS

SEQ ID NO: 3581 - protein, 639 aa, Solibacter usitatus Ellin6076
MCGIAGFTRLNKYASRGVAQRITEALSHRGPDQQGVFEGSEATLCAVRLKIIDLAGGDQPILSDDGDTAIAFNGEIYNHREVRGELEALGHRFRSNCDTETVLRAFLQWDTAAFQRLRGMFAIALWTESRKRLLLVRDRMGIKPLYYYRSGDDLYFGSELKAILEHPDVPRTLDLSALDTYLSVNYVPGPQTLIRGIRKVPPGHLLEWRHGKAWCEAWWKRPDSGTRRISLGAAKEQLDVLMKDSVREHLVSDVPLGVWASGGLDSSAILHYAAAQTAGRLKTFSVSFEGRSFDESRYFREIAQVYGTDHHEFDLNPDVELQSAIEDFAYYSDEPSADAGALPVWFLSRMSRRHVTVALSGEGADELFGGYLTYQADRLARPFRMVPAGLRRLMRGALDRYMPVSDDKISLEYKLKRWIDGSLLNADEAHFFWNGTFSPEQLRQIRPGTNGNGLQRMVEGLNGPREVVQRYLDVDQSFYLPDDILYKTDRMSMAHSLEVRPPFLDHRIVEFAASLPQRLKIRGAKQKHVLRELMRGKLPESVLTRKKSGFDIPTHDWFRGTLRGMLMDTLTPDAIAATGVFDANAIDGLIRDHMERRINVGYHLWGLLTLFLWMKRWKVEALPPEEEMRQVPARVLATR

SEQ ID NO: 3582 - protein, 252 aa, Thermosynechococcus elongatus BP-1
MMIYRLNALTDNYIFLLHDPQTGTAAVVDPAEPEPVLAKLAELGATLRAIFNTHHHWDHVGANCALRSRFPDIAVYGSSEDQGRIPEQTVFLKAGDRVPFGQTYFDVLFVPGHTRGHIAYYAPTTGDLFCGDTLFGGGCGRLFEGSPAQMLDSLNQLRQLPEETRVWCAHEYTQKNLSFALTVEADNPTLQERYAQVCRDRAQGKATIPSTIGLEKATNPFLRCEVRSIQIAVGATTPLQTFTRLRGKRDQY

SEQ ID NO: 3583 - protein, 216 aa, Dendrobium thyrsiflorum
KAHEISVLCDAEVAVIVFSNKGKLYEYSTDSSMEKILERYERYSYAERALFSNEANPQADWRLEYNKLKARVESLQKSQRHLMGEQLDSLSIKELQHVEQQLESSLKHIRSRKAQLILDSISELQKKEKILLEQNKTLEKEIIAKEKAKALMQNAPWEKQNLSRYSSAPLHVISDSVPTPTSRTFQAIANEEESPQAQLRVSNTLLPPWMLGHMNG

SEQ ID NO: 3584 - protein, 229 aa, Ipomoea batatas
MAREKIKIKKIDNITARQVTFSKRRRGLFKKAEELAVLCDADVALIVFSATGKLFEFASSNMKDILGKYELHSSNLDQATQPSRELQLENSLHVRLSKEVADKTRELRQMKGEELQGLSLEELQKLEKRLENGLTRVLETKGERVVTEIATLQRKGAELMKENKQLKEKMARVNGEKFPVIADVEAAGLIPEEGQSSESITTNVCSCNSGPPPEDDCSDTSLKLGLPIN

SEQ ID NO: 3585 - protein, 445 aa, Arabidopsis thaliana
MEEERRVLFGKYEMGRLLGKGTFAKVYYGKEIIGGECVAIKVINKDQVMKRPGMMEQIKREISIMKLVRHPNIVELKEVMATKTKIFFVMEFVKGGELFCKISKGKLHEDAARRYFQQLISAVDYCHSRGVSHRDLKPENLLLDENGDLKISDFGLSALPEQILQDGLLHTQCGTPAYVAPEVLKKKGYDGAKADIWSCGVVLYVLLAGCLPFQDENLMNMYRKIFRADFEFPPWFSPEARRLISKLLVVDPDRRISIPAIMRTPWLRKNFTPPLAFKIDEPICSQSSKNNEEEEEDGDCENQTEPISPKFFNAFEFISSMSSGFDLSSLFESKRKVQSVFTSRSSATEVMEKIETVTKEMNMKVKRTKDFKVKMEGKTEGRKGRLSMTAEVFEVAPEISVVEFCKSAGDTLEYDRLYEEEVRPALNDIVWSWHGDNNNTSSEDC

SEQ ID NO: 3586 - protein, 248 aa, Populus trichocarpa
MGRGRVQLKRIENKINRQVTFSKRRTGLLKKANEISVLCDAEVALIVFSHKGKLFEYSTDDSMEKILERYERYSYAERQLVATDLDSQGNWTLEYNRLKAKVELLQRNHRNYLGEDLDSMSLKELQNLEQQIDTALKHIRARKNHLMSQSISELQRKEKAIQVQNNMLVKQIKEKEKNDKALAQPAFWDLQDHGPNASSFLLSQPAGLPLPCLNIGGSHQEEAPEARRNELGHTLEPIYSFHLGGYGA

SEQ ID NO: 3587 - protein, 678 aa, Aspergillus nidulans FGSC A4
MTTFKLNTGATIPALGFGTWQDADAQETAVLEALRAGYRHIDTARVYGTEAAVGRAIKKSGIPRNQIFLTTKIWNNKHHPDDVAQALQDSLNDLDQDYVDLLLIHWPVAFKRGTEQFPKTEDGKPAVADTDYLDTYKALEKLLSTGKVKAIGVSNFSKAEMERILANATVPPAVHQLEGHPWLQQREFAEWHKKHGIHITHYSPFGNQNEVYSREGTIGRLIEDPVLVEIGKKYNKSAAQVALAWGVTEGHSVLPKSKTPERIKANLEGDFKLEEEDLKKIRGIDRKLRFNDSSKDFGNAASATPRAYSALMADSVILRGQAIHDQDSDSSGLLQVGTFQNALLNLIESPSGRFMQQNWQEYLGRSVDSVVNVVGNAKEDTKFPLDRLSKMDRYGQTGNKTYKNILDSLRFSIDLQPRNQFGGLWYYVYPNWSYLDGMFSLLSFSPMYASTFDIANSTLMNRDLFNQLDLLWSHCRDNRTGLLVHGYDASRTAPWANPVTGASPIVWIRALGWFMMALVDLFEHDLMDARVSIWRTRFVDLANALVDAVDSTSGAWWQVMSAPGQEGNYIESSGSAMFVYALYKGVRVGILPAPEKGGEAYIEVAERAYSELVKRFIVENEDGTLSYNGTVGVCSLNSTATYDYYIHQPLVYDSVLGSAAFIRASTEHELHLEASLNL

SEQ ID NO: 3588 - protein, 480 aa, Pantoea agglomerans
MKNGMLALGMTAADVPDNFLWGAASAAYQVEGATNKDGKGRSVWDYYLDEKHLAGPGISGALRLTFTDRDQYLKDIQLFKELGLNSYRFSHRLDTYYPDGQGPVNLRAVAHYRQFITDLEAAGIKPLVTLYHWDMPESLSAAGGWENRESVEWFQRYAEVIFANFSDQVDQFVLINEPTVEVATKIMAEKRLKGEELTLPPIVPAGSYLETSLKSYNHILLASAAAAESFKVKGYKGRLGIALPFFPVLTTENASDEDKADARLVDGILNRWFLDAMYKGNYPADVLKLAADRHLNIDVQPGDAERIHDAGLGFLGINYYAPFFIRHQKNASEVYSPEIIFPKNEKLAFNGAVRPDQFSALLERVRDEYGNPPVIITENGAGFEGEDQLTNGKVNDVNRCLYLVDHIHAMRESIARGANVQGYYVWSSHDNLEWLSGYKSRFGMIYVDYDTQKRTPKLSAEIYGKIIRGENISDVDCKSD

SEQ ID NO: 3589 - protein, 550 aa, Photobacterium profundum SS9
MAAKDVKFGNDARIKMLEGVNVLADAVKVTLGPKGRNVVLDKSFGAPTITKDGVSVAREIELEDKFQNMGAQMVKEVASQANDAAGDGTTTATVLAQSIIAEGLKAVAAGMNPMDLKRGIDKAVIAAVAALKELSVPCEDTKAIAQVGTISANADATVGNLIAEAMEKVGRDGVITVEEGQALHDELDVVEGMQFDRGYLSPYFINNQEAGSIDLESPFILLVDKKVSNIRELLPALEGVAKASRPLLIIAEDVEGEALATLVVNNMRGIVKVAAVKAPGFGDRRKSMLQDIAVLTAGTVISEEIGLELEKVQLEDLGQAKRITITKENTTIIDGAGEETMIQGRVAQIRQQIEDATSDYDKEKLQERVAKLAGGVAVIKVGAATEVEMKEKKDRVQDALHATRAAVEEGVVAGGGVALIRAASKVAASGLEGDNEEQNVGIRVALRAMESPLRQIVKNAGDEDSVVANNVRAGEGNYGYNAATGVYGDMIAMGILDPTKVTRSALQFAASVAGLMITTEAMITDMPAKDASAMPDMGGMGGMGGMGGMM

SEQ ID NO: 3590 - protein, 434 aa, Leptospira interrogans serovar Copenhageni str. Fiocruz L1-130
MRRNIVHSGADALIYEIRQIVAVAKKLEALGLQITYENIGDPILKGESIPDWMKEIVSNLILKDKSWAYTATQGYEPTRKFLAEKVNERGGAQISADDLLFFNGLGDAVAKIFGFMRREARVLGPSPAYSTISSAEAAHSGYEHLTYNLLPEHNWMPDLEDMENKVKYNDSIAGILLINPDNPTGAVYDKNLMKKIVAICEKYDLMLICDETYAHVNYSDHGPLHLSEVIGDKVPGMALRSISKEFPWPGGRCGWLEIFNKEKDPVFSRYVKSLLDAKMLEVCSTTLPQMAIPEVYSHPDFIPHLKRRNEKFKKRAHVATEYFAELRGVKVVEPKGAFYLTVAFDDDVLNSSMKLEIENKKADEFIQPLLASAANDRRFVYYLLASTGICVVPLSAFCTLKDGFRVTLLEEDEEKFNWIYKTLRDKIGEYIASA

SEQ ID NO: 3591 - protein, 263 aa, Zea mays
MRTCTTFSPNSSMFRNYEFNSKNLKWDFLGLVCPLQPVGRLVLNRNIDNFFAENEQLAFCPGLIVPGIYYSDDKLLQTRIFSYSDTQRHRLGPNYLLLPANAPKCAHHNNHYDGSMNFMHRHEEVDYFPSRYDAVRNAPRYPIPTAHIAGRREKTVISKENNFKQPGERYRAMDPARQERFITRWVDALSDPRLTHEIRTIWLSNWSQADRSLGQKLASRLSAKPSMLKLFLISFNLIQYMCNGRTSSDQYQFVFRLNEIERV

SEQ ID NO: 3592 - protein, 214 aa, Dendrobium thyrsiflorum
KAHEISILCDTEVALIIFSTKGKLYEYSTDSCMDRILERYERYCYAEKALQNTEPESQGDMSQEYGKLKNKIEALQKSRSHLMGENLDTLSLKELQHLEQQLETALKHIRSQRTQLLLNSIAELQRKEKSLLEHNSLLEKKITENESTTAMTQDLNPKQQRQAQESSSPPPFINDIPTLNLGTYPVSHGEEVAEPPLTGMNSNSLPPWMLRSLT

SEQ ID NO: 3593 - protein, 475 aa, Streptococcus agalactiae NEM316
MTVFPKHFLWGGAVAANQVEGAFRTDGKGLSVQDVLPNGGLGDFTAKPTPDNLKLEAIDFYHNYKNDIKLFAEMGFKVFRTSIAWSRIFPNGDDSAPNEAGLQFYDNLFDELLKYNIEPLVTLSHYETPLHLAKTYNGWADRRLIAFFEKFAQTVMERYKDKVKYWLTFNEVNSILHMPFTSGAIMTDKSQLSPQELYQAIHHELVASARVTKLGRSINPNFKIGCMILAMPAYPMTSDPRDVLAARQFEQHNLLFSDIHVRGKYPTYIQSYFKNNGIKIKFEEGDEEVLAQNTVDFLSFSYYMSVTQAYDFENYQSGQGNILGGLTNPHLTTSEWGWQIDPIGLRLVLNQYYERYQIPLFIVENGLGAKDQLIETLDGDYTVEDDYRIDYMNQHLVQVAKAIEDGVEIMGYTSWGCIDCVSMSTAQLSKRYGLIYVDRNDDGTGSLQRYKKKSFGWYQKVIKTNGQSLFEHHNR

SEQ ID NO: 3594 - protein, 428 aa, Pfiesteria piscicida
MKWGDVGGSGSKDVPIAKDAARGAEIGGRGAAVAPSIGQSESSGSFQKLCGEVLLDLPKHLVAVKQVGKGAYGEVFLCKDERTQGQVAVKVIRDFTKDLLFGKRIFREVKILMALQHENLMRLIDLPAVPSPDFNVVYMVMPYMLADLHRMIYSSLKLVESHCQAFTCQILRGLKYLHSAGIVHRDLKPANIMVNKNCTLRITDFGLARGRCDDEEVLTDYVVTRWYRAPELMLVPSSYFEAIDLWSVGCIHFECVARTVLFPGEHHFDMLKKIADTLGMFTPEGVAWCPQDQKGEVDTMLNKLEDLRSKELNSLASRLPEASEVCLDLLLKLLDKVPSTRISAAEALEHPYLQHLRDPAGETVAKRPFAWDFDVFEPSERALKDRIYAECARIHPEIITRDAKYLMDRGFKVPAQRPSPADEKPDGS

SEQ ID NO: 3595 - protein, 420 aa, Symbiobacterium thermophilum IAM 14863
MFATERMTLNMDERRTRFGLSLLLVAVTGVVSYALGALGWPPALQESMSQLRDRLPVAGSSLSGLQVERLEEVMRAIQGQYVEEVDVEALNVGALRGMVEALGDRYSTFFTPEEYRSFVEGFEPTFSGIGVTVEISQQTGLLTVVSPIKGSPGAKAGLRTGDAIIQVDGRDITGMSLNEAVALIKGPKGTQVRLLVKREGEPEPLEFVITRDTITVPVLDYRMIDQEAGIGYIQLFEFSKKGAASQVKEAIAELRSQGMTRLIFDVRQNPGGLLDEVVEIASFFLPTGDPVVHIVERAKEPRALTAKEAEKWTGPLVVLVDGGSASASEILAGAVKDAGVGTLIGAKTFGKGSVQTFWRLQDGSGIKLTTAKYLTAGGHSIDGQGVEPDIVVGNPNRIIPGEPGDPQLEAAVRHIREMEP

SEQ ID NO: 3596 - protein, 583 aa, Securigera parviflora
MCGILAVLCAENSQAKRVRVLELSRRLKHRGPDWSGLHQHGDCYLAHQRLAIVDPASGDQPLFNEDKSLIVTVNGEIYNHEELRKQLPNHKFRTGSDCDVIAHLYEEHGENFVDMLDGIFSFVLLDTRDNTFIVARDAIGVTSLYIGWGLDGSVWISSEMKGLNDDCEHFECFPPGHLYSSKDRAFRRWYNPPWFSETIPSAPYDPLALRHAFEKAVIKRLMTDVPFGVLLSGGLDSSLVASITSRYLATTKAAEQWGSKLHSFCVGLEGSPDLKAAKEVADYLGTVHHEFTFTVQDGIDAIEDVIYHVETYDVTTIRASTPMFLMSRKIKSLGVKWVISGEGSDEIFGGYLYFHKAPNKEEFHRETCRKIKALYQYDCLRANKSTFAWGLEARVPFLDKEFINVAMNIDPENKMIKRDEGRMEKYILRRAFDDEEHPYLPKHILYRQKEQFSDGVGYSWIDGLKEHAAKHVTDKMIFNAANIFPHNTPTTKEAYYYRMIFERFFPQNSARLTVPGGASVACSTAKAVEWDAAWSNNLDPSGRAALGVHLSAYDNQNNLANKPVEFEKIIPMEAPSLGVAIQS

SEQ ID NO: 3597 - protein, 309 aa, Kluyveromyces lactis NRRL Y-1140
MTSPSGEFPSLKLNTGASIPQLGFGTWPSSHADAYTAVITALKTGYRHIDAAAMYGNEAAVGKGIRDSGIPREEIFVTTKLWNTQQRDPASALDESLERLGLDYVDLFLIHWPVPLKPVGGPENLLKYPTPGIKPQIDTEDWSFIKTWELMQTLPKTGKTRAVGVSNFSIKNLEDLLNSSPDVLVPAVNQFEIHPQLPQTELINYCKSKGIVVEAYCPLGSSSSAMLSDPTIAEIADKYHVKPANVLINWGISRGYCVLPKSFTPARIASNKTPVHLSREDTERITKLSETLGVKRYVHPDFEPYPLFE

SEQ ID NO: 3598 - protein, 269 aa, Brassica napus
  misc_feature (15)..(15): Xaa can be any naturally occurring amino acid
PTRPCLLDEEAIKVXGGSNHSHATKDLYDSIAAGNYPEWHLFVQVDPRVRMDPAHEDKVDFDPLDVTKIWPEDVLPLQPVGRLVLNKNIDNFFNENEQIAFCPAIVVPGVHYSDDKLLQTRIFSYADSQRHRLGPNYLQLPVNAPKCAHHNNHHEGFMNFMHRDEEVNYFPSRLNPVRHADKYPTTPVFCSGNREKCMIEKENNFQQPGERYRSWDADRQERFVKRFVEALAEPRVTHEIRSIWISYWTQADKSLGQKLASRLNVRPKY

SEQ ID NO: 3599 - protein, 205 aa, Brassica rapa subsp. pekinensis
MAMLGGVRDVPANQNSGEVESLARFAVDEHNKKENALLEFARVVKAKEQVVAGTMHHLTLEIIEAGKKLYEAKVWVKPWLNFKELQEFKPASDDGSPSATITPSDLGCKKGEGASGWREVPGDDPEVQHVADHAVKTIQQRSNSLFPYELQEVVHANAEVTGEAAKYNMVLKLKRGEKEEKFKVEVHKNHEGVLHLNHMEQQHHD

SEQ ID NO: 3600 - protein, 282 aa, Thermosynechococcus elongatus BP-1
MFESFMTSVSSLPSRPLRPNWGVIFFMAIVHLGALLVFVPGTFSWSAVLLCFVLYWVSGGLGITLGWHRLVTHRSFQCPKWLEYFFVFCGTLACEGGIIEWVGLHRNHHLHSDQELDQHNSQKGFWWSHMGWMLQEVPAKAEVERLTKDINTDPVYRFLNQQFLPIQGVLGVLLYLWGGLPFVVWGIFVRLVLVYHLTWFVNSATHKFGYRTFESGDRSTNCWWVALLTFGEGWHNNHHTYPHSARHGLQWWEFDITWITIRALQGIGLAQKVRLVEAPPKQ

SEQ ID NO: 3601 - protein, 323 aa, Vicia faba
MSAQGQPQVQAQVQGIDEAVLDDIIRRLTEVRLSRPGKQVQLSEAEIKQLCLASRDIFLQQPNLLELEAPIKICGDIHGQYSDLLRLFEYGGLPPKSNYLFLGDYVDRGKQSLETICLLLAYKIKYPENFFLLRGNHECASINRIYGFYDECKRRFNVRLWKAFTDSFNCLPVAALIDDKILCMHGGLSPDLTNLDQIRILPRPVAIPDTGLLCDLLWSDPGRDVKGWGMNDRGVSYTFGPDKVAEFLSMHDLDLICRAHQVVEDGYEFFADRQLVTIFSAPNYCGEFDNAGAMMSVDENLMCSFQILKPAEKKTKFVMSNKM

SEQ ID NO: 3602 - protein, 845 aa, Arabidopsis thaliana
MRDIRGFAVKFYTREGNFDLVGNNTPVFFIRDGIQFPDVVHALKPNPKTNIQEYWRILDYMSHLPESLLTWCWMFDDVGIPQDYRHMEGFGVHTYTLIAKSGKVLFVKFHWKPTCGIKNLTDEEAKVVGGANHSHATKDLHDAIASGNYPEWKLFIQTMDPADEDKFDFDPLDVTKIWPEDILPLQPVGRLVLNRTIDNFFNETEQLAFNPGLVVPGIYYSDDKLLQCRIFAYGDTQRHRLGPNYLQLPVNAPKCAHHNNHHEGFMNFMHRDEEINYYPSKFDPVRCAEKVPTPTNSYTGIRTKCVIKKENNFKQAGDRYRSWAPDRQDRFVKRWVEILSEPRLTHEIRGIWISYWSQVRPSSAHDSPFFTTNSGAPVWNNNSSLTVGTRGPILLEDYHLLEKLANFDRERIPERVVHARGASAKGFFEVTHDITQLTSADFLRGPGVQTPVIVRFSTVIHERGSPETLRDPRGFAVKFYTREGNFDLVGNNFPVFFVRDGMKFPDMVHALKPNPKSHIQENWRILDFFSHHPESLHMFSFLFDDLGIPQDYRHMEGAGVNTYMLINKAGKAHYVKFHWKPTCGIKCLSDEEAIRVGGANHSHATKDLYDSIAAGNYPQWNLFVQVMDPAHEDKFDFDPLDVTKIWPEDILPLQPVGRLVLNKNIDNFFNENEQIAFCPALVVPGIHYSDDKLLQTRIFSYADSQRHRLGPNYLQLPVNAPKCAHHNNHHDGFMNFMHRDEEVNYFPSRLDPVRHAEKYPTTPIVCSGNREKCFIGKENNFKQPGERYRSWDSDRQERFVKRFVEALSEPRVTHEIRSIWISYWSQADKSLGQKLATRLNVRPNF

SEQ ID NO: 3603 - protein, 630 aa, Fusarium oxysporum
MSLLRLCMHASPLRALRYSFIPNRVQLARSTTILHPARFTTMPPKRTKRESSSPPAKKAKTSKTNGSSTSDALRQPHHKAGEAEENGIAIRKFYPPEMSNARARAYNNNELPRPIEVLISALENTAQERKSIDVKKAVVHWFKMDLRLSDNRALALASDKAKEAGVPLIAMYIISPQDYEAHLRSPVRVDFMLRTLEVIKHDLAKLDIPLYVETVEKRKRVPDRILELMDQWGAGHLYANMEYEVDELRREASMIRDFAENGKAFEVVHDTCVVPPGELHTGAGKQYAVYTPWYRSWVAHIHENLDLLELYEPPEKNPSSARKVFAKLFDVEIPDAPKSKRLDGEEKERLRSLWPCGEHEAKKRLDKFCEEMIGNYQKKRNIPAEAGTSSISVHLASGTISARTCVRTARDRNKTKKLNGGNEGIQTWISEVAWRDFYKHVLVHWPYVCMNKPFKPEYSNISWSYDNEHFAAWCEGRTGFPIVDAAMRQLNHLGYMHNRCRMIVACFLAKDLLLDWRKGERYFMEHLVDGDFASNNGGWGFSASVGVDPQPYFRIFNPLLQSEKFDPDGDYIRKWVPELKDLDRKAIHDPYNRGAGSKAKKNGYPAPIVTHKDCRDRALAAYKEGLASGE

SEQ ID NO: 3604 - protein, 77 aa, Fragaria x ananassa
PTDWRSPYAHVLVSDLPGMKKEEVKVEVDDGRVLQISGERKVKDGNGGSDKNDPECKWHRVERCRGKFLRRFTQDSS

SEQ ID NO: 3605 - protein, 727 aa, Yersinia pestis KIM
MSVLPDRQVINQLISGHYGDPFSILGMHETSQGLQICALLPDAREVWLVETENGRRIAQLTLEDPRGFFIAQLTRRKKSFRYQFAVTWQENPQIIEDPYRFGPLLQDIDSWLLAEGTHLRPYERLGAHLMSLDGVSGVSFAVWAPNAQRVSVVGDFNFWDGRRHPMRLRRENGIWELFLPGIEAGQLYKFEIIDCHGQVRLKADPYAFEAQMRPETASLISPLPDVVKSSAARQKANDLCSPVSIYEVHLGSWRRHTDNNFWLSYRELADQLVEYVKYMGFTHVELLPINEHPFDGSWGYQPLGLYAPTRRYGTPEDFKAFVAKFHQAGINVILDWVPGHFPSDEHGLSTFDGTALYEYADPREGYHQDWNTLIYNYGRNEVRNYLAGNAFYWMERFGIDALRIDAVASMIYRDYSRAEGQWVPNYYGGRENLEAIAFLRYTNKTIGVERPGSVTMAEESTDFPGVTLPPDIGGLGFNYKWNMGWMHDTLNYMQCDPVHRKYHHNLMTFGMLYAYTENFILPLSHDEVVHGKRSILDRMPGDAWQKFANLRAYYAFMWAHPGKKLLFMGCEFAQGREWNFETSLDWHLLDDENGWHSGVQRLVRDLNHCYRQYAPLYEWDYQPAGFEWLVVDDHENSVFAFLRRDAEGHELIAISNFTPVPRYHYRVGIPQGGHYREVLNSDSAFYCGSNLGNQGGIDSHHVRSHNHEHSLLLTLPPLATIYLLREN

SEQ ID NO: 3606 - protein, 217 aa, Triticum aestivum
  misc_feature (156)..(156): Xaa can be any naturally occurring amino acid
  misc_feature (158)..(158): Xaa can be any naturally occurring amino acid
  misc_feature (162)..(162): Xaa can be any naturally occurring amino acid
  misc_feature (171)..(171): Xaa can be any naturally occurring amino acid
  misc_feature (186)..(186): Xaa can be any naturally occurring amino acid
  misc_feature (199)..(199): Xaa can be any naturally occurring amino acid
  misc_feature (207)..(207): Xaa can be any naturally occurring amino acid
MCGILAVLGCADDTQGKRVRVLELSRRLKHRGPDWSGMHQVGDCYLSHQRLAIIDPASGDQPLYNEDKSIVVTVNGEIYNHEQLRAQLSSHTFRTGSDCEVIAHLYEEHGENFIDMLDGVFSFVLLDTRDNSFIAARDALASPPLFGGNDVVGFEXSXMTMXGALNDDCEXLWEIFPPGHLYSSKXQGGFMRWYNPPWXFSEVIPSXAYDPLCSQGG

SEQ ID NO: 3607 - protein, 427 aa, Oryza sativa
MENGGGDASAAAWRFGAANPAMEAARSQSIRALVYRVYACLDRGDARSVAPLGHGDPAAFACFRAAPAATGAVVAAAASGAHNSYAPAAGIAEACSAVAAHLSRELPYAVSPADVVLTAGCNHAVEIMMSVLASPGANVLLPRPGYPLYASRAALSGLEFRHFDLLPDSEWEVDLAGVEALADANTVAMVIVNPNNPCGCVYSRDHLAKIAETARKLGIMVISDEVYDHFAFGSKPFVPMGVFGDVAPVMTLGGISKRWMVPGWRLGWIAATDPNGILRNKKIIDSVIDYRAISVDPVTFVQGALPDILAKTDDAFFTNALGVVKKAAEICYEKLKEIDCITCPHKPEGSMFVMAKLDLSSLDGIEDDVDFCSKLAKEESVVICPGSGLGMKNWLRITFAVDPQLLEDGLERTKCFCKRHGKIKEAS

SEQ ID NO: 3608 - protein, 186 aa, Arabidopsis thaliana
MVHSKKFRGVRQRQWGSWVSEIRHPLLVWLGTFDTAETAARAYDQAAVLMNGQSAKTNFPVIKSNGSNSLEINSALRSPKSLSELLNAKLRKNCKDQTPYLTCLRLDNDSSHIGVWQKRAGSKTSPNWVKLVELGDKVNARPGGDIETNKMKVRNEDVQEDDQMAMQMIEELLNWTCPGSGSIAQV

SEQ ID NO: 3609 - protein, 473 aa, Zea mays
FAAVVLKCEYAVRGEIVIHAQRLQQQLQTQPGSLPFDEILFCNIGNPQSLGQQPVTFFREVLALCDHPCLLEKEETKSLFSADAISRAKQILATIPGRATGAYSHSQGIKGLRDAIAAGITSRDGFPANADDIFITDGASPGVHMMMQLLIRNEKDGILCPIPQYPLYSASIALHGGALVPYYLDEKTGWGLEISDLKKQLEDARSKGIDVRALVVINPGNPTGQVLAEDNQYDIVKFCKNEGLVLLADEVYQENIYVDNKKFNSFKKIARSMGYGEDDLPLVSFQSVSKGYYGECGKRGGYMEITGFSAPVREQIYKVASVNLCSNITGQILASLVMNPPKVGDESYASYKAEKDGILQSLARRAKALEDAFNTLEGFSCNKAEGAMYLFPQIHLPHKAIEAAKAAKKAPDAFYALRLLESTGIVVVPGSGFGQVPGTWHVRCTILPQEDKIPAVITRFKAFHEAFMAEYRD

SEQ ID NO: 3610 - protein, 544 aa, Treponema pallidum
MANELLFNEEARKKLLSGVEQISSAVKVTLGPKGRNVLLEKGYGAPTVTKDGVSVAKEVELEDPFENMGAQLLKEVATKTNDVAGDGTTTATVLAYSMVREGLKAVAAGMTPLELKRGMDKAVAIAVDDIKQNSKGIKSNEEVAHVASVSANNDKEIGRILASAIEKVGNDGVIDVDEAQTMETVTEFVEGMQFDRGYISSYFVTDRDRMETVYENPYILIYDKSISTMKDLLPLLEKIAQTGRPLLIIAEDVEGEALATLVVNSLRGTLKTCAVKAPGFGDRRKEMLEDIAILSGGQVISEDLGLKLESADIALLGQAKSVKVDKENTTIIDGSGKSKDIKDRIEQIKKQIEASTSDYDSEKLKERLAKLSGGVAVIKIGAVTEVEMKEKKHRVEDALNATRAAIEEGIVAGGGLALIQAAAALEKADLSGLTPDEAVGFKIVRRALEEPIRQISENAGIDGAVVAEKAKEKRGIGFDASKMEWVDMIKVGIIDPAKVTRSALQNAASVSGLLLTTECAIAAIGQKSSSTPPAPDMGGMGGMY

SEQ ID NO: 3611 - protein, 871 aa, Solanum tuberosum
MVYILSGVRFPTVPSVYKSNGFSSNGDRRNANVSVFLKKHSLSRKILAEKSSYNSEFRPSTVAASGKVLVPGTQSDSSSSSTDQFEFTETSPENSPASTDVDSSTMEHASQIKTENDDVEPSSDLTGSVEELDFASSLQLQEGGKLEESKTLNTSEETIIDESDRIRERGIPPPGLGQKIYEIDPLLTNYRQHLDYRYSQYKKLREAIDKYEGGLEAFSRGYEKMGFTRSATGITYREWAPGAQSAALIGDFNNWDANADIMTRNEFGVWEIFLPNNVDGSPAIPHGSRVKIRMDTPSGVKDSIPAWINYSLQLPDEIPYNGIYYDPPEEERYIFQHPRPKKPKSLRIYESHIGMSSPEPKINSYVNFRDEVLPRIKKLGYNALRIMAIQEHSYYASFGYHVTNFFAPSSRFGTPDDLKSSIDKAHELGIVVLMDIVHSHASNNTLDGLNMFDGTDSCYFHSGARGYHWMWDSRLFNYGNWEVLRYLLSNARWWLDEFKFDGFRFDGVTSMMYTHHGLSVGFTGNYEEYFGLATDVDAVVYLMLVNDLIHRLFPDAITIGEDVSGMPTFCIPVQDGGVGFDYRLHMAIADKWIELLKKRDEDWRVGDIVHTLTNRRWSEKCVSYAESHDQALVGDKTIAFWLMDKDMYDFMALDRPSTSLIDRGIALHKMIRLVTMGLGGEGYLNFMGNEFGHPEWIDFPRAEPHLSDGSVIPGNQFSYDKCRRRFDLGDAEYLRYHGLQEFDWAMQYLEDKYEFMTSEHQFISRKDEGDRMIVFERGNLVFVFNFHWTNSYSDYRIGCLKPGKYKVVLDSDDPLFGGFGRIDHNAEYFTSEGSYDDRPCSIMVYAPSRTAVVYALVDKLEVAVVEEPIEE

SEQ ID NO: 3612 - protein, 189 aa, Solanum tuberosum
GNEFGHPEWIDFPRAEQHLSDGSVIPGNQFSYDKCRRRFDLGDAEYLRYRGLQEFDRAMQYLEDKYEFMTSEHQFISRKDEGDRMIVFEKGNLVFVFNFHWTKSYSDYRIGWLKPGKYKVALDSDDPLFGGFGRIDHNAECFTFEGWYDDRPRSIMVYAPSRTAVVYALVDKEEEEEVAVVEEVVVEEE

SEQ ID NO: 3613 - protein, 370 aa, Pseudomonas syringae pv. phaseolicola 1448A
MSEINKHVTAPFDMSHFKLKNRFAVAPMTRVSADEQGSATQNMTRYYERFAKGGFGLIITEGNYTDRSSSQGYRFQPGLTDDEQAQAWRATTNAVHRHGSVMIAQLMHAGALSQANRFVSESAGPSAIRPKGEQMAFYYGAGSYRIPRAMTDKDIAEVIDGFAHAAQLAIGTAGFDGVEIHGANGYLLDQFLTDYSNQRTDQWGGEVVQRLRLTLEVIASVKKVAGQAPVGVRLSQGKVNDFQHKWAGGERDAEIIFATLADAGVDYIHVTEHEAWQPAFAQGKASLVELARRYAPGVALIANGGLHDPQKADQVLHQGADIIAVGKGALANPDLPQLLRQGEPLRDFDPAILGPIANIKDSELAFNGMN

SEQ ID NO: 3614 - protein, 676 aa, Treponema denticola ATCC 35405
MHLFNKSILNFKLGKYLTESNIAYIIFSPDYVPLFWSPEAERLLPDYLIKNTKIRLQDYLKTVLLEEDYIRLSAFIKSNPKTAAFEAKFDKPSSLSDKTALKFSFTQQDDNNFFVTIDDITKQKLKERFLIIARQDAEKANSMRSLFLANVSHEIRTPIQTIIGMMELINETNLDEEQSEYTRQVNFSAEVLLTLVNDVLDFSKLESGNMTMERTVFNLTDSVEQTVDLISMEAHKKGLEIVVDISDKIPDFIYGDPARLQQVLLNFVKNAVKFTETGYVSVSVKLVFENNSDDPYAAKHFFILFEVADTGIGVNNEQKSKIFNSFYQGNAAINRKYGGTGLGLAISKNIITMMKGQIGIKDNIPRGSVFWFKIPLVPSKKKAPHESILLDKSTRFLIVDDNMQTRTILKRMLLKFGFEDIALVSSGEQAIGVMKTAAEHKNPFNVVFIDMVMPKMDGWRLGAEIHNDDSLSASKLFLMIPEGSLGRDAKMKLLEWFDGYLYKPLKSRIVFHLLNELYRKLAIALEKDDIPELEPVEAGGQGQQNGNVHNFNEDNFFGCKVLVVDDHPVNQKLLKIILEKAHCIVSTANDGEEAIDTASSEHFDIIFMDIQMPGINGYEATQILRGKGYSRPIIACTAGSQDNERNLCKSMGLNDIIKKPFNKKQLFEMVKKHYKK

SEQ ID NO: 3615 - protein, 384 aa, Arabidopsis thaliana
MASSSADNLTDKNIVFRKLKSKSENKVCFDCSAKNPTWASVTYGIFLCIDCSATHRNLGVHISFVRSTNLDSWSPEQLRTMMFGGNNRAQVFFKQHGWTDGGKIEAKYTSRAADLYRQILAKEVAKAIAEETNSGLLSSPVATSQLPEVSNGVSSYSVKEELPLSKHEATSATSSPKASNTVVPSTFKKPIGAKRTGKTGGLGARKLTTKPKDNLYEQKPEEVAPVIPAVSSTNNGESKSSAGSSFASRFEYNDDLQSGGQSVGGTQVLNHVAPPKSSSFFSDFGMDSSFPKKSSSNSSKSQVEESDEARKKFTNAKSISSAQYFGDQNKNADLESKATLQKFAGSASISSADFYGHDQDDSNIDITASDLINRLSFQVKDPYT

SEQ ID NO: 3616 - protein, 190 aa, Solanum tuberosum
GNEFGHPEWIDFPRAEQHLSDGSVIPGNQFSYDKCRRRFDLGDAEYLRYRGLQEFDRAMQYLEDKYEFMTSEHQFISRKDEGDRMIVFEKGNLVFVFNFHWTKSYSDYRIGCLKPGKYKVALDSDDPLFGGFGRIDHNAECFTFEGWYDDRPRSIMVYAPSRTAVVYALVDKEEEEEEVAVVEEVVVEEE

SEQ ID NO: 3617 - protein, 878 aa, Solanum tuberosum
MVYTLSGVRFPTVPSVYKSNGFSSNGDRRNANISVFLKKHSLSRKILAEKSSYNSESRPSTIAASGKVLVPGIQSDSSSSSTDQFEFAETSPENSPASTDVDSSTMEHASQIKTENDDVEPSSDLTGSVEELDFASSLQLQEGGKLEESKTLNTSEETIIDESDRIRERGIPPPGLGQKIYEIDPLLTNYRQHLDYRYSQYKKLREAIDKYEGGLEAFSRGYERMGFTRSATGITYREWAPGAQSAALIGDFNNWDANADFMTRNEFGVWEIFLPNNVDGSPAIPHGSRVKIRMDTPSGVKDSIPAWINYSLQLPDEIPYNGIYYDPPEEERYIFQHPRPKKPKSVRIYESHIGMSSPEPKINSYVNFRDEVLPRIKKLGYNAVQIMAIQEHSYYASFGYHVTNFFAPSSRFGTPDDLKSLIDKAHELGIVVLMDIVHSHASNNTLDGLNMFDGTDSCYFHSGARGYHWMWDFRLFNYGNWEVLRYLLSNARWWLDEFKFDGFRFDGVTSMMCTHHGLSVGFTGNYEEYFGLATDVDAVVYLMLVNDLIHGLFPDAITIGEDVSGMPTFCVPVQDGGVGFDYRLHMAIADKWIELLKKRDEDWRVGDIVHTLTNRRWSEKCVSYAESHDQALVGDKTIAFWLMDKDMYDFMALDRPSTSLIDRGIALHKMIRLVTMGLGGEGYLNFMGNEFGHPEWIDFPRAEQHLSDGSVIPRNQFSYDKCRRRFDLGDAEYLRYRGLQEFDRAMQYLEDKYEFMTSEHQFISRKDEGDRMIVFEKGNLVFVFNFHWTKGYSDYRIGCLKPGKYKVALDSDDPLFGGFGRIDHNAEYFTFEGWYDDRPRSIMVYAPSRTAVVYALVDKEEEEEEEVAVVEEVVVEEE

SEQ ID NO: 3618 - protein, 278 aa, Anabaena variabilis ATCC 29413
MLREFASRDELIAYLREQFPQATERSDNISDTKGGRQAAQKALQKVNPATYAKTRNFLTGDVTRLSPYIRYGVLSLREIRDYVLDNVKHSDDATKLINELGWRDYWQRLYVKLGNGIWEDQEEYKTGYTPAEYASDLATDIKEGKTGLVCIDSFSRELRETGYLHNHMRMWLAAYIVHWRRIRWQEGAKWFLEHLLDGDPASNNMSWQWVASTFSQKPYFFNRENLERYTKSIYCQKCPLYGHCNFEGSYEELEQQLFPKGKFTRQPNSQSWQRGKKK

SEQ ID NO: 3619 - protein, 750 aa, Salmonella typhimurium
MSHNEKSPHQSPVHDTRESQPGLDSLAPSDGSHRPTPETTPPGAQPTAPGSLKAPETANDKLTALDAFRKGSENYALTTNQGVRIADDQNSLRAGSRGPTLLEDFILREKITHFDHERIPERIVHARGSAAHGYFQPYKDLSDITKAAFLCDPQKITPVFVRFSTVQGGAGSADTVRDIRGFATKFYTEEGIFDLVGNNTPIFFIQDAHKFPDFVHAVKPEPHWAIPQGQSAHDTFWDYVSLQPETLHNVMWAMSDRGIPRSYRTMEGFGIHTFRLINAQGKATFVRFHWKPLAGKASLVWDESQKLTGRDPDFHRRDLWEAIEAGDFPEYELGLQLIAEEDEFKFDFDLLDPTKLIPEELVPVQRVGKMVLNRNPDNFFAENEQAAFHPGHIVPGIDFTNDPLLQGRLFSYTDTQISRLGGPNFHEIPINRPTCPYHNFQRDGMHRMDIDTNPANYEPNSINDNWPRETPPAPKRGGFESYQERVDGNKIRERSPSFGEYYSHPRLFWLSQTPIEQQHIIDAFSFELGKVARAYIRERVVDQLAHIDVTLAQGVAHNLGFALTHEQTQIAPPPDVNGLKKDPALSLYAVPDGDVKGRVVAILLNDKVNAAELLTILQALKAKGVHAKLLYSRMGEVTADDGSTLTIAATFAGAPSLTVDAVIVPCGNIADIESCGDARYYLLEAYKHLKPIALAGDARRFKALLNIDSQGEEGLVEADNVDHHFMDTLLTLMAAHRVWSRAGKINAIPA

SEQ ID NO: 3620 - protein, 834 aa, Ashbya gossypii ATCC 10895
MKTALIGLKLKDTEPLDWSKALASYLKRNYGQHQWSQFYDDKKSAELDQLRISANSDLGLEALLEQNLRYYGFLEQLYLRLGSQSVQLKLDYTWYDAEHGMNGGQKYKQHTLVFEKSSTLFNIGVLLAQLAGEQLRASYKEAIPQLARAVACFEYMSETFLNSPSVDLQAENTGFLAALLHAEAQELFLLNVINGGDAARRASLLCRLSYTCARFYRKCVEFYKADGADEAAAAVPYGKAKWRDVVNMKMHLYEGVAAYNSALVLEQAGKIGHAVGLLEKAAASMATANTHRKALQGTAYLRDEVDLDGISSVVNEKLKTTAKDNDYIYHDHVPSDISLDSTKLMDAIKVPEFDAVVGPYLEAATETCNDLFRGIVPMAVYERESMYTEEKTQLLRREVDAVEQADWEYQSFVDFTNLPKLLDDLERRFLDTSSSSEDAEVVHMREQLQSWADAVRQSSFNDIEQQSKNILRTRNDIMALLSSVPPENKEDVVKIKSSLLQASQSDEKLFSQVKPYVNEIQLLNNPTLLWNNFNTFTTSQPTPDLLDLDHSKADEVLAKIRQIRQLYENLKLLKEERTSIMKDLKDLVNQDDITKQLILNNNKSDSQIKTLFQEELEKFRPFGSRIEATVFKQGNTIKDIKIGLDTIFKLADVQEKTSAQKQAASQRKEFFSKLQKAATAFKLFETDLPKGLSFYDLLYKMTKEMHDLSVTKRTTDSDLASNMAGLNISSSKETAKYNPQPLTAPPLAPRTYMPSPQAYNRNLDIRNANTYGNNLNAGSLGQRPRLPQKIPTGISGLETQNDPKLSEEESIRNPTNFYNTPSVFNESMYSKFSH

SEQ ID NO: 3621 - protein, 1550 aa, Nostoc sp. PCC 7120
MKAQLPDNEVQRIAALLEYKILDTPPEAAFDDITRLASYICGTPIALISLIDQNRQWFKATFGLERRETPRDEAFCAHTILESEAFIVPDATADERFATNPLVISDPKIRFYAGVPLTNPEGYSLGTLCVIDYIPRNLSFEQIEALQILGRQVIKQLELRRNLANLVLVNNQHKQAQKIRHPFFKKIAGGFGLASVFLVLLGLASYQAEIELIHNGNQVQTTQESINNLEQLLSQMKDAETGQRGYILTGKDPYLQTYQTALANIDQKFDELRNATVDPVRQQRLVILKPLITAKITELNQTIKLRQNLGFQAALQVIQSDQGQTLMDDIRKVMREMETENKVRLQQQLQAVKASEQKVIFILAIAIVSGFIILAVVYYLIYCEVIARQSMENILNEERNFISAVLDTVSALVIVLDSQGRIVRFNQACEVITGYSFDEVRGRHFWNLFLLPEDVESSKEFFAKFPADPTVPSVQESENYWVTKDGSRRLIAWSRTILQNHEGSVEYIIGTGIDITERKRADKHLTIQYAITRVLAESTTITEATPQILQAICETLGWNVCEIWMVNQQANFLSFFDLWHHTSLEMQEFRTQSQPITFASGIGLPGRIWASGQPIWLTDIVNDGSFLRNQLAAQVGLRGAFGFPIRSGQKILGVITCFSHQVQPHDPDLAKIMDSIGEQVGQFIHRKQAEEELQRQNLRSQLFTEITLKIRQSLQIEEILQITVKEVQKILQTDRVLIYQLLPDGSGSLIIEAVVAGWAAIKGQNITDFYLQTEYQQQYCLQQYRLRHLEAIANLDLGEIQQSHLELLRKFGVKANLVIPILVKDELCGLLIVHQCATSRQWTSFETHLLRQIADQVGIAVAQAQLLEVETRQRQELEVARSQAELASHAKSAFLANMSHEIRTPMNAVLGMTGLMLETLLNQEQRDFMETIRISGDALLTLINEILDLSKLEAGEMALENLNFNLSTCVEEVLDLLAPQAHSKGLEIAALIYRHVPIQLQGDASRLRQILMNLIGNAIKFTSFGEVVMRVELRSETPTTAIIHFAVTDSGLGITLEDQHKLFTPFTQVDASTTRKYGGTGLGLAICKQLVTLMGGEIGVESQLGKGSKFWFEIPFAKQLQPVSFVEDCGLLNNRRLLVVDDHATNRKIIYHQVSRWGMQVDQADRAVAALSMIVEACQQNKPYDVILIDMQMPEMDGMALGKQIKANSAIPPTPLIMLTSTNQRDEVQQAIKIGFAAYLVKPVKSSRLLDTIMSVLKTPSQLEAEKLEVKSQELEKNNLDHSRNHNFTATQAQNSVSTKTRILLAEDNLVNQKVALKQLQSLGYTADVAANGKEVLQLLKQIPYDLILMDCQMPILDGLEATKEIHRWAESSFASCRRPVIIAMTANAMKEDKQMCLDAGMDDYLSKPVMKEQLATALEYWCQLILNSRQAVEFDLNSLPLDWEHLHQLSENDTEFELHLLQIFVEDVRARLELAKEAIANTDFQQMAQQVHQLKGASTNIGATAMYLAAEKLEQLAQNQERRGSMELITEIEEGVNQIQAFLTRSQIV

SEQ ID NO: 3622 - protein, 105 aa, Glycine max
MDIRLMDLDSPLFNTLHRIMDLTEDDNVLLISGERKREEDKEKEGAKYLRMERRVGKFMRKFTLPENANTDAISAVCQDGVLTVTVNKLPPPQPKKPKTIKVKIA

SEQ ID NO: 3623 - protein, 202 aa, Oryza sativa
  misc_feature (84)..(84): Xaa can be any naturally occurring amino acid
  misc_feature (97)..(97): Xaa can be any naturally occurring amino acid
  misc_feature (110)..(110): Xaa can be any naturally occurring amino acid
  misc_feature (116)..(116): Xaa can be any naturally occurring amino acid
  misc_feature (130)..(130): Xaa can be any naturally occurring amino acid
  misc_feature (134)..(134): Xaa can be any naturally occurring amino acid
  misc_feature (139)..(139): Xaa can be any naturally occurring amino acid
  misc_feature (141)..(142): Xaa can be any naturally occurring amino acid
  misc_feature (156)..(156): Xaa can be any naturally occurring amino acid
  misc_feature (160)..(160): Xaa can be any naturally occurring amino acid
  misc_feature (165)..(165): Xaa can be any naturally occurring amino acid
  misc_feature (168)..(168): Xaa can be any naturally occurring amino acid
  misc_feature (181)..(181): Xaa can be any naturally occurring amino acid
  misc_feature (194)..(194): Xaa can be any naturally occurring amino acid
MTDKFVHNKTLTMENLNPRVIDVEYAVRGPIVLRAAEMEKEIQSGKHSFPFERVIRANIGDCHASGNQLPITYIRQFVAGCTYXAIMDSSDFPADIXQRVERLLASAAGXSLGSYXESQGLITIREDIAXYIEXRDGYXAXXSDIYLCNGALDGIXTVIXLLMNXDPXKPSGIMIPVPQYXLYSATLSEYGAYXIEYYLDED

SEQ ID NO: 3624 - protein, 586 aa, Medicago sativa
MCGILAVLGCSDDSQAKRVRILELSRRLKHRGPDWSGLHQHGDNYLAHQRLAIVDPASGDQPLFNEDKSIIVTVNGEIYNHEDLRKQLPNHKFRTQCDCDVIAHLYEEYGENFVDMLDGIFSFVLLDTRDNSFIVARDAIGVTSLYIGWGLDGSVWIASELKGLNDECEHFEVFPPGHLYSSKDREFRRWYNPPWFNEAVIPTTPYDPLVLRNAFEKAVIKRLMTDVPFGVLLSGGLDSSLVAAVTARYLAGTKAAKQWGAKLHSFCVGLKGAPDLKAGREVADFLGTVHHEFQFTIQDGIDAIEDVIYHTETYDVTTIRAATPMFLMSRKIKSSGVKWVISGEGSDEIFGGYLYFHKAPNKEEFHQETCRKIKALHRYDCLRANKSTYAWGLEARVPFLDKEFIKVAMDIDPEYKMIKHEEGRIEKWILRKAFDDEENPYLPKHILYRQKEQFSDGVGYGWIDGIKDHAAKHVTDRMMLNASHIFPFNTPLTKEAYYYRMIFERFFPQNSARLTVPGGASVACSTEKAIEWDASWSSNLDPSGRAAFGVHNSAYENQVNSVAKTVEPEKIIPKMEISNLGVAIQS

SEQ ID NO: 3625 - protein, 540 aa, Piromyces sp. E2
SNPDSTNGNVACDSYHKFDEDIKMMKIMNANHYRFSMSWSRLFPDGQAKKVDGKWNVNEKGAEYYDMMINTLIENDIVPMATLYHWDLPYALHEKYGGWLDYHSQFDFANYAEFCFERFGDRVKNWVTINEPWVNCVGGYKNGPGKAPYRCTGEAPRKLANDTTGLDLEGGCSYEIGPSQYYKGAKVLSANRPPQRLEDVWCSHNILLGHAQAVKVYREKFQKKQKGLIGITVDGEAEIPWEEPNMSEEELENNKKYAKLGTEFRIGWYSDPKIFGDIAGSVKQRMGKEMPVFSDEEKAILKGSSSDFLGWNTYTSHWAAQVKNEDGTYIQPPTDEKASYENSKRDMWDDNCKGRGEGWTCIPPTLGSQAGSSWEYLYGPTILVGLNWLYDRYKSVLKNGIVITENGCAQPNYKVSRANDQVTLDYFKSIGKEEFVDTYDESIIEDEKNIEGSILHDTYRINWYKQYLENLRLAYVEDKFDVRGYMAWSLIDNFEWENGYETRFGMTYIDFYNDKELTRVPKDSLTFLGQWYLDNVEQKN

SEQ ID NO: 3626 - protein, 451 aa, Zea mays
  misc_feature (231)..(231): Xaa can be any naturally occurring amino acid
MAGAGAGGWKKRVGRYEVGRTIGRGTFAKVKFAVDADTGAAFAIKVLDKETIFTHRMLHQIKREISIMKIVRHPNIVRLNEVLAGKTKIYIVLELVTGGELFDRIVRHGKLRENEARKYFQQLIDAIDYCHNKGVYHRDLKPQNLLLDSRGNLKLSDFGLSTLSQNGVGLVHTTCGTPNYVAPEVLSSNGYDGSAADIWSCGVILYVLMAGYLPFEENDLPHLYEKITAAXYSCPYWFSPGAKSLIQRILDPNPRARITIEEIREDPWFKKNYVTIRCGEDENVSLDDVQAIFDNIEDKYVSDEVTHKDGGPLMMNAFEMIALSQGLDLSALFDRQQEFVKRQTRFVSRKPAKTVVATIEVVAESMGLKVHSRNYKVRLEGPASNRASQFAVVLEVFEVAPSLFMVDVRKVAGDTPEYHRFYENLCSKLGSIIWRPTEVSAKSTPLRTTTC

SEQ ID NO: 3627 - protein, 547 aa, Actinobacillus actinomycetemcomitans
MAAKDVKFGNDARVKMLNGVNILADAVKVTLGPKGRNVVLDKSFGAPTITKDGVSVAREIELEDKFENMGAQMVKEVASKANDAAGDGTTTATVLAQAIVNEGLKAVAAGMNPMDLKRGIDKAVNSVVAELKNLSKPCETSKEIEQVGTISANSDSIVGQLIAQAMEKVGKEGVITVEDGTGLEDELDVVEGMQFDRGYLSPYFINKPETATVELDNPFILLVDKKISNIRELLPVLEGVAKAGKPLLIIAEDVEGEALATLVVNTMRGIVKVAAVKAPGFGDRRKAMLQDIAILTAGTVISEEIGMELEKATLEDLGQAKRIVINKDNTTIIDGIGDEAQIQGRVAQIRQQIEESTSDYDKEKLQERVAKLAGGVAVIKVGAATEVEMKEKKARVEDALHATRAAVEEGIVAGGGVALIRAAGRVVGLQGENEEQNVGIKLALRAMEAPLRQIVANAGEEASVIASAVKNGEGNFGYNAGTEQYGDMIAMGILDPTKVTRSALQFAASVAGLMITTECMVTELPKDDKADLGAAGMGGMGGMGGMM

SEQ ID NO: 3628 - protein, 485 aa, Glycine max
MALGNNSHQLLSKIATNDKHGENSPYFDGWKAYDSNPFHPTKNPQGVIQMGLAENQLCFDMIQEWIRNNPKASICTAEGVNQFKYIANFQDYHGLPEFRNAVANFMSKVRGGRVRFDPDRILMSGGATGANELIMFCLADAGDAFLVPSPYYPAFVRDLCWRTRAQLIPVECHSSNNFKITREALEESYRKAKEGNINVKGLIITNPSNPLGTTIDKETLKSIVGFINEKNIHLVCDEIYAATVFRAPSFVSVSEVMQDMEHCKKDLIHIIYSLSKDLGLPGFRVGIVYSYNDEVVNSGRKMSSFGLVSSQTQHFLAALLSDDEFVERFLAESARRLAARHSHFTKGLEKVNITCLPSNAGLFFWMNLKGLLKEKTFEGEMMLWRVIINEVKLNVSPGSAFNCPEPGWYRVCFANMDDETVDVALMRIRAFVGKETGKPPKELKRWKSNLRLSFSNSRRFDENLMSPHMMSPHSPMPHSPLVRAT

SEQ ID NO: 3629 - protein, 160 aa, Xylella fastidiosa Temecula1
MNVVRYTPWPGQAALQNEIKQVFDRFFEHNGDTDESAVVTAQWVPRVDIKEEPNQFVLYADLPGIDPADIEVQMDKGILSIKGERKTESSSQTEHFSRIERRYGSFHRRFALPDSADADGITASGSHGVLRILIPKQAATTPRRIQVGNAVSSDVALQSM

SEQ ID NO: 3630 - protein, 836 aa, Solanum tuberosum
ILAEKSSYNSEFRPSTVAASGKVLVPGTQSDSSSSSTNQFEFTETSPENSPASTDVDSSTMEHASQIKTENDDVEPSSDLTGSVEELDFASSLQLQEGGKLEESKTLNTSEETIIDESDRIRERGIPPPGLGQKIYEIDPLLTNYRQHLDYRYSQYKKLREAIDKYEGGLEAFSRGYEKMGFTRSATGITYREWAPGAQSAALIGDFNNWDANADIMTRNEFGVWEIFLPNNVDGSPAIPHGSRVKIRMDTPSGVKDSIPAWINYSLQLPDEIPYNGIYYDPPEEERYIFQHPRPKKPKSLRIYESHIGMSSPEPKINSYVNFRDEVLPRIKKLGYNALQIMAIQEHSYYASFGYHVTNFFAPSSRFGTPDDLKSLIDKAHELGIVVLMDIVHSHASNNTLDGLNMFDGTDSCYFHSGARGYHWMWDSRLFNYGNWEVLRYLLSNARWWLDEFKFDGFRFDGVTSMMYTHHGLSVGFTGNYEEYFGLATDVDAVVYLMLVNDLIHGLFPDAITIGEDVSGMPTFCIPVQDGGVGFDYRLHMAIADKWIELLKKRDEDWRVGDIVHTLTNRRWSEKCVSYAESHDQALVGDKTIAFWLMDKDMYDFMALDRPSTSLIDRGIALHKMIRLVTMGLGGEGYLNFMGNEFGHPEWIDFPRAEQHLSDDSVIPGNQFSYDKCRRRFDLGDAEYLRYRGLQEFDRAMQYLEDKYEFMTSEHQFISRKDEGDRMIVFEKGNLVFVFNFHWTKSYSDYRIGCLKPGKYKVALDSDDPLFGGFGRIDHNAEYFTFEGWYDDRPRSIMVYAPCRTAVVYALVDKEEEEEEEEEEVAVVEEVVVEEE

SEQ ID NO: 3631 - protein, 1329 aa, Cochliobolus heterostrophus
MAAETYSGVAAIIRNLARQHDPARDPSFSAQVSANGAKTAANAIALPGPESEEKTQLEQELSALCSRIDFLEHKCSHAAAKSGQFPLTPAQESPDDGVLYTPAGAIRNSSAPPGQARRGSNKERAIWVSNWLAAKETNGGPEEPAAALTEEQLNYLRVHLNQQADQIRNQREHIDNLSREVNKQLTTQSMVFEHGIEDIGALKRELGKHQQANLAFQKALREIGAIVTAVAMGDLSKKVLIHAKEMDPEITLFKRTINTMVDQLQEFASQVTFLAREVGTEGRLGGQANLPGVAGIWAELTDSVNMMANNLTEQVREIAVVTTAVAHGDLSRKIERPARGEILQLQQTINTMVDQLQSFATEVTKVARDVGTEGKLGGQAEIAGVKGMWNELTVNVNAMAQNLTTQVRDIAQVTTAVAQGNLTRKVEAQCKGEILELKNTINRMVDQLQQFAHEVTKIAREVGSEGRLGGQATVHGVEGTWKDLTENVNGMAMNLTTQVREIAEVTTAVARGDLSRKVKAEVQGEILSLKITINTMVDRLNTFAQEVSKVAREVGTDGILGGQAQVDNVEGKWKDLTNNVNTMAQNLTLQVRSISEVTQAIAKGDMSRRVHVDAEGEIRLLKDTVNDMVMRLDEWSLAVKRVARDVGVDGKMGGQADVRDIDGRWKEITTDVNTMAQNLTSQVRAFGDITNAAMEGKFTQITVEASGEMDELKRKINQMVSSLRESIQRNTAAREAAELANKTKSEFLANMSHEIRTPMNGIIGMTQLTLDTDLTHAQREMLTIVHNLAGQLLTIIDDILDISKIEANRMVMEEIPFSMRGTIFNALKSLASRANERKLNLAYDVSYTVPDYVVGDSFRLRQIILNLVGNAIKFTEHGEVKVAISMAQEQDCGPDHYVFQFAVSDTGIGIRGDKLNLIFDTFQQADGSTTRKFGGTGLGLSISKRLVTLMGGRMWVESDFGKGSVFYFTCRVRLGKPEITAIQPQLVAYKQHTVLFVDQGNTGFSDQIIEHLKALDLVPMVVNSVEEVPETTKRADMPYDCVIVDNDKTARELRIAERFKYIPLVMLTPHVCISLRSALENGISSYMTTPCLPIDLGNALIPALDGRAAPLVSDHSKSFQILLAEDNAVNQKLAVRILEKYHHRVTVANNGLEAFEHIQKKRYDCVLMDVQMPVMGGFEATAKIREWERENGIPSTPVIALTAHAMVGDREKCLAAQMDDYLSKPLRQNQLIQTILRCATVGSTIYDHTSEPRYTASSHIPNLDLPGNSKDKATTGAASASTTSPKKRPQLETRGFTDRGGGADSPNLLAVDQTDNGSVERVRSLSASL

SEQ ID NO: 3632 - protein, 1021 aa, Burkholderia vietnamiensis G4
MQNSTLQFIRRYQSISMFGGGIVVTILILIACGLGISSIVYGYLDAERRNFLNGVDETAEELQVAETAFVNDVMNAQLIWSETAPAPADVVDTFFTHGQELAVTPYQSLVVGVPGQTAQRDEVARYLALSFMLPHLCATSADNRACTVEGYHYSTRTGVFGIVPRPARDHPALATARTRAQLLAALHVDFDGPMPAQSDGRPSVRWLPPYVDPVTGRSRIRIAAQARAGGGAFAVLVTEYAPEYLLSWLPDRGLAGRFFVASADNRLIAIDPAVEHTGALNARLLALDVARGDESLGEPLFRSGSIVFRSRLATTGWTVAYVLSWGDVVLGVGVQAAVLAAATLVTIAVMWLLLVRFHRRVLAPVYARSARVFDSEALCRSVIAMAPVGIGLVSLSDRRVMLASDALVQMLLPHGGDHHALSARVLERYDAFVADGGRGRTLVTELAVDAHGDAPLHLEIIAHAARYQGEDVLIAVFTDTTAQRRLVQQLEEAVRAADSANAAKSSFLAATSHEIRTPLNVILGNLELLERTALDASQQSRVRTLRASAEGLLAIVSDILDFSKIEAGAMSVESIEFELIAVIEQQLAAFAPIAKAKGLPLFVEIDASVEQRMRGDPTRLAQVLGNLLSNAIKFTSEGHIAARVAVWPDARGVPEVELSVEDTGIGIEPTQRARLFKPFSQVDASITRRYGGTGLGLALCDRLVTAMGGTLSVESTPQVGSVFSVHLPLQADIAPTRPLDASRGHVVLVVSQDEAWRKFASAHLRAWGFDVAVHASPVGIAAELVARARALVLVGDADRWRRDELDRAGHDTPIVLATPDGPLQPDVAGRTIRVSSYSVNGLRMALERTLRAGGESPHAPIADPHAAATAPAESLPRVLVADDAAINGSIFLEQLAVLGSPFDCVSSGAAALDMLARGDWDVLLIAAELPDMLARELVEAVHARALPCDVIVVASHLGPDDARLYAAVKVDCVLTKPVMLADLRRSLTRIARRRGIGVLVGAMNERCVVGKARATADMSGR

SEQ ID NO: 3633 - protein, 448 aa, Bacillus sp.
MASIQFPKDFVWGTATASYQIEGAYNEDGRGMSIWDTFSRTPGKVVNGDTGDIACDSYHRYEEDIALLKNLGVKAYRFSIAWPRIYPDGDGELNQKGLDYYAKVIDGLLAAGIEPCVTLYHWDLPQALQDKGGWDNRDTIRAFVRYAETAFKAFGGKVKQWITFNETWCVSFLSNYIGAHAPGNTDLQLAVNVAHNCMVAHGEAVKAFRALGISGEIGTTHNLYWFEPYTTKPEDVAAAHRNRAYNNEWFMDPTFKGQYPQFMVDWFKGKGVEVPIQPGDMETIAQPIDFIGVNFYSGGFGRYKEGEGLFDCEEVQVGFDKTFMDWNVYAEGLYKVLSWVHEEYGDVPIYITENGACYEDELTQEGRVHDAKRADYFKKHFIQCHRLIESGVPLKGYFAWSLLDNFEWAEGYVKRFGIVYTDYKTLKRYPKDSYRFIQSVIENDGFEA

SEQ ID NO: 3634 - protein, 882 aa, Solanum tuberosum
MVYTLSGVRFPTVPSVYKSNGFSSNGDRRNANVSVFLKKHSLSRKILAEKSSYNSEFRPSTVAASGKVLVPGTQSDSSSSSTDQFEFTETSPENSPASTDVDSSTMEHASQIKTENDDVEPSSDLTGSVEELDFASSLQLQEGGKLEESKTLNTSEETIIDESDRIRERGIPPPGLGQKIYEIDPLLTNYRQHLDYRYSQYKKLREAIDKYEGGLEAFSRGYEKMGFTRSATGITYREWALGAQSAALIGDFNNWDANADIMTRNEFGVWEIFLPNNVDGSPAIPHGSRVKIRMDTPSGVKDSIPAWINYSLQLPDEIPYNGIHYDPPEEERYIFQHPRPKKPKSLRIYESHIGMSSPEPKINSYVNFRDEVLPRIKKLGYNALQIMAIQEHSYYASFGYHVTNFFAPSSRFGTPDDLKSLIDKAHELGIVVLMDIVHSHASNNTLDGLNMFDCTDSCYFHSGARGYHWMWDSRLFNYGNWEVLRYLLSNARWWLDAFKFDGFRFDGVTSMMYIHHGLSVGFTGNYEEYFGLATDVDAVVYLMLVNDLIHGLFPDAITIGEDVSGMPTFCIPVQEGGVGFDYRLHMAIADKRIELLKKRDEDWRVGDIVHTLTNRRWSEKCVSYAESHDQALVGDKTIAFWLMDKDMYDFMALDRPSTSLIDRGIALHKMIRLVTMGLGGEGYLNFMGNEFGHPEWIDFPRAEQHLSDGSVIPGNQFSYDKCRRRFDLGDAEYLRYRGLQEFDRPMQYLEDKYEFMTSEHQFISRKDEGDRMIVFEKGNLVFVFNFHWTKSYSDYRIACLKPGKYKVALDSDDPLFGGFGRIDHNAEYFTFEGWYDDRPRSIMVYAPCKTAVVYALVDKEEEEEEEEEEEVAAVEEVVVEEE

SEQ ID NO: 3635 - protein, 1329 aa, Cochliobolus heterostrophus
MAAETYSGVAAIIRNLARQHDPARDPSFSAQVSANGAKTAANAIALPGPESEEKTQLEQELSALCSRIDFLEHKCSHAAAKSGQFPLTPAQESPDDGVLYTPAGAIRNSSAPPGQARRGSNKERAIWVSNWLAAKETNGGPEEPAAALTEEQLNYLRVHLNQQADQIRNQREHIDNLSREVNKQLTTQSMVFEHGIEDIGALKRELGKHQQANLAFQKALREIGAIVTAVAMGDLSKKVLIHAKEMDPEITLFKRTINTMVDQLQEFASQVTFLAREVGTEDRLGGQANLPGVAGIWAELTDSVNMMANNLTEQVREIAVVTTAVAHGDLSRKIERPARGEILQLQQTINTMVDQLQSFATEVTKVARDVGTEGKLGGQAEIAGVKGMWNELTVNVNAMAQNLTTQVRDIAQVTTAVAQGNLTRKVEAQCKGEILELKNTINRMVDQLQQFAHEVTKIAREVGSEGRLGGQATVHGVEGTWKDLTENVNGMAMNLTTQVREIAEVTTAVARGDLSRKVKAEVQGEILSLKITINTMVDRLNTFAQEVSKVAREVGTDGILGGQAQVDNVEGKWKDLTNNVNTMAQNLTLQVRSISEVTQAIAKGDMSRRVHVDAEGEIRLLKDTVNDMVMRLDEWSLAVKRVARDVGVDGKMGGQADVRDIDGRWKEITTDVNTMAQNLTSQVRAFGDITNAAMEGKFTQITVEASGEMDELKRKINQMVSSLRESIQRNTAAREAAELANKTKSEFLANMSHEIRTPMNGIIGMTQLTLDTDLTHAQREMLTIVHNLAGQLLTIIDDILDISKIEANRMVMEEIPFSMRGTIFNALKSLASRANERKLNLAYDVSYTVPDYVVGDSFRLRQIILNLVGNAIKFTEHGEVKVAISMAQEQDCGPDHYVFQFAVSDTGIGIRGDKLNLIFDTFQQADGSTTRKFGGTGLGLSISKRLVTLMGGRMWVESDFGKGSVFYFTCRVRLGKPEITAIQPQLVAYKQHTVLFVDQGNTGFSDQIIEHLKALDLVPMVVNSVEEVPETTKRADMPYDCVIVDNDKTARELRIAERFKYIPLVMLTPHVCISLRSALENGISSYMTTPCLPIDLGNALIPALDGRAAPLVSDHSKSFQILLAEDNAVNQKLAVRILEKYHHRVTVANNGLEAFEHIQKKRYDCVLMDVQMPVMGGFEATAKIREWERENGIPSTPVIALTAHAMVGDREKCLAAQMDDYLSKPLRQNQLIQTILRCATVGSTIYDHTSEPRYTASSHIPNLDLPGNSKDKATTGAASASTTSPKKRPQLETRGFTDRGGGADSPNLLAVDQTDNGSVERVRSLSASL

SEQ ID NO: 3636 - protein, 1129 aa, Burkholderia vietnamiensis G4
MPAELKRIASQVANAGRKPFEPGRARRYQQLLLYGGGFAVTLFILMCALLVTRLDVQDYRAQARLTFLYRKAQFSRTLEMADMVLATYGGRIEQLWNQGARPSADALAQFSAAGGVLGASNGDGSETLLALARLTPDRPAPSYARYLGALFGLVRQDDRSGHVLPPALVSGGEPLGGYLIGLDAPFLAVLGTELVPRAHTLEPGTDLHTLIDGLMPTGIARQKTLMQSRPFVFDRRLDPLSGRVVMRFARRLDDAAGRPFGWLVINGLHRVDDVMAPRSDDEDVAIVDARHDIVFGRERDRSMIERALHDARAPLGDHVAVRRVGARFVVYDRLPGTGLVMMTSFSWRSMVREMRVGLGITFGAALLGIVLLWSAIVLFDRRALRPAHRRAIRLIESEAFNRTLARHAPAGLLLLSAADGETMVHNDAVRAYDGGAGGQRLGKRIWDAYRERAAAGDGRLDVMQHELAVEQADHGKVYLALQVVRTMFHGVDVLLCTLTDVTARKLTEDKLKEARTAAEDANKAKSTFLATMSHEIRTPLNAIVGNLELMARAQLPLAERRRLQTVMSSSDALLHTINDVLDLSKAESNQMALEAVPFDLRAVLHEVAAIFRALADAKHLRLECVIAAGLGDGYVGDPARVRQIVSNLVSNAIKFTEHGRVTVEALPAAVPGRGVEIVVRDTGIGIEPDSMPTLFDVYVQTDASIYRRFGGTGLGLPLCRRLARLMGGDVTVESRPGAGAVFTASLPLADAPLRGRAAVDARASGAKGAGARRAEVAGAEATEAEVTGADAARVDGTGADGTGATGTEAEAADAKATGTEAPGASGTEAKRTGADAMAAATRAAATPTNATSRPAATPKPIETHARTSALSPVQPPAPACSADGETPLRVLVAEDHPASRALLRDQLDALHCDATLVSNGIEAMRAFFAQPFDVVLTDLGMPELDGFALANCLREQGAKVPVIAMTAHATDEDRRRCAQAGAVEVVLKPLSIDALDAVLTRHARHAAAARSSTADSTDSADSDDRPIPPMTDEIRENLRTATLLSLALIDDALPRGDVERIRVELHSMRGGFALAGDTVAGAACAHAERIFSQGRTAALRAAWPACRAAIERSAERLRAAGSGAGSEPA

SEQ ID NO: 3637 - protein, 433 aa, Solanum tuberosum
MVYTLSGVRFPTVPSVYKSNGFSSNGDRRNANVSVFLKKHSLSRKILAEKSSYDSESRPSTVAASGKVLVPGIQSDSSSSSTDQFEFTETAPENSPASTDVDSSTMEHASQIKTENDDVEPSSDLTGSVEELDFASSLQLQEGGKLEESKTLNTSEETIIDESDRIRERGIPPPGLGQKIYEIDPLLTNYRQHLDYRYSQYKKLREAIDKYEGGLEAFSRGYEKMGFTRSATGITYREWAPGAQSAALIGDFNNWDANADIMTRNEFGVWEIFLPNNVDGSPAIPHGSRVKIRMDTSSGVKDSIPAWINYSLQLPDEIPYNGIYYDPPEEERYVFQHPRPKKPKSLRIYESHIGMSSPEPKINSYVNFRDEVLPRIKNLGYNAVQIMAIQEHSYYASFGYHVTNFFAPSSRFGTPDDLKSLIDKAHELGIVVL

SEQ ID NO: 3638 - protein, 1329 aa, Cochliobolus heterostrophus
MAAETYSGVAAIIRNLARQHDPARDPSFSAQVSANGAKTAANAIALPGPESEEKTQLEQELSALCSRIDFLEHKCSHAAAKSGQFPLTPAQESPDDGVLYTPAGAIRNSSAPPGQARRGSNKERAIWVSNWLAAKETNGGPEEPAAALTEEQLNYLRVHLNQQADQIRNQREHIDNLSREVNKQLTTQSMVFEHGIEDIGALKRELGKHQQANLAFQKALREIGAIVTAVAMGDLSKKVLIHAKEMDPEITLFKRTINTMVDQLQEFASQVTFLAREVGTEGRLGGQANLPGVAGIWAELTDSVNMMANNLTEQVREIAVVTTAVAHGDLSRKIERPARGEILQLQQTINTMVDQLQSFATEVTKVARDVGTEGKLGGQAEIAGVKGMWNELTVNVNAMAQNLTTQVRDIAQVTTAVAQGNLTRKVEAQCKGEILELKNTINRMVDQLQQFAHEVTKIAREVGSEGRLGGQATVHGVEGTWKDLTENVNGMAMNLTTQVREIAEVTTAVARGDLSRKVKAEVQGEILSLKITINTMVDRLNTFAQEVSKVAREVGTDGILGGQAQVDNVEGKWKDLTNNVNTMAQNLTLQVRSISEVTQAIAKGDMSRRVHVDAESEIRLLKDTVNDMVMRLDEWSLAVKRVARDVGVDGKMGGQADVRDIDGRWKEITTDVNTMAQNLTSQVRAFGDITNAAMEGKFTQITVEASGEMDELKRKINQMVSSLRESIQRNTAAREAAELANKTKSEFLANMSHEIRTPMNGIIGMTQLTLDTDLTHAQREMLTIVHNLAGQLLTIIDDILDISKIEANRMVMEEIPFSMRGTIFNALKSLASRANERKLNLAYDVSYTVPDYVVGDSFRLRQIILNLVGNAIKFTEHGEVKVAISMAQEQDCGPDHYVFQFAVSDTGIGIRGDKLNLIFDTFQQADGSTTRKFGGTGLGLSISKRLVTLMGGRMWVESDFGKGSVFYFTCRVRLGKPEITAIQPQLVAYKQHTVLFVDQGNTGFSDQIIEHLKALDLVPMVVNSVEEVPETTKRADMPYDCVIVDNDKTARELRIAERFKYIPLVMLTPHVCISLRSALENGISSYMTTPCLPIDLGNALIPALDGRAAPLVSDHSKSFQILLAEDNAVNQKLAVRILEKYHHRVTVANNGLEAFEHIQKKRYDCVLMDVQMPVMGGFEATAKIREWERENGIPSTPVIALTAHAMVGDREKCLAAQMDDYLSKPLRQNQLIQTILRCATVGSTIYDHTSEPRYTASSHIPNLDLPGNSKDKATTGAASASTTSPKKRPQLETRGFTDRGGGADSPNLLAVDQTDNGSVERVRSLSASL

SEQ ID NO: 3639 - protein, 1329 aa, Cochliobolus heterostrophus
MAAETYSGVAAIIRNLARQHDPARDPSFSAQVSANGAKTAANAIALPGPESEEKTQLEQELSALCSRIDFLEHKCSHAAAKSGQFPLTPAQESPDDGVLYTPAGAIRNSSAPPGQARRGSNKERAIWVSNWLAAKETNGGPEEPAAALTEEQLNYLRVHLNQQADQIRNQREHIDNLSREVNKQLTTQSMVFEHGIEDIGALKRELGKHQQANLAFQKALREIGAIVTAVAMGDLSKKVLIHAKEMDPEITLFKRTINTMVDQLQEFASQVTFLAREVGTEGRLGGQANLPGVAGIWAELTDSVNMMANNLTEQVREIAVVTTAVAHGDLSRKIERPARGEILQLQQTINTMVDQLQSFATEVTKVARDVGTEGKLGGQAEIAGVKGMWNELTVNVNAMAQNLTTQVRDIAQVTTAVAQGNLTRKVEAQCKGEILELKNTINRMVDQLQQFAHEVTKIAREVGSEGRLGGQATVHGVEGTWKDLTENVNGMAMNLTTQVREIAEVTTAVARGDLSRKVKAEVQGEILSLKITINTMVDRLNTFAQEVSKVAREVGTDGILGGQAQVDNVEGKWKDLTNNVNTMAQNLTLQVRSISEVTQAIAKGDMSRRVHVDAEGEIRLLKDTVNDMVMRLDEWSLAVKRVARDVDVDGKMGGQADVRDIDGRWKEITTDVNTMAQNLTSQVRAFGDITNAAMEGKFTQITVEASGEMDELKRKINQMVSSLRESIQRNTAAREAAELANKTKSEFLANMSHEIRTPMNGIIGMTQLTLDTDLTHAQREMLTIVHNLAGQLLTIIDDILDISKIEANRMVMEEIPFSMRGTIFNALKSLASRANERKLNLAYDVSYTVPDYVVGDSFRLRQIILNLVGNAIKFTEHGEVKVAISMAQEQDCGPDHYVFQFAVSDTGIGIRGDKLNLIFDTFQQADGSTTRKFGGTGLGLSISKRLVTLMGGRMWVESDFGKGSVFYFTCRVRLGKPEITAIQPQLVAYKQHTVLFVDQGNTGFSDQIIEHLKALDLVPMVVNSVEEVPETTKRADMPYDCVIVDNDKTARELRIAERFKYIPLVMLTPHVCISLRSALENGISSYMTTPCLPIDLGNALIPALDGRAAPLVSDHSKSFQILLAEDNAVNQKLAVRILEKYHHRVTVANNGLEAFEHIQKKRYDCVLMDVQMPVMGGFEATAKIREWERENGIPSTPVIALTAHAMVGDREKCLAAQMDDYLSKPLRQNQLIQTILRCATVGSTIYDHTSEPRYTASSHIPNLDLPGNSKDKATTGAASASTTSPKKRPQLETRGFTDRGGGADSPNLLAVDQTDNGSVERVRSLSASL

SEQ ID NO: 3640 - protein, 1329 aa, Cochliobolus heterostrophus
MAAETYSGVAAIIRNLARQHDPARDPSFSAQVSANGAKTAANAIALPGPESEEKTQLEQELSALCSRIDFLEHKCSHAAAKSGQFPLTPAQESPDDGVLYTPAGAIRNSSAPPGQARRGSNKERAIWVSNWLAAKETNGGPEEPAAALTEEQLNYLRVHLNQQADQIRNQREHIDNLSREVNKQLTTQSMVFEHGIEDIGALKRELGKHQQANLAFQKALREIGAIVTAVAMGDLSKKVLIHAKEMDPEITLFKRTINTMVDQLQEFASQVTFLAREVGTEGRLGGQANLPGVAGIWAELTDSVNMMANNLTEQVREIAVVTTAVAHGDLSRKIERPARGEILQLQQTINTMVDQLQSFATEVTKVARDVGTEGKLGGQAEIAGVKGMWNELTVNVNAMAQNLTTQVRDIAQVTTAVAQGNLTRKVEAQCKGEILELKNTINRMVDQLQQFAHEVTKIAREVGSEGRLGGQATVHGVEGTWKDLTENVNGMAMNLTTQVREIAEVTTAVARGDLSRKVKAEVQGEILSLKITINTMVDRLNTFAQEVSKVAREVGTDGILGGQAQVDNVEGKWKDLTNNVNTMAQNLTLQVRSISEVTQAIAKGDMSRRVHVDAEGEIRLLKDTVNDMVMRLDEWSLAVKRVARDVGVDGKMGGQADVRDIDGRWKEITTDVNTMAQNLTSQVRAFGDITNAAMEGKFTQITVEASGEMDELKRKINQMVSSLRESIQRNTAAREAAELANKTKSEFLANMSHEIRTPMNGIIGMTQLTLDTDLTHAQREILTIVHNLAGQLLTIIDDILDISKIEANRMVMEEIPFSMRGTIFNALKSLASRANERKLNLAYDVSYTVPDYVVGDSFRLRQIILNLVGNAIKFTEHGEVKVAISMAQEQDCGPDHYVFQFAVSDTGIGIRGDKLNLIFDTFQQADGSTTRKFGGTGLGLSISKRLVTLMGGRMWVESDFGKGSVFYFTCRVRLGKPEITAIQPQLVAYKQHTVLFVDQGNTGFSDQIIEHLKALDLVPMVVNSVEEVPETTKRADMPYDCVIVDNDKTARELRIAERFKYIPLVMLTPHVCISLRSALENGISSYMTTPCLPIDLGNALIPALDGRAAPLVSDHSKSFQILLAEDNAVNQKLAVRILEKYHHRVTVANNGLEAFEHIQKKRYDCVLMDVQMPVMGGFEATAKIREWERENGIPSTPVIALTAHAMVGDREKCLAAQMDDYLSKPLRQNQLIQTILRCATVGSTIYDHTSEPRYTASSHIPNLDLPGNSKDKATTGAASASTTSPKKRPQLETRGFTDRGGGADSPNLLAVDQTDNGSVERVRSLSASL

SEQ ID NO: 3641 - protein, 246 aa, Petunia x hybrida
MGRGRVELKRIENKINRQVTFAKRRNGLLKKAYELSVLCDAEVALIIFSNRGKLYEFCSSNNMFKSLERYQKCSYGTLEVNQSSKDNEQNNYREYLKLKAKYESLQRYQRHLLGEDLGPLNIDDLENLEVQLDTSLKHIRSTRTQLMLDQLSDLQTKEKLWVEANKVLERKLEEIYAENSLQQSWGGGEQSVTYGHQHNAQSQGFFQPLECNSTLQIGYNPITTSRQITAVTNAQNVNGMVPGWML

SEQ ID NO: 3642 - protein, 238 aa, Petunia x hybrida
MGRGKIVIQRIDNTTSRQVTFSKRRSGLLKKAKELSILCDAQVGLIIFSSTGKLYEFASNSMRSVIERYYKMKEEHHLMSPMSEVKYWQREVASLRQQLHYLQENHRQLLGEKLSGLGIKDLTHLENKLEMSLKGVRKQKEQILTDEIKEITRKGNLIHQENIELYKKVNLIRQENTDLQKKVYEKGCGSEPNEGVQATFAISNGYDLHAPIYLQLRPPQTQKNQTSTSVMQFGLQLH

SEQ ID NO: 3643 - protein, 374 aa, Yarrowia lipolytica CLIB122
MTTPNLFKPIKVGASQLSNRVVMAPLTRTRAEKHVPSDLAVEYYTQRASTAGTLIISEATYIHPSAGGHKGREGLVPGIWGDASIIAGWKKVIQGIHSKGSKIYIQLWDIGRVANYDVLQQTGHDLVGPSAIAQAGDEDGAKHVRALTIPEIKQKVQLYVDAAKNALEAGADGVEIHSANGYLPDQFIHWNSNNRTDEYGGSIENRSRFSLEIIDAVSAAIGADRVGVRFSPWTTFQDMEVNEEKSLPQFKYLFEQLEKRAKENEKNRLSYIHVIEPRADGISDAIPKQWQSNDPFRNIWTGDLIRAGGYNRETAIETAQEDDRTLIGFGRYFIANPDLVYRLENDLPLTHWDRPSFYTPGPHGYTDYPFHKKE

SEQ ID NO: 3644 - protein, 282 aa, Tropheryma whipplei TW08/27
MVFVLTYVPSVLLGDGVSIPQFGLGTYELPPNETSSVVQSAIELGYRHIDTASLYANEREVGRAIASSGIKREEFFVTTKLWNSDQPKPREAFERSLDLLSLDYVDLYLIHWPCPPSELYINVWEVLLELKESGRAKSVGVSNFLSEHINKIKEAGFPLPSVNQIELHPWLQQRELVLSCRNYGIQIESWGPFARFSKDLDAFPELTRPAKEYGKTPAQVILRWHIQKGYVVFPKTVHAERLRQNIDIFDFDLTPDEISGIDSLDAGFRTGPDPSSFRAGLD

SEQ ID NO: 3645 - protein, 665 aa, Piromyces sp. E2
MKSLTIFTTLLAISAAKKCVVRNPVDNTKNDLAPVFNEDTPSDDETPVNVDDNTPVEKEDDSAIENSDIEDSENKSKGKLPADFKWGAATAAYQVGGAWNEDGRGESVWDHFTPLYPKNVESGDRTNPDSTNGNVACDSYHKFDEDIKMMKIMNANHYRFSMSWSRLFPDGQAKKVDGKWNVNEKGAEYYDMMINTLIENDIVPMATLYHWDLPYALHEKYGGWLDYHSQFDFAKYAEFCFERFGDRVKNWITINEPWVNCVGGYKNGPGKAPNRCTGEAPRKLANDTTGLDLEGGCSYEIGPSSYYKGAKVLPANRPPQRLEDVWCSHNILLGHAQAVKVYREKFQKKQKGLIGITVDGEAEIPWEEPNMSEEELENNKKYANLGTEFRIGWYSDPTIFGDFPRSVKQRMGKEMPVFSDEEKAILKGSSSDFLGWNTYTSHWAAQVKNEDGSYVQPPTDEEASYENSKRDMWDDNCKGRGEGWTCIPPTLGSQAGSSWNTLYGPTIRVGLNWLYDRYKTVLKNGIVITENGCAQPNYKVSRANDQVTLDYFKSIGKEEFADTYDESIIEDEKNIEGSILHDTYRINWYKQYLENLRLAYVEDKVDVRGYMAWSLIDNFEWENGYETRFGMTYIDFYNDKELTRVPKDSLTFLGQWYLDNVEQKN

SEQ ID NO: 3646 - protein, 670 aa, Actinobacillus pleuropneumoniae serovar 1 str. 4074
MKINQLSRLIAICFGTIVSSAFAVEPQIQESALVTPKPTEQHSLSTKRVTARLTQSHYHKFKLDDEFADKIFNRYMDWLDGAHNTFLQSDIDEMRAKYAAKLDDELYEGKLDSAFEIYDLMTKRRYGRYKYALSLLDKEPNLKGSDQIENDREKAAFPATVKEANQLWEQRVKNDVINLYLKDKKWPEIKKTLIKRYNLAIKRLTQIKADDVLQTYLNAFAREIDPHTSYLSPRAAKAFQESMNLSLEGIGATLAMEDDVTTIKSLVPGAPAARSKKLVVGDKIVGVGQDNDEIEDVIGWRLDDVVDKIKGKKGTKVRLEIEPEKGGKTKVITLVRDKVRLEDSAAKLTVDKINGKNVAVIKISTFYIGLTNDVRKLLDEMKTKKVDGLIIDLRENGGGSLTEVVELTGLFIKDGPVVQVRDAFNRIKVHEDPEADKSLYDGKIMVMINRHSASASEIFAAAMQDYNRAIIVGQQTFGKGTVQQSRSLNFVYDLDQEPLGFIQYTIQKFYRIDGGSTQLKGVEADIKFPEIINAEKTGESFEDNALPWDKIPAASYQEAGHARDAVSALTAKHEERIAKEPEFITLNEDIAIRKERDARKYSSLNLEERLKEDRADEAKRLKDLNARFAREGKKAIKNIDALPKDYEAPDFFLKEAEKMMVDWLEIDKKS

SEQ ID NO: 3647 - protein, 591 aa, Helianthus annuus
MCGILAVLGCSDDSQAKRVRVLELSRRLKHRGPDWSGLYQHGDNYLSHQRLAIIDPASGDQPLFNEDQTIVVTVNGEIYNHEELRKRLTAAGHKFRTGSDCDVIAHLYEEHGEDFVDMLDGMFSFVLLDTRNNTYIAARDAIGITSLYIGWGLDGSVWISSELKGLNDDCEHFEVFPPGHLYSSKTGGFKRWYNPLWFAETIPSTPYDPLVLRCAFENAVIKRLMTDVPFGVLLSGGLDSSLVASITARYLAGTKAAKQWGAQLHSFCVGLEGSPDLKAAREVADYLGTVHHEFHFTVQDGIDAIEDVIYHIETYDVTTIRASTPMFLMSRKIKSLGVKMVISGEGSDEIFGGYLYFHKALNREEFHQETCRKIKALHQYDCLRANKSTSAWGLEARVPFLDKEFINVAMSIDPEAKMINMDQKRIEKWVLRRAFEDEEHPYLPKHILYRQKEQFSDGVGYSWIDGLKAHAELHVTDKMMLHAEHIFPHNTPVTKEAYYYRMIFERLFPQNSAKLTVPGGASIACSTAKAIEWDASWSNNLDPSGRAALGAHNAAYKKNMGPVGQVKLGPNIIDNVPRMMDISASELVIQG

SEQ ID NO: 3648 - protein, 558 aa, Helianthus annuus
MCGILAVFGCVDCSQAKRARILELSSRLRHRGPDWSGLHSEEDCYLAHQRLAIVDPASGDQPLYNEDKSIIVTVNGEIYNHKEFREQLKSHKFNTGSDCEVIAHLYEEHGEDFVHMLDGMFSFVLLDTRNKSYIAARDAIGITPLYIGWGLDGSVWFASEMKALSDDCEQFMSFLPGHIYSSKNGGLRRWYNPPWWSELVPSTPYDPLVLRNAFEKAVIKRLMTDVPFGVLLSGGLDSSLVAAVASRHLVDSEAYCQWGSQLHTFCIGLKGSPDLVAAREVADYLGTRHHEFYFTVQEGIDALEEVIYHIETYDVTTIRASTPMFLMSRKIKSLGVKMVLSGEGSDEIFGGYLYFHKAPNKEEFHEETCRKIKALHLYDCLRANKSTSAWGLEARVPFLDKEFINVAMSIDPKWKMIDRDNGRIEKWVLRNAFDDDEKPYLPKHILYRQKEQFSDGVGYSWIDGLRDHANKQVTDSMLANANFVYPENTPATKEAYYYRKIFEKFFPKNAARLTVPGGPSVACSTAKAVEWDASWSKNLDPSGRAALGVHAAAYEDAK

SEQ ID NO: 3649 - protein, 297 aa, Zea mays
MDATPPSSRDLSPQPRRPASSAGPAKRVGLLLGRYELGRLLGHGTFAKVYHARHADDTGETVAIKVLDKEKALRNGLVPHIKREIAILRRVRHPNIVRLFEVMATKSKIYFVMEFVRGGELFARVAKGRLKEDTARRYFQQLISAVGFCHARGVFHRDLKPENLLVDERGDLKVSDFGLSAVADQFHPDGLLHTFCGTPSYVAPEVLARRGYDGAKADIWSCGVILFVLMAGYLPFHDQNLMAMYRKIYRGEFRCPRWFSKDLSAGMIPQVDKAFYVAATDKRVPFSNHVNIFLSGK

SEQ ID NO: 3650 - protein, 1329 aa, Cochliobolus heterostrophus
MAAETYSGVAAIIRNLARQHDPARDPSFSAQVSANGAKTAANAIALPGPESEEKTQLEQELSALCSRIDFLEHKCSHAAAKSGQFPLTPAQESPDDGVLYTPAGAIRNSSAPPGQARRGSNKERAIWVSNWLAAKETNGGPEEPAAALTEEQLNYLRVHLNQQADQIRNQREHIDNLSREVNKQLTTQSMVFEHGIEDIGALKRELGKHQQANLAFQKALREIGAIVTAVAMGDLSKKVLIHAKEMDPEITLFKRTINTMVDQLQEFASQVTFLAREVGTEGRLGGQANLPGVAGIWAELTDSVNMMANNLTEQVREIAVVTTAVAHGDLSRKIERPARGEILQLQQTINTMVDQLQSFATEVTKVARDVGTEGKLGGQAEIAGVKGMWNELTVNVNAMAQNLTTQVRDIAQVTTAVAQGNLTRKVEAQCKGEILELKNTINRMVDQLQQFAHEVTKIAREVGSEGRLGGQATVHGVEGTWKDLTENVNGMAMNLTTQVREIAEVTTAVARGDLSRKVKAEVQGEILSLKITINTMVDRLNTFAQEVSKVAREVGTDGILGGQAQVDNVEGKWKDLTNNVNTMAQNLTLQVRSISEVTQAIAKGDMSRRVHVDAEGEIRLLKDTVNDMVMRLDEWSLAVKRVARDVGVDGKMGGQADVRDIDGRWKEITTDVNTMAQNLTSQVRAFGDITNAAMEGKFTQITVEASGEMDELKRKINQMVSSLRESIQRNTAAREAAELANKTKSEFLANMSHEIRTPMNGIIGMTQLTLDTDLTHAQREMLTIVHNLAGQLLTIIDDILDISKIEANRMVMEEIPFSMRGTIFNALKSLASRANERKLNLAYDVSYTVPDYVVGDSFRLRQIILNLVGNAIKFTEHGEVKVAISMAQEQDCGPDHYVFQFAVSDTGIGIRGDKLNLIFDTFQQADGSTTRKFGGTGLGLSISKRLVTLMGGRMWVESDFGKGSVFYFTCRVRLGKPEITAIQPQLVAYKQHTVLFVDQGNTGFSDQIIEHLKALDLVPMVVNSVEEVPETTKRADMPYDCVIVDNDKTARELRIAERFKYIPLVMLTPHVCISLRSALENGISSYMTTPCLPIDLGNALIPALDGRAAPLVSDHSKSFQILLAEDNAVNQKLAVRILEKYHHRVTVANNGLEAFEHIQKKRYDCVLMDVQMPVMGGFEATAKIREWERENGIPSTPVIALTAHAMVGDCEKCLAAQMDDYLSKPLRQNQLIQTILRCATVGSTIYDHTSEPRYTASSHIPNLDLPGNSKDKATTGAASASTTSPKKRPQLETRGFTDRGGGADSPNLLAVDQTDNGSVERVRSLSASL

SEQ ID NO: 3651 - protein, 548 aa, Lawsonia intracellularis
MASKEILFDAKAREKLSRGVDKLANAVKVTLGPKGRNVVIEKSFGSPVITKDGVSVAKEIELEDKFENMGAQMVKEVAPKTSDIAGDGTTTATVLAQAIYREGVKLVAAGRNPMAIKRGIDKAVVAVTKELSDITKPTRDQKEIAQVGTISANSDTTIGNIIAEAMAKVGKGGVITVEEAKGLETTLDVVEGMKFDRGYLSPYFVTNPEKMVCELDNPYILCNEKKITSMKDMLPILEQVAKVNRPLLIIAEDVEGEALATLVVNKLRGALQVVAVKAPGFGERRKAMLEDIAILTGGEAIFEDRGIKLENVSLSSLGTAKRVVIDKENTTIVDGAGKSEDIKARVKQIRAQIEETSSDYDREKLQERLAKLVGGVAVIHVGAATETEMKEKKDRVEDALNATRAAVEEGIVPGGGTAFVRSIKVLDDIKPADDDELAGLNIIRRSLEEPLRQIAANAGYEGSIVVEKVREPKDGFGFNAASGEYEDLIKAGVIDPKKVTRIALQNAASVASLLLTTECAIAEKPEPKKDMPMPGGGMGGMGGMDGMY

SEQ ID NO: 3652 - protein, 945 aa, Candida albicans SC5314
MKTHLLVVPSKKTEEVNWVKPLNNYLLSIYGNTLQYQDDINSLNKLRQDIRGVNADDTGLKLYYSYYSKLELIDLRIPFHDLNKSKKLQFEWFDSFSSLPYTQNSLAFEKANVLYNIGAILSKFAQFKYNESQQLNGPEGETAFKQSISMLQQSSGIYQFINENFLHAPSQDLAQSTIKFLSKLMMAQSQEIFTLKVISGDLNQSKNSLIAKLCKSTSVLYEDCYNMINKNKKEGFKITNESYDGNDYEDDLDDDDCDDLEGFLERPEDTEDSDNRYVAAELDSSWISIIYFKYEYYKSLAYYFNGLHLDANRKYGDAIAYLTKSQEVLNGVHSSTLKQVSKGSGDVYELLDNYKYQKDAVTIRLNDLNKDNDLIYHDIVPNLVTLPEIKPMDSTKIIKLGDNAMFHEINEKNYNNFLVNVVPVNIHELSSYYSEEKSQYLRNEIDHFEVSNEEVSSVLEYLKLPKALVSIKESLRGTSSKGSTGNIDELLSQSVIDKVNEISSQYSNDIQRKSTIENSRKEIYQLIKFLTENNCQDDAIQLKKILYDASVSDTKLFALVDETYHQTLGKGIQSTEFKSLFKTVDNKSSNQDSEISLLDIIDDDDDDNTNQDKQIKNIEDYLNDLNNIKQAKFKLIEKLKKEIHNDDISDILVLNMKLKSTNEIKSIIFPEELKKFNPFTNELDKLITNEKSIIEQLKSRWNQLISNPQIKNLQTETNSKNRLIISQSEKIDQFYGNWLKYHNGLIAGEKFYNQLLDQFKNFRNNIDNQLNQGMRSLNIGQQFPTQPMLNRTQSSGLQSNYTGQSSISHSGSLSGQPSGGYNQPQPQQQQLQQQQQQQQQAQFSGAYNQQYSQPHGGYTQFQGYGQGQGQSQTGYQRQPPPPPPQLPPKQSMGSYNFATTLQQQQLPPQQQQQPQQQRTPQNESNLIYDNPSTYNPNMYNFFSSK

SEQ ID NO: 3653 - protein, 446 aa, Lycopersicon esculentum
MKKVKRKLGKYEVGRTIGEGTFAKVKFARNTETGENVAIKVLAKSTILKHRMVEQIKREISIMKIVRHPCIVRLHEVLASQTKIYIVQEFVTGGELFDKIVHLGRLSEDEARRYFQELIDAIAHCHSKGVYHRDLKPENLLLDFQGNLKISDFGLSALPQQGVELLYTTCGTPNYVAPEVLGNRGYDGAAADVWSCGIILYVLMAGYLPFDETDLPTLYTKIKAAEFSCPFWFSPGATSLIQKIIDPNPQTRIKIDGIKRDPWFRKNYRAVKAKADEVVNLDDIHAVFDDIEDAFVSEKSEDSESGPLVMNAFEMITLSQGLNLSALFDRRQDYVKRQTRFISRQPAKVVIETIEAAAESLGLKVHTRDYKTRIEGVTANRAGQFAVVLEVFQVAPSLFMVDVRKAAGDTLEYHKFYKTFCTKIDDVIWKPKEGMSNAVLLRTRTR

SEQ ID NO: 3654 - protein, 727 aa, Xanthomonas axonopodis pv. citri str. 306
MTAVSNRWDSGVVRALAEARHGDAFAVLGAHPSDKGRLLRTYLPGADRVGAVLDDGQVVALDAGPEPGLFAGELPAHGGYRLRIGWPGGEQETADPYAFGPQLSDFDLHLISEGHHLQLADALGANVVEVEGVRGTRFAVWAPNASRVAVVGDFNSWDARRHPMRLRHQSGVWELFVPDVGPGAHYKYQLRGPHGHELPAKADPVARRAELAPGTASIVADPTPHQWSDDGWMATRARRQAHDAPMSIYEIHAGSWLREAGVDLDWDGLADRLIPYVADMGFTHVELMPVSEHPFGGSWGYQPLGLFAPTARFGTPDGFARFVDRCHREGIGVIVDWVPAHFPTDAHGLAHFDGTALYEHADPREGFHRDWNTLIYNHGRREVSGFLIASAMEFLQRYHVDGLRVDAVASMLYRDYSRNAGEWIPNIHGGRENYETIAFLRRLNEVVREHTPGAVMIAEESTAFPGVTAEVAHGGLGFHYKWNMGWMHDTLHYAGLDPIYRRYHHGELTFSMVYAYSERFVLPISHDEVVHGKGSLLGRMPGDDWQRFANLRAYLGFMFTHPGRKLLFMGCEFGQPTEWNHDAGLPWHLLDDPRHRGVQTLVRDLNRLYVQYPALHAHDDDPSGFAWVVGDDAGNSVVAFLRKGKRGDAPVLVVINFTPVVQHAYRIGVPQGGQWREVFNSDAGIYGGSNLGNGGSVTAEQQSMHGHAQSLPLLLPPLGAIVLTPYG

SEQ ID NO: 3655 - protein, 469 aa, Yarrowia lipolytica CLIB122
MVESDILPKSQREEIFKKLSSLQANKTCFDCPANNATWSSVTFGVFICYDCSSVHRNLGVHVSFVRSTTMDEWSYKQLRNMKCGGNQNAREYFAKHGGSQYLENAGRAQEKYTSKTAKAYLTHLAQKCAKDAAQFPDEIVVETADDDAASIKSASTDDFFANWDKPLVKKPTPTSSRSSTPALGASTASLPGIRNGNNGSTSSLNNPTKKVTPTATRTKITSKAGGAAGKKSILSSKKTKPKKAPAESFDFEEAERLAKEEEKNKEALGLGNDDDAEDDVFGKSTVVSEPTHTAAPSGSFGGPADYPPTYSNEPIKLVPTNTKEVEQKFQKLGFGMVAGENKLESTKKKSTYVPPDKETAETLNKFKTSKGISSDQFFGRSDYDPAAQKEAKERLQTYSGSKAISSSSYFGRDEEEEQAMVNHSSDLERMAADLAERVKNVAGEDFGGLKDAFEQGGKKVGDFMREYMR

SEQ ID NO: 3656 - protein, 773 aa, Alkaliphilus metalliredigenes QYMF
MDDMKKEEVNTNYKNVLEDLMDIILIVDKNGKIVYGNKRAVETYGYTYEELVNLSVFDLRNQDIEEPVQEQLKQALLRGIEFKTYHYKKNGTKFPVEVRSRYSGEQSKGNVVSIIRDISHIDKIAKDAEMFSVSLDILDDAIVTFTKDLKVSLWSKAAEEKLGYTKEEIVGQNIKILVPNEKIKEFENEIFEVRKGNVVERLETIRLHKNGNAIDVSISVSPFYDPDGVLIGVLGVYKDISQRKELAKQLKRNEERWRYALEGGRFGIWDWDIENNKIFSADLWKEILGYNEGELNDTYEDWMSKVHPEDFPYVKDKLNKHSRGEKYIDEFRMKCKDNTYKYLRAKGQIIEWREDGNPLRMMGTLEDITDRKIIEEELKEKYKQLELLKEEAENANKAKSQFLANMSHEIRTPMNGIFGVVQLLESTDVGAEQNKYINMLKESTHTLAGIINDILDISKIESGTFKLNNEPFNLTEMISSIYHGLLVDGNAKGLEVGYYLDPNINPQVIGDELKLKQILTNLISNAVKYTEQGFVSFRVNRISFDEHTEKIQFNVKDSGIGIKDGFKEKIFEDFSQEDSSTRKKYQGTGLGLAISKNLALLMQGDISFESKLGEGSIFTFTCELQKSRTEDVNTKNHDIVKEKVEYSNQNSNKVILCVEDNIMNQEVMESIVTKKGYQYLAAYNAKEALDILENKKVHLILMDIQLPDLNGFEITKSIRMAKGPMKDVPIIAVTAYVDHKIENKCIQAGINDYMPKPLDLEKLYEMLESYLEG

SEQ ID NO: 3657 - protein, 271 aa, Glycine max
MFSKLQPQHQQQHQPFQFSRECQTSEDDDSRSSGGPNTAVAQKSVLGGGGCSDGATIEVVRRPRGRPPGSKNRPKPPLIITREPEPAMSPFILEIPGGSDVVEALARFSRRKNTGLCVLTGSGTVANVTLRQPSFSPAGATVATVTFHGRFDILSMSATFLHHASPAAIPNAFAVSLSGPQGQIVGGFVAGRLLAAGTVFVIAASFNNPSYHRLSSEEEAQNNSGGGAGDAQSPPVSGGGVESGHVPAESFMYSCHLPSDVIWAPTPRPPF

SEQ ID NO: 3658 - protein, 206 aa, Arabidopsis thaliana
MPSRRRTLLKVIILGDSGVGKTSLMNQYVNKKFSNQYKATIGADFLTKEVQFEDRLFTLQIWDTAGQERFQSLGVAFYRGADCCVLVYDVNSMKSFENLNNRREEFLIQASPSDPENFPFVLIGNKVDVDDGNSRVVSEKKAKAWCASKGNIPYFETSAKVGTNVEEAFQCIAKDALKSGEEEELYLPDTIDVGTSNQQRSTGCEC

SEQ ID NO: 3659 - protein, 401 aa, Xanthomonas axonopodis pv. citri str. 306
MLSDPIIDVLTSGVAGLGVWGMLAVLLVFTQLTIFAVTLYLHRSQAHRGVDFHPVIAHFFRFWTWLTTSMITREWVAIHRKHHAKVETEEDPHSPQTKGIAQVFWRGVELYREARTQRADIEQYGKGAPSDWIERHLYTPHANAGPIALLVINAVLFGLPGIALWAIQMAWIPFWAAGVVNGLGHWWGYRNFESADTSTNLTPWALWIGGEELHNNHHAFPSSARFSMRRWELDIGWVAIRGLQALGLAKVLRVAPSLDIRPNIAVPDADTLKALLSHRFQAMTDYQRNVFKPALREEAAATGAKLRELLPRRLRKGLVDDGRWLKPDARAQLQAWVAQRPRMRTLVEYRARLTALLEARSHDASERLRQLQQWCHEAEASGNAALQAYAARLKGYALSGA

SEQ ID NO: 3660 - protein, 1145 aa, Cochliobolus heterostrophus
MAAETYSGVAAIIRNLARQHDPARDPSFSAQVSANGAKTAANAIALPGPESEEKTQLEQELSALCSRIDFLEHKCSHAAAKSGQFPLTPAQESPDDGVLYTPAGAIRNSSAPPGQARRGSNKERAIWVSNWLAAKETNGGPEEPAAALTEEQLNYLRVHLNQQADQIRNQREHIDNLSREVNKQLTTQSMVFEHGIEDIGALKRELGKHQQANLAFQKALREIGAIVTAVAMGDLSKKVLIHAKEMDPEITLFKRTINTMVDQLQEFASQVTFLAREVGTEGRLGGQANLPGVAGIWAELTDSVNMMANNLTEQVREIAVVTTAVARGDLSRKVKAEVQGEILSLKITINTMVDRLNTFAQEVSKVAREVGTDGILGGQAQVDNVEGKWKDLTNNVNTMAQNLTLQVRSISEVTQAIAKGDMSRRVHVDAEGEIRLLKDTVNDMVMRLDEWSLAVKRVARDVGVDGKMGGQADVRDIDGRWKEITTDVNTMAQNLTSQVRAFGDITNAAMEGKFTQITVEASGEMDELKRKINQMVSSLRESIQRNTAAREAAELANKTKSEFLANMSHEIRTPMNGIIGMTQLTLDTDLTHAQREMLTIVHNLAGQLLTIIDDILDISKIEANRMVMEEIPFSMRGTIFNALKSLASRANERKLNLAYDVSYTVPDYVVGDSFRLRQIILNLVGNAIKFTEHGEVKVAISMAQEQDCGPDHYVFQFAVSDTGIGIRGDKLNLIFDTFQQADGSTTRKFGGTGLGLSISKRLVTLMGGRMWVESDFGKGSVFYFTCRVRLGKPEITAIQPQLVAYKQHTVLFVDQGNTGFSDQIIEHLKALDLVPMVVNSVEEVPETTKRADMPYDCVIVDNDKTARELRIAERFKYIPLVMLTPHVCISLRSALENGISSYMTTPCLPIDLGNALIPALDGRAAPLVSDHSKSFQILLAEDNAVNQKLAVRILEKYHHRVTVANNGLEAFEHIQKKRYDCVLMDVQMPVMGGFEATAKIREWERENGIPSTPVIALTAHAMVGDREKCLAAQMDDYLSKPLRQNQLIQTILRCATVGSTIYDHTSEPRYTASSHIPNLDLPGNSKDKATTGAASASTTSPKKRPQLETRGFTDRGGGADSPNLLAVDQTDNGSVERVRSLSASL

SEQ ID NO: 3661 - protein, 372 aa, Xanthomonas oryzae pv. oryzae KACC10331
MSAVDAALSQLFSPITFGPLALANRIVIAPMCQYSAQDGCATDWHRIHLGTLSQSGAGLLILEAAAVVPEGRISYADLGLYDDATEQALAEVLQSVRRWSPMPIGIQLAHAGRKASTDLPWKGSEAIAPDHAHGWQTVSASAMPFRAGQPAPQALDQAGIDAVVDAFVASAQRAERLGLELIELHAAHGYLMHQFLSPLSNQRSDAYGGSLENRMRLTLRIFDAVRAAVSEKIAIGVRISATDWVEGGWDVQQSIALSQALDARGAHYIHVSSGGLDPRQQIPLQAGYQIPFAQEIRAQVSRPVIGVGLITEPAQAEAIVQEGQADAIALARGILYDPRWPWHAAAALGASVTPAPQYLRCEPRDARGVFAN

SEQ ID NO: 3662 - protein, 431 aa, Anabaena variabilis ATCC 29413
MIGGAIATTATISVFGPAWTRSVRAALQDSPKAVIDQVWQLVNNEYVDGKFNQQDWLAVRKSLLSKDYSSKEEAYVAIREALQRLNDPYTRFMDPKQFEVLTSQTSGEVSGIGIRMELNEITKRLTVLEAIENSPALKAGIKAGDEILAIDGKPTQQMKVDDASKLIRGKEGTAITLRLGRTGNSAFDLKLTRAKIEVPTVSYNLKQEGSRRVGYIRLREFSAHAAEQMARAIRNLNGQKVDSYVLDLRGNPGGLLQASIEIARMWLDDGGIVRTVNRQGFNEDTKANRTALTKLPLAVLVDGNSASASEILTGALKDNKRAVVIGGQTFGKALVQSVHELPDGSGLAVTIAHYYTPNGTDINHKGITPDIKLELTDAQERQLANNPKLIATQNDPQYARAIAVLSGNTFARPPLNQTNQPMSLGANELKF

SEQ ID NO: 3663 - protein, 423 aa, Corynebacterium diphtheriae NCTC 13129
MNNKKETPQAAPAQRKRTRRIFDQSDKLKNVLYEIRGPVTAEAEAMELDGHRILKLNTGNPAIFGFEAPDVIMRDMIASLPTSQGYSTSKGIIPARRAIVTRYEVIPGFPAFDVDDVYIGNGVSELITMTTQALLNNGDEVLIPMPDYPLWTAATSLAGGKPVHYLCDEEDDWNPSIEDIKSKITERTKAIVVINPNNPTGAVYSKEVLQKIVDVAREHDLLILADEIYDRILYDGAVHTNIAALAPDLLCITFNGLSKAYRVAGYRAGWMIVTGPKNNARGFIEGLDLLSGTRLCANVPGQHAIQVALGGRQSIYDLTGQGGRLLEQRNVTWEKLNAIPGVSCVKPMGALYAFPKLDLEYYDIKDDAQLMLDLLRQEKILMVQGTGFNWDKPDHFRVVTLPWASQLSEAMDRLGNFLASYKQ

SEQ ID NO: 3664 - protein, 286 aa, Oryza sativa
  misc_feature (155)..(155): Xaa can be any naturally occurring amino acid
MMSMMTDLSCGPSSMTELTAAAAPAGSGSSAAVAAGSSEKMGRGKIEIKRIENTTNRQVTFCKRRNGLLKKAYELSVLCDAEVALIVFSSRGRLYEYANNSVKSTVERYKKANSDTSNSGTVAEVNAQHYQQESSKLRQQISSLQNANSLTRLAXNISSRTIVGDSINTMSLRDLKQVENRLEKGIAKIRARKNELLYAEVEYMQKREVELQNDNMYLRSKVVENERGQQPLNMMGAASTSEYDHMVNNPYDSRNFLQVNIMQQPQHYAHQLQPTTLQLGQQPAFN

SEQ ID NO: 3665 - protein, 139 aa, Prosthecochloris aestuarii DSM 271
MAIKLYGRDPLKMFENVFNDTVSPFVSSMVAHSFKVDVSEDEMAIYIDADMPGMKKEDVKISMDDDVMTICAERTHEEEEKKKDYHRIERTYGSMSRSFSVGDNVDVDKIEASYDNGVLHIVVPKKEPVEKKSKDISIK

SEQ ID NO: 3666 - protein, 888 aa, Candida glabrata CBS138
MKPSVIGLKCKDTDKVDWKRGLSSYLKRIYGSRQWKEFYDEQLCVEMDHVRNNANGELGAVTLVEQNYKYYAYLEQLYLRLGNNIGQFKLEFTWYDAEYGLVSSPTKHTQKTLVFEKSCTLYNLGVALTEVANEKINEDFKTAMVHMAKAMECFRYLSENFFNSPSADLQTENTKFLSDLSHAEAQEMFLINAINNGTSEKQASLISKLAYSGSNLYENCWEFLRTEEGGLTPYGEARWNSIVSGKHHFFRSLAAYYNALALEQNNKYGEAIAFLKLATQCLSSSLPYKYALNDNFDFDGFGETIKDKTKQLIKDNDYIFHDSIPQSVSLSSIKALDAIKAPKWEEQLKPFMEAIAHKCEKLYRGIVPMEVFEKESIYSEKKASMLRQCINDSETADMEYSSFIEFTHLPNLLSDLKRRYKSQNFSGTTDPQGDMMRDQIQSWIKSISQSKYKDPDEQLKLISSKKQEILTLLAGLPSEQKENVVKLKMALVEAAASDEKLFSLVQPYAAQLRLLKQPDELWKIFNMFSIDESNKQSLLDIDDSKNQEILAKISDIEQMAEDLRLLKEERGRTLKELKSQTNDDDITNTLLVNSKAESEELEVIFKKELDKFKPLTTRIEATIFKQESVVNEVKNELDNVFSLSGLENKTSEEEEKQKKRKEFFMQIEEAATKFLIFNNDLPKGLEFYDSLLKMSKDLAVSVKVQNNASGSDNNSNNGYVSGNVIPPSLPPQPRNVGSSIDSQFQSMNLGSVPTPQRFPQPPAPNSRPIVSMENYTSQFSVPPAHGDLPPAYNQVPLVPTRNYDQPHGSGNYPGNVSSQHPVSSSPIPGAYDQVPMVPPKQPPAEGRSQISRQEQMEREERELQRDPTAFYKKSSVFDESLYSRYSGK

SEQ ID NO: 3667 - protein, 451 aa, Ashbya gossypii ATCC 10895
MSEDAGEVYVDKAVSDEIFSKLNSKPENRTCFDCGNKNPTWTSVPFGIMLCIQCSGEHRKLGVHITFVKSSNLDKWTINNLRRFKMGGNHRAREFFLKNNGKQLLDYKADKQVKYTSAVAKNYRARLDKLAAKDREQHPAELVLATDEEQGSSGSSGASSKNNSVDDFFASWEKKSASTPPPKILTPNPTGSSAGAARSSILSAPGRRRTPLAGGGSTGKKHSILSSKRTARPAAKKADADLFDEFEKEAQREQEESAAAVSTETVRTSSNAYVQQKPIKMHAASSSDDDLADNPYNDGTRFDQVRPAPTVEDVQPKLAKLGFGMVNNNASSLMEEARQSKLAAAAPKYTGDVVAKFGAQKAISSDQMFGRGSYDEDSSREARDKLKSDFHNATAISSSSYFGEPEPPALPQPAPFRMDLLGSEEDFELAKQALERSAQKLGNYLRDYIRK

SEQ ID NO: 3668 - protein, 298 aa, Glycine max
NSAPKIKKREMATETKVAVLGGITEVQGAANSVEINNLARFAVEEQNKRENSVLEFVRVISAKQQVVAGVNYYITLEAKDGEIKNEYKAKVWERESQELLEFKPTLGAGGIIDVPGAANSIEIDHLARFAVEEQNKRENSVLELVRVISAKKQVVAGMNYYITLEAKDGVIKKEYEAKIWVRGWLNSKELLEFKPVNVSSTQMGGITDVTANSLEIDILARFAVDQHNKKENANLEFVGVIRAKQQVVEGFIYYITLEAKDGETKNVYETKVWVRSWLNSKEVLEFKPISINPLSVSV

SEQ ID NO: 3669 - protein, 187 aa, Arabidopsis thaliana
  misc_feature (39)..(39): Xaa can be any naturally occurring amino acid
  misc_feature (64)..(64): Xaa can be any naturally occurring amino acid
  misc_feature (116)..(116): Xaa can be any naturally occurring amino acid
  misc_feature (123)..(123): Xaa can be any naturally occurring amino acid
  misc_feature (136)..(136): Xaa can be any naturally occurring amino acid
LPFNRSVITAFYYNTFNENFNKSQKTIRCELYLRASELXKEGKKIILTNVMNPNTLRHNPLTFXRQLVALCQTPILLDHPNVVMLFTDDAIARAKHYLSLTSSGLCAYSDSRCLPXLENRLLXFIQRHDGYPSHPXTIFLTDGASKSVMQILNCVIRGNGYGILVPRPQYPLYSATISLLADTLVTY

SEQ ID NO: 3670 - protein, 466 aa, Arabidopsis thaliana
YFDGWKAYEENPFHPIDRPDGVIQMGLAENQLCGDLMRKWVLKHPEASICTSEGVNQFSDIAIFQDYHGLPEFRQAVAKFMEKTRNNKVKFDPDRIVMSGGATGAHETVAFCLANPGDGFLVPTPYYPGFDRDLRWRTGVNLVPVTCHSSNGFKITVEALEAAYENARKSNIPVKGLLVTNPSNPLGTTLDRECLKSLVNFTNDKGIHLIADEIYAATTFGQSEFISVAEVIEEIEDCNRDLIHIVYSLSKDMGLPGLRVGIVYSYNDRVVQIARKMSSFGLVSSQTQHLIAKMLSDEEFVDEFIRESKLRLAARHAEITTGLDGLGIGWLKAKAGLFLWMDLRNLLKTATFDSETELWRVIVHQVKLNVSPGGSFHCHEPGWFRVCFANMDHKTMETALERIKVFTSQLEEETKPMAATTMMAKKKKKCWQSNLRLSFSDTRRFDDGFFSPHSPVPPSPLVRAQT

SEQ ID NO: 3671 - protein, 1544 aa, Rhodospirillum rubrum
MGAVLAGIGLSGFAVWWVTQRNAELAETAASLELTRLSDAIAERITLYQYGLRGARGVIVTFGERGITREVFRGYSKTRDIGAEFPGARGFGFIRRVPADREERFLAEARADGWPDFAIAQFTPHEGERFVIQYIEPAQRNLKAVGLDIASEKNRREAALAAIDTGQVRLTGPITLVQASGDKSQSFLILLPIYRTLSTPETLAERRAQAFGWSYAPLNMPEVLSGLVPNQDRLALTLRDVTNPAEAETVFTSNTDCAAAECVTKTLTRSIFGRVWEISVTVSPAYGHAVQRIAPWVVVSLGIGASILAAGFAAVIGLNQARRREIAQAQARLSTIVENSGDAIIGEALDGTIVGWNRAAEALFGYKAPEVIGKALAPLLIPADRMAENQSIVLSALSGEAVMAFDTQRIHADGHLFDVSMTACPVHDRLGHVVGVANLIRDIRKRKAAEQSLLEFNAQLEKQVASRTAELEKARRALQTVLDSVPSMIGYWDRDLHCHIANRAYCSWFNVDPSGLIGKSMRSLLGEALFTANRPFIEAVLRGQPQTFERMIPRPNGQGVRHSLAHYIPDVVDGEVLGFYALVHDVSELVEGRQKLDAALRENEALLRTIDEQLLCSITDRNGNIISINDNFCKLMGYTKDELLGLDHRIMNSGLHDKTFWADVWATISAGGSWRGEVCNKAKDGALYWLDSVLTPFFGEDGSIDRYVALRIDITDRKKAEAERNRSNTLLRSVLASAREFSIIATDPDGVITIFNSGAEKLLGYSAEEMVGKQTPALIHLADQVAERGRSLSDEFGVPIEGFRVFVHRSERDGVEAQEWTYVRKDGGHLEVLLVVTAIREDDGRIAGYLGVAQDVSRRKEFERALVLAKQAAEEASVVKGQFLANMSHEIRTPMNAILGMLTLVQRTALTPHQADYVCKAHSAAGSLLGLLNDILDFSKIEAGKLHLEPHPFRLETVLRDLAVVLSGSYGDKGVEVLFDIAPHLPDSFIGDDLRLRQVLLNLAGNALKFTDQGQVIVSVGVLAREDDRLTMRMAVSDTGIGIAADQLASIFGAFEQAETSTTRRFGGSGLGLTITRHLVERMGGVLRVESQPGRGSRFWFDITLPVSGEGSESAESGRPLRVLVVEDNPVAGGILAQTVQGLGYDCDLVQESAETKARIVAADAAGRPYDAVLLDWRMPEVDGLTTARILREMGVTLCPQSIIMVTAYGRDVLSLAEQTGDAPFDAVLTKPVTPGQLRDALLRRDRATSEGEATALAPRGLPTPLAGRRLLVVEDNAINRQVAAELLAGAGAEIDLAEGGERGVMMVLRGEIAYDAVLMDIQMPDIDGFEATRRIRADARFKALPIVAMTANASRADREACLAAGMTEHVGKPIDITATIDVLVSLMTEGMTEGEPIAPPSPMGGTGREVPSDEPLLEDLDSIAERLGGQVDLLRRLLPTFAERTGELLDEIEDLIGRGDWSALSMAFHTIKGSAASMGAVALASHAALWEERLREDGPGTLDALRRDQALCDQMRALLAASLEALSSHLDAMAGPYAKEPAG

SEQ ID NO: 3672 - protein, 475 aa, Oryza sativa
MAGSGRPPAAQKKILQSLRPPLPFAASSRSPFAAPNDYHRFPAGGAAAAAASGSGGIGAGGAGGGGDIEEGLVIRTPQKRKAPEESDVAESSDCMITSPGFAVSPMLTPVSGKAVKTSKSKTKNNKAGPQTPTSNVGSPLNPPTPVGTCRYDSSLGLLTKKFINLLKQAPDGILDLNNAAETLEVQKRRIYDITNVLEGIGLIEKTLKNRIRWKGLDDSGVELDNGLSALQAEVENLSLKEQALDERISDMREKLRGLTEDENNQRWLYVTEDDIKGLPCFQNETLIAIKAPHGTTLEVPDPDEAGDYLQRRYRIVLRSTMGPIDVYLVSQFDEKFEDLGGGATPSGHANVPKHQPTEVFNTTNAGVGQCSNSVAVDNNIQHSQTIPQDPSASHDFGGMTRIIPSDIDTDADYWLISEGDVSITDMWKTAPDVQWDESLDTDVFLSEDVRTPSSHNQQPSAVGGPQMQVSDMHKP

SEQ ID NO: 3673 - protein, 348 aa, Vibrio sp. Ex25
MPWYAYHFGLGWEHLVWGVMAFSFTNLSITAGYHRLWSHKTYEAHPILRAIFAIGGAFSLQNSALHWSSDHRVHHKHVDNNDKDPYSAKRGFWYSHIGWMLRDYNKSQENEYTNCRDLKRDKIVMWQHKYYVPLALLTNIGFPVALGIIYGDIWGMLLVVGAARLFMSHHTTFFINSLAHVWGKQTFTDKNTARDNGVLAFFTFGEGYHNFHHIFENDYRNGVYWWHYDPTKWLIKSCSWLGLTSKLRTTPTFRIEKARATQLLKKAKEKLGAKPNTQTILDQLQHEFDSLVHHMQEYYEMRKEVLGAKTASVVKKYECSVTKIKYQQIKAEFERQQRSWNLMVRRYA

SEQ ID NO: 3674 - protein, 440 aa, Glycine max
  misc_feature (53)..(53): Xaa can be any naturally occurring amino acid
  misc_feature (200)..(200): Xaa can be any naturally occurring amino acid
MEQKGGVLMQRYELGRLLGQGTFAKVYHARNIITGMSVAIKITDKDKILKVGXVMRLIRHPHVVELYEVMASKTKIYFVMEYVKGGELFNKVSKGKLKQDDARRYFQQLISAVDYCHSRGVCHRDLKPENLLLDENGNLKVTDFGLSTLAETKHQDGLLHTTCGTPAYVAPEVINRRGYDGAKADIWSCGVILYVLLAGXEFKFPNWIAPDLRRLLSKILDPNPKTRISMAKIMESSWFKRGLEKPTITRNEDQELAPLDADGVFGACENGDPIEPAKDSKRCNNLNAFDIISYSSGFDLSGLFEETNRKKEARFTSDKPASIIISKLEEICIRLGLKVKKKDGGLFKLEGSKEGRKGSLGIDAEIFEITPVFHLVELKKSSGDTLEYQKLLKQEVRPALKDIVWNWQGEQPQQLQHGVVQKEEQPSYPGISDVAPPQTA

SEQ ID NO: 3675 - protein, 430 aa, Arabidopsis thaliana
MSKAWKLKLLLLLQLLLLSQHDVDSASVISYLPGFEGLLPFHLETGYIGVGEGEKVQLFYYFIKSENNPEEDPLIIWLTGGPACTALSALAFEIGPLTFKTEGYNGGLPSLVSTSYSWTKVASIIFLDQPVGTGYSYSTTPLSYKPSDTGEAKQTYEFLQKWLVENPQFVSNPIYVGGDSYAGIVVPAIVQQISIGNEHGYKPQINLKGYILGNPSTDLDSDHNSKIPYAHRMGLISDELYESLKRTCQGNYVKVDPTNTKCLKLMEDYGKTLVQSDLSLPTPDCYMYRYLLASHWANDEDVRRELHVVKGSIGKWMRCNWDLPYEKDIKSSVPYHRNNSIIGDYRSLVYSSDHDMMVPYIGTEAWIKSLNYSITDDWRPWFVNNQVIGYTRTYANNMTFATIKGGGHTAEYKPEESFMMFQRWISGRPL

SEQ ID NO: 3676 - protein, 457 aa, Staphylococcus aureus subsp. aureus Mu50
MAIAVLLNRMFRMEHNPLFEYIYQQKEDIDACYFIIPEEDMSSASDLKAQFYRGTLQRFYQSLHAEKLTPYVMSYDDIISFCKENNISEVVIAGDIMSYHLEEYDILHQRSLFNEARIAVTLIRGNHYFKASKTMNQQGEPYKVFTSFYRKWRPYLRHRDVYHYDLKSFEDFVIASPDDLVFDDIAFGSSQVIEQNKWQHFLDQDIQNYESGRDYLPEVLTSQLSVALAYGLLDIIEIFNDLLARYDEDEANHEAFIRELIFREFYYVLMTQYPETSYQAFKPKYRQIKWSQNEANFNAWCEGQTGFPIIDAAIMELTQTGFMHNRMRMVVSQFLTKDLFIDWTWGEKFFRKHLIDYDAASNIHGWQWSASTGTDAVPYFRMFNPIRQSERFDAKALYIKTYLPIFNQIDAKYLHDTQRNESNLFEQGIELGSHYPRQMVDHQEKRTQVLATFKALD

SEQ ID NO: 3677 - protein, 457 aa, Staphylococcus aureus subsp. aureus MSSA476
MAIAVLLNRMFRMEHNPLFEYIYQQKEDIDACYFIIPEEDMSSASDLKAQFYRGTLQRFYQSLHAEKLTPYVMSYDDIISFCKENNISEVVTAGDIMSYHLEEYDILHQRSLFNEARIAVTLIRGNHYFKASKTMNQQGEPYKVFTSFYKKWRPYLRHRDVYHYDLKSFEDFVIASPDDLVFDDIAFGSSQIIEQNKWQHFLDQDIQNYESGRDYLPEVLTSQLSVALAYGLLDIIEIFNDLLARYDEDEANYEAFIRELIFREFYYVLMTQYPETSYQAFKPKYRQIKWSQNEADFNAWCEGQTGFPIIDAAIMELTQTGFMHNRMRMVVSQFLTKDLFIDWTWGEKFFRKHLIDYDAASNIHGWQWSASTGTDAVPYFRMFNPIRQSERFDAKALYIKTYLPIFNQIDAKYLHDTQRNESNLFEQGIELGSHYPRQMVDHQEKRTQVLATFKALD

SEQ ID NO: 3678 - protein, 439 aa, Oryza sativa
MESRGKILMERYELGRLLGKGTFGKVHYARNLESNQSVAIKMMDKQQVLKVGLSEQIRREITTMRLVAHKNIVQLHEVMATRNKIYFVMEYVKGGELFEKVAKRGKLTEVVAHKYFQQLISAVDYCHSRGVYHRDLKPENLLLDENENLKVSDFGLSALSESKRQDGLLHTTCGTPAYVAPEVISKIGYDGAKSDIWSCGVILFVLVGGYLPFQGPNLMEMYRKIQHGEFRCPGWFSRKLQNLLYKIMDPNPSTRISIQKIKESTWFRKGPEENRILKERTLNENTTKNVALVLGVRRKKNAHEDVKPMSVTNLNAFEIISFSKGFDLSGMFIVKEWRNEARFTSDKSASTIISKLEDVAKALNLRVRKKDNGVVKMQGRKEGRNGVLQFDIEIFEVTTSYHIIEMKQTSGDSLEYRQLLEEGIRPALKDIVLAWHGDE

SEQ ID NO: 3679 - protein, 278 aa, Staphylococcus epidermidis RP62A
METVQFYNGRTMPKIGLGTYRVKDGDECRESVKYAIEQGYRSIDTAMIYGNEETVGQGIKEGLESTGLSREDLFITSKLWLTDFGRQNVEDAYRQSVAKLGLDYLDLYLMHWPGTNEAVMIDTWRGMEDLYKQNQVKNIGVSNFTPEHFEALLAQVSIKPVINQVEFHPYLTQNELRKYLEAQNIIMESWSPLMNSQILHDEVINEVANEVGKTPAQVVIRWNIQHDVVVIPKSVTPHRIEENLDVWNFELSDNQMERIDQLNQDKRIGPNPLEFNGK

SEQ ID NO: 3680 - protein, 495 aa, Cucurbita pepo
MGFHQIDERNQALLSKIAIDDGHGENSAYFDGWKAYDNNPFHPENNPLGVIQMGLAENQLSFGMIVDWIRKHPEASICTPEGLEKFKSIANFQDYHGLQEFRKAMASFMGKVRGGRVKFDPSRIVMGGGATGASETVIFCLADPGDAFLVPSPYYAAFDRDLKWRTRAQIIPVHCNSSNNFQVTEAALEIAYKKAQEANMKVKGVIITNPSNPLGTTYDRDTLKTLVTFVNQHDIHLICDEIYSATVFKAPTFTSIAEIVEQMEHCKKELIHILYSLSKDMGLPGFRVGIIYSYNDVVVRRARQMSSFGLVSSQTQHLLAAMLSDEDFVDKFLAENSKRLGERHASRFTKELDKMGITCLNSNAGVFVWMDLRRLLKDQTFKAEMELWRVIINEVKLNVSPGSSFHVTEPGWFRVCFANMDDNTVDVALNRIHSFVENIDKKEDNTVAMPSKTRHRDNKLRLSFSFSGRRYDKGNVLNSPHTMSPHSPLVRARTY

SEQ ID NO: 3681 - protein, 359 aa, Arabidopsis thaliana
MDHSSNRFGNNGVESILPNYKLGKTLGIGSFGKVKIAEHVVTGHKVAIKILNRRKIKNMEMEEKVRREIKILRLFMHPHIIRQYEVIETTSDIYVVMEYVKSGELFDYIVEKGRLQEDEARNFFQQIISGVEYCHRNMVVHRDLKPENLLLDSRCNIKIADFGLSNVMRDGHFLKTSCGSPNYAAPEVISGKLYAGPEVDVWSCGVILYALLCGTLPFDDENIPNLFKKIKGGIYTLPSHLSSEARDLIPRMLIVDPVKRITIPEIRQHRWFQTHLPRYLAVSPPDTVEQAKKINEEIVQEVVNMGFDRNQVLESLRNRTQNDATVTYYLLLDNRFRVPSGYLESEFQETTWFQSYAHT

SEQ ID NO: 3682 - protein, 590 aa, Pseudomonas fluorescens Pf-5
MCGLAGELRFDHQPADLAAVERITHHLAPRGPDAWGFHSQGPIALGHRRLKIMDLSDGSAQPMVDNQLGLSLAFNGAIYNFPELRAELEAKGYAFYSGGDTEVLLKGYHAWGADLLPKLNGMFAFAIWERDAQRLFIARDRLGVKPLYLSRTGQRLRFASALPALLKGGDINPLLDPVALNHYLNFHAVVPAPRTLLAGIEKLPPATWMRIEADGRTEQQTWWTLPYGPRADETNLTLEDWRDRVLDSTREAVAIRQRAAVDVGVLLSGGVDSSLLVGLLREVGVDNLSTFSIGFEDAGGERGDEFQYSDLIARHYGTRHHQLRIDEREIIEQLPAAFRAMSEPMVSHDCIAFYLLSREVAKHCKVVQSGQGADELFAGYHWYPQVDGASDPYAAYRAAFFDRSYDDYAATVQPQWLTANDAAGDFVREHFAQPGADAAVDKALRLDSTVMLVDDPVKRVDNMTMAWGLEARTPFLDYRLVELSARVPARFKLPDGGKQVLKEAARLVIPSEVIDRKKGYFPVPGLKHLQGATLDWVRELLLDPSQDRGLFKPAMLDRLLTDPQGQLTPLRGSKLWQLAALNLWLSEQGI

SEQ ID NO: 3683 - protein, 727 aa, Xanthomonas axonopodis pv. citri str. 306
MTTEGISEMSQTLQALADGLPADAFAVLGPKLLADGRRQVRVLAPGAEAMGLIDPRGKLLARMQASAIDGVFEGTLAVDGPYRLRIVWPDRVQEVEDPYAFAATLDESLLLQIAAGDGQALRRALGAQHLHCGDVPGVRFALWAPHAQRVAVVGDFNGWDVRRHPMRQRIGGFWELFLPRVDAGARYKYAVTAADGRVLLKADPVARQTELPPATASVVPSAATFAWTDAAWMANRDPAAVPGPLSIYEVHAASWRRDGHNQPLDWPTLAEQLIPYVQQLGFTHIELLPITEHPFGGSWGYQPLGLYAPTARHGSPDGFAQFVDACHRAGIGVILDWVSAHFPDDAHGLAQFDGAALYEHADPREGMHRDWNTLIYNYGRPEVTAYLLGSALEWIEHYHLDGLRVDAVASMLYRDYGRAEGEWVPNAHGGRENLEAVAFLRQLNRDIATQFPGVLTIAEESTAWPGVTAAISDGGLGFTHKWNMGWMHDTLGYMQRDPAERAHHHSQLTFGLVYAFDERFVLPLSHDEVVHGTGGLLGQMPGDDWRRFANLRAYLALMWAHPGDKLLFMGAEFGQWADWNHDQSLDWHLLDGARHRGMQQLVGDLNAALRRTPALYRGTHRAEGFDWSVADDARNSVLAFVRHDPDGGAPLLAVSNLTPQPHHDYHVGVPRAGLWREILNTDSAHYGGSNLGNSGRLATEPVGMHGHAQRLRLTLPPLATIYLQAEK

SEQ ID NO: 3684 - protein, 277 aa, Yersinia pseudotuberculosis IP 32953
MTMQPLIKLHDGRLMPQLGLGVWQASIQETELAVSKALEVGYRSIDTAAIYKNEEGVGKALKAAAVARDELFITTKLWNDDQHNPQQALETSLQKLQLDYIDLYLIHWPDPKQDHYVSAWRELVTLKEQGLIRSIGVCNFHIPHLQRLIDETGIAPTVNQIELHPLLQQRQLHAWNATHHIATESWSPLAQGGKGVFDQEIIRKLAQQYNKTPAQIVIRWHLDSGLIVIPKSVTPARIRENFEVFDFKLQKEELLAITKLDCGKRLGPDPEVFGSDR

SEQ ID NO: 3685 - protein, 516 aa, Arabidopsis thaliana
MMNKDMLLHQHQQPQQDENMSNLTSASGDQASVSSGNITEASGSNYFPHHQQQQEQQQQQRQQLVVPDSQTQKKRRNQPGNPDPESEVIALSPKTLMATNRFVCEICNKGFQRDQNLQLHRRGHNLPWKLKQRSNKEVIRKKVYVCPEASCVHHDPSRALGDLTGIKKHFCRKHGEKKWKCDKCSKKYAVQSDCKAHSKTCGTKEYRCDCGTLFSRRDSFITHRAFCEALAEETAREVVIPQNQNNNQPNPLLIHQSASHPHHHHQTQPTINVSSSSSSSHNHNIINSLHFDTNNGNTNNSNNSNNHLHTFPMKKEQQSNDHIMNYHHSIIPPWLAPQPHALTSSNPNPSNGGGGGGSLFSLASPAMSATALLQKAAQMGSTKTPPLPPTTAYERSTHNNNLTTTMAAMMTSPSGFISSNNNNHVLFQDYNASGFDNHGREEAFDDTFGGFLRTNEVTAAAGSEKSTKSGGGEGLTRDFLGLRPLMSHNEILSFAGLGSCINSSASDQLHPKPWQG

SEQ ID NO: 3686 - protein, 786 aa, Pseudomonas aeruginosa PAO1
MLGGRTSPRLIPAPMDIALTHRLSFKQASLTVLVAFILGTLLSLIQVGVDYASQDASINREVRALLDVSHNPAARIAYNIDAELAQELVLGLLRSPAVVRAEIIDTSGLPLASASREPAESRLRPLSDFLFGHKRVYEDPLHVDHAPGEALGVLHLEIDTFVFGNDFLRRAGITLLSGFVRSLLLSLILLVLFYTLLTKPLVSLIQALSGHDPRSPARMRLPCPKGHERDEIGVLVEVINRQLGRISVEIEQRREAENRLTQYLEELESIVAARTAELKAANARLTLSNQELEEARQTALDMAQARASFLANMSHEIRTPLNGLLGMLSLSLDGPLTPEQRQQLSIAHDSGKVLVELLNDVLDLSKFEAGQLVLEQIPFDLGVLVEDTASLLSQNAAAGVELTCLVDPALPAQVSGDPTRIRQIVSNLLSNALKFTRLGRVDVRVEATAEGVRISVRDTGIGIAQEALDRIFQPFTQADAGITRQYGGTGLGLALTRKLCEAMQGELTVESTVGLGSLFSVGLPLAPVSPPLQALPLRGRVIAQCSANSGLAQLLQTWLPRWGLEYKRLETDDSLLGHSLDVLISDCPDCLMGLRPSIGTPILLVTAYGSFLEPELARRLSPLRQLARPLSRNQLYQALKHVLEHTAIAPSSASDTTGEQRNTRVLLVEDNPVNQLVAKGLLHKLGCQVWIAEHGLNALKMLEEHPIDLVLMDCNMPVMDGYEATRQIRDSGRWGGLPIIALTANALPDERERCRAAGMDDYLAKPFHRDELKAILDRWCPLTASD

SEQ ID NO: 3687 - protein, 258 aa, Arabidopsis thaliana
MGRGKVELKRIENKINRQVTFAKRRNGLLKKAYELSVLCDAEIALLIFSNRGKLYEFCSSPSGMARTVDKYRKHSYATMDPNQSAKDLQDKYQDYLKLKSRVEILQHSQRHLLGEELSEMDVNELEHLERQVDASLRQIRSTKARSMLDQLSDLKTKEEMLLETNRDLRRKLEDSDAALTQSFWGSSAAEQQQQHQQQQQGMSSYQSNPPIQEAGFFKPLQGNVALQMSSHYNHNPANATNSATTSQNVNGFFPGWMV

SEQ ID NO: 3688 - protein, 658 aa, Pseudomonas syringae pv. syringae B728a
MCGITGFFGVKNKNLDETTVIKNMLSMIEHRGPDQAGYYVNNSMGLGTMRLSIIDLAAGIQPLSDGTGQYWISYNGELYNYIELRRRLQVLGHHFSTESDTEVVLRSWMEWGDEALEKFNGAFAFAIYDTVKDEVFIARDRFGKRPLFYTQTDGGYLFASEMKCFFGFPGFEFKFDEMSLSSILAHWTPLPSQTPFQGIRQLPPGSIMTLRGAQCEIRPYYALDFRAVDFDGTENEAKEEIRNTLEQAVKLRLRSDVPMGLYLSGGVDSSVLTSIAARIIKQKPLRTFSVEFEDKNLDESSDQQLVSALFSTKHERLIINHKDIVDNFSATVFHAEMPLFRTAPVPMYMLSKHVRSTGIKAILSGEGADEVFLGYNIFKETLLRSQWDTTDHDEKKRLLAKLYPYMKSFSEDNDSNLMGFYNAYAKEKIPGLFSHEIRFQNGRFASRLLKTKNDPFAGIQAWVAKDPVYSALSPTQKAQWLEFNTLLSGYLLSSQGERMGLAHGIENRCPFLDINVQKLASSINLRFDDGFTEKYMLRMAYDGILPGRIIHKAKTPYRAPDSGPFVEHALDYLNHLCESNALDAIELINPVFAKALIKKVVERTLAGGEDITVRDNQAFVYLMSLIELDKWFVKRQGAAYINPCRVDKLLVQAVDARH

SEQ ID NO: 3689 - protein, 57 aa, Pisum sativum
MASMISSSAVTTVSRASRGQSAAVAPFGGLKSMTGFPVKKVNTDITSITSNGGRVKC

SEQ ID NO: 3690 - protein, 545 aa, Campylobacter upsaliensis RM3195
MAKEIIFSDEARNKLYEGVKKLNDAVKVTMGPRGRNVLIQKSFGAPSITKDGVSVAKEVELKENLENMGASLVREVASKTADQAGDGTTTATVLAHAIFKEGLRNITAGANPIEVKRGMDKACEAIVDELKKLSREVKDKKEIAQVATISANSDEKIGALIADAMERVGKDGVITVEEAKSINDELSVVEGMQFDRGYLSPYFITNADKMIVELSNPYILLFDKKITSLKDLLPILEQIQKTGKPLLIIAEDIEGEALATLVVNKLRGVLNISAVKAPGFGDRRKAMLEDIAILTGGEVIAEELGRTLESATLEDLGQASSVIIDKDNTTIVNGAGDKANIDARVNQIKAQIAETTSDYDREKLQERLAKLSGGVALIKVGAATETEMKEKKDRVDDALSATKAAVEEGIVIGGGAALIKAKSKIKLKLEGDEAIGAAIVERALRAPLRQIAENAGFDAGVVVNSVENSSEENAGFDAAKGEYVDMFKAGIIDPVKVERIALLNAVSVASMLLTTEATISEIKEDKPAMPDMSAMGGMGGMGGMM

SEQ ID NO: 3691 - protein, 272 aa, Anabaena variabilis ATCC 29413
MTIATSTKPQINWVNTLFFLGLHIGALFAFVPGNFSWAAVGVALLLYWITGGLGITLGFHRLVTHRSFQTPKWLEYFLVLCGTLACQGGPIEWVGTHRIHHLHSDTDPDPHDSNKGFWWSHIGWLIYHSPSHADVPRFTKDIAEDPVYQFLQKYFIFIQIALGLLLLYLGGWSFVVWGIFFRIVWVYHCTWLVNSATHKFGYRTYDAGDKSTNCWWVAVLVFGEGWHNNHHAFQYSARHGLEWWEVDLTWMTVQLLQVLGLATNVKLADKKQ

SEQ ID NO: 3692 - protein, 306 aa, Lycopersicon esculentum
MPSHADVDRQIEQLMECKPLSEAEVKTLCEQARAILVEEWNVQPVKCPVTVCGDIHGQFYDLIELFRIGGNVLITNYLFMGDYVDRGYYSVETVSLLVALKVRYRDRITILRGNHESRQITQVYGFYDECLRKYGNANVWKYFTDLFDYLPLTALIESQIFCLHGGLSPSLDTLDNIRALDRIQEVPHEGPMCDLLWSDPDDRCGWGISPRGAGYTFGQDIASQFNHTNGLSLISRAHQLVMEGFNWCQDKNVVTVFSAPNYCYRCGNMAAILEISENMEQNFLQFDPAPRQIEPDTTRKTPDYFL

SEQ ID NO: 3693 - protein, 306 aa, Lycopersicon esculentum
MPSHADLDRQIEQLMECKPLSEADVKTLCDQARAILVEEWNVQPVKCPVTVCGDIHGQFYDLIELFRIGGNAPDTNYLFMGDYVDRGYYSVETVTLLVALKVRYRDRITILRGNHESRQITQVYGFYDECLRKYGNANVWKYFTDLFDYLPLTALIESQIFCLHGGLSPSLDTLDNIRALDRIQEVPHEGPMCDLLWSDPDDRCGWGISPRGAGYTFGQDIASQFNHTNGLTLISRAHQLVMEGFNWCQDKNVVTVFSAPNYCYRCGNMAAILEIGENMEQNFLQFDPAPRQIEPDTTRKTPDYFL

SEQ ID NO: 3694 - protein, 365 aa, Bradyrhizobium sp. BTAi1
MSTSKLFEPYKLGPITLANRAVMAPLTRNRAVEGLAAGPLTATYYAQRASAGLLISEASQVSQQGQGYQDTPGIYSKEQIAGWRKVTDAVHAKGGRIFIQLWHVGRISHVSLQPHGGAPVAPSAIAAKTKTFVGGAFTDVSAPRALELAEIPGIVQAFKQAALNAIEAGFDGVEIHGANGYLLDQFAKDGANKRTDAYGGSIENRARLMLEVAKAVSEAIGADKTGIRLSPVTPANDISDSNPQALFDYIVDQLNALKLVYIHVIEGATGGPRDVAPFDYASLRKRFKGTYIANNGYDLALANKQLDANAADLIAFGRPFIANPDLVERLKQNAPLNELDRATLYGGGAKGYTDYPTLQASQAAE

SEQ ID NO: 3695 - protein, 240 aa, Zea mays
TRVEFCKNEGLVLLADEVYQENIYVEDKPFHSFKKIARSLGYTDDDLPLVSFQSVSRGYYGECGKRGGYMEITGFSPEVREQIYKVASVNLCSNVSGQILASLVMNPPKAGDESFESFMSEKDGILSSLARRAKALEEAFNSLEGITCNKAEGAMYLFPRLHLPQKAIGAAQAVGTAPDAYYAKRLLEATGIVVVPGSGFGQVPGTWHFRCTILPQEDKIPAIVSKLKEFHEKFMDEFRD

SEQ ID NO: 3696 - protein, 615 aa, Bacillus halodurans C-125
MCGITGWVDWRRNLQNETETIKQMAETQTHRGPDDLNVWTEKHAALGHSRLIVVDPEGGCQPMMRERNGKRYTIVYNGELYNTEDLRKELIVKGYQFQGHSDTEVLLVSYIEWGYQCVEKFNGIFAFAIWNDKDQSLFMARDRLGVKPLFYTVRHGFLLFATEIKALLAHPEIEPVLTEEGLSEVLGLGPSRSPGNGVFDDIQELRPAHLLTYDRNGAKVSRYWRLKSMAHSEDAMETAAHLRDLLEDTVERQLFADVPVGMFLSGGVDSSALTAIAALIYEREGKGLIRTYSIDYDENDKYFKANDFQPNADGPWVEKVSTTFRTNHHNAVISIEELANQLKRAVELRDLPGMADVDSSLYWFCKQIKKDVTVGLSGECADEIFGGYPWFHKPEVMNFNGFPWMRSADERQELLHERWRQKLNLPKYVHDRYKETIAETPRFEEDTPEEARRREISYLNMVWFMTTLLDRKDRMSMGASLEVRVPFSDHRIVEYAWNIPWEIKQFGGREKGILRKALEGILPDEVLYRKKSPYPKTHHPKYTKMVQQEMERILGQSDSPLFDVVNRKKLKELTETGGKALTTPYFGQLMTGPQLLAHFIQMEHWLKHYNIKLIG

SEQ ID NO: 3697 - protein, 271 aa, Zea mays
MRNSTAAQPSTPSSAPAMSGSGPAYVAPASSTPVGGGYTYPAPASSGGSAGYARIPTYPAPPSAYPATNPPTPQVSTNAPVQDPTAPPSPLAKAGELVARLREQGQALIAARRPWAEVFRAAAFSRPPSLGEALARTRRNAAYFRANYALAVLAAVAASLLWHPGTLLALVLLCAAWFFLYFARGNQPLRVLGTEFDDGTVLAALCGVTVVALLFTSVGWNVVGSVMVGGALVGAHAALRTTDDLFLTEQEAAGDGLVAAGPILPTYVRIV

SEQ ID NO: 3698 - protein, 445 aa, Vibrio parahaemolyticus RIMD 2210633
MKKKIGLYWFTFDLRLHDNSLLVDASSFLDELVCLYCRPSVTPFLHHFAQEVTLGRARQKFIDASLCELNDALGQLGQRLWTLDLPPYQALKYAIQYLSVTHLYSDAMAGSDEQSILHKLQDEYPHLVIVQHSVRSLFDESKLPFTLPDLPETFTQFRKCVEGIDIAHPIDAPSRLPPMPKGAQLPTLSSFYFDESALFSGGEWSGLAHCRRYFFSGLASSYKETRNGLDGMAYSTKFSPWLALGCVSPRMIHAMLKQYEQTQGANDSTYWIYFELLWREYFYWYARCYQQRLFRFGGIRNQPPLTSFYAHRFQQWKNGTTPYPIVNACMHQLNHTGYMSNRGRQLVASCLVHELGLDWRYGAAYFETQLIDYDVGSNWGNWQYLAGVGADPRGSRQFNLEKQTQMYDPNHEFIERWQGRDSRAQQDVVDMVGWPITTQQENGDK

SEQ ID NO: 3699 - protein, 464 aa, Listeria innocua Clip11262
MTYKFPDNFWWGSAASGPQTEGAANVDGRKPSIWDHWYKIEPGRFFNDVGPTNTSNFYYQYKEDIALMKQTGHNSFRTSIQWSRLIPDGIGEVNPKAVDFYNRVIDEMLANNVEPFMNLYHFDMPMSMQEKGGFESREVVDAYATFAKTCFELFGDRVKHWFTFNEPIVPVEAGYLYDMHYPNVVDFKRATQVGYHTTLAHALAVKEFHALEIPEGQIGIILNLTPSYPRSQNPADLKAAHIADLIFNRSFLDPVTKGEFPADLVEIIREHDALPEYTEEDLAIIKNNIIDILGVNYYQPRRVKAKEYAAHPDAPFMPEHLFDNYEMPYRKMNPYRGWEIFERAIYDIAINLRDNYDNIPFFISENGMGVEGESRYRNADGMIEDTYRIDFIKSHLKWLHKAIEEGSNCHGYHLWTFMDCWSWANAYKNRYGLVEVDLDNDFKRTVKASGHWYKELSENNGFED

SEQ ID NO: 3700 - protein, 206 aa, Chlamydomonas reinhardtii
MSTKKRRLLKVIILGDSGVGKTSLMNQYVQKKFTKEYKATIGADFLTKEIEVDDKKVTMQIWDTAGQERFQSLGSAFYRGADCCVLVFDVNNAKSFDDLDNWRDEFIIQAGPPDPDNFPFMVLGNKIDENGGSSRQVSEKKAKAWCASKGSIPYFETSAKEDINVEAAFTCITRNALRNEKEEELFMPDAVDMNTTATQRKRAGCC

SEQ ID NO: 3701 - protein, 201 aa, Phytophthora infestans
MNPEYDYLFKLLLIGDSGVGKSCLLLRFADDTYTESYISTIGVDFKIRTIELDGKTIKLQIWDTAGQERFRTITSSYYRGAHGIIVVYDVTDQESFNNVKQWLHEIDRYACENVNKLLVGNKSDLTAKRVVSTDAAKEFAESLGIEFLETSAKNAANVEKAFMMMAAQIKKRMANAPVAPKAGVKLTPGQQVPSNGGSKCC

SEQ ID NO: 3702 - protein, 278 aa, Bacteroides thetaiotaomicron VPI-5482
METVRLNNGVEMPILGYGVYQVTPEECERCVLDAISVGYRSIDTAQAYYNEEGVGNAVRKCGVPREELFITTKVWISNGGYEKAKASIDESLRKLQSDYVDLLLIHQPFNDYYGTYRAMEEAYKAGKARAIGVSNFYPDRFIDLAEFCEIKPAVNQVETHVFNQQVKPQEIMKKYDTKVMSWGPFAEGRNNFFSNEVLKAIGEQYGKSVAQVALRFLIQRDIIVIPKSTRKERMIENFDVFDFTLSVKDMEEIAGLDKKESLFFSHYDPEMVNFLINL

SEQ ID NO: 3703 - protein, 447 aa, Paenibacillus polymyxa
TIFQFPQDFMWGTATAAYQIEGAYQEDGRGLSIWDTFAHTPGKVFNGDNGNVACDSYHRYEEDIRLMKELGIRTYRFSVSWPRIFPNGDGEVNQEGLDYYHRVVDLLNDNGIEPFCTLYHWDLPQALQDAGGWGNRRTIQAFVQFAETMFREFHGKIQHWLTFNEPWCIAFLSNMLGVHAPGLTNLQTAIDVGHHLLVAHGLSVRRFRELGTSGQIGIAPNVSWAVPYSTSEEDKAACARTISLHSDWFLQPIYQGSYPQFLVDWFAEQGATVPIQDGDMDIIGEPIDMIGINYYSMSVNRFNPEAGFLQSEEINMGLPVTDIGWPVESRGLYEVLHYLQKYGNIDIYITENGACINDEVVNGKVQDDRRISYMQQHLVQVHRTIHDGLHVKGYMAWSLLDNFEWAEGYNMRFGMIHVDFRTQVRTPKESYYWYRNVVSNNWLETRR

SEQ ID NO: 3704 - protein, 484 aa, Nicotiana tabacum
MVFISGNVQKQQLLSKIATNDGHGENSAYFDGWKAYENDPFHLSNNPNGVIQMGLAENQLCFDLIQEWVVNNPKASICTTEGAEDFKDIAIFQDYHGLPEFRQAVARFMEKVRGDRVTFDPNRIVMSGGATGAHETLAFCLANPGDAFLVPTPYYPGFDRDLRWRTGVQLFPVVCDSSNDFKVTKKALEAAYEKAQESNINIKGLLINNPSNPLGTLLDSDTLRDIVTFINSKNIHLICDEIYAATVFDQPKFFSVSEIVEEHVGCNKDLIHIVYSLSKDLGFPGFRVGIVYSYNDTVVNIARKMSSFGLVSTQTQHLIASMLSDEIFIEKFIAESSERLGKRHGMFTKGLAQVGISTLKSNAGLFFWMDLRRLLKEPTLESELELWRIIINEVKLNVSPGCSFHCSEPGWFRVCFANMDDETMRTALRRIRNFVLQTKGLNNKAAVKKQCSRSKLQISLSFRRMDDFMNSPVHSPMNSPLVRT

SEQ ID NO: 3705 - protein, 175 aa, Xylella fastidiosa Temecula1
MHPKNFQHQLKTIPQPPEETRDFVFNHTMLRVKDINASLDFYARILGFRLIDQRDFPEAQFSLYFLALLPQTVHISDNDTERRLWMSGIPGVLELTHNYGTETQEGQIYHNGNSEPRGFGHICISVPDLYSACARFDTLQVPYQKRLTDGRMKNIAFIKDPDGYWVEIISNTPLP

SEQ ID NO: 3706 - protein, 279 aa, Staphylococcus aureus subsp. aureus Mu50
MLNEIQILNNGYPMPSVGLGVYKISDEDMTKVVNAAIDAGYRAFDTAYFYDNEASLGRALKDNGVDREDLFITTKLWNDYQGYEKTFEYFNKSIENLQTDYLDLFLIHWPCEADGLFLETYKAMEELYEQGKVKAIGVCNFNVHHLEKLMAQSSIKPMVNQIEVHPYFNQQELQEFCDRHDIKVTAWMPLMRNRGLLDNPVIVKIAEKYHKTPAQVVLRWHLAHNRIIIPKSQTPKRIQENIDILDFNLELTEVAEIDALDRNARQGKNPDDVKIGDLK

SEQ ID NO: 3707 - protein, 279 aa, Staphylococcus aureus subsp. aureus MSSA476
MLNEIQILNNGYPMPSVGLGVYKISDEDMTKVVNAAIDAGYRAFDTAYFYDNEASLGRALKDNGVDREDLFITTKLWNDYQGYEKTFEYFNKSIENLQTDYLDLFLIHWPCEADGLFLETYKAMEELYEQGKVKAIGVCNFNVHHLEKLMAQSSIKPMVNQIEVHPYFNQQELQEFCDRHDIKVTAWMPLMRNRGLLDNPVIVKIAEKYHKTPAQVVLRWHLAHNRIIIPKSQTPKRIQENIDILDFNLELTEVAEIDALNRNARQGKNPDDVKIGDLK

SEQ ID NO: 3708 - protein, 235 aa, Arabidopsis thaliana
MSSYSIASAISRISPLIRFVKPYSTGFSFITCACNSTRRPKRFDQLCVFSMASEARESPANNPGLSTNRDEATKGYIMQQTMFRIKDPKASLDFYSRVLGMSLLKRLDFSEMKFSLYFLGYEDTTTAPTDPTERTVWTFGQPATIELTHNWGTESDPEFKGYHNGNSEPRGFGHIGVTVDDVHKACERFEELGVEFAKKPNDGKMKNIAFIKDPDGYWIEIFDLKTIGTTTVNAA

SEQ ID NO: 3709 - protein, 369 aa, Burkholderia sp. 383
MSALFEPFKLKDVTLRNRIAVPPMCQYVAEDGVVNDWHHVHLAGIARGGAGLVIAEATAVSPEGRITPGCAGLWNDAQAEAFAPSVAAIKAAGAVPGIQIAHAGRKASANRPWEGDDHIADGDPRGWQTIAPSAVPFGAHLPKTPRAMTRDDIARVQADFVASAKRARDLGFEWLELHFAHGYLGQSFFSVHANQRDDEYGGSAENRGRFLVETLAAVRKVWPEHLPLTARFGVIEYDGRDEETLAESIALTQRLKQEGLDMLSVSVGFSTPDAQIPWGPAFLAPIAERVRREAGLPVSSAWGIDTPQLANRVVAEEQLDLVMVGRAHLADPHWPYYAAKQLGVERPSWTLPAPYAHWLERYRTADKVA

SEQ ID NO: 3710 - protein, 363 aa, Oryza sativa (japonica cultivar-group)
MSFCERDMNKESMYQERDDMAGIRFATPPLPQQQQQQQLVECFSDEVDSRGSGGEMKDAVGSGSGQLVVVGGGDGASIEVAKKRRGRPPGSKNKPKPPVVITREAEPAAAMRPHVIEIPGGRDVAEALARFSSRRNLGICVLAGTGAVANVSLRHPSPGVPGSAPAAIVFHGRYEILSLSATFLPPAMSSVAPQAAVAAAGLSISLAGPHGQIVGGAVAGPLYAATTVVVVAAAFTNPTFHRLPADDDASVSVSVSLSGSGDADEHRGHQHKPEPQEPRQLRRPPPHLSAAAAVSAAQPVEPCGAPMYACHPQPQEVMWPPPARTPHPPPPPPWGEQEKGGEGDERGRDGVVEGRVAAAGDVE

SEQ ID NO: 3711 - protein, 158 aa, Triticum aestivum
MAAISSTSYFSSQPQLPASGGGSNGRQPRRRRMGGSCVMLEAAAASGSGGGGVVVGRTRSLTEEDLEELKGCLDLGFGFSYHQIPGLCGTLPGLELCYSMTRRFLDEQRTVVGQLEPVAAAAPIPDWKISGPGDSPEEVKARLKYWAQTVACTVKLCS

SEQ ID NO: 3712 - protein, 158 aa, Glycine max
MAIRLMDLDSPFFNTLHRIMDLTEDAEKNLNAPTRTYVRDAKAMAATPADVKEYPNSYVFVIDMPGLKSGDIKVQVEDDNVLLISGERKREEEKEKEGGKYLRMERRLGKLMRKFTLPENANTDAISAVCQDGVLTVTVNKLPPPQPKKPKTIEVNIA

SEQ ID NO: 3713 - protein, 284 aa, Zea mays
  misc_feature (258)..(258): Xaa can be any naturally occurring amino acid
LLTRSILLFLQTDLSCGPSSKAKGGQPAATTGSGGDRQGRGKIEIKRIENTTNRQVTFCKRRNGLLKKAYELSVLCDAEVALVVFSSRGRLYEYANNSVKSTIERYKKANSDTSNSGTVAEVNAQHYQQESSKLRQAIDSLQNANRTIVGDSIHTMGLRELKQMEGKLEKAINKIRARKNELLYAEVEYMQRRMDLQTDNMYLRSKIAENNNETGQPAMNMIGVPSTSEYDHMASFVDSRNFLQVNMQQQQPQHYSHXAATNDPPTRMMKLRIFGQQSMHASTQ

SEQ ID NO: 3714 - protein, 128 aa, Zea mays
  misc_feature (72)..(72): Xaa can be any naturally occurring amino acid
  misc_feature (104)..(104): Xaa can be any naturally occurring amino acid
MVLSHGVGGSDESVHSTFASRYVRTSLPRYRMPEQSIHVDAASGGFIAPFLYPELEWDFRLPLVKSINVSGXKYGLVYAGIGWCIWRTKEDLPGELIFHINYLXADQPTFTLNFSKGASLGSLFFLGL

SEQ ID NO: 3715 - protein, 445 aa, Pseudomonas syringae pv. phaseolicola 1448A
MLHLSRLTSLALAIAIVIGAPLAQAAEKTAPATPAAVSPAKPNANAKPPLPLDELRTFAEVMDRVKAAYVEPVDDKTLLENAIKGMLSNLDPHSAYLGPEDFQELQESTSGEFGGLGIEVGVEDGFVKVVSPIDDTPASKAGIEAGDLIVKINGTPTQGQNMQEAVDKMRGKIGEKITLTLVRDGGTPFDVTLARATIQVKSVKAQMLENGYGYIRITQFQVKTGDEVGKALAKFRKDNGKKMSGLILDLRNNPGGVLQSAVQVADHFLTKGLIVYTKGRIANSELRFSADPADASEGVPLVVLINGGSASASEIVAGALQDQKRGILMGTDTFGKGSVQTVLPLNNDRALKITTALYYTPNGRSIQAQGINPDIVVRRAKVTSEADGENYKEADLMGHLGNGNGGADKPTVKGGAAAKARPQDDDFQLSQALSLLKGLSITRGN

SEQ ID NO: 3716 - protein, 482 aa, Pseudomonas syringae pv. syringae B728a
MQLIWLRSDLRAQDNTALTAAMERGPTLAVYLLSPAQWRSHDDADCKVDFWLRNLVELEKALGELNVPLLIREADTWDQAPEVLATLCTQFKVEGLHLNQEYGINETRRDQAVQKAMGKAGVHFNSYLDQLLFKPGSILTKTGNYFQVFTQFKKVCYTRLHEAMPHPVRTPQAQAAQSIKSDAVPKQVKGFATPSKALRDLWPAGEAEARRRMDAFAAEQISYYKTERDFPAKPGTSQLSAYLAAGVISPRQCLHAALASNQGEFETGDVGTVTWINELLWREFYKHTLVGYPRVSRHRAFRPETEALKWRDAPEELRAWQEARTGLPIIDAAMRQLLETGWMHNRLRMVVAMFLTKNLLIDWREGERFFMRHLIDGDLASNNGGWQWSSSTGTDSAPYFRIFNPLSQSERFDPEGVFIKRWLPELADMNKKQIHDPSLIGDLFGAADYPKPIVDLSKSRARALAAFKALPARQPAAGVEHG

SEQ ID NO: 3717 - protein, 548 aa, Escherichia coli O157:H7 EDL933
  misc_feature (160)..(160): Xaa can be any naturally occurring amino acid
MAAKDVKFGNDARVKMLRGVNVLADAVKVTLGPKGRNVVLDKSFGAPTITKDGVSVAREIELEDKFENMGAQMVKEVASKANDAAGDGTTTATVLAQAIITEGLKAVAAGMNPMDLKRGIDKAVTAAVEELKALSVPCSDSKAIAQVGTISANSDETVGXLIAEAMDKVGKEGVITVEDGTGLQDELDVVEGMQFDRGYLSPYFINKPETGAVELESPFILLADKKISNIREMLPVLEAVAKAGKPLLIIAEDVEGEALATLVVNTMRGIVKVAAVKAPGFGDRRKAMLQDIATLTGGTVISEEIGMELEKATLEDLGQAKRVVINKDTTTIIDGVGEEAAIQGRVAQIRQQIEEATSDYDREKLQERVAKLAGGVAVIKVGAATEVEMKEKKARVEDALHATRAAVEEGVVAGGGVALIRVASKLADLRGQNEDQNVGIKVALRAMEAPLRQIVLNCGEEPSVVANTVKGGDGNYGYNAATEEYGNMIDMGILDPTKVTRSALQYAASVAGLMITTECMVTDLPKNDAADLGAAGGMGGMGGMGGMM

SEQ ID NO: 3718 - protein, 507 aa, Ashbya gossypii ATCC 10895
MAGNNDKTNSAEVREDRVVTNSVGNPINEPFATQRVGQHGPLLLQDYNLLDLLAHFNRERVPERNPHAHGSGAFGYFEVTDDITDVCGSAMFGEVGKRTRALVRFSTVGGEKGSADTVRDPRGFAVKFYTEEGNLDWVYNNTPVFFIRDPSKFPHFIHTQKRNPRTNLKDANMFWDFLTTPENQVAIHQVMILFSDRGIPASYRHMNGYSGHTYKWSNKQGDWRYVQVHIKTDQGIKNLTAEEGAKLAGEDPDFCQQDLVQALERGEYPSWTVYIQTMTEEQAQKLPFSVFDLTKVWPHKDFPLRRVGRLVLNEVPTNFFAQIEQAAFSPATTVPYQEPSADPVLQARLFSYADAHRYRIGPNYHQVPVNCPYASKFFNPAIRDGPMNVDGNLGSEPNYLATNNNYRFLGADRPIQQHQETWQGPAQPVHWATTGDIDFAQATALYHVLGRTPGQQRNLAHNVAIHVASADPPIQERVFQMFSRVDKGLGEAIRSEATALSQKKPKL

SEQ ID NO: 3719 - protein, 474 aa, Synechococcus elongatus PCC 6301
AAPILFWHRRDLRLSDNIGLAAARAQSAQLIGLFCLDPQILQSADMAPARVAYLQGCLQELQQRYQQAGSRLLLLQGDPQHLIPQLAQQLQAEAVYWNQDIEPYGRDRDGQVAAALKTAGIRAVQLWDQLLHSPDQILSGSGNPYSVYGPFWKNWQAQPKPTPVATPTELVDLSPEQLTAIAPLLLSELPTLKQLGFDWDGGFPVEPGETAAIARLQEFCDRAIADYDPQRNFPAEAGTSGLSPALKFGAIGIRQAWQAASAAHALSRSDEARNSIRVWQQELAWREFYQHALYHFPSLADGPYRSLWQQFPWENREALFTAWTQAQTGYPIVDAAMRQLTETGWMHNRCRMIVASFLTKDLIIDWRRGEQFFMQHLVDGDLAANNGGWQWSASSGMDPKPLRIFNPASQAKKFDATATYIKRWLPELRHVHPKDLISGEITPIERRGYPAPIVNHNLRQKQFKALYNQLKAAI

SEQ ID NO: 3720 - protein, 446 aa, Oryza sativa
MAARGALRRVGKYEVGRTIGEGTFAKVKFAQNTESGESVAMKVVDRSSILKHKMADQIKREISIMKLVRHPNVVRLHEVLASRKKIFIILEFITGGELFDKIIRHGRLNEADARRYFQQLIDGVDFCHSKGVYHRDLKPENLLLDSQGNLKISDFGLSAWPAQGGALLRTTCGTPNYVAPEVLSHKGYDGALADTWSCGVILYVLLAGYLPFDEVDLTTLYGKIESAEYSFPAWFPNGAKSLIHRILDPNPDKRIRIEEIRNDEWFKKNYEPTREIESEEVNLDDVNAAFDDPEEDADHTLDDEAGPLTLNAFDLIILSQGLNLAALFDRRQDYDKLQNRFLSRKPAKVIMSSMEVVAQSMGYKTHIRNYKMRVEGLNANKTSHLAVMLEIFEVAPSIFMIELQRAAGDTSDYNKFINNYCSKLDDIIWNFPIEKSKSRISRLSKR

SEQ ID NO: 3721 - protein, 411 aa, Frankia sp. CcI3
MSRESELQSAIAASAAVSGSTDSVIIKSTVTTSGTATTSGTAKSIPTTTLGSGTLGSGTLGSAAARVAASRPGDYDGCPPGRSRPDPTLPSGPPLPARATGPRRSTRPDVADQSKTLGEQVLLAFFIVVPLLALLAAVPLAWGWGLGWHDLVIGAVMYLITGFGVTVGYHRLFTHGSFRTGRPLRIILAVAGSLAIEMGVTDWVAAHRRHHKYSDQAADPHSPWRFGHHGRGLAKGFLHAHVGWLFHPERTAPETFCPDLLADRDIAAISARFPWLVAASVLLPPLVGGLWSMSWAGAATALFWGALVRIALLHHVTFSINSICHTIGTRPFAARDRSSNVWWLAIPSLGESWHNLHHADPTSARHGVLPGQIDPSAALIRLFEKLGWAHDVRWPTAKRIAARRVDAGAGR

SEQ ID NO: 3722 - protein, 256 aa, Schizosaccharomyces pombe
MSFHITPIWMWKGTGNNYAYLLTCDKTKITAIVDPAEPESVIPVIKEKTAKKEIDLQYILTTHHHYDHAGGNEDILSYFPSLKVYGGKNASGVTYTPKDKEIFKVGEVQVEALHTPCHTQDSICYYVSSPSKRAVFTGDTLFTSGCGRFFEGDAKQMDYALNHVLAALPDDTVTYPGHEYTKSNAKFSSTIFSTPELTKLVDFCKNHESTTGHFTIGDEKKFNPFMCLGLESVQKAVGSSDPITVMKKLRDMKNAA

SEQ ID NO: 3723 - protein, 366 aa, Halobacterium sp. NRC-1
MADSFSPLELRDTTIRNRFAMSPMCQYSCEDRDGLATDWHRVHLGSRAVGGAGVVMTEATAVEERGRISPEDLGIWSDEHGEALAPVAEFISDQGATPAIQLAHAGRKAGTARIWGDDSGPVPLDEGGWDPVAPSADPYPYEDDERDTRKLSTADIEDVVEAFRDAARRANEAGFEVAEIHAAHGYLIHQFLSPVSNHRDDEYGGSFENRTRLAREVTSAVREEWPDDKPVFVRISATDWIDDRDSWTVEESVQLADDLHALGADLIDVSTAGIHPDQDIQSGGPNYQLQFAERINADTERDVAVGTVGGIQSAEQADAIVRNDRADLAIVGREFLRDPYFPLHAARELGREDAADVPPQYRRGFQ

SEQ ID NO: 3724 - protein, 209 aa, Triticum aestivum
  misc_feature (194)..(194): Xaa can be any naturally occurring amino acid
MASRRRTLLKVIILGDSGVGKTSLMNQYVNKKFSNQYKATIGADFLTKEVQFEDRLFTLQIWDTAGQERFQSLGVAFYRGADCCVLVYDVNSMKSFDNLNNWREEFLIQASPSDPDNFPFVLLGNKVDVDGGNSRVVSEKKAKAWCASKGNIPYFETSAKDGINVEEAFQCIVKNALKNEPEEELYMPDTVDVXGGNRGQDPQGAVRPE

SEQ ID NO: 3725 - protein, 141 aa, Arabidopsis thaliana
MMSFEMNDRKKIGLGLTGFGVFFSFLGIVFVFDKGLLAMGNILFISGVSLTIGFKSTMQFFMKRQNYKGTISFGVGFFFVIIGWPILGMMLETYGFFVLFSGFWPTLAVFAQKIPVLGWIIQQPYIRSVCVQLQTTIANFA

SEQ ID NO: 3726 - protein, 146 aa, Magnetococcus sp. MC-1
MAALMEYDPFRNVRTLQNEINRLFDHNWEEPNGQMAKWPMRVDIREDENQIMIKADLPGMTQQDISVDVDNGTLTISGERKFDDEQNRDGYHRIERAYGRFSRSFQLPNTTDTGNIAAKYQNGVLEVTLPKLDEAKPRSIQVEVLN

SEQ ID NO: 3727 - protein, 491 aa, Synechococcus sp. WH 8102
MSSLQIVWFKRDLRVDDHRPLLEAAARGPVLPLYVVEPELWQQPDASERQWLFCRESLLELRQALAELGQPLVVRSGDVVQVLERARRQFGVDGLWSHEETGNGWTYQRDKRVGAWARAHGIQWGEIRQFGVTRRMRSRNGWAKRWEEQMAEPITPAPAGVPALEEIDPGVIPERPCPELLPDDCSQRQTGGRSIGLGELRDFLQHRAPCYQRAMSSPKSAFTGCSRLSAYLAWGCLSMREVLQTSRHHSGRGVSSFESRLHWHCHFIQKLEDQPEIEFSDFHPYMRGIRETNAERLAAWTEGRTGVPFVDACMRALKAHGWINFRMRAMLMSFASYNLWLPWRDSGLHLARQFVDYEPGIHWSQCQMQSGSTSINTIRIYNPIKQGMDHDPQGVFIRQWCPELKDVSTIHIHEPWMLGGGRSAPIVDVTTSMQLAKDRIWEIRRSAGFDRHADAIQRMHGSRKAGLKPTASRRRQKRSNDNGVRQLSLEL

SEQ ID NO: 3728 - protein, 256 aa, Glycine max
HGVIDPIEELGHLASSFGICFHVDLCLGGFVLPFARELGYHIPPFDFSVKGVSSISVDVHKYGLAPKGTSVVLYRNHEIRKHQFVAVTEWSGGLYVSPTIAGSRPGSLIAGAWAAMISLGKEGYLKNTKEIMEGSRRIQKGIEEIAELFIVGKPDMTIVAFGSAVLDIFEVNDVMSSKGWHLNALQRPNSIHICVTLQHVPIVEDFLNDLKESVKTVKANPGPISGGLAPIYGAAGKMPDRGMVQELLVDYMDGTC

SEQ ID NO: 3729 - protein, 319 aa, Arabidopsis thaliana
MKLDVYNGTLPSLVSTTYSWTKTSSIIFLDQPVGTGFSYSRTQQFNKPSDSGEAKRIHEFLQRWLGKHQVFSSNPFYVAGDSYSGLVVPATVQEISKGNYECCNPPINLQGYVLGNPLTDYTTGSNSRIPFAHGMALISDELYESLKKTCKGEYTNVHPRNTQCLKFVEEFNKCTNRIFQQLILDPLCETETPDCYIYRYLLTTYWANDATVREALQINKESIGEWVRCYYSIPYNNDIKSSMPYHVNNSISGYRSLIYSGDHDFEVPYLGTQAWIRSLNYSIIDDWRPWMVKNQIAGYTRTYANKMTFATIKASLSFF

SEQ ID NO: 3730 - protein, 219 aa, Glycine max
MEAEHHHQTSNAGGIIGGLYVKVMTDDQMELLRQQISVYATICQQLVEMHKAVTIQQDLAGLRLGNLYCDPLMACSGHKITARQRWTPTPLQLQVLERIFDEGNGTPSKQKIKDITIELGQHGQISETNVYNWFQNRRARSKRKQLTPALNVVEPEVETEVEVESPKEKKTRAEGFQVQPYEKSSPHRIKDMYIQSPDIGFDQLMSKIEVAGCYSSYFL

SEQ ID NO: 3731 - protein, 471 aa, Listeria monocytogenes str. 1/2a F6854
MHTNTGFPADFLWGGAAAANQFEGAYNVDGKGLSVQDVTPKGGFGHITDGPTPDNLKLEGIDFYHRYKDDVKLFAEMGFKVFRTSIAWSRIFPNGDETEPNEAGLQFYDDLFDELLAHNIEPLITLSHYETPLHLSKTYDGWVNRKMIDFYENYVRTVFNRYKGKVKYWLTFNEINSILHAPFMSGGISTSPDKLSQKDLYQAVHHELVASALATKIGHEIMPEAQIGCMVLAMPTYPLTSHPDDIIAVMEAERKNYFFSDVHVRGTYPGYMKRYFRENNIELDVTEEDLEILKNTVDFISFSYYMSTTETADESKRKAGAGNILGGVQNPYLEASEWGWQIDPQGLRVVLNEFWDRYQKPLFIVENGLGAIDQLEQDENGNYTVNDDYRINYLSAHLSQVKEAIKDGVDLMGYTSWGCIDLVSASTAEMKKRYGFIYVDRNNDGTGTLNRYKKKSFDWYKNVIATNGEDL

SEQ ID NO: 3732 - protein, 544 aa, Thiomicrospira crunogena XCL-2
MAKDVRLGLDAREKMVEGINVLADAVKVTLGPKGRNVVLEKSFGAPTVTKDGVSVAREIELEDKFMNMGAQMVKEVSSQTNDVAGDGTTTATVLAQSIVREGMKSVAAGMNPMDLNRGIHKAVEAVVKEIQKMSVPCTTTESIAQVGTISANSDSAVGKMIAEAMEKVSTEGVITVEEGSSLHDELVVVEGMEFDRGYLSPYFVTNQEKMVAELDNPYILLHDKKISNIRDLLPTLEAVSKAGRPLLIIAEDVDGEALATLVINNMRGIVKATAIKAPGFGERRKAMLQDMAVLTGGTVISEEVGLTLENVTLDMLGETKSAVVGKDSTKLIDGAGAKADIEARCAQIRSQAENTTSEYDSEKLQERLAKLAGGVAVIKLGAATEVEMKEKKDRVDDALHATRAAVQEGIVAGGGVALVRARSKVKVKGDNDEQQLGIEIALRAMEEPMRQIAANCGLEGSVIVNKVMESKDNMGFDAASETYVDMIKAGIIDPAKVTRSALQNAASVAGLVLTTGAAIADLPSKDGASADAAAGGMGGMGGMM

SEQ ID NO: 3733 - protein, 257 aa, Anabaena variabilis ATCC 29413
MQVIRLAALSDNYIFLLHDSQKNIAAVVDPAEAEPVLKQLAQLNAELVAIFNTHHHNDHVGGNQQLIQNFPQLKVYGGAEDKGRIPGQQVFLQPGDRVQFTDRVAEVIFVPGHTRAHIAYYFPPQTADTPGELFCGDTLFAGGCGRLFEGTPAQMVESLTKLRSLPENTRVWCAHEYTLKNLQFALSVDSENTELQKRFDEVKTKRSQGIATVPSLLGVEKLTNPFLRWEQPSLQSAVNSNDPVQTFARIRGLKDKF

SEQ ID NO: 3734 - protein, 548 aa, Buchnera aphidicola (Pterocomma populeum)
MAAKDVKFGNEARIKMLRGVNVLADAVKVTLGPKGRNVVLDKSFGAPSITKDGVSVAREIELEDKFENMGAQMVKEVASKANDAAGDGTTTATLLAQSIVNEGLKAVAAGMNPMDLKRGIDKAVISAVEELKNLSVTCSDSKAITQVGTISANADEKVGSLIAEAMEKVGNDGVITVEEGTGLQDELEVVKGMQFDRGYLSPYFINKSETGIVELENPYILMADKKISNIREMLPILESVAKSGKPLLIISEDLEGEALATLVVNSMRGIVKVAAVKAPGFGDCRKAMLQDISILTNGTVISEELAMELEKSTLEDLGQAKRVVISKDTTTIIGGVGEKHAIQARINQIRQEIQDASSDYDKEKLNERLAKLAGGVAVLKVGAATEVEMKEKKARVEDALHATRAAVEEGVVAGGGVALVRVAGKLSNLRGQNEDQNVGIRVALRAMEAPLRQIVSNSGEEPSAVTNNVKDGKGNYGYNAATDEYGDMIDFGILDPTKVTRSALQYAGSVAGLMITTECMVTDLPKEDKSSDLGSAPAGGMGGMGGMM

SEQ ID NO: 3735 - protein, 547 aa, Buchnera aphidicola (Tetraneura caerulescens)
MAAKDVKFGNEARVKMLRGVNVLADAVKVTLGPKGRNVVLDKSFGAPSITKDGVSVAREIELEDKFENMGAQMVKEVASKANDVAGDGTTTATLLAQAIVNEGLKAVAAGMNPMDLKRGIDKAVINAVSELKQLSVPCLDSKAITQVGTISANADETVGTLISEAMEKVGNDGVITVEEGTGLEDELEVVKGMQFDRGYLSPYFINKPETGIVELENPYILMVDKKISNIRELLPILEAVAKSSKPLLIISEDLEGEALATLVVKSMRGIVKVAAVKAPGFGDRRKAMLQDISILTAGTLISEELAMDLEKSTLEDLGQSKRVVITKDTTTIIDGSGSKKDIKNRISQIKQQIQESTSDYDKEKLNERLAKLSGGVAVLKVGAATEVEMKEKKARVEDALHATRAAVEEGVVPGGGVALVRVAQKISKILGQNEDQNVGIRVALRAMEAPLRQIVSNSGEEPSVVTNNVKDGIGNYGYNAATDEYGDMIKFGILDPTKVTRSALQYAGSVAGLMITTECMVTDLPKEEKSDLSVPPQGGMGGMGGMM

SEQ ID NO: 3736 - protein, 469 aa, Bacillus cereus G9241
MVVAFLIGAGGMFAGMSLFGVNPAEVTQTISSGNASTAQGNLAKINEAYALIDSRYVEDVKDEKLVEGAIQGMLSTLKDPYSTYMDKETAKQFSESLDPELEGIGAEVNKTDGKLIIVSPIKGSPAEKIGIKPNDQILSVDGNSVKDLSREEAVLKIRGKKGTTVAIEIKRAGVADPIVFKIKREKIPIFTVFSSVKQESGKDIGYMQITSFAENTAKEFKDQLKELEKKNIKGLVIDVRGNPGGYLNSVEEILGEIMTDKKPMLQVEQRNGEKKKFSTELKERKPYPISVLIDNGSASASEILAGALKEGEGYDLIGEKTFGKGTVQQAVPFKDGSNIKLTMFKWLTPDGNWIHKKGIAPTVEVKQPDYYHATPIQIEKTLSYNSNDVQVKHAQEMLKSLGYVTGREDGYFSKETESALKAFQNANKMEATGQLDKKTAEAIQTKIIEKIRSGENDLQLQSALKLMAK

SEQ ID NO: 3737 - protein, 550 aa, Buchnera aphidicola (Thelaxes suberi)
MAAKDVKFGNDARVKMLRGVNVLADAVKVTLGPKGRNVVLDKSFGAPAITKDGVTVAREIELEDKFENMGAQMVKEVASKANDAAGDGTTTATVLAQSIVTEGLKAVAAGMNPMDLKRGVDKAVIAAVEELKCLSVPCSDFKAIAQVGTISANSDETVGKLIAEAMEKVGKEGVITVEEGTGLQDELDVVEGMQFDRGYLSPYFINKPDTGSIELDNPFILLADKKISNNREMLPPLESVAKAGNLLIIAEDVEGEALATLVVNTMRGIVKVAAVKAPGFGDRRKAMLQDIATLTGSTVISEEIGLELEKTTIEDLGHAKRVVINKDTTTIIDGIGNESAIKGRVVQIRQQIEEATSDYDREKLQERVAKLAGGVAVIKVGAATEVEMKEKKARVEDALHATRAAVEEGVVAGGGVALIRVAGKISSLTGENEDQNVGIKVAIRAMESPLRQIVINAGEEASVIANNVKAGKGNYGYNAYSEQYGDMIKMGILDPTKVTRSALQYAASVAGLMITTECMITDLPKSDSSDLSNAGNGGMGGGMGGMGGMM

SEQ ID NO: 3738 - protein, 553 aa, Buchnera aphidicola (Tuberolachnus salignus)
MAAKEVKFGNDARAKMLRGVNVLADAVKVTLGPKGRNVVLDKSFGAPTITKDGVSVAREIELEDKFENMGTQMVKEVASKANDAAGDGTTTATVLAQSIITEGLKAVAAGMNPMDLKRGIDKAVIAAVEELRKLSVPCSDSKAIAQVGTISANSDLTVGKLIAEAMGKVGKEGVITVEEGTGLQDELDVVEGMQFDRGYLSPYFINKPESGAVELENPFILLADKKISNIRELLPILEAVAKAGKSLLIIAEDVEGEALATLIVNTMRGIVKVAAVKAPGFGDRRKAMLQDIATLTGGTVISEEIGLELEKTILDDLGQAKRVVINKDTTIIIDGIGNEINIKGRIAQIHQQIEEATSDYVKEKLQERVAKLADGVAVIKVGAATEVELKEKKGRVEDALHATRAAVEEGVVAGGGVALIRVAGKISNLTGDNEDQNVGIKVALRAMESPLRQIVINAGEEASVIANNVKACEGSYGYNAYTEEYGDMISMGILDPTKVTRSALQYAASVAGLMITTECMITDLPKGETPDLNNSGGMGGGMGGGMGGMGGMM

SEQ ID NO: 3739 - protein, 149 aa, Xanthomonas oryzae pv. oryzae KACC10331
MPGHTRTHIAFVTDRHLFSGDTLFSLGCGRMFEGTAPQMFDSLQRLACLPGETLVCCGHEYTLANAAFALHVDSTNAALQRRQQEAQAMRHAARPTLPISLKSELATNPFLRTNRPEIRAVVAARAAGALSSEVDVFAELRRWKDEFCL

SEQ ID NO: 3740 - protein, 316 aa, Yarrowia lipolytica CLIB122
MSFKLASGKSMPKVGFGLWKVPRDKTADTVYGAIKNGYRLFDGAFDYQNEREAGEGIRRAIKDGLVKREDIFITTKLWNTFHSKEHALQIAKEQNEWWGLDYIDLYLIHFPIPMQYIPISEKEWAGWTNATDSGPNPLAKIPTRETWEALEELVDTGIAKSIGVSNFTAQNIYDVQTYNKHPISALQIEHHPYLVQPQLTQLAKDNNIQVTAYSSFGPASFVEIGMDQKVPPLFENETITKIAKAHNKTPSQVLLRWATQRGIAVIPKSNNVERQTQNLESLDFDLTEAEIKEISNLNKNLRFNDPGVYANLPIFA

SEQ ID NO: 3741 - protein, 488 aa, Listeria seeligeri
MTDRRNLTTNQGVPMGDNQNSMTAGLKGPTLLEDYVLIEKLAHFDRERVPERVVHARGAGAHGKFVTKKSMKKYTKAQFLQEEGTETEVFARFSTVIHGQHSPETLRDPRGFSVKFYTEEGNYDFVGNNLPVFFIRDAIKFPDVIHSLKPDPHTNIQDGNRYWDFFSLTPEATTMITYLFSDEGTPASYREIRGSSVHAFKWINEEGKTVYVKLRWVPKAGIVNLSTDQAAQIQAKEFNHASRDLYEAIENGDYPEWDLYVQVLDPKDLDNYDFNPLDATKDWFEDVFPYEHVGTMTLNRNPDNIFAETESVGFNPGVLVPGMLPSEDRLLQGRLFSYSDTQRHRVGPNYLQLPINSPKTPVANNQRDGQMPFKQQTSSINYEPNSYDTEPKENPAYIEPEQEIRGDISGRLAAEKPNNFGHAKEVWNRYSDAERAALVKNIVDDWQGVREDIKVRNLRNFYQVEPEFAERVAAGTGINLAEHVIDLK

SEQ ID NO: 3742 - protein, 467 aa, Listeria innocua Clip11262
MTSVMWFRRDLRVNDNKALYHACKEEDLILLFQVNPEQFIKGSPSHQAFFASVAHFQQELNKNTHLQIMFGEPIELLKQLKEKIPTWDKVFFNRDETGYGASRDEAARAFFADKEITVHSYHDSYLHSAEEVKKSATEYYKIFTPYYKKWREEIKEMPLKVTLKPEKIRKESLFPNYEEQFRELIQDLPAFDSGEKAANTRLANFVKEDLADYDKARDVPALDKTSHLSRYLRTGEISIRTVWQALQKEEATEGRATFEKELCWRDFYNMIYVSFPKQKNEPIQENYRFIEWENNREFFKKWQDGQTGFPLVDAAMRQLKETGWMHNRLRMITASFLTKDLLIDWRFGEKYFQQMLIDYDPASNIGGWQWAASTGTDAVPYFRIFNPTTQSEKFDPDGTFIRKYVKELRDLPDKFIHQPEKMSETEQKEHGLILGKDYPLPIIDHKERRKLAIARYEFSKEHSRGNI

SEQ ID NO: 3743 - protein, 365 aa, Escherichia coli O157:H7 EDL933
MSSEKLYSPLKVGAITAANRIFMAPLTRLRSIEPGDIPTPLMAEYYRQRASAGLIISEATQISAQAKGYAGAPGIHSPEQIAAWKKITAGVHAENGHMAVQLWHTGRISHASLQPGGQAPVAPSALSAGTRTSLRDENGQAIRVETSMPRALELEEIPSIVNDFRQAIANAREAGFDLVELHSAHGYLLHQFLSPSSNHRTDQYGGSVENRARLVLEVVDAGIEEWGADRIGIRVSPIGTFQNTDNGPNEEADALYLIEQLGKRGIAYLHMSEPDWAGGEPYTDAFREKVRARFHGPIIGAGAYTVEKAETLIGKGLIDAVAFGRDWIANPDLVARLQRKAELNPQRAESFYGGGAEGYTDYPTL

SEQ ID NO: 3744 - protein, 468 aa, Thermotoga maritima
MGSSHHHHHHSSGLVPRGSHMASNVKKFPEGFLWGVATASYQIEGSPLADGAGMSIWHTFSHTPGNVKNGDTGDVACDHYNRWKEDIEIIEKLGVKAYRFSISWPRILPEGTGRVNQKGLDFYNRIIDTLLEKGITPFVTIYHWDLPFALQLKGGWANREIADWFAEYSRVLFENFGDRVKNWITLNEPWVVAIVGHLYGVHAPGMRDIYVAFRAVHNLLRAHARAVKVFRETVKDGKIGIVFNNGYFEPASEKEEDIRAVRFMHQFNNYPLFLNPIYRGDYPELVLEFAREYLPENYKDDMSEIQEKIDFVGLNYYSGHLVKFDPDAPAKVSFVERDLPKTAMGWEIVPEGIYWILKKVKEEYNPPEVYITENGAAFDDVVSEDGRVHDQNRIDYLKAHIGQAWKAIQEGVPLKGYFVWSLLDNFEWAEGYSKRFGIVYVDYSTQKRIVKDSGYWYSNVVKNNGLED

SEQ ID NO: 3745 - protein, 696 aa, Ipomoea batatas
PPGLGQRIYEIDPLLKNFRDHLDYRFSHYRKIREAINQYEGGLEVFSRGYEKLGFTRSATGITYREWAPGATWATLIGDFNNWNPNADVMTRNEFGVWEISLPNNADGSPAIPHGSRVKIRMDTPSGIKDSIPAWINFSVQAPGAIPYDGIYYDPPEEERYKFQHPRPKRPKSLRIYECHIGMSSPEPKINTYAEFRDDVLPRIKKLGYNALQIMAIQEHSYYASFGYHVTNFFAPSSRFGTPDDLKSLIDRAHELGLVVLMDIVHSHASNNTLDGLNMFDGTDSCYFHSGTRGYHWMWDSRLFNYGNWEVLRYLLSNARWWLDEYKFDGFRFDGVTSMMYTHHGLSVGFTGNYSEYFGYATDVDAVVYLMLVNDLIHGLFPEAITIGEDVSGMPAFCIPVRDGGVGFDYRLHMAIPDKWIEILKRRDEDWQMGEIVHTLTNRRWLEKCVSYAESHDQALVGDKTIAFWLMDKDMYDFMALDRPATPVIDRGIALHKMIRLITMGLGGEGYLNFMGNEFGHPEWIDFPRGEQRLPDGSVLPGNNFSYDKCRRRFDLGDADYLRYRGMQEFDQAMHHLEEKYGFMTAEHQYISRQDEGDRVIIFERGDLVFVFNFHWTNSYSDYRVGCLKPGKYKVALDSDSPLFGGFGRVQPDAEFFTFEGYHDDRPRSFMVYAPSRTAVVYALAKEEDEAKPVEE

SEQ ID NO: 3746 - protein, 558 aa, Bacteroides fragilis YCH46
MCGIAGIFNIKIQSRELRNKALRMARKIRHRGPDWSGMYCGGSAILAHERLSIVDPQSGGQPLYSSDRKQVLAVNGEIYNHRDIRAQYAGRYEFRTGSDCEVILALYRDKGIHFLEELNGIFAFALYDEEKDEYLIARDPIGVIPLYIGKDAEGHVYFGSELKALEGFCDEYEPFLPGHYYHSKERTMKRWYTRDWMEYKEENDKQADSRSPTRQIQDALENAVHRQLMSDVPYGVLLSGGLDSSVISAIAKKYAAKRIETDGASDAWWPQLHSFAIGLKGAPDLIKAREVAEYIGTVHHEINYTLQEGLDAIRDVIYFIETYDVTTVRASTPMYLLARVIKSMGIKMVLSGEGADEIFGGYLYFHKAPDARAFHEETVRKLSKLHLYDCLRANKSLAAWGVEGRVPFLDKEFLDVAMQLDPEIKMAPGKVIEKKVLREAFADMLPSGIAWRQKEQFSDGVGYSWIDTLKEITATAVSDEQMAHAAERFPIHTPMNKEEYYYRSIFEEHFPSESAARSVPSIPSVACSTAEALAWDTTFKNLNDPSGRAVKGVHEEAY

SEQ ID NO: 3747 - protein, 192 aa, Chara globularis
MGRAKIEIKRIDNATSRQVTFSKRRNGLLKKAYELSVLCDADIAVIMFSPTGKLFEYANSSMKEILDRYHSCPPEQREKRKFDNTDYLSKEAKRLRHEVELAKQENRHLSGEDLNAVQMPELDGLELKLEDALRKIRFRKREVMQMEIDRLQQKVWTSSPQFLLAWRSCHPAVVQIIIFCSHPAFVPKFILQ

SEQ ID NO: 3748 - protein, 435 aa, Arabidopsis thaliana
MANNNVYSVLKSLLLLLHLVFLSKQHVDSASIVKFLPGFEGPLPFELETGYIGVGEEEEVQLFYYFIKSERNPKEDPLLLWLTGGPGCSAISGLLYQNGPLAMKLDVYNGTLPSLVSTTYSWTKTSSMIFLDQPVGTGFSYSRTQLFNKPSDTGEAKRIHEFLQKWLGKHQEFSSNPFYVGGDSYSGLVVPATVQEISKGNCQCCNRPINLQGYVLGNPLTDCVYDCNYRVPFAHKMALISDELYESLKRTCRGEYVNVHPHDTECLKFVEEFNKLTNRVCERHILHSCCETETPSCYSYRFMLTTYWANDETVRKALQINKEDLRLQESIGEWTRCYRGIPYNHDIKSSVPYHMNNSIDGYRSLIYSGDHDIQVPFLGTQAWIRSLNYSIIDDWRPWMIKDQIAGYIRGGGHTAEFTPKETFMMFQRWINGQPL

SEQ ID NO: 3749 - protein, 289 aa, Salmonella typhimurium LT2
MEYSILSNNLKMPMVGFGVFKVTDKEECQQSVLSAIRSGYRLIDTAAVYGNEDAVGDAVREAIATGLCTREELFITSKLWVQDMANYDLAKAGIEASLKKSGLDYFDLYLLHQAMGDYFSAWRALEDAYEAGKLKAIGVSNFYAHVLANFCETVRITPMVNQVELHPYFAQPAALETMKHYNVQPEAWAPLGGGRHKPYENVMLQGIADAHQKTIAQVVLRWNVQRGVTVIPKSTRQERIEENFAIWDFSLTDNEMAQINALDLGYVGEAVKHFNPEFVRGCLGVKIHD

SEQ ID NO: 3750 - protein, 953 aa, Bacteroides fragilis YCH46
MKYLTFPFLLLLLPLIGFGCSSEEKETDSLILSSDSEIFFEQGIDFAATSGTRNLSFSSGRPWRISLTTDTDTRRAADWCTVSPSSGTAGDASVTISIQENADYDSRSVKLTLVAGGIEKSFTVSQKQKDALTLTASRFEVGKEGGTVQVEVKANITFEVEIPEVDRSWISQANTRGLVVTNLAFTVAPNEGVAGREGEIVIRSGSLSEKIRITQEGRCDDGLSFRPETPDADRQLTLYFKATKTSPLYGYAGDVYVHTGVVSEGTWMYVPAEWNTNVDKCKMVRVADNIWSITLAPSIRQWFGSNETPVRQLGVVIRSADGSKKGTDGDSFVSVTDHLYKPFEPAAVRYASMPSGLQEGINLIDASTVTLVLYDKDKKGGHKDFAHVVGDFNDWKLSNESNSQMNRDDAAGCWWITLTGLQPTREYAFQYYVGTRAGEILRLADAYSRKILDPDNDKYIPSSTYPDAKEYPTGAVGIASVFKIQGDSYDWKVKNFRIPDKNNLMIYELLLRDFTATGDLNGAMEKIGYLKSLGFNAVELMPVQEFDGNDSWGYNPCFYFALDKAYGTDHMYKAFIDKCHEAGMAVLFDVVYNHASGSHPFARLYWDTKNNRTAADNPWFNVKEPHPYGVFHDFNHDSPLVRAFVKRNLKFLLEEYRIDGFRFDMTKGFTQNSSTEATAGSYDASRIAILKDYNETVREVNPEAVVILEHFCDEKEESELAEEGMQLWRNLNHAYCQSAMGYPSNSDFTPLVTFGTTMPYGGWVGFMESHDEERTAFKQIAYGEGPLKSDINVRMKQLAANASFFFTAPGPKMVWQFGEMGYDVSIEEGGRTGRKPLHWEYLDNEARKGLCNTYAKLLKLRREHSELFNPGSTFSWLVKTANWTGGRFLTLAATNGKRLVVVGNFTAKPIEAITSFPVTGVWTNYLDGTKLHVTSIPTGLTIPAHECRVYINF

SEQ ID NO: 3751 - protein, 488 aa, Rhodobacter sphaeroides 2.4.1
MTRMTTTAGAPIADNQNTLTAGPRGPVLLEDYQLIEKLAHQNRERIPERVVHAKGWGAFGTFTVTNDITRYSCAKVFSEVGKQTDLAVRFSTVAGELGAADHERDVRGFSVKMYTEEGNWDLAGNNTPVFFVRDPMKFPDFIHTQKRHPRTNLRSATAMWDFWSLSPESLHQVTILMSDRGLPVDPMHMNGYGSHTYSLWNAQGERFWVKFHWKTLQGHAHYTNAEAAEIVGRTREGYQEALFGAIEEGRFPKWRLMVQVMPEAEAETTPYNPFDLTKVWPHSDYPLIEVGVMELNRNADNYFAQIEQLAFSPSNKVPGIGYSPDKMLQARVFSYADAHRYRLGTHYEALPVNAPRCPVHHYHKDGQMNFFGHRTGAVDAYYEPNSVPGAAVEDPAVAEPPLRISGDAARYNHREGNDDYSQPRALHDKVMTDEQRARLYANIAEAMAGIPEEIANRAIAQFDRVSPAYGEGIRAARARLAGALQAAE

SEQ ID NO: 3752 - protein, 492 aa, Prunus persica
MGSSSATSNRLLLSKIATSEGHGENSPYFDGWKAYDRNPFHPTKNPEGVIQMGLAENQLSFDLIEDWIKKNPKASICTPEGVEEFKNVAIFQDYHGFPEFRKAVAMFMSKARGGRVTFDPNRVVMSGGATGANELVMFCLADPGDAFLVPSPYYPAFYRDLGWRTGVQIVPVDCDSSNNFQITKEALAAAYEKAQKNNINVKGLIITNPSNPLGTTLDRDTLESLVEFINQKNIHLVCDEIYAATVFSSPTFTCISEVIQNMNCNPNLIHIVYSLSKDMGLPGLRVGIVYSYNDDVVNIGRKMSSFGLVSSQTQHMLASMLLDEEFVARFLETSSKRLARRHGVFTKGLEEVGINCLKSNAGLFCWMDLRRLLKDRTFDGEMVLWRVIVNEVGLNVSPGSSFKCVEPGWFRVCFANMDDETVEVALKRIRTFVRQGKKAQDQAVQVKSPKRWKSNLRLSFSSSSTRRFDQDSVNVLSPHMMSPHSPLVRAKT

SEQ ID NO: 3753 - protein, 336 aa, Coleochaete scutata
MGRGKIEIRRIENATSRQVTFSKRRNGLLKKAYELSVLCDVDIAVIVFSPTGKLFQYASSSMKEILERYEQVPPEQKEKGSQRLDNMDYLNREVAKLRNEVEHKYHEARQLEGEDLDRLGVYELEQLEQKLSNSMRRIRGRKDELMKAELEGLRKQVADMETALVGAASFDGRPLSGSSNYLLQSIPGIRTMPPSSLGGMNPASTSLQLGSDRLFGNRGVELHDRSASDESPVMTNRMSVDFAQAPREMSGVDLSGSPVPPWKSQAAAAAQQEWKNQASSPTDWKVTNTEHLDSWPKAPAPTPEWKSTSVQPEWKNQSSPSSEWKPLDWMYHGPQD

SEQ ID NO: 3754 - protein, 34 aa, Glycine max
LHFGVNSAATRFAIERQAVNEATFRCPDEMGWKP

SEQ ID NO: 3755 - protein, 630 aa, Mesorhizobium loti
MCGIFGIVLKNEGTPVCAAAVERCADALAHRGPDASGLYINQSVAFAHRRLSIVDAHSRANQPYRDANTGVVVTYNGEIFNYREIKAELRDMGFSFSTVSDTEVLILSYIAWGKSFLNRLDGIFAFALFDPRKSLVLIARDRLGVKPLYYTICDVGLLFASQPNALIRWPGVMHGPDMIGALSFLSYRAVVGARTLFAGISKLEPGHLLEIRNGRHTSERWWNLSARISRSKPDYSDIRRLFGSAVERQLVADVPVAALLSGGLDSSILAYEASARSQIRPVCYTGKVETPDYDETAYAMEVAAEFGLTHRVVPIGEPSDINAVAELVRLRGHPLGMHNETAMFTLAKAISKEHKVVLTGEGADEIFAGYSRLFRTPYDYNRSKIITALPPALAQIARRRLGLGVHCSQLQFFLERYSYFPADEIRSLAIDGQMRTEHEMELFDHFSTQFAEAGGDFFSKISYVLVSTHLPALLEMVDNTTMAAGLEARVPYTDHQLVTAAMAMPGSQRLRWRSPIASAQALWHPVASFSERLDVSKYPLRREYRSVLPKSVLSRKKMGFPLPLGQWAVGEGATEYRRLLFDKDSPLGDLFDPAALRRWFKAGRRNPSDSFGRKFWLLANLGIFFKEVFS

SEQ ID NO: 3756 - protein, 216 aa, Phaseolus coccineus
MESGGFHGYRKLPNTTSPGLKLSVSDMNNVNTSRQVAGDNNHTADESNECTVREQDRFMPIANVIRIMRKILPPHAKISGDAKETIQECVSEYISFITGEANERCQREQRKTITAEDVLWAMSKLGFDDYMEPLTMYLHRYRELEGDRTSMRGESLGKRTIEYAPMGVGVATAFVPPQFHPNGYYGPAMGAYVAPPNAASSHHHGMPNTEPNARSM

SEQ ID NO: 3757 - protein, 551 aa, Buchnera aphidicola (Chaetophorus leucomelas)
MAAKDVKFGSEARAKMLRGVNILADAVKVTLGPKGRNVVLDKSFGAPSITKDGVSVAREIELEDKFENMGAQMVKEVASKANDVAGDGTTTATLLAQSIVNEGLKAVAAGMNPMDLKRGIDQAVIKAVKELKKLSVPCSDSKAITQVGTISANADETVGSLISEAMDKVGNDGVITVEEGTGLEDELDVVKGMQFDRGYLSPYFINKPETGNIELENPYILMVDKKISNIRDILSLLESVAKSGKPLLIIAEDLEGEALATLVVNSMRGIVKIAAVKAPGFGDRRKAMLQDISILTFLYNSDVISEELAMDLDKTTLEDLGQAKGVVITKDHTIIVGSGKKEIFKQILIRQQLIESTSDYDKEKLNERLAKLSGGVAVLKVGAATEVEMKEKKARVEDALHATRAAVEEGVVAGGGVALVRVAEKISRLKGQNEDQNVGIRVAVRSMEAPLRQIVANSGEEPSVVTNNVKDGVGNYGYNAATDQYGDMIKFGILDPTKVTRSALQYAASVAGLMITTECMVTDSPKEDKSSDMPSPSAGGMGGMGGMGGMM

SEQ ID NO: 3758 - protein, 488 aa, Listeria seeligeri
MTDRRNLTTNQGVLIGDNQNSMTAGLKGPTLLEDYVLIEKLAHFDRERVPERVVHARGAGAHGKFVTKKSMKKYTKAQFLQEEGTETEVFARFSTVIHGQHSPETLRDPRGFSVKFYTEEGNYDFVGNNLPVFFIRDAIKFPDVIHSLKPDPRTNIQDGNRYWDFFSLTPEATTMITYLFSDEGTPASYREIRGSSVHAFKWINEEGTTVYVKLRWVPKAGIVNLSTDQAAQIQAKEFNHASRDLYEAIENGDYPEWDLYVQVLDPKDLDNFDFNPLDATKDWFEDVFPYEHVGTMTLNRNPDNIFAETESVGFNPGVLVPGMLPSEDRLLQGRLFSYSDTQRHRVGPNYLQLPINSPKTPVANNQRDGQMPFKQQTSSINYEPNSYDTEPKENPAYIEPEQEIRGDISGRLAAEKPNNFGHAKEVWNRYSDAERAALVKNIVDDWQGVREDIKVRNLRNFYQVEPEFAERVAAGTGINLAEHVTDLK

SEQ ID NO: 3759 - protein, 308 aa, Neurospora crassa
MADHTEVDLDSIIDRLLEVRGSRPGKQVQLLEAEIRYLCTKAREIFISQPILLELEAPIKICGDIHGQYYDLLRLFEYGGFPPEANYLFLGDYVDRGKQSLETICLLLAYKIKYPENFFILRGNHECASINRIYGFYDECKRRYNIKLWKTFTECFNCLPIAAIIDEKIFTMHGGLSPDLNSMEQIRRVMRPTDIPDCGLLCDLLWSDPDKDITGWSENDRGVSFTFGPDVVSRFLQKHDMDLICRAHQVVEDGYEFFSKRQLVTLFSAPNYCGEFDNAGAMMSVDESLLCSFQILKPAEKKQKFGRR

SEQ ID NO: 3760 - protein, 547 aa, Actinobacillus pleuropneumoniae serovar 1 str. 4074
MAAKDVKFGNDARVKMLKGVNVLADAVKVTLGPKGRNVVLDKAYGAPTITKDGVSVAREIELEDKFENMGAQMVKEVASKANDAAGDGTTTATVLAQAIVNEGLKAVAAGMNPMDLKRGIDKAVVAVVEELKAISKPCETSKEIEQVGTISANSDETVGKLIAQAMEKVGKEGVITVEDGTGLDDALDVVEGMQFDRGYLSPYFINKPEAGTVELENPYIILVDKKISNIREILPVLEAVAKAGKPLLIVAEDIEGEALATLVVNTMRGIVKVAAVKAPGFGDRRKAMLQDIAILTAGTVISEEIGMELEKATLEELGQAKRVVITKDNTTIIDGIGDEAQIKARVAQIRQQIEDSTSDYDKEKLQERVAKLACGVAVIKVGAATEVAMKEKKDRVDDALHATRAAVEEGIVPGGGVALVRAASKVAATLTGDNEEQNVGIKLALRAMEAPLRQIVTNAGEEASVVARNVKDGNGNYGYNAGTEQYGDMLEMGILDPTKVTRSALQFAASIAGLMITTECMITDLPKEEKLDPAAAMGGMGGMGGMI

SEQ ID NO: 3761 - protein, 488 aa, Listeria seeligeri
MTDRRNLTTNQGVPIGDNQNSMTAGLKGPTLLEDYVLIEKLAHFDRERVPERVVHARGAGAHGKFVTKKSMKKYTKAQFLQEEGTETEVFARFSTVIHGQHSPETLRDPRGFSVKFYTEEGNYDFVGNNLPVFFIRDAIKFPDVIHSLKPDPRTNIQDGNRYWDFFSLTPEATTMITYLFSDEGTPASYREIRGSSVHAFKWINAEDKTVYVKLRWVPKAGIVNLSTDQAAQIQAKEFNHASRDLYEAIENGDYPEWDLYVQVLDPKDLDNFDFNPLDATKDWFEDVFPYEHVGTMTLNRNPDNIFAETESVGFNPGVLVPGMLPSEDRLLQGRLFSYSDTQRHRVGPNYLQLPINSPKTPVANNQRDGQMPFKQQTSSINYEPNSYDTEPKENPAYIEPEQEIRGDISGRLVAEKPNNFGHAKEVWNRYSDAERAALVKNIVDDWEGVREDIKVRNLRNFYQVEPEFAERVAAGTGINLAEHVTDLK

SEQ ID NO: 3762 - protein, 299 aa, Arabidopsis thaliana
MGDKNKDDSSSQSKAVRKEKRAFLFRKWTRVDVMRVSAVGAVHLLCLLAPFNYTWEAFRFAAMVGISTNLSITFSYHRNLTHRSFKLPKWLEYPFAYSALFALQGHPIDWVSTHRFHHQFTDSDRDPHSPIEGFWFSHVFWIFDTSYIREKCGGRDNVMDLKQQWFYRFLQNTIGLHILTFWILVYLWGGLPYLTWSVGVGGAIGYHATWLINSACHIWGSRAWNTKDTSRNIWWLGPFTMGESWHNNHHAFEASARHGLEWYQVDLTWYLIWFFQVLGLATDVKLPTDAQKRKMSLAR

SEQ ID NO: 3763 - protein, 365 aa, Cryptococcus neoformans var. neoformans JEC21
MQPGPSKDILRFTGHRHLRQRILLSILSGKSMRIDGIRSDDVHVGLRDYEVNLLRLVEKVTNGSTIEISVTGTSFILHPGLLPGGSFNHSCHIGRSIGYYLEVLLPLAPFCKKPFNITLYGVTGEEGRDMTVDMIRTVTLPHLHLFGISDGLELQIKKRGSAPLGGGQIFFKCPVVRQLNTLHFVDKGKIKKIRGVSYSTRVSPQFANRMVESARSVLNRYVPDVYLYTDVYKGDDSGKSPGYGLTLVTQSTTSAVHAAESLSVAGEVTTPEDVALFASRLLLEELSRGGCIDSKHQWLVALLMALGKEDVSKCLFGSLTPYTVQFFRDMFTFFGTKYKISEESSGEVLVSCIGIGYSNVNKSMA

SEQ ID NO: 3764 - protein, 234 aa, Hyacinthus orientalis
MGRGKIEIKRIENTTNRQVTFCKRRNGLLKKAYELSVLCDAEVALIVFSTRGRLYEYSNNSIKSTIERDKKACADSSSSSAVIEVNTQRYYQQEASKLRQQIQILQNANRHLMGESLDPLNVKELKQLETRLERGITRVRSKKHELLFAELEYMQKREVELQTDNMYLRAKIGENERAHQASVVQAGTEFDALPTFDSRNYYQVHMLQAASHYSHHQDQTALHLGYETKADPSA

SEQ ID NO: 3765 - protein, 495 aa, Ustilago maydis 521
MTARRYTQGVRCSTGDAVDGRVRGRDKKGKAKQMSAEDAVGLQGQMRRPVSSMSGLAWRPTGVVRTASMWSKRRCLVDARWTGWLLSHGVHTFTGAMNAARTSSARSSSVSSTGPSTSPTAPVAPASSSPYSPATPASLAGLGTTQLSPDIMLRCTIFDSTGSATSTSGVFKKSRLCSDHGLEPRDLRKIDSRVPNLVPTILVRRGGILVNILHIRAMIKKDKVLLFDSYGSTDSQLHSAFVYNLQHNLRPPHQNAHQHTSTSSSPGALAYEFRALESILVSVLDALRIELGVVRGWTSEVLEQLDDDVDRDKLRTLLQVSRKLNAFLSRSKAVKNAVVEVLENDEDMQLMHLSSIPPSASTDKGCASSNDAHTSSANTSSSCDATASNDGSQAMDELELLLESFDKQVEEVVAETTQLHSDMTNTQEVVELILDNNRNKLLALDLKTSIATMGISAGTLWAGLFGMNLKSHMEELDWAFAGTRKVAQGGLGHEG

SEQ ID NO: 3766 - protein, 745 aa, Shewanella sp. MR-7
MMTQAQTYFYDGSDVALLNGQYTDVFSLLGMHCINEGKALVVRCFLRNAQKVDVISLKDGRKVASLERVNEAGLFAGTLGRRVKPFLYALRVVYPLCELDIIDPYQFGSLLDSQDLYLFGEGGSEQAYRFLGANWRQVDSVEGVHFCVWAPNAKRVSVVGDFNHWDDTRHVMRQHMANGLWEIFLPDVAEGAHYKFDLVYQNGERHAKSDPMATQMECAPNNASIVPKKHQHPWADTQWMDKRATTAWHRAAMSIYEVQLGSWRRKGEFGEQYFDYQDLIEQLIPYVKEQGFTHIELMPVSEYPFDGSWGYQPVGLYAPTHRFGDANGLKAFIDACHQAEIGVLLDWVAAHFPKDPHGLVRFDGTCLYEHEDPRKGTHPDWDTLIYNYDRGEVRSFLLSNACYWLREFHLDGLRLDAVSSMLYLDYSREPGQWLPNAYGGRENLEAIHFLQMLNQRLYQAFPGICMIAEESTAFAGVTKPTDCGGLGFGFKWNMGWMNDSLSYLGRDPIYRQYHHNQLTFSLMYAYSEQFMLSISHDEVVHGKGSLLHKIPGDDWQKFATLRAYYGFMWGHPGKKLLFMGSEFAQRDEWNHNHSLDWHLLAFEPHQGVQRWLRDLNQLYRQFPALSVLDYESQGFRWLDCDNGRDSIFSFVRYGEGSDVPLVFVVNMTPTLHQGFRIGLPQGGDFCEYLNSDSHLYGGSNQGNAGKVIAEDLPWQGMASSALITVPPLGCLILGPATDAPRDTSL

SEQ ID NO: 3767 - protein, 464 aa, Lycopersicon pennellii
MARVTLFLLLLLVYGVVSEHFIVETLPGFHGKLPFTLETGYISVGEEEKVQLFYFFVQSERDPRNDPLMIWLTGGPGCSGLSSFVYEIGPLTFDYANSSGNFPKLELNSYSWTKVANIIFIDQPAGTGYSYANTSEAYNCNDTLSVTLTYDFLRKWLMDHPEYLNNPLYVGGDSYSGIFVALLTRKIYDGIEVGDRPRVNIKGYIQGNALTDRSIDFNGRVKYANHMGLISDKIYQSAKANCNGNYIDVDPNNILCLNDLQKVTRCLKNIRRAQILEPYCDLPYLMGILQETPTNGQSVFPIAGPWCREKNYIYSYVWANDKAVQKALNVREGTTLEWVRCNESMHYRGKERTESYVYDVPSVIDDHQHLTSKSCRALIYSGDHDMVVPHLSTEEWIETLKLPIADDWEPWFVDDQVAGYKVKYLQNDYEMTYATVKGAGHTAPEYKPEQCLPMVDRWFSGDPL

SEQ ID NO: 3768 - protein, 578 aa, Photobacterium profundum SS9
MYPNDVKIEEDHNAALKVKSDGNDEFTVFTSKLNQLLEDRHFSQANIIKAKEEAEKANAAKSSFLANMSHEIRTPLNGIIGMSGILSDTELNPSQAEYLQTIETSSQTLLLLINDILDLSKIESGNLVLSPHESNLAEVVYDTITIVQAKASEQGLNLQIQLDPELPTSVMLDEHRLRQVLMNLMSNAVKFTLQGSVTLSITYTDIGDKKASLLFSIKDTGIGIEKDKQQQVFAPFTQEDGSITRQFGGTGLGLAICRQLVELLGGSIELKSEKGVGSDFYFSLDVDVVKYQPKIISNFENKKCLLLSNQSSNAELIEIECKKWGLNVTISDIETAAVSGISQQYDLILYCQKTLNRTIKDIELFNRIQERPALVICSQLQDEQFDFGHTIDGLTILPLLGQRFVKAINSAFTNVLKNSEIQTKSALNPDSRLIDIKPVSINTTPVITESQDVILIVEDNIVNQKVASLLLKKAGYQIVVANNGQEAVDLITQKEPTLFKAILMDCMMPIMDGFAATEAIRLWEKEQHTDRLPIIALTASVLDEDISKCYEAGMDDYVAKPFRKEHLLDKLERLNEVA

SEQ ID NO: 3769 - protein, 355 aa, Rhodospirillum rubrum
MLATDRTTLAQFLVEECRGRAGDDSELLGLLLDVAQACKTISKMTAMGSLAGVHGYNGDVNPQGENQARLDLMSNQAFVRATERTGHAAGLASEEMEEVLGFPESYARGTLLLVFDPLDGSSNIDINGTVGSIFSILPMPRPGEAPQTADFLQSGRQQVAAGYALYGPSTMFVLTIGSGVHGFTLDPLLGDFILTHPSMTVIPESGEFAINSSNSRFWEPPIRAYVDELLAGRSGPRSKDYNMRWIAALVADVHRILLRGGIYLYPRDTKTPDLAGRLRLLYEAAPVAFLMEQAGGRCTTGTRTMLDLVPGSLHERVPLIFGSAVEVERVETLYREPQRREFATPLFNQRGLFRD

SEQ ID NO: 3770 - protein, 134 aa, Zea mays
MRKHRIVSLVSALLILLALAVSSTRNAQEDSMANNTGTLVGGIQDVPGSENDLHLQELARFAVDEHNKKANALLGFEKLVKAKTQVVAGTMYYLTIEVKDGEVKKLYEAKVWEKPWENLKGLQEFKPVEEGASA

SEQ ID NO: 3771 - protein, 436 aa, Photorhabdus temperata
MHLQNTWREEYIKCQTLYARHPLFTKIKVRLSMLAVKKSSKLDNVCYDIRGPVLKEAKRLEEEGNKVLKLNIGNPAPFGFEAPDEILVDVIRNLPTAQGYSDSKGLYSARKAIMQHYQARNMLDVSVEDIYIGNGVSELIVQAMQALLNTGDEMLVPAPDYPLWTAAVSLSSGKAVHYMCDEGSDWFPDLDDIRNKITPRTRGIVIINPNNPTGAVYSKALLLEIVEIARQHNLIIFADEIYDKILYDDAEHHSIAALAPDLLTVTFNGLSKTYRVAGFRQGWMVLNGPKKHAKSYIEGLEMLASMRLCANVPMQHAIQTALGGYQSISEFILPGGRLYEQRNRAWELINQIPGVSCVKPKGALYMFPKIDAKRFNVHDDQKMVLDLLLQEKVLLVQGTAFNWPEPDHFRIVTLPRLDELEMAIQKFARFIGKYHQ

SEQ ID NO: 3772 - protein, 495 aa, Pyrus pyrifolia
MASSASENRLLLSKIATNEKHGENSPYFDGWNKYNQNPFHLTENPEGVIQMGLAENQLSFDLVEEWIRKNPKASICTAEGIEKFRNVANFQDYHGLPEFRQAIATFMSKARGGRVTFDPHRVVMSGGATGANELVMFCLADRGDAFLIPSPYYPAFYRDLGWRTGVQIVPVDCDSSNNFKITKEALEAAYEKAQNNNINVKGLIITNPSNPLGTTLDKDTLESLVTFINQKNIHLVCDEIYAATVFSSPKFTCITEVIQNMNCNPNLIHIVYSLSKDMGFPGLRVGIVYSYNDDVVNIGRKMSSFGLVSSQTQHMLASMLSDEDFVEKFLTTSAKRLAKRHGVFTDGLEEVGINCLKSNAGLFCWMDLRRLLKDQTFDGEMVLWRVIVNEVKLNVSPGSSFKCVEPGWFRVCFANMDDDTVEVALKRIRAFVGQGKKAQEQAQVKSPKKRWQSNLRLSFSSSSRRFEQEGVSVMSPRMMSPHSPMPHSPLLRATT

SEQ ID NO: 3773 - protein, 280 aa, Glycine max
MEGSTTSSELPPGFRFHPTDEELIVYYLCNQATSKPCPASIIPEVDLYKFDPWELPDKTEFGENEWYFFSPRDRKYPNGVRPNRATVSGYWKATGTDKAIYSGSKHVGVKKSLVFYKGRPPKGAKTDWIMHEYRLAESKIPSSRKIGSMRLDDWVLCRIYKKKSMVKALEHKEAQPKVQIANLAAANQDVEQKMMNLPRTWSLAYLLDMNYLGPILSDGSYCPTLDFQINNANIEFDPFVKSQPVEMNYNYEADSGKYQVKQSSTIDQPIYVKQMYDLLG

SEQ ID NO: 3774 - protein, 424 aa, Xylella fastidiosa Ann-1
MSNSPQTPLVTRQRLSEVRYEIRGELARRARELEAEGRKLIKLNIGNPGAFGFRAPEHLQRAIADDMGRTDPYTHQQGLPIAREAIAAAYARRHYPDVDADRVFVGNGVSELIDLSLRALLNPGDEVLVPSPDYPLWSAATILNDGRPVYYRCAPENGFQPDAVEIETLVSSRTRAIVLINPNNPSGANYSQELLERIVAIAVKHHLLLLVDEIYDQILYDGAVFVPVAPLAGTHPCITFSGLSKVHRACGWRVGWALLSGSSIQVDNLRNAMDLLGALRLCANVPGQYAIDAAVNGPDTITPLCSPGGPLYETRRAVIDACAASEHLSLVVPAGALYAFPSVVGPAARHFDDYAFALELMNEEGVLVVPGSSFNVPYRDHFRVTLLPDAGLIREVFSRIDRALSRRAEVADKVVPLKSRSAAA

SEQ ID NO: 3775 - protein, 498 aa, Cryptococcus neoformans var. neoformans B-3501A
MGQGQSSKKLGRISSKQLPPPDLADSFARTSIADRDPNPPPPDAAKRRSSARDPLPPAHASPPSHAPAHSSGPARQNTPPSPAAVPTTQNIIAAPSQPSKSFLASSPPPPSAMPVSPAGTTRARSSSPPPSSSPAAASHLSRDSASSLSPGFALTQTVSRGSLGAGGAGFQILDVDNMIQRLLEAGYSGKVTKSPPLKNAEITSVCAAAREVFLSQPTLIELSPPVKIVGDVHGQYADLLRMFEMCGFPPAANYLFLGDYVDRGKQSLETILLLLCYKIKYPENFFLLRGNHECANVTRVYGFYDECKRRTNIKIWKTFIDVFNTLPIASIVASKIFCVHGGLSPSLKSMDDIRRIQRPTDVPDYGLLNDLVWSDPSDTALDWEDNERGVSFCYGKSVINAFLATHDMDLICRAHMVVEDGYEFYNDRTLVTVFSAPNYCGEFDNFGAVMSVSEDLLCSFELLKPLDGAALKKEMTKSKRKSLQAHQSPPNNPMAQSF

SEQ ID NO: 3776 - protein, 492 aa, Ipomoea batatas
MDPSKYRPSSSFNTPFCTTNSGAPVWNNTCALTVGSRGPILLEDYHLVEKIQNFTRERIPERVVHARGASAKGFFEVTHDITHLTCADFLRAPGVQTPLIVRFSTVIHERGSPETIRDPRGFAVKMYTRGGNWDLVGNNFPVFFIRDGTQFPDVIHAFKPNPKSHIQENWRILDYLSHLPESLNTFAWFYDDVGIPTDYRHMEGFGVHTFTMINKEGKANYVKFHWKPTCGVKCLLEEEAIRIGGENHSHATQDLYESIAAGNYPEWKLYIQVMDPDHEDRFDFDPLDTTKIWPEELIPLQPVGRMVLNKNIDNFFAENEMLAMDPAHIVPGIYFSDDKMLQARVFAYADTHRHRLGPNYMLLPVNAPKCAHHNNSYDGYMNFVHRDEEVDYFPSKFDNTRNAERFPTPLRIVTGQRDKCVIEKENNFKQPGDRYRSWAPDRQDRFINRWVKALSEPRVTHEIRSTWISYLTQADRSLGQKVASRLNIRPTM

SEQ ID NO: 3777 - protein, 149 aa, Clostridium thermocellum ATCC 27405
MFGIVPFGRRGMGVSRRGRDLFDIDSFFDDFFDDRFFPAFYGGNQIKVDIRENDKEYILEADIPGVDKENITVEVNGDVLTISAKWDEQTEIKKENYLRRERRASSMSRSFTLENVDSDRITAKHENGVLTLILPKKEPRSRGRRINIS

SEQ ID NO: 3778 - protein, 139 aa, Brassica napus
  misc_feature (128)..(128): Xaa can be any naturally occurring amino acid
MTDAHTARTIVGIIGNVISFGLFCSPIPTMIKIWKMKSVSEFKPDPYLATVLNCMMWSFYGLPFVHPDSLLVVTINGTGLFMELVYVTIFFIFATSAIRRKITIAMVVEMIFMAVVIFCTLYFLHTTXQRSMLIGIMCI

SEQ ID NO: 3779 - protein, 134 aa, Candida albicans SC5314
MLEFGVSFTAGGIFFFVFGIMTFFDSALLALGNVLFIIGITLIIGPQRTIAFFSRPTKLRGTICFILGILLILLKYAFIGFILESFGILGLFGDFFGTIVQFLRSIPYIGDVLSHPLIAPTIDRLAGISNTLPV

SEQ ID NO: 3780 - protein, 532 aa, Enterococcus avium
MAKDIKFSEDARAAMLRGVDKLADTVKVTLGPKGRNVVLEKSYGSPLITNDGVTIAKDIELDDHFENMGAKLVSEVASKTNDIAGDGTTTATVLTQAIVREGLKNVTAGANPMGIRRGIELATKAAVEELHSISKVVDSKDAIAQVAAVSSGSEEVGKLIAEAMEKVGNDGVITIEESKGIDTELDVVEGMQFDRGYLSQYMVTDNDKMEAALENPYILITDKKISNIQDILPLLEQVLQQSRSLLIIADDVDGEALPTLVLNKIRGTVNVVAVKAPGFGDRRKAMLEDIAILTGATVITEDLGLDLKEATIENLGTAGKVVVDKDNTTIVEGSGDKAALNDRVEMIKRQIGETTSDFDREKLQERLAKLAGGVAVVKVGAATETELKELKLRIEDALNSTRAAVEEGIVSGGGTALVNVIKKVSELEAEGDAATGIKIVVRALEEPVRQIAENAGFEGSVVIDKLKNADQGTGFNAASGEYVNMIDAGIVDPTKVTRSALQNAASVSALLLTTEAVVADKPVEGGAAAAPA

SEQ ID NO: 3781 - protein, 209 aa, Bacillus cereus G9241
MKWIQMPLGPLQTNAYILTNDQNECIIFDPGHEGEKLVTYLQEEQLKPLAVLLTHAHFDHIGAVDAVRDAFHIPVYVHKEEEDWLGDATVNGSQIFMMNRSITAKPADHIIDAEGTLAIGSFNFEVFETPGHSPGSISYYCKEASAVFSGDVLFQMSIGRTDLPGGSFAELIGSIEEKLFVLPDETAVLCGHGPETSIGFEKENNPFLQ

SEQ ID NO: 3782 - protein, 436 aa, Prochlorococcus marinus str. NATL2A
MLSSVKSLTKPLQRLFAVLISFGILFQVFTQPAFALNDGQLLVIEAWNQVNAGYLDPKKFDEIQWKKLRQKALEKPINNSQQAYSAIEAMLLPLGDPYTRLLRPVDYEAMKKSNIGSEINGVGLQLGARKEDGDIVVISPLEGSPASDAGITSGTIIKKVNGQSPKQLGLEATAAKLRGQTGTQVIVELEQPDNEIKEISLERRSVDLRPVRTKRIRNESHTFGYLRITQFSEGVPEQVKEALEELSGKDIDGLILDLRNNSGGLVSSGLAVADDFLSDMPIVETKKRDSINDPISSGLETIYDGPMVTLVNEGTASASEILAGALQDNKRSELIGNKTFGKGLIQSLTNLSDGSGLAVTVASYLTPSGRDIQNLGIDPDRLLEMPEPLNPGSDEDRWLLDAELIMQATLDKEEVSEKLSKETLVKEEQLISQEIE

SEQ ID NO: 3783 - protein, 531 aa, Enterococcus casseliflavus
MAKEIKFAEDARAAMLRGVDKLADTVKVTLGPKGRNVVLEKSYGSPLITNDGVTIAKEIELEDHFENMGAKLVSEVASKTNDIAGDGTTTATLLTQAIVREGLKNVTAGANPLGIRRGIEMATKVAVEELHNISSIVDSKEAIAQVGAVSSGSEKVGQYIADAMEKVGNDGVITIEESKGIETELDVVEGMQFDRGYLSQYMVTDNDKMEAALENPYILITDKKISNIQDILPLLEQILQQSKPLLIIADDVDGEALPTLVLNKIRGTFNVVAVKAPGFGDRRKAMLEDIAILTGGTVITEDLGLELKDATIDNLGQASKVVVDKDNTTIVEGAGEKEAIDARVQLIKNQIADTTSDFDREKLQERLAKLAGGVAVIKVGAPTETELKELKLRIEDALNATRAAVEEGMVSGGGTALVNVINKVAEIETDGDAATGVKIVLRALEEPVRQIAENADYEGSVIIDKLKNADLGVGFNAATGEWVNMLEAGIVDPTKVTRSALQNAASVAALLLTTEAVVADKPEPAAPAAPA

SEQ ID NO: 3784 - protein, 917 aa, Pseudomonas syringae pv. syringae B728a
MLTKLGIKGRVLLLTILPASLMAAMLGGYFTWMQLSELQSQLLQRGEMIAQDLAPLAANALGRKDKVLLSRIATQTLEQTDVRAVSFLDTDRTVLAHAGPTMISPSPIGSGSQLLSSTGTDATRYLLPVFGSQRHLTSPIIPAEADTLLGWVELEISHNGTLLRGYRSLFASLLLILTGLAFTATLAVRMSRTINGPMSQIKQAVSQLKDGNLETRLPPLGSRELDELASGINRMAATLQNAQEELQLSIDQATEDVRQNLETIEIQNIELDLARKEALEASRIKSEFLANMSHEIRTPLNGILGFTHLLQKSELTPRQFDYLGTIEKSADNLLSIINEILDFSKIEAGKLVLDNIPFNLRDLLQDTLTILAPAAHAKQLELVSLVYRDTPLALSGDPLRLRQILTNLVSNAIKFTREGTIVARAMLEDETEEHAQLRISVQDTGIGLSSQDVRALFQAFSQADNSLSRQPGGTGLGLVISKRLIEQMGGEIGVDSTPGEGSEFWISLKLPKAREDKEESLNIPLGGLRAAVLEHHDLARQALEHQLEDCGLQTIVFNNLENLLNGVTAAHETPAAIDLAVLGVTALEISPERLRQHIWDLENLNCKVMVLCPTTEHALFQLAVHDVYTQLQAKPACTRKLQKALSELIAPRAVRADIGPPLSSRAPRVLCVDDNPANLLLVQTLLEDMGAEVVAVEGGYAAVNAVQQEAFDLVLMDVQMPGMDGRQATEAIRAWEAERNQSSLPIVALTAHAMANEKRSLLQSGMDDYLTKPISERQLAQVVLKWTGLALRNPAPERQNEALEVHVGPLVLDHEEGLRLAAGKADLAADMLAMLLASLDADREAIRVARANQDVHALIERIHRLHGATRYCGVPQLRSACQRAETLLKQNAPHTEEALNDLDKAIIRLEAEARVMA

SEQ ID NO: 3785 - protein, 552 aa, Mesorhizobium loti MAFF303099
MAAKDVKFSRDARERMLRGVNILADAVKVTLGPKGRNVVIDKSFGAPRITKDGVTVAKEIELEDKFENMGAQMVREVASKTNDIAGDGTTTATVLAQSIVQEGHKAVAAGMNPMDLKRGIDLAVSDVVWTLIKNATKIKTSEEVAQVGTIAGNGDESVGKMIAEAMQKVGNEGVITVEEAKTAETELEVVEGMQFDRGYLSPYFVTNADKMVADLEDAYILLHEKKLSNLQAMLPVLEAVVQTSKPLLIISEDVEGEALATLVVNKLRGGLKIAAVKAPGFGDRRKAMLEDIAILTGGQVISEDLGIKLENVGLDMLGRAKKVSISKENTTIVDGAGKKEEIQGRVAQIKQQIEETTSDYDKEKLQERLAKLAGGVAVIRVGGATEVEVKEKKDRVDDALNATRAAVEEGIVPGGGVALLRASLSINAVGANSDQTAGISIVRRALQAPARQIAANAGAEASIVAGKILENKGATFGFNAQTGEYGDMIAMGIVDPVKVVRTALQDAASVAGLLVTTEAMIAEAPKKESAGGGGMPGGMGGGGMGGMGGMDF

SEQ ID NO: 3786 - protein, 396 aa, Leuconostoc mesenteroides subsp. mesenteroides ATCC 8293
MEKRKFLSRFKFDNGLVIKNHIVMSPMTTMTSFYNGMITTDELNYYAARAGGPGIIITGVANVSDNGKGFEGELSVAHDAMLPGLIKLAKVIHKDGTKAILQIFHAGRKANSAILRGERPVSASAIAASYPADSETPRALNDSEVHQIITEFGEATRRAIEAGFDGVELHGANTYLLQQFYSENSNQRSDEWGGSRGKRLKFPLAVIETVNKTVKKYSKKPFIVGYRISPEEIEEPGIRLEDSLFFVDQIKHKVDYIHLSMGSYKRTSLNNKANKETLISQFSQHTKNIVPLIGIGSVETPDDVNAVMSDGADLVAIGREFIREPQWVQKIERNDLESIRTLISPSDMAELAIPSVMQVYLRESFYSVMHFTDDIETQSDYQNALAPMEGLEKKLS

SEQ ID NO: 3787 - protein, 917 aa, Pseudomonas putida KT2440
MLDRLGIRSRVLLLALLPAGLMALVLGSYFTWLQQNDLRTQLLQRGKMIAEQLAPLAAPAMARLAPAQLERIAAQTLEQADVRAVAFLAPDRTRLAHAGPSMLNLPPSGGTGTQLLQRSGNDATRYLMPVFGHHRDLATDAVPAEAERLLGWVEIELSHDGTLLRGYRNLFTSLLLILACLALSGLLALRMSRTINDPIERIKHAVNQLKDGHLEERLPTMGSHELDELAHGINRMAETLQNAHEELQHSIDQATEDVRQNLETIEIQNIELDMARKEALEASRIKSEFLANMSHEIRTPLNGILGFTHLLQKSEMTPRQLDYLNTIEKSADNLLGIINEILDFSKIEAGKLVLDSIPFNLRDLIQDTLTILAPAAHAKQLELLSLIYRDTPASLVGDPLRLKQILTNLVSNAIKFTREGTIVVRAMLEDEHEDCAQLRISVQDTGIGLSPQDVRTLFQAFSQADNSLARQPGGTGLGLVISKRLIEQMGGEIGVDSTPGEGSQFWISLNLPKAHDDAEALPPQPLLGRRAAIVDGHELARQALEHQLEDCGLSVSLFASYDQLLQGVQAASQAGLPFEFAVLGANLGNLSPEQLGHYHQQLERYHCQCVVLCPTTEQALYHPYLPNGHGQLLSKPTCTRKLRRLLLELVQPRRPLAEGSNPNGQRRPKILCVDDNAANLLLVKTLLEDLGAEVLAVNNGYAAVQAVQEELFDLVLMDVQMPGMDGRACTEQIRLWENTQSGNPLPIVALTAHAMANEKRALLHSGMDDYLTKPISERQLAQVVMKWTGLSLGTPQQAQAELLTNGDELKVLDPEEGLRLAAGKADLAADMLSMLLASLDTDREAIRAARAADDRNGLIEQVHRLNGASRYCGVPQLRAACQRSETLLKQDNPQAQQALDELDSAISRLAAQARLSA

SEQ ID NO: 3788 - protein, 644 aa, Propionibacterium acnes KPA171202
MAHDEFGGLTGWDLEGFHSGGDTEVWKRLGSHVVTIDDDERGPITGTRFAVWAPNAQAVEVISDFNWWTGDRMRLIPGSGVWGTFVEGVDEGTLYKFRIQDQWGTWHEKVDPMARYSEQAPQNASIVTETHYEWNDDEWIARREASRAHAEPMSVYEVHLGGWRHGLSYRELADQLVSYVTWQGYTHVEFMPLAEHPFAPSWGYQVTGYFSPTSRYGSPDDLRYLIDKLHQAGIGVIMDWVPGHFPKDDWALGRFDGTALYEHADPRQGEHKDWGTYIFNYGRNEVKSFLVSSALYWISEFHADGLRVDAVASMLYLDYSREEGQWVPNKYGGRENLEAIDFLRYVNSHLYSRHPGILMIAEESTSFPGVTKPVDDGGLGFGFKWNMGWMNDSLRYLELNPFHRQYHHGEMTFAMVYQYSENFILPISHDEVVHGKGSMITKIPGDDWQQFASLRAFYSYMWSFPGKQLVFMGQEFGQRHEFDESVSLEWFVADLWGHGGLKRLFRDLNKIYKENPALWQLDSDPRGFEWINADDAGNNLFSWLRRSDDGSTIACFTNFSPNPQTDYRIDLPMEGVWTEILNTDSLEYDGTGEFGNLGQIVAAPLPAPDRLRAVATVCVPPMGSVWLRHNPSATAALPGDPGVQ

SEQ ID NO: 3789 - protein, 500 aa, Petunia x hybrida
MVLSKTVSQSDVSIHSTFASRYVRTSLPRFKMPDNSIPKEAAYQIINDELMLDGNPRLNLASFVTTWMEPECDKLMMDSINKNYVDMDEYPVTTELQNRCVNMIAHLFNAPLEDGETAVGVGTVGSSEAIMLAGLAFKRKWQNKMKAQGKPCDKPNIVTGANVQVCWEKFARYFEVELKEVKLSEGYYVMDPEKAVEMVDENTICVAAILGSTLNGEFEDVKRLNDLLVEKNKETGWDTPIHVDAASGGFIAPFIYPELEWDFRLPLVKSINVSGHKYGLVYAGIGWVVWRNKDDLPDELIFHINYLGADQPTFTLNFSKGSSQVIAQYYQLIRLGYEGYKNVMENCQENASVLREGLEKTGRFNIISKEIGVPLVAFSLKDNRQHNEFEISETLRRFGWIVPAYTMPPNAQHITVLRVVIREDFSRTLAERLVRDIEKVLHELDTLPARVNAKLAVAEEQAAANGSEVHKKTDSEVQLEMITAWKKFVEEKKKKTNRVC

SEQ ID NO: 3790 - protein, 313 aa, Arabidopsis thaliana
MKQIGGQLCVWPGLRQLCLRKSLLYGVMWLLSMPLKTLRGARKTLKITHFCSISNMPSSLKIELVPCSKDNYAYLLHDEDTGTVGVVDPSEAAPVIEALSRKNWNLTYILNTHHHDDHIGGNAELKERYGAKVIGSAVDKDRIPGIDILLKDSDKWMFAGHEVRILDTPGHTQGHISFYFPGSATIFTGDLIYSLSCGTLSEGTPEQMLSSLQKIVSLPDDTNIYCGRENTAGNLKFALSVEPKNETLQSYATRVAHLRSQGLPSIPTTVKVEKACNPFLRISSKDIRKSLSIPDSATEAEALRRIQRARDRF

SEQ ID NO: 3791 - protein, 544 aa, Propionibacterium acnes KPA171202
MAKLIEFNIEARRGLEAGMNTLADAVKVTLGPKGRNVVLEKSWGAPTITNDGVSIAKEIELDDPYEKIGAELVKEVAKKTDDVAGDGTTTATVLAQAMVREGLRNVTAGANPMGLKKGIEAAVQAVSARLSDMAIDIETKDQIASTASISAADPTVGEIIAEAMDKVGKEGVITVEESNTFGLELELTEGMRFDKGYISPYFVTDTERMEAVLEDPYILIVNSKISSLKDLLPVLEKVMQSGKPLFVIAEDVEGEALAGLIVNKIRGTFKSVAVKAPGFGDRRKAMLNDIAILTGGQVISEEVGLSLDAVTLDLLGRARQVVVTKDEATIVDGAGDSEQIAGRVSQIRKEIENSDSDYDREKLQERLAKLAGGVAVIKVGAATEVELKERKHRIEDAVRNAKAAVEEGIIPGGGVALLQASKAAEIEGLEGDELTGAQIVLAACTAPLKQIAINAGLEGGVVAEKVAGLPAGQGLNAANDEYVDMVEAGIIDPAKVTRSALQNAASIAALFLTTEAVIADKPEPVKAPAGGGDMDGMGGMGGMM

SEQ ID NO: 3792 - protein, 330 aa, Kluyveromyces lactis NRRL Y-1140
MLHPLSTEIYFTFNNGNKVPAFGLGTAAQHERVAETKQAVKAAIKAGYRHIDTAWAYGVEEYVGEALQELFEERVVKREDLHITSKVWHTMWNDVDKSLNESLARLKVDYVDLFLQHWPLCTQKVPDPHGVDKIAKEPVDDQGNPLYDEKGDWIETYKQIEKIYLDKNDKRVRAIGVSNFPIEYLKRVLKECRTVPACNQVELHPHLPQRELCEFCSEHKILVTAYSPLGGNGAPLLELPILKGLCEKYNASPNDILTSYHLRQGTIVIPRSLNSTRIASNLEFVPLSEEDVNKLNEFGQKNKKRYINGAVSSVIPGFKEDFLKEQLQQS

SEQ ID NO: 3793 - protein, 633 aa, Diospyros kaki
MESCDCIETQWPTDELLVKYQYISDFFIAFAYFSIPLELIYFVQKSSFFPYRWVLMQFGAFIVLCGATHFINLWTFSMHSKTVAVVMTIAKIATAVVSCATALMLVHIIPDLLSVKTRELFLKNKAEELDREMGLIMSQEETGRHVRMLTHEIRSTLDRHTILRTTLVELGRTLDLEECALWMPTRRGQTLELSHTLKNLIPLGSSVAINLPIVNDVFKSAQAIRIPHTCPLARIRPPVGRYVPPEVVAVRVPLLHLSNFQINDWPDLSPKSYAVMVLILPMDGIRKWRDHELELVEVVADQVAVALSHAAILEDSMRARDQLMEQNVALDNARQEAETAIRARNDFLAVMNHEMRTPMHAIISLSTLLLETELTPEQRVMIETILKSSNLLATLINDVLDLSRLEDGSLELDTGIFNLHEVLKQAVGLIKPIASVKKLSMTLLLAPELPVYAVGDEKRLIQTILNIAGNAVKFTKEGYVSVVASTAKPESLRDWRPPEFYPMPSDGHFFLRVQVKDSGCGISPQDIPQIFTKFAQSQSGSNRNTSGAGLGLGLPICKRFINLMGGHIWIESEGLDKGTTVTFIVKLGICDGDGPTESRAQQAPLPSRENKGSADLIGHKPFAKELPRYQRTF

SEQ ID NO: 3794 - protein, 586 aa, Medicago sativa
MCGILAVLGCSDDSQAKRVRILELSRRLKHRGPDWSGLHQHGDNYLAHQRLAIVDPASGDQPLFNEDKSIIVTVNGEIYNHEDLRKQLPNHKFRTQCDCDVIAHLYEEYGENFVDMLDGIFSFVLLDTRDNSFIVARDAIGVTSLYIGWGLDGSVWIASELKGLNDECEHFEVFPPGHLYSSKDREFRRWYNPPWFNEAVIPTTPYDPLVLRNAFEKAVIKRLMTDVPFGVLLSGGLDSSLVAAVTARYLAGTKAAKQWGAKLHSFCVGLKGAPDLKAGREVADFLGTVHHEFQFTIQDGIDAIEDVIYHTETYDVTTIRAATPMFLMSRKIKSSGVKWVISGEGSDEIFGGYLYFHKAPNKEEFHQETCRKIKALHRYDCLRANKSTYAWGLEARVPFLDKDFIKVAMDIDPEYKMIKHEEGRIEKWILRKAFDDEENPYLPKHILYRQKEQFSDGVGYGWIDGIKDHAAKHVTDRMMLNASHIFPFNTPLTKEAYYYRMIFERFFPQNSARLTVPGGASVACSTEKAIEWDASWSSNLDPSGRAAFGVHNSAYENQVNSVAKTVEPEKIIPKMEISNLGVAIQS

SEQ ID NO: 3795 - protein, 464 aa, Thermoanaerobacter tengcongensis MB4
MSKEYRFPEGFWWGSATSAVQIEGAADEDGKGMNVWDYWYQKEPNRFFNGIGSQVTSDFYHRYKEDIKLMKELGHNSFRFSISWSRLIPGGTGKVNEKAVEFYNNVINELLENGIEPFATLFHFDMPIEMQNIGGFENRKVVEYFAEYAKTCFELFGDRVKRWITFNEPIVPVLGGYLYNFHYPDIVDFKRAVQFGYGTVLASARAIEEFKKLKINDAKIGIVLNLSPVYPRSNHPADLKAAELADLFHNRSFLDPSVKGEYPKELVEVLKAYNHLPEYKEEDLELIKDNTVQYLGVNYYQPLRVKAKENMPNPYGVFTPNWFYDEYIMPGRRMNPYRGWEIYEKGIYDLLKRIKDEYGNIECFISENGMGVEGEERFIKDGIIQDDYRIEFIKEHLKWVHKAIEEGCNVKGYHVWTFMDNWSWLNAYKNRYGLVAIDLKTQKRTIKKSGYWFKEVAENNGFVD

SEQ ID NO: 3796 - protein, 468 aa, Corynebacterium glutamicum ATCC 13032
MNDPQRSPTLLWFRDDLRLSDNAALKWAADHGPVIGLFIDETINRSIGAAARWWREQSLNALAQDLSFYGVPLLRRTGNPLEILPKIVSEMEVKAVTWNRRYHQPLCEVDATLKKNLRDKGIEVHSHPGFLLTEPWEVSTATGTPYKVFTPFSKAAWEVARVHAYETVKNNVPVPSHLTGPEDVELPILEMEQPFWSTTLVKECAPGEKNASEKLFDFLEHLQDYPQARDSLARSATSKLSAHLRFGEISIHRVWAETAAIDSEGTELFLKELLWRDFAWHRLYALPHMDTQNVRMQFNRFGWSWDPSEKDKLNTPSTPLIPTKADQFHEDLAAWRAGKTGIPLVDAGMRELWATGSMHNRVRMVVASFLTKNLQIHWRHGEEWFWETLVDADPASNAFNWQWAAGSGDDASPYFRIFNPVTQAKKFDPDETYIRRWVPEYGTPSYPDPIVDLKESRQIALDAYSAIK

SEQ ID NO: 3797 - protein, 171 aa, Triticum aestivum
ALAQAKLLEQEREIRQQLIEQNKALMTATKAAEDANRAKSDFLATMSHEIRTPMNAVIGMTGLLLDTHLNTQQQQFTETIRSSGEALLSLINDILDFSKIESGQFKLEIHPFEIQQCVEECLDLVAPQAFAKKLDLVYQIEPQVPMAILGDLTRVRQVLVNILANAVKFTT

SEQ ID NO: 3798 - protein, 438 aa, Oryza sativa
MSTTKVKRRVGKYELGRTIGEGTFAKVKFARDTETGDPVAIKILDKEKVLKHKMVEQIKREISTMKLIKHPNVVRIYEVMGSKTKIYIVLEYVTGGELFDTIVNHGRMREDEARRYFQQLINAVDYCHSRGVYHRDLKPENLLLDSYGNLKVSDFGLSALSQQIKDDGLLHTTCGTPNYVAPEVLEDQGYDGAMADLWSCGVILFVLLAGYLPFEDSNLMTLYKKISNAEFTFPPWTSFPAKRLLTRILDPNPMTRVTIPEILEDEWFKKGYKRPEFDEKYDTTLDDVYAVFNDSEEHHVTEKKEEPEALNAFELISMSAGLNLGNLFDSEQEFKRETRFTSKCPPKEIVRKIEEAAKPLGFDVQKKNYKLRLEKVKAGRKGNLNVATEILQVAPSLHMVEVRKAKGDTLEFHKFYKNLSRTLKDVVWKSDDLQNQLS

SEQ ID NO: 3799 - protein, 550 aa, Yersinia enterocolitica
  misc_feature (3)..(3): Xaa can be any naturally occurring amino acid
  misc_feature (377)..(377): Xaa can be any naturally occurring amino acid
  misc_feature (383)..(383): Xaa can be any naturally occurring amino acid
  misc_feature (510)..(510): Xaa can be any naturally occurring amino acid
  misc_feature (530)..(530): Xaa can be any naturally occurring amino acid
  misc_feature (543)..(543): Xaa can be any naturally occurring amino acid
MPXKDVKFGNDARIKMLRGVNILADAVKVTLGPKGRNVVLDKSFGSPTITKDGVSVAREIELEDKFENMGAQMVKEVASKANDAAGDGTTTATVLAQSIITEGLKAVAAGMNPMDLKRGIDKAVIAAVEELKKLSVPCSDSKAIAQVGTISANSDSTVGELIAQAMEKVGKEGVITVEEGSGLQDELDVVEGMQFDRGYLSPYFINKPETGSIELESPFILLADKKISNIREMLPVLEAVAKAGKPLLIIAEDVEGEALATLVVNTMRGIVKVAAVKAPGFGDRRKAMLQDIATLTAGTVISEEIGLELEKTTLEDLGQAKRVVINKDTTIIIDGVGDEAAIQGRVAQIRQQIEDATSDYDKEKLQERVAKLAGGVXVIKVGXATEVEMKEKKARVEDALHATRAAVEEGVVAGGGVALIRAASAITAAGLKGDNEDQNVGIKVALRAMESPLRQIVVNAGEEASVIANNVKAGSGSYGYNAYSEEYGDMIAMGILDPTKVTRSALQYAXSIAGLMITTECMITDLPRDXKGADMGAGGMGGXGGMGGMM

SEQ ID NO: 3800 - protein, 500 aa, Triticum aestivum
  misc_feature (442)..(442): Xaa can be any naturally occurring amino acid
  misc_feature (452)..(452): Xaa can be any naturally occurring amino acid
  misc_feature (468)..(468): Xaa can be any naturally occurring amino acid
MAAAVSTVGAINRAPLSLNGSGAGAASVPATTFLGKKVVTASRFAQNNKKSNGSFKVVAVKEDKQTDGDRWRGLAYDISDDQQDITRGKGMVDSVFQAPMGTGTHNAVLSSYEYLSQGLKQYNLDNMMDGLYIAPAFMDKLVVHITKNFLTLPNIKVPLILGVWGGKGQGKSFQCELVMAKMGINPIMMSAGELESGNAGEPAKLIRQRYREAADLIKKGKMCCLFINDLDAGAGRMGGTTQYTVNNQMVNATLMNIADNPTNVQLPGMYNKEDNARVPIIVTGNDFSTLYAPLIRDGRMEKFYWAPTREDRIGVCKGIFRTDNIKDEDIVTLVDQFPGQSIDFFGALRARVYDDEVRKFVEGLGVEKISKRLVNSREGPPVFEQPEMTLEKLMEYGNMLVMEQDNVKRVQLADQYLNEAALGDANADAIGRGTFFGKSAQXVNLPVPEGCXTDPAAKNFDPTARSDXDGTCVFQLLSFLLLIIKSSVFFFFCFCVIVNW

SEQ ID NO: 3801 - protein, 660 aa, Rhodopirellula baltica SH 1
MQQKTSLRYGDCYLRAPTNAFMPEWPNWIHRLSSSSCGTRAEHVRSTRTHSPVSFPLGIESVAASGSHLCDPPINREPLGSKPPQENYIVAKQIVFDDDARGPLLAGVSKLARAVRSTLGPRGRNAVLDKGWGSPKVTKDGVTVAEDIELDDPFENLGAQLVKEAASKTNDVAGDGTTTATVLSEAIFREGLKMVATGADPMALSRGIQKAVDTAIAQIAKMATPINEKSKSDIKQVATIAGNNDPQIGDVLADAFTKVGKNGVITVEEGRSNETYVDVVEGMQFDRGFLSPHFVTNQDEVTVELDDCYILLFEEKISNNKKMIPLLEAISKAKKPLLIIAEDTEGEALATLVVNKMRGILSACAVKAPGYGDRRKAILGDIAALTGGKAIFKDLGIDLESVKVSDLGRAKQIRITSEATTIVGGAGKKADIEGRVAQIRREIEATDSDYDREKLQERLAKLAGGVAQINVGAATETEMKERKALIDDARAATQAALEEGIVPGGGTALLRCRAAVEKLEKATEGDQKLGVRIIRNVLDQPMRAIANNAGLDGAVVVNRVLQMKGKTEGYDANADKYCDLVAAGIVDPAKVVRTSLTNAASVAALLLTTESLVTEIPVEEEPAGGDHHDHGMGGGMPDMGGMGMGGMGGMGGMGGMGGMM

SEQ ID NO: 3802 - protein, 544 aa, Neisseria meningitidis
MAAKDVQFGNEVRQKMVNGVNILANAVRVTLGPKGRNVVVDRAFGGPHITKDGVTVAKEIELKDKFENMGAQMVKEVASKTNDVAGDGTTTATVLAQSIVAEGMKYVTAGMNPTDLKRGIDKAVAALVEELKNIAKPCDTSKEIAQVGSISANSDEQVGAIIAEAMEKVGKEGVITVEDGKSLENELDVVEGMQFDRGYLSPYFINDAEKQIAGLDNPFVLLFEKKISNIRDLLPVLEKVAKASRPLLIIAENVEGEALATLVVNNIRGILKTVAVKAPGFGDRRKAMLQDIAILTGGTVISEEVGLFLEKATLDNLGQAKRIEIGKENTTIIDGFGDAAQIEARFAEIRQQIETATSDYDKEKLQERVAKLAGGVAVIKVGAATEVEMKEKKDRLEDALHATRAAVEEGVVAGGGVALLRARAALENLHTGNADKDAGVQIVLRAVESSLRQIVANAGGEPSVVVNKVLEGKGNYGYNAGSGEYGDMIEMGVLDPAKVTRSALQHAASIAGLMLTTDCMIAEIPENKPAMPDMGGMGGMGGMM

SEQ ID NO: 3803 - protein, 354 aa, Arabidopsis thaliana
MSAESCFGSSGDQSSSKGVATHGGSYVQYNVYGNLFEVSRNAATNSETGEEVAIKKIGNAFDNIIDAKRTLREIKLLKHMDHENVIAVKDIIKPPQRENFNDVYIVYELMDTDLHQIIRSNQPLTDDHCRLLRGLKYVHSANVLHRDLKPSNLLLNANCDLKLGDFGLARTKSETDFMTEYVVTRWYRAPELLLNCSEYTAAIDIWSVGCILGETMTREPLFPGKDYVHQLRLITELIGSPDDSSLGFLRSDNARRYVRQLPQYPRQNFAARFPNMSAGAVDLLEKMLVFDPSRRITVDEALCHPYLAPLHDINEEPVCVRPFNFDFEQPTLTEENIKELIYRETVKFNPQDSV

SEQ ID NO: 3804 - protein, 531 aa, Enterococcus hirae
MAKELKFAEDARAAMLRGVDKLADTVKVTLGPKGRNVVLEKSYGSPLITNDGVTIAKEIELEDHFENMGAKLVSEVASKTNDIAGDGTTTATVLTQAIVREGLKNVTAGANPLGIRRGIELATKAAVEELHNISTVVDSKEAIAQVAAVSSGSEKVGHLIADAMEKVGNDGVITIEESKGIETELDVVEGMQFDRGYLSQYMVTDNDKMEAVLENPYILITDKKISNIQDILPLLEQILQQSRPLLIIADDVDGEALPTLVLNKIRGTFNVVAVKAPGFGDRRKAMLEDIAILTGGTVITDDLGLELKDATIENLGNASKVVVDKDNTTIVEGSGDKTAIEARVQLIKNQIAETTSDFDREKLQERLAKLAGGVAVVKVGAATETELKELKLRIEDALNATRAAVEEGMVSGGGTALVNVINKVSAVEAQGDVATGVKIVVGALEEPIRQIAENAGYEGSVIVDKLKNVELGTGFNAATGEWVNMVEAGIVDPTKVTRSALQNAASVSALLLTTEAVVADKPEPAAPAAPA

SEQ ID NO: 3805 - protein, 819 aa, Ustilago maydis 521
MPRNVLSIPLKRTPSVSSALSTAIRNYISNNYSDTHPDAFSNDLREFVRLRDQICSVEVHVSSVEPLLRYHAQLVFFSTKFPANINLSFPWSLSFPPSLPSWTNTISGAMEATKSAEAGPASGIAYATSDTVAHPDLAFERANLLFSLAALYSALGCAEPRAENESIKRATAWFQNAAGVLQNIVDHLVEPTRLLLPPSPDFNPRLLSCIRDLMLAQAQECFWQKAVMDRLKDATIAKLAAKVADYYASALQAVTEAPTQDGSSHSDPADTAKLTLPSGWENHLAVKRWHFAAAAQYRKACDDLGANRYGDELGRLQLAEQHVKSALDSAKKGVNSAITSDLESLQAIIKSNLARATRDNDLIYLEAVTPAAQLSPIQPAAMVKPVVPPEVAQPTAYLRDASAATGSKPGFGRPLFAELVPYGVHLAISIYDDRKDSLVRDSIASKRDELDAIATSTLQSLNLPGSLQALEQPMGLPPALLRKHEEVVAEGGLERLQRIAHDVARIAATDRDTLAEALALIEHEQREDESVRASFGTHSSWARQTSSEVNGDLKAQAAEYHGTLVKAAASDEIVRRKLEDWEDLIDVLGGDVAGLEAFVPSTNPNVSAVSSGARGSDEQVQAVRALREELEHLDDLLDSRSACVTEAKTLAASDDIRALVLREAASLASNVSGVAEVSGADFEELFDHELRKYARFTSDLDQSGSLQEALLQRIEQRNAAFVQARKSDATIQRREKALQNLDSAYIKYRELSSNLVEGLEFYNGLAKILSGYRDAVKEWARARQVDLHWLVHQMGRMRAEYAITTATAAAASVISSETD

SEQ ID NO: 3806 - protein, 323 aa, Acinetobacter sp. ADP1
MPKFFLRWIDSWSNLNHTQVSTQVYSSQPQRIQWLRIIPFIVLHIACLAVFWIGFSWFAIFFMLGFYVIRMFAITAFFHRYLSHKTFQTSRPVQFLFILIGTMSAQRGPLWWAAHHRYHHRFTDTDQDPHSSTKGFWYSHVGWFLNEENFAIRKSIIKDWLKYPELIWLDRFSLPVVLATAFAIYALGEVLAIYAPQLKTNGLQLLVWGFVVSTVLLTHATLCINSLAHRYGSKDFETDDQSRNNFFLSIITLGEGWHNNHHFYAGSTRQGFFWWQIDVTYYLLKIMSWCGLVWAIKPVPERIYTSSKKSNSLKDKKINITNI

SEQ ID NO: 3807 - protein, 497 aa, Zea mays
MVLSHASSGRDDDDAVASTFASRYVRERLPRYRMPERSIPREAAQQIISDELMLDGNPRLNLASFVTTWMEPECDKLIMDSINKNYVDMDEYPVTTELQNRCVNMIAHLFNAPIKEDETAIGVGTVGSSEAIMLAGLAFKRKWQNKRKEQGKPCDRPNIVTGANVQVCWEKFARYFEVELKEVKLSEGYYVMDPVKAVEMVDENTICVAAILGSTLTGEFEDVKQLNDLLTEKNKETGWDVPIHVDAASGGFIAPFLYPELEWDFRLPLVKSINVSGHKYGLVYPGVGWVIWRSKDDLPEELIFHINYLGTDQPTFTLNFSKGSCQIIAQYYQLIRLGFEGYRNIMENCQENAAILREGIAATGRFDVLSKDAGVPLVAFSLRDSSRFSVFDVSENLRRFGWIVPAYTMPADAEHVAVLRVVVREDFSRSLAERLVSDVRKILRELDARATHAVRVSTATAEQSGDGVVAKKSVLEIEREVAARWMNAVNKKKTGVC

SEQ ID NO: 3808 - protein, 531 aa, Enterococcus gallinarum
MAKEIKFAEDARAAMLRGVDKLADTVRVTLGPKGRNVVLEKSYGSPLITNDGVTIAKEIELEDHFENMGAKLVSEVASKTNDIAGDGTTTATLLTQAIVREGLKNVTAGANPLGIRRGIEMATKVAVEELHNISSIVDSKEAIAQVGAVSSGSEQVGKYIADAMEKVGNDGVITIEESKGIETELDVVEGMQFDRGYLSQYMVTDNDKMEAALENPYILITDKKISNIQDILPLLEQILQQSKPLLIIADDVDGEALPTLVLNKIRGTFNVVAVKAPGFGDRRKAMLEDIAILTGGTVITEDLGLELKDATIDNLGQASKVVVDKDNTTIVEGAGDKSAIDARVQLIKNQIADTTSDFDREKLQERLAKLAGGVAVIKVGAPTETELKELKLRIEDALNATRAAVEEGVVSGGGTALVNVINKVAAIEADGDAATGVKIVLRALEEPVRQIAENAGYEGSVIIDKLKHADLGVGFNAATGEWVNMLEAGIVDPTKVTRSALQNAASVAALLLTTEAVVADKPEPAAPAAPA

SEQ ID NO: 3809 - protein, 479 aa, Vibrio sp. Ex25
MTNKKLTTAAGCPVAHNQNVMTAGPRGPQLLQDVWFLEKLAHFDREVIPERRMHAKGSGAYGTFTVTHDITKYTRAKIFSEIGKKTELFARFTTVAGERGAADAERDIRGFALKFYTEEGNWDLVGNNTPVFFLRDPLKFPDLNHAVKRDPRTNMRSSTNNWDFWTSLPEAFHQVTIVMSDRGIPASYRHMHGFGSHTFSFINAENERYWVKFHFKTQQGIKNLTDQEAEAIVGKDRESHHRDLYEAIERQDFPKWKMYVQIMPELEADEVNFNPFDLTKVWSQKDYPLIPVGEFELNRNPENFYAEVEQSAFNPAAIVPGIGFSPDKMLQGRLFAYGDAQRYRLGVNHHQIPVNTPRCPVHSYHRDGAMRVDGNFGSTLGYEPNYKQEWAEQPDYSEPPLRINGNADHYDHRVDEDYFSQAGNLFRLMSEEQRQTLFDNTARAMDGVPDFIKERHVNHAYQADEAYGKGLEIALGLNK

SEQ ID NO: 3810 - protein, 310 aa, Glycine max
FGSRTFADFCLSLSYHHNSQSSETERDGERGGIQKQLQRWQQSGNVNVNVNVDANGELMYVKVMTDEQLETLRKQIAVYGTICEQLIEMHRTLSAQQDLAGVRLGNIYCDQLMTSGGHKITSRQRWTPTPVQLQILERIFDQGNGTPSKEKIKEITAELGQHGQISETNVYNWFQNRRARSKRKLQNVAPSNTESEVDTEVDSKNKKTKAEEEFQSQHNITTSGGAEKLCFQNPQVYSDHLHYLNPDSNKPYSMCQSDCNLKSTRNSSHVSVFNEMLSNSRSEYVGGKMEVAGSVSYNLFHQTGDCNLAG

SEQ ID NO: 3811 - protein, 362 aa, Glycine max
MFRVCDVRRLRSLPPLFSRMFSSEPVLTQETINQHVVKAEYAVRGELVLLANKHQKTMQQNPNHSLPFKEIIYCNIGNPQILGQKPLTFFRQVTACCEYPALLDLPNVMPEDVKERAKKLLASMGNSTGAYSSSQGVPIVLNNVAKFIEERDGHPANAEDIFLTDGASVGVQRMLRLLIRDDKDGILIPIPQYPLYSATIDLYGGQRVGYYLNEEANWRLDTPQLEKALDEAKKKGINTRALVVINPGNPTGNTMDRKAMEEVVDFCYRNKLILMADEVYQDNIYKEGQSFISFKKVLREMEEKYQKLELVSFHSVSKGFYGECGKRGGYLEMVNISEPVKEHKSLQPGGSTTSRAVATAEE

SEQ ID NO: 3812 - protein, 475 aa, Aspergillus nidulans FGSC A4
MLEDPSYAEIVRWGDDGDSFVVLECEKFTKTILPKHFKHSNFASFVRQLNKYDFHKVRQNNEENGQSPYGQNAWEFKHPEFRANSKESLDNIRRKAPAPRKQAQAHDDSVPTQQIDLLNQQIVAQQQQIQHISDRYAQMSVDHQLMLQEVLRVQKTVVNHENVIHQLVNYLVSIDARQKRDNKAGSFQAQVGASPSQVTPMDDGVSTPLQQASKLLSDMNAEVQFNLVPVESMGEPPKTGVVSTPTMETAPRRVAPQPAAAATNPALVYPKMNGEMEPVVYPVGATNGIDPMYGEHVNNVPYTVPPKQDMDDRRQFPENRKKSNHVDPGWMRSPRILLVEDDATCRQIGGKFLYSFSCEIDTALDGLEAVNKVQDGSKYDLILMDIIMPNLDGVSACHLIRQFDRTPIIAMTSNIRSDDIQLYFQHGMDDVLPKPFTRKSLLEMLEKHLVHLKTVPQGMEAPPTCDRSHVGTSLN

SEQ ID NO: 3813 - protein, 160 aa, Zea mays
MDARMFGLENPLVAALHHLLDVPDGDAGAGGDKAGGGATRTYVRDARAMAATPADVKELAGAYAFVVDMPGLSTGDIRVQVEDERVLMISGERRREEREDAKYLRMERRMGKFMRKFVLPDNADVDKVAAVCRDGVLTATVEKLPPPEPKKPKTIEIKVA

SEQ ID NO: 3814 - protein, 370 aa, Shewanella sp. MR-7
MTQLFSPFKLKNITLKNRIAVAPMCQYQAHDGLSNDWHQVHYTSLARGGAGLVVVEATAVSPEGRITPRCLGLWNDEQAAGLAKIATAIKDSGAVAGIQIAHAGRKASANIPWEGDDHIEGDQGWQTLSPSAVAFGENLGKVPTAMTIDDIQRVKADFVAAAKRALDAGFEWLELHFAHGYLAQSFFSTYANQRTDEYGGDAEGRGRFLIETVEAVRAVWPEHLPLTARFGVIEFDDKDEQTLSESIALVKQFKRAGLDMLNVSICFSTPTANIPWRPAFLAPIAERVRREVGFPVATSWGMDNPHHAEQAIQDQQMDLVMIGKAFLANPHWPYQAAQTLKVSRPSWVLPSSYAHWLERYSTVKVESSID

SEQ ID NO: 3815 - protein, 350 aa, Arabidopsis thaliana
MKFGETFTEYLHGEEEWFLEKCRFVEYKKLKKVLKKCKTCNSTKSDDGQIIPSATSSSLSDSCECKACPLIFVQQSNGERNDLLGCDQMFFEELMKEATDIAGFFRSRVRHLLHLHVATGMQRYMIRLRRCFTDEKQALVQEGQILIQYITMNAIAIRKILKKYDKVHSSENGKNFKLKMRAERIELLHSPWLIELGAFYLNSGLDNVGNFKNSFGRVACENLNEDQPVLKLMLPNSIELEYDLTCAICLETVFNPYALKCGHIFCNSCACSAASVLIFQGIKAAPRHSKCPICREAGVYAEAVHMIELHLLLKTRSKEYWKERMMNERSEMVKQSKMFWNEQTKHMIGY

SEQ ID NO: 3816 - protein, 404 aa, Oryza sativa
EEADQVERKLVLGRYELGRLLGQGTFAKVYYGRDLRSGESVAIKVIDKARLRRTEGMVEQLRREISIMRMVRHPNVVGIREVLASRARVFVVMEYARGGELFAKVARGRLTEEHARRYFQQLVAAVGFCHGRGVAHRDLKPENLLLDEEGRLKVTDFGLAALPEQLRQDGLLHTQCGTPAYVAPEVLRKRGYDGARADLWSCGVVLYVLLCGFLPFQHENYAKMYQKIFKAEYQVPPWVSGDARRLIVRLLVVDPAKRISIPEIMRTPWFKKGFVPPVPTSPVSPKKWEEDDVLLDGGDSGAMSPRTCNAFQLISSMSSGFDLSGMFESEQKAATVFTSRAPAATVIQKLEAVGRSLGYSATRGKGWKLRLEATASVQRDVKSVGCISFSFFARGYVQAKSRDV

SEQ ID NO: 3817 - protein, 540 aa, Rhodopirellula baltica SH 1
MAKQLLFEDHARARMLAGVEKLAKAVATTMGPTGRNVIIDKSFGGPTVTKDGVTVAKEIELEDRFENMGAKLVIEVAQKTSDLAGDGTTTATVLARAIFKEGLRNIVAGSNPTAIRRGIEKAVEAACDQLVEMGRPVSGKQEVAHVGAISANNDNVIGELLADALERVGKDGVITVEEGKSRNTEVEYVDGMQFDKGYVSPYFITDSSTMEASLEDALVLLYEKKVSNIRDLVPLLEKTAQTGQPLLIIAEDVDAEALTLLVVNKLRGTLNVCAVKAPGFGDRRKAMLGDIATLTGGTLISEDLGMQLENVTLEHLGRAKKVTVDKSNTTIVEGAGKREDIDKRVAQIRAQIEQTDSDYDKEKFQERLAKLAGGVAVISVGAETEAEMKQTKARLEDALHATRAAVEEGILPGGGVALVHCREAVEAAKKKAKGDEKIGVDIVLGALDAPMRQIADNGGIDGSVVVDEVLQKNDPKIGFNAHTGEYTDMVKAGVIDPVKVVRTALTNAASIAGLLLTTEALVTNFEQEDKDKRPVEGMVS

SEQ ID NO: 3818 - protein, 450 aa, Geobacter sulfurreducens PCA
MQTRTRITLGLVVAILCLTIGVAAGWRYYNPAADQVGAEHLRLFREVVSIVRSSYVEEVSGKKLLEGAINGMLASLDPHSSYLPPEPFTEMKTEISGSFGGLGIEISMRDGKLTVVAPIEDTPAWRAGIQSGDHIWKIDDTPTRGLTITQAVKQMRGEKGTQVSLSILRNGNGKPLVFPLVRDIIKTRSLKSRTLEPGYGYVRISQFQERTGDDFAAALAKLRSDNGGSLKGLVLDLRNNPGGLLDAAVAVAGRFVGERLDNGLIVYTEGREHFAKRSYSATIGEKEPRYPLVVLINGGSASASEIVAGALQDHGRAVIMGTTSFGKGSVQTVVPLKDGAGLKLTTARYYTPKGRSIQARGIEPDIVVERAGFKELPDKGRAGFLEKDLDNHLSGAESGEGEKTPEQDVKKLPAAPATPEHEVDKDYQLLRALELLKGWDAMRKVATAKH

SEQ ID NO: 3819 - protein, 492 aa, Solanum melongena
MDLSKYRPSSAYDTPFLTTNAGGPVYNNVSSLTVGPRGPVLLEDYHLIEKLATFDRERIPERVVHARGASAKGFFEVTHDVSHLTCADFLRAPGVQTPVICRFSTVVHERGSPESIRDIRGFAVKFYTREGNFDLVGNNVPVFFNRDAKSFPDTIRALKPNPKSHIQENWRILDFFSFLPESLHTFAFFYDDVCLPINYRHMEGFGVHAYQLINKAGKAHYVKFHWKPTCGVKSMTEEEAIRVGGTNHSHATKDLYDSIAAGNYPEWKLFIQIMDPEDVDKFDFDPLDVTKTWPEDILPLMPVGRLVLNRNIDNFFAENEQLAFNPGHIVPGVYYSEDKLLQTRIFAYADTQRHRIGPNYMQLPVNAPKCAHHNNHRDGAMNFMHRDEEVDYLPSRFDPCRPAEQYPIPSCVLTGRREKCVIPKENNFKQAGERYRTWEPDRQDRYINKWVESLSDPRVTHEIRSIWISYLSQADKSCGQKVASRLLVKPTM

SEQ ID NO: 3820 - protein, 532 aa, Enterococcus raffinosus
MAKDIKFSEDARAAMLRGVDKLADTVKVTLGPKGRNVVLEKSYGSPLITNDGVTIAKDIELDDHFENMGAKLVSEVASKTNDIAGDGTTTATVLTQAIVREGLKNVTAGANPMGIRRGIELATKAAVEELHSISKEVDSKDAIAQVAAVSSGSEEVGKLIAEAMEKVGNDGVITIEESKGIDTELDVVEGMQFDRGYLSQYMVTDNDKMEAALENPYILITDKKISNIQDILPLLEQVLQQSRSLLIVADDVDGEALPTLVLNKIRGTFNVVAVKAPGFGDRRKAMLEDIAILTGATVITEDLGLDLKEATIENLGTAGKVVVDKDNTTIVEGAGDKAALTDRVEMIKRQIGETTSDFDREKLQERLAKLAGGVAVVKVGAATETELKELKLRIEDALNSTRAAVEEGIVSGGGTALVNVIKKVSDLDAEGDVATGIKIVVRALEEPVRQIAENAGFEGSVIIDKLKNADRGTGFNAASGEYVNMIDAGIVDPTKVTRSALQNAASVSALLLTTEAVVADKPVEGGAAAAPA

SEQ ID NO: 3821 - protein, 377 aa, Dehalococcoides ethenogenes 195
MTLRIKVLLGTILAMVGLLVSFGVGYLSGGIAALNSDENLSSIVNAWQIITTEYVEPDSIDQAALAEAAIKGMMDELDDPHSVYLNAEDYQSSLEYDDGKYVGIGATVQIEDEAIVLVPYDGSPAALAGIQAGDILLEVDGQSVAGFSLADLSPLVRGEKGTSLTLLVERSSSDQPLLFEVTRDEILISSVTSEMMGDIAYIRISRFSERTDEELEQVLKNLGSAEGIVLDLRGNPGGLVSSVINVTSRFVSSGVVLTTVDNEGNSSEYSVVPKTVTTSLPMVVLVDQYSASGSEALSGALQDYGRATIAGKTTYGKGSVNRTFNVTPDTGIYLTIGRWYTPNGRMIEGQGITPDIELELTGDEAVSWALGFLHGDT

SEQ ID NO: 3822 - protein, 207 aa, Triticum aestivum
MVQPKKKFRGVRQRHWGSWVSEIRHPLLKRRVWLGTFETAEEAARAYDEAAVLMSGRNAKTNFPVQRSSTGDPAPAATRDVRGGSSSSSTSNLSQVLSAKLRKCCKAPSPSLTCLRLDTEKSHIGVWQKRAGARADSNWVMTVELNKGAGPSGDAVAAQSTVSATTASSPASTMDDEERLTLQMIEELLSSSGPASPSHGEEGSFVV

SEQ ID NO: 3823 - protein, 534 aa, Streptococcus mitis
MSKEIKFSSDARSAMVRGVDILADTVKVTLGPKGRNVVLEKSFGSPLITNDGVTIAKEIELEDHFENMGAKLVSEVASKTNDIAGDGTTTATVLTQAIVREGIKNVTAGANPIGIRRGIETAVAAAVEALKNNAIPVANKEAIAQVAAVSSRSEKVGEYISEAMEKVGKDGVITIEESRGMETELEVVEGMQFDRGYLSQYMVTDSEKMVADLENPYILITDKKISNIQEILPLLESILQSNRPLLIIADDVDGEALPTLVLNKIRGTFNVVAVKAPGFGDRRKAMLEDIAILTGGTVITEDLGLELKDATIEALGQAARVTVDKDSTVIVEGAGNPEAISHRVAVIKSQIETTTSEFDREKLQERLAKLSGGVAVIKVGAATETELKEMKLRIEDALNATRAAVEEGIVAGGGTALVNVIPAVADLELTGDEATGRNIVLRALEEPVRQIAHNAGFEGSIVIDRLKNAEVGTGFNAATGEWVNMIDQGIIDPVKVSRSALQNAASVASLILTTEAVVANKPEPAAPAPAMDPS

SEQ ID NO: 3824 - protein, 370 aa, Thiobacillus denitrificans ATCC 25259
MSTLFSPFRLGTRVLKNRIVVSPMCQYSAEDGCATDWHMIHLGHLALSGAGLLFVEATAVSPEGRIAASDLGLWSDDNEAALRRVVDAIRRYAPPLALGIQLAHAGRKASTDVPWAGGHFILPEQGGWQTLAPSALAYAPGDAAPRALDTAGLERVRGEFVTAAQRAERLGFDVIELHAAHGYLLHEFLSPLSNVRDDRYGGSLENRMRFPLEVFDAMRAALHADVPLGVRISATDWVEGGWDIAQSLAFAEALRRRGCAFIDVSSGGLSPAQQIPVAPGYQLPFAAQIRGETGMPTMAVGLITDPHQAENIVAGGHADLVALARGMLYDPRWPWHAAAELGARADAPKQYWAAPPHGHGTLFKRDKDAE

SEQ ID NO: 3825 - protein, 507 aa, Xanthomonas oryzae pv. oryzae KACC10331
MRPGSLMVLALLAPTLIAPPVFAQSVLTRDNGAKVGDNQNSQTAGPNGPTLLQDVQLIQKLQRFDRERIPERVVHARGTGVKGEFTATADVSKLTKAKVFSAGERTPVFVRFSSVVHGNHSPETLRDPHGFATKFYTSEGNWDLVGNNFPTFFIRDAIKFPDMVHAFKPDPRTNLDDDSRRFDFFSHVPEATRTLTLLYSNEGTPAGYRFMDGNGVHAYKLVNAQGEVHYVKFHWKTLQGIKNLDPKQVAAVQAKDYSHLTNDLVAAIKKGDYPKWDLYVQVLKPEDLAKFDFDPLDATKIWPDVPEQKVGQMVLNKNVDNFFQETEQVAMAPANLVPGIEPSEDRLLQGRIFSYADTQLYRIGANGLSLPVNRPRVAVNNGNQDGQGNIGQTTSGVNYEPSRLQPRPQDASARYSELPLSGTTQQAKITREQNFKQAGELYRSYSKKDRADLVQSFGESLADTDTESKHRMLSFLYKADPEYGSGVTRVAKGDLSRVKQLASSLQD

SEQ ID NO: 3826 - protein, 545 aa, Bacillus clausii KSM-K16
MAKDIQFSEEARRSMLKGVDTLANAVKVTLGPKGRNVVLEKKFGSPLITNDGVTIAKEIELEDAFENMGAKLVAEVASKTNDIAGDGTTTATVLAQAMIREGLKNVTSGANPMGIRKGIEKATAAAVKELKAISKPIEGRESIAQVAAISSADEEVGQIIAEAMERVGNDGVITIEESKGFSTELEVVEGMQFDRGYASPYMVSDSDKMEAVLDNPYVLITDKKITNIQEVLPVLEQVVQQSRPVLIIAEDVEGEALATLVLNKLRGTFNAVAVKAPGFGDRRKAMLEDIAILTGGQVITEDLGLDLKSATIESLGRAAKVVVTKENTTIVEGAGDPEQISGRVNQLKAQVEETTSEFDKEKLQERLAKLAGGVAVLKVGAATETEMKERKLRIEDALNSTRAAVEEGIVAGGGTALVNVIKAVKAVDATGDEATGVNIVLRALEEPVRQIAHNAGLEGSIIVEKLKAEEVGVGYNAATGEYVNMVETGILDPVKVTRSALQNAASVSAMFLTTEAVIADKPEENAGGADMGGMGGMGGGMPGMM

SEQ ID NO: 3827 - protein, 367 aa, Pseudomonas syringae pv. syringae B728a
MSAEALFTPFRLGSLELSSRVVMAPMTRSFSPGHVPNSKVVEYYRRRAAAGVGLIITEGTTVNHKASNGYPNVPQFFGEAPLAGWRKVVEAVHAEGGKIVPQLWHVGAVRRPGTEPDGSVPAYGPMEKVKDGQVLVHGMSKQDIDEVVAAFAQAAADARAIGMDGVEIHGAHGYLVDQFFWEGSNQRSDEYGGSLANRSRFALELIKAVRGAVGPDYPIIFRFSQWKQQDYTARLVQTPEALGEFLQPLADAGVDIFHCSTRRFWEPEFEGSDLNLAGWTRKLTGKPTITVGSVGLDGEFLQFMVNTDKVAQPASLENLLKRLGNDEFDLVAVGRALLVDPDWALKVREGREQDILPFSRDALTTLV

SEQ ID NO: 3828 - protein, 462 aa, Glycine max
PSISQTDRVLSHESTVAEEVRKPMPETESAAAAAVEEENNTALFGKYEVGRLLGCGAFAKVYHARNTETGQSVAVKVISKKKLNSSGLASNVKREISIMSRLHHPNIVKLHEVLATKTKIYFILEFAKGGELFARIAKSRFSEDLARRYFQQLISAVGYCHARGVFHRDLKPENLLLDEQGNLKVSDFGLSAVKDQIGVDGLLHTLCGTPAYVAPEILAKKGYDGAKVDVWSCGIILFVLVAGYLPFNDPNLMVMYKKIYKGEFRCPRWFSMELRRILTRLLDTNPDTRITVDEIMKDTWFKKGYKEVKFGDLGLEWKSEGEGVKDLNAFDIISFSTGLNLSGLFDSSCGVEEGERFLLRESPEKVVEMLVAAAEKEGVVVRMRKECGVELEGCGGNFAALVEVYRLPGELVVVEVRRRDGDGGVFRDVWRNKLRPCLCAASSSTTSDRDGTTLAQPVAGDS

SEQ ID NO: 3829 - protein, 169 aa, Mesorhizobium loti MAFF303099
MSVRDLIPWSRGGGPAPSIYRGDDMDPFLSLHRNVNRLFDEVFRGFDTPSVLGRMAPLNGTWPGVEFSETDEEIRLTAEIPGLDENDVEVMLDDGVLTLRGEKKAETEDKDRQFSERYYGRFERRFGLGREVEDDKVAATFKNGVLTVTLPKTKRAQANAKRIAINGNK

SEQ ID NO: 3830 - protein, 280 aa, Streptococcus pyogenes MGAS10394
MMVTTVKMTSGYEIPVLGFGTYQAADGEEAYQSTLAAIKADYRHIDTAAIYKNEESVGRAIKDSGVLREDLFITTKLWNDAHSYEGAKDALAASLDRLGLDYVDLYLIHWPNPKALRNTWKEANAQAWQYMEEAVEAGLIKSIGVSNFMVHHLEALQETAKITPAINQIRLAPGCYQKEVVDYCKANEILLEAWSPLGQGEIFDNETMQQLANKYDKTVAQVALAWSLAEGFIPLPKSVHDERIKENMAIFDVSLTPEDKKTIRYLSGMSAIPNPDTTSF

SEQ ID NO: 3831 - protein, 181 aa, Arabidopsis thaliana
MAQQSLIYSFVARGTVILVEFTDFKAYCVVAVDSAGRQIPMSFLERVKEDFNKRYGGGKAATAQANSLNKEFGSKLKEHMQYCMDHPDEISKLAKVKAQVSEVKGVMMENIEKVLDRGEKIELLVDKTENLRSQAQDFRTTGTQMRRKMWLQNMKIKLIVLAIIIALILIIVLSVCHGFKC

SEQ ID NO: 3832 - protein, 520 aa, Zea mays
  misc_feature (492)..(492): Xaa can be any naturally occurring amino acid
  misc_feature (504)..(504): Xaa can be any naturally occurring amino acid
MMVGHSHVVCRLKHRGPDWSGLYQHEGNFLAQQRLAIVSPLSGDQPLFNEDRTVVVVANGEIYNHKNVRKQFTGAHSFSTGSDCEVIIPLYEKYGENFVDMLDGVFAFVLYDTRDRTYVAARDAIGVNPLYIGWGSDGSVWMSSEMKALNEDCVRFEIFPPGHLYSSAAGGFRRWYTPHWFQEQVPRTPYQPLVLREAFEKAVIKRLMTDVPFGVLLSGGLDSSLVASVTKRHLVKTDAAGKFGTELHSFVVGLEDGIDAIEEVIYHDETYDVTTIRASTPMFLMARKIKSLGVKMELHRETCRKVKALHQYDCLRANKATSAWGLEVRVPFLDKEFVDVAMGMDPEWKMYDKNLGRIEKWVLRKAFDDEEHPYLPEHILYRQKEQFSDGVGYNWIDGLKAFTEQQVTDEMMNSAAQMFPYNTPVNKEAYYYRMIFERLFPQDSARETVPWGPSIACSTPAAIEWVEQWKASNDPSGRFISSHDSAATDRTXTSWRWSTATGTXANGTVNGNDVAVAIAV

(The sequence listing continues in the following parts.)
